United States Patent Application Publication US 2005/0228172 A9 - sequence listing, part 54

SEQ ID NO: 223843 - DNA, 563 bp, Homo sapiens
gggagcgtgggcattttcttcagtccccaagggttacttttacaaaagggacagctgaaacattcctaatgctatggggcatttggttttacctcctaaaagacacgtcttgttrctaatttatctacaataatctttttttttttttttttctgagatggagtctcactctgtcaaccacgctggagtgcagtggtgtgatctcagctcactgcaacctctgcctcctgggttcaagcaattctcctccctcagcctccctagtagctgagattacagatgcctgccacgatgcttggttattgttttttttttttttttttttttttgtatttttagtaaagactgggtttccccatgtttgccaggctggtctcgaactcctgacctcaagtgatctgctctcctcggcttcccaaagtactgagattacaggcgtgagccatggcggccggccaataatttccttttgagatatacttgctgtgtcagtgagttgacctgttagcctgttcaacaacaaggcttgccaactgcagaatgagcccatcttcccgggtgca

SEQ ID NO: 223844 - DNA, 563 bp, Homo sapiens
gggagcgtgggcattttcttcagtccccaagggttacttttacaaaagggacagctgaaacattcctaatgctatggggcatttggttttacctcctaaaagacacgtcttgttgctaakttatctacaataatctttttttttttttttttctgagatggagtctcactctgtcaaccacgctggagtgcagtggtgtgatctcagctcactgcaacctctgcctcctgggttcaagcaattctcctccctcagcctccctagtagctgagattacagatgcctgccacgatgcttggttattgttttttttttttttttttttttttgtatttttagtaaagactgggtttccccatgtttgccaggctggtctcgaactcctgacctcaagtgatctgctctcctcggcttcccaaagtactgagattacaggcgtgagccatggcggccggccaataatttccttttgagatatacttgctgtgtcagtgagttgacctgttagcctgttcaacaacaaggcttgccaactgcagaatgagcccatcttcccgggtgca

SEQ ID NO: 223845 - DNA, 505 bp, Homo sapiens
tgtttcttgtgacactccatgagttccttcttctcagccaggttccaggcagtggctcacgcctgtaatcccagcactttgagaggccaagatgggaggattgcttgagcttgggaatttragaccagcctgggcaacactgtgagacccagtctctccaaaaaaaaaaaaaagctgggtacggtggtgtgtacctatagtcccagctactcgggaggctgaggctgaggtgggagaattgcttgagcctggaaggtggaggctgcagtgagctatgattgcaccactgcattccagcatgggcgacagaatgagaccgtgtctcaaaataaaagttccttcttctgcctgtcttctcagttacactagaagatctttaaggaagaagaccctgcctccgacttccttccttccccgccacagcacccgacaaggacacagaagcttcgcaagaaacatgacattgatcactgctgtctaataggcgacaggcccactgaatagt

SEQ ID NO: 223846 - DNA, 495 bp, Homo sapiens
tgtttcttgtgacactccatgagttccttcttctcagccaggttccaggcagtggctcacgcctgtaatcccagcactttgagaggccaagatgggaggattgcttgagcttgggaatttgagaccagcctgggcaacactgtgagacccaktctctccaaaaaaaaaaaaaagctgggtacggtggtgtgtacctatagtcccagctactcgggaggctgaggctgaggtgggagaattgcttgagcctggaaggtggaggctgcagtgagctatgattgcaccactgcattccagcatgggcgacagaatgagaccgtgtctcaaaataaaagttccttcttctgcctgtcttctcagttacactagaagatctttaaggaagaagaccctgcctccgacttccttccttccccgccacagcacccgacaaggacacagaagcttcgcaagaaacatgacattgatcactgctgtctaataggcgacaggccc

SEQ ID NO: 223847 - DNA, 505 bp, Homo sapiens
tgtttcttgtgacactccatgagttccttcttctcagccaggttccaggcagtggctcacgcctgtaatcccagcactttgagaggccaagatgggaggattgcttgagcttgggaatttgagaccagcctgggcaacactgtgagacccagtctctccaaaaaaaaaaaaaagctgggtacggtggtgtgtacctatagtcccagctactcgggaggctgaggctgaggtgggagaattgcttgagcctggaaggtgsaggctgcagtgagctatgattgcaccactgcattccagcatgggcgacagaatgagaccgtgtctcaaaataaaagttccttcttctgcctgtcttctcagttacactagaagatctttaaggaagaagaccctgcctccgacttccttccttccccgccacagcacccgacaaggacacagaagcttcgcaagaaacatgacattgatcactgctgtctaataggcgacaggcccactgaatagt

SEQ ID NO: 223848 - DNA, 495 bp, Homo sapiens
tgtttcttgtgacactccatgagttccttcttctcagccaggttccaggcagtggctcacgcctgtaatcccagcactttgagaggccaagatgggaggattgcttgagcttgggaatttgagaccagcctgggcaacactgtgagacccagtctctccaaaaaaaaaaaaaagctgggtacggtggtgtgtacctatagtcccagctactcgggaggctgaggctgaggtgggagaattgcttgagcctggaaggtggaggctgcagtgagctatgattgcaccactgcattccagcatgggcgacagaatgagaccgtgtctcaaaataaaagttccttcttctgcctgtcttctcagttacactagaagatctttaaggaagaagaccctgcctccgacttccttccttcccygccacagcacccgacaaggacacagaagcttcgcaagaaacatgacattgatcactgctgtctaataggcgacaggccc

SEQ ID NO: 223849 - DNA, 495 bp, Homo sapiens
tgtttcttgtgacactccatgagttccttcttctcagccaggttccaggcagtggctcacgcctgtaatcccagcactttgagaggccaagatgggaggattgcttgagcttgggaatttgagaccagcctgggcaacactgtgagacccagtctctccaaaaaaaaaaaaaagctgggtacggtggtgtgtacctatagtcccagctactcgggaggctgaggctgaggtgggagaattgcttgagcctggaaggtggaggctgcagtgagctatgattgcaccactgcattccagcatgggcgacagaatgagaccgtgtctcaaaataaaagttccttcttctgcctgtcttctcagttacactagaagatctttaaggaagaagaccctgcctccgacttccttccttccccgccacagcacccgacaaggacacagaagctycgcaagaaacatgacattgatcactgctgtctaataggcgacaggccc

SEQ ID NO: 223850 - DNA, 560 bp, Homo sapiens
tttgaatggttaaatgctgcgagtccagcaactcgactcaggacccgactagcacctggatcctgtcaccaggatcgacctcaccgggcgtttgtcagtggatgctcctggtctcgagttagttacatgcttgggtgtcactctgggggctcaacggtcttctcatcacttatcacctgggaacaaccactccctccccactttggagccagcagcctttggggaaggtgggctctcgtggtttctgtgcctggcagaatgtcctataatcctggcgtctgsatgctcagaaaacagggtccccttcccatctgagctgccgcagccttggcaccttggtttaccagtgcaacacagcccatgatgatccagttgaggggagacgggttcttccttttctcccctcttgcctgcagtcctcctgggcctccacacccgtccttcgacgacccccatggacagcaacatcccaccataggagagaaacccttctgttcattcccggggggctcgctagggaaacgcctgagtgatctattttacagcctcccccatgctcc

SEQ ID NO: 223851 - DNA, 560 bp, Homo sapiens
tttgaatggttaaatgctgcgagtccagcaactcgactcaggacccgactagcacctggatcctgtcaccaggatcgacctcaccgggcgtttgtcagtggatgctcctggtctcgagttagttacatgcttgggtgtcactctgggggctcaacggtcttctcatcacttatcacctgggaacaaccactccctccccactttggagccagcagcctttggggaaggtgggctctcgtggtttctgtgcctggcagaatgtcctataatcctggcgtctgcmtgctcagaaaacagggtccccttcccatctgagctgccgcagccttggcaccttggtttaccagtgcaacacagcccatgatgatccagttgaggggagacgggttcttccttttctcccctcttgcctgcagtcctcctgggcctccacacccgtccttcgacgacccccatggacagcaacatcccaccataggagagaaacccttctgttcattcccggggggctcgctagggaaacgcctgagtgatctattttacagcctcccccatgctcc

SEQ ID NO: 223852 - DNA, 509 bp, Homo sapiens
tcctcccactctaaccaccgtcaccctggagacccacaggaagagctgtgagccctgaaggcaatgcttgcaccatccttcccccacctgggccaggactgccactgtcagctgctgctccagcctcacgctgagcataggggacatggcccagatgcagccaccacccacttgatatggttcctgcctgccacgtgccataccactgcggtccatgttggacaggtgcaatatgaggtctaagtccctctggctccattctagccagcaccatggcaccaacctaaccacagcctgtgtgacagtccaggaggtcaaccagtgccacaccctctccatgcggagttcagcctcctcaggtggggcttcctactgagaactgctctacatttggacttctgactcccctccctggcacttgctggagagcacaggaggtgggctccagggaggagacrccatgtcttgctgttcagctggtacctagcgtgtgctggtgcatagcaagt

SEQ ID NO: 223853 - DNA, 588 bp, Homo sapiens
aagcttgtcaagaggcagaagcacagcctggggagggaatccrcagttgtccctgctcagcttccagcccgcagaggatggacgccttctccggatggcttctcttggttttgggagcagggcggcaaagtcttttcatttcccaatttttaaattacttttctgaatagttaacacattcagatcgctcaaaggtcaaaaaatacagaagagtagctgcactggcgtctcctgcacctccgtcagtgcagggttgacgtgccgtgctgtccctcacaggaggaccttgtcccctccaggcagcttcagaccacggctcagcaccaaacccagccgcggcctggctccctgcagttcccacttgctgtgcttacttctaagtgagaggtcccacctgcaactggggaagctctgcctcgataaagcctccaagagcctgtgccctggctcacaccagggtgaccgggaaacgcagacagcacttatgccaagcaacagtttcttacactctgggacctccaggaagtagcatctgccaaatgcaaggataacattttcctcttcatgcagcaaggtctcttcagatta

SEQ ID NO: 223854 - DNA, 589 bp, Homo sapiens
gaagcttgtcaagaggcagaagcacagcctggggagggaatccacagttgtccctgctcagcttccagcccgcagaggatggacgccttctccggatggcttctcttggttttgggagcagggcggcaaagtcttttcatttcccaatttttaaattacttttctgaatagttaacacattcagatcgctcaaaggtcaaaaaatacagaagagtagctgcactggcgtctcctgcacctccgtcagtgcagggttgacgtgccgtgctgtccctcacaggaggaccttgtcccctccaggcagcttcagaccacggctcagcaccaaacccagccgcggcctggctccctgcagttcccacttgctgtgcttacttctaagtgagaggtcccacctgcaactggggaagctctgcctcgataaagcctccaagagcctgtgccctggctcacaccagggygaccgggaaacgcagacagcacttatgccaagcaacagtttcttacactctgggacctccaggaagtagcatctgccaaatgcaaggataacattttcctcttcatgcagcaaggtctcttcagatta

SEQ ID NO: 223855 - DNA, 578 bp, Homo sapiens
accatgctctaaagcatatgccccatgaatgaataagcaaatcagtgaccatgtagcctcctttcctctttacatttacatatgcttggggtgcayggagcccttttgcatccaccataagctttttcttctttccctacagacccacagagattctgtgactttccatggctctcttcacctgtctcagctacttccaacttggctgttcaaaaactagttcaatatagcaatttctatcaattgacttcaacaagggtatacactatcaactgctgtaactcaaggccaccctttttccaagcattttctgtgggttagtgctttgatccagaatttgtgtttagctgtcctaaagagaggtttacgtacctcatcctgcaacagagtcttactgtactccaggtggtgcctctccaaaatagaagaaccatgaagtcttgctaatggagacgtggatctagaaggaaaacaacatgccatgattctagctgtttaaaaattacacataggttcatacaattcaggatttttcttaatgtctctcttctccctcctcactcaattatctgtgaagt

SEQ ID NO: 223856 - DNA, 578 bp, Homo sapiens
accatgctctaaagcatatgccccatgaatgaataagcaaatcagtgaccatgtagcctcctttcctctttacatttacatatgcttggggtgcatggagcccttttgcatccaccataagctttttcttctttccctacagacccacagagattctgtgactttccatggctctcttcacctgtctcagctacttccaacttggctgttcaaaaactagttcaatatagcaatttctatcaattgacttcaacaagggtatacactatcaactgctgtaactcaaggccaccctttttccaagcattttctgtgggttagtgctttgatccagaatttgtgtttagctgtcctaaagagagktttacgtacctcatcctgcaacagagtcttactgtactccaggtggtgcctctccaaaatagaagaaccatgaagtcttgctaatggagacgtggatctagaaggaaaacaacatgccatgattctagctgtttaaaaattacacataggttcatacaattcaggatttttcttaatgtctctcttctccctcctcactcaattatctgtgaagt

SEQ ID NO: 223857 - DNA, 574 bp, Homo sapiens
tctgaaactgtttgcagagctgttaggcattcctagggcccaagctgcctggcagggtatctggctgtcttccaggagcaggcctgctttactgtccctgccacacttagttaccaattgggagtggcctgtggagcgtgtggcctcagcacagatgtgaccatggatttcaggccagcagccattgcacggctacacttcccacaggtggagatctgagaagcacattttcatgggcaccacaatgatgtttcccagagaactgggaaatccctgtggcctggaggtttatcccacactggggactccccaaggccccrgggaggccccaggcctcctctctgcccaggccatgagagcacatcagagcagtagctgcagtggagcatgagagaaagcaaagggcctcacatttcagagcagcctgcattctcctgggccagctccattcccactccctgtttagacaatgactgcttaaggttcagactctagaaaatcattgtcgcccttttgctgacatgcatcctattctgacatccacgtgccataaatataggggtcaggcctgggc

SEQ ID NO: 223858 - DNA, 440 bp, Homo sapiens
ttgtgccgtccttatgagaatctaactaatgcctgatgatctgaggtggaagtttcatcccaaaaccatctcccaccccaccctcattctgtggaaaaattgtcttccacaaaaccggtccctggtgccaaaaaggttggggaccactgccgtaaatgaccaggagtgtgagcaaatggaggagtggcaggtcccctccctggccttctgtcttawccttcttttcttccttcactgaagaatctgctacttgctggcccagccagggtgagtgggagatggacccgtgtgtgcctgtggccacacctgagcatcaggcggactctgggggtggaggagaggcgagagcatccactcctctaccccagccccaagaggtgaggtctgacccagagtgcagttacctgaaatgtgaagtattcatccgcaggggcattcat

SEQ ID NO: 223859 - DNA, 440 bp, Homo sapiens
ttgtgccgtccttatgagaatctaactaatgcctgatgatctgaggtggaagtttcatcccaaaaccatctcccaccccaccctcattctgtggaaaaattgtcttccacaaaaccggtccctggtgccaaaaaggttggggaccactgccgtaaatgaccaggagtgtgagcaaatggaggagtggcaggtcccctccctggccttctgtcttaacyttcttttcttccttcactgaagaatctgctacttgctggcccagccagggtgagtgggagatggacccgtgtgtgcctgtggccacacctgagcatcaggcggactctgggggtggaggagaggcgagagcatccactcctctaccccagccccaagaggtgaggtctgacccagagtgcagttacctgaaatgtgaagtattcatccgcaggggcattcat

SEQ ID NO: 223860 - DNA, 543 bp, Homo sapiens
atctcattcgctctctctctcctgcccatatcactgccccccagagtctgtgctctgcctgctcctccctctgctgtctgtcccctgaagcccatcctcttgctgtgctccaactcaggcagatggtccccaaccttgtccttctagtgccaacctcctggcaaacgccatggagcagcatgaaataattttggaacggtgaagagctacagcccaggccctggacaaaactgtgagacaggtgacattgatcctggtgccccatcaccccactgtgcccttggtctttcctcttgctcataagatctctgtgccttgcagttttctaatcaaatcagttcagcmaaagagctgatcattttacgctctcattctaatgtgttaactctcccagtcatttgcatttttaaagccttttatctctctttgtgggttcaactgttgttcctgtattgaagagttttcaggcttcatttagcagatagtgggaatttagagggaaatcaggactgaagaggaaggaggaaggtgagcaggtttgga

SEQ ID NO: 223861 - DNA, 570 bp, Homo sapiens
ccttttttgtctctatcttaattattttccactctaaggtaaattttaaccaataaatgttaaaaatatgttttgagttttaaaaacttatttatccttatatgctagtaaaacatttaatatgtcacttaagaaatttgttgccctcattgtattatatgttcattcttatcacaactgtgataccatgttaatcactgcgtattccaaatgaaagaactagtctctactttataaaatgttactcagtacaatcaaagtagatcaggtagatgaatgctcaggttcagggctraggttggacccttcgtattatgcgtacatatgcacatgatcttccttatagacatttttcccttagtgttctgtcagtagatgacacctatgttgacctaaaaactaatatcagaaatctggggattatccttgatactttctttccccttattatttatgtttaatttgtcaccaagtcctgtgaattttacccccagagtatatatttctcaagttctctccaccctactacaaaccactatattttctcttataggctactgttatattctc

SEQ ID NO: 223862 - DNA, 407 bp, Homo sapiens
gcagtcaaaacctttccaaaatatctaacaacgtaagatgactgcatgaagaagtaactagaaattaagataagctaggcattctttcagttagttgagaaggacactgagaattagtacactgtcaatatgggctttgcatagtaacaagatgtataaaatatatgaactgtcatgacccaatcrtttaaaattgctaataaattaccatgccttctacaacaggaaactggagaagttatcagaactttttggcagtttcaataattaggaaatacataagcaaattttatttagtactgtcattattgaaattctttgacccttttcattttctcaataatgtaacaaatctttaacatttttattgtcacatcttgtccaaaagtaggaactttccgttaaaa

SEQ ID NO: 223863 - DNA, 531 bp, Homo sapiens
ctttacttccttcacagtttcatttgtcctataggacacacctaaattaatccttctaaaacatacttttactgcattttcttgttcatgtgtgtgcaatgaattcccactacctgccaagtcaatacaaccgtctcagtctgcaatgcaaggccttcttttatgtacctatgtctaatatataaatcactaaacaagggtatttgtcgaaatacaagcacttggcaaagtgtctagtacacaatgagcgtttaaaattgaataaataatggcacaatttgatttgcaccgtcacacatagagatataaagctcactgactgccagaatttaaataaaacagcatccacatcattctagatgaataatatttaccaagaaatcagcaaaccttggctgagtacattctatgtgcccagcactctgatactctcatagtatyttataaatcatcaaatctaaccagagcctaaatatttctaatgtaatcaggcttacacttcacattttcttctttagggtattttggaag

SEQ ID NO: 223864 - DNA, 541 bp, Homo sapiens
cattttccttcagccctggatgcttctgcatttgacttctcagtggttataaaaactcataacctctatttgcttggtggcatcgctagccctcttgattttcaagcactatgtccataggcacaagattgtatacattacatacaggaaatgttggttatcttaccttggcataatttgcataatcccctagcacagtggggaggcttgaggctctaactcaagcataagcattcagtggttaccatggcaggagtctgatctctcacaagcaagagtttcagtgacctggtaccataggaagataaaattggaaaggtagtgtattaggccattctcatattgttataaatacctragactggctaatttataaagaaaagaggtttcattgactcatggttctccacgctgtacaggaagcatggcagtatttgtttctgggtaggcctcagggaggtttactgatggtggaaggcaaagtgggagcagacatcttacacggcaggagcaggactgagagagagtttggcggggggct

SEQ ID NO: 223865 - DNA, 541 bp, Homo sapiens
cattttccttcagccctggatgcttctgcatttgacttctcagtggttataaaaactcataacctctatttgcttggtggcatcgctagccctcttgattttcaagcactatgtccataggcacaagattgtatacattacatacaggaaatgttggttatcttaccttggcataatttgcataatcccctagcacagtggggaggcttgaggctctaactcaagcataagcattcagtggttaccatggcaggagtctgatctctcacaagcaagagtttcagtgacctggtaccataggaagataaaattggaaaggtagtgtattaggccattctcatattgttataaatacctaagactggctaatttataaagaaaagaggtttcattgactcatsgttctccacgctgtacaggaagcatggcagtatttgtttctgggtaggcctcagggaggtttactgatggtggaaggcaaagtgggagcagacatcttacacggcaggagcaggactgagagagagtttggcggggggct

SEQ ID NO: 223866 - DNA, 541 bp, Homo sapiens
cattttccttcagccctggatgcttctgcatttgacttctcagtggttataaaaactcataacctctatttgcttggtggcatcgctagccctcttgattttcaagcactatgtccataggcacaagattgtatacattacatacaggaaatgttggttatcttaccttggcataatttgcataatcccctagcacagtggggaggcttgaggctctaactcaagcataagcattcagtggttaccatggcaggagtctgatctctcacaagcaagagtttcagtgacctggtaccataggaagataaaattggaaaggtagtgtattaggccattctcatattgttataaatacctaagactggctaatttataaagaaaagaggtttcattgactcatggttctccacgctgtacaggaagcatggcagtatttgtttctgggtaggcctcagggaggtttactgatggtggaaggcaaagtgggagcagacatcttacacggcaggagsaggactgagagagagtttggcggggggct

SEQ ID NO: 223867 - DNA, 575 bp, Homo sapiens
caatttgctcagcctcatcagggtttgcctcaacttctgaattgaagcttgattgctttgcatgggtgatgcttttgccatactaggagggccctcaaaatgatgacacattttctactgtgtcatgcacttgcttacaaatctgaaggatccattttctgttgtggcaattggagtataccaagtgagcagagagcttgctccaattataacatctcctatgccttttttgaaagaaaatgatactgaatgtattgccttttatcatgcggaaatgaggtgtttttagtgacgatayttatttgtgtttcaaatgtggaaagaaataaatcagggatttttcttgccataaagctaaaatttaggaaaaagtcttatatatgagatacttgtttcaggaaataaagggatgaatgttgcaagttaaatcttactgagtttagagcacttagatgattttatgtcttgtcatttttcccaggagagcttacagtgaaaatacatcccagatcctctgtttgaaactaggattctatcttacaacagtaatatgataaaatgtgatgaaaaggagg

SEQ ID NO: 223868 - DNA, 389 bp, Homo sapiens
gaaaagaaaaaacttagaagagtcacaatatgtatttatgttagcgttcaactcaacagaaaaygactagatttgcatatctccctctgtattcagtctcttatgctatcctaagtcatataacctctggacaatttcactgtatacttgtgatagaatgagaatgaaaaacatagtgtctcagtattattatgaaaagagtttttgacttcatagctcccctgaaaggatctcagggacacctacaggttcccagaacaccctactttgaaaaccactagttaggatattggtatgtgtttttaaatcttctaattatgtcttttgtagttgccaataacattttctgtacactagagtatggatcagttattcattaaaacataata

SEQ ID NO: 223869 - DNA, 585 bp, Homo sapiens
atttctgcatgtcttataaaacaaattgcaaaatccattaattttgcattttggtgtttttgtgtttgcaactcattacaaagttaaactaggtcggatcatttcagcaagcacaaactatgtaaccaccttagcattcacccataaatattgtaaaattatcagaacctgacctaagccacccatttatcatcttttactttctttccaactcatttatttgtctctgcctgcccaccaacacacacatacacacacacacacacacacacacacacacacacwctctctctctctctctctctctctcacttactcaatgagaaaacagagcaatgttgcaattactaagagaaacaaccgtatgatctatcctgaaagataacctactgataagaagggcttatgtgttttaacttttgttcttgtttgtaatttcaaacttgcataagcttgatatttcacttcatttcttttttttacttcaacctggtgaggaatgtcttgctgggtaacatgttacaggtgattacaatcagcccttttagtcctcaaacaatcttataaaacaactgttgataaaaa

SEQ ID NO: 223870 - DNA, 585 bp, Homo sapiens
atttctgcatgtcttataaaacaaattgcaaaatccattaattttgcattttggtgtttttgtgtttgcaactcattacaaagttaaactaggtcggatcatttcagcaagcacaaactatgtaaccaccttagcattcacccataaatattgtaaaattatcagaacctgacctaagccacccatttatcatcttttactttctttccaactcatttatttgtctctgcctgcccaccaacacacacatacacacacacacacacacacacacacacacacacactctctctctctctctctctctctcacttactcaatgagaaaacagagcaatgttgcaattactaagagaaacaaccgtatgatctatcctgaaagataacctactgataagaagggcttatgtgttttaacttttgttcttgtttgtaatttcaaacttgcataagcttgatatttcacttcatttyttttttttacttcaacctggtgaggaatgtcttgctgggtaacatgttacaggtgattacaatcagcccttttagtcctcaaacaatcttataaaacaactgttgataaaaa

SEQ ID NO: 223871 - DNA, 585 bp, Homo sapiens
atttctgcatgtcttataaaacaaattgcaaaatccattaattttgcattttggtgtttttgtgtttgcaactcattacaaagttaaactaggtcggatcatttcagcaagcacaaactatgtaaccaccttagcattcacccataaatattgtaaaattatcagaacctgacctaagccacccatttatcatcttttactttctttccaactcatttatttgtctctgcctgcccaccaacacacacatacacacacacacacacacacacacacacacacacactctctctctctctctctctctctcacttactcaatgagaaaacagagcaatgttgcaattactaagagaaacaaccgtatgatctatcctgaaagataacctactgataagaagggcttatgtgttttaacttttgttcttgtttgtaatttcaaacttgcataagcttgatatttcacttcatttcttttttttacttcaacctggtgaggaatgtcttgctgggtaacatgttacaggtgattacaatcagcccttttagtcctcaaacratcttataaaacaactgttgataaaaa

SEQ ID NO: 223872 - DNA, 540 bp, Homo sapiens
cagtattgatgcctcactgctcactgtcatcaccacaccaagcctgtgtttgtctgtaaatgaattaatggatggtaaagtggcttagttattatatttattaacgaattaaattgttctttaaaagaaatccaaaatttctagattgagatgaagagacaacttatgtctatataaaagttgggcacctacatgaaatawattcattaatccatttcaattacccagactatttatctacctcgatctgagtgttattgtcctgcccatcatccagcagcaggtctgtgaagcttctgggctcaggagagtcttggccgacgcttgctcggttcgtgtctaccgccttgagaaagtccaagtttcttttccacctgtggctgtacgcgtgtgaatcaacttccacctcctcctctgtgtgagggaaggcctgagtaactccatactgccaatctgtttgaaaaagaaagaaaatgggttaccactcattatgtgtaccatacatgcaagtgctatcggctcgagaagaaaaaagaattc

SEQ ID NO: 223873 - DNA, 540 bp, Homo sapiens
cagtattgatgcctcactgctcactgtcatcaccacaccaagcctgtgtttgtctgtaaatgaattaatggatggtaaagtggcttagttattatatttattaacgaattaaattgttctttaaaagaaatccaaaatttctagattgagatgaagagacaacttatgtctatataaaagttgggcacctacatgaaataaattcattaatccatttcaattacccagactatttatctacctcgatctgagtgttattgtcctgcccatcatccagcagcaggtctgtgaagcttctgggctcaggagagtcttggccgacgcttgctcggttcgtgtctaccgccttgagaaagtccaagtttcttttccacctgtggctgtacgcgtgtgaatcaacttccacctcctcctctgtgtgagggaaggcctgagtaactccatactgccaatctgtttgaaaaagaaagaaaatgggttaccactcattatgtgtaccatacakgcaagtgctatcggctcgagaagaaaaaagaattc

SEQ ID NO: 223874 - DNA, 578 bp, Homo sapiens
ttctaaaatgctatgaatgtctgaattctgacattgctttcctaaatgactttccctaattaaattgcatgattgcatatatttacactgattacataatttaactaacattgtaaataatccacaatcaacaaaattacattaaaaaaagaaatcaagacagtaaaaactatactaaaattagatttccatttttgtgatatattccttaaacatacaaacaaccagttaagaattaagcactaaaatgagatagaaactcacatttcagaagtaatctatcaacacctgtagattagttgagctctaacacttagaatccagcggcttctctttttctttatttttgaattacatttttataaaaggttttcataactcacaaaagcaaattctagataaactagaagactctctaaatagttgttaaaatatatatttagaataaattccttctaagggtgtggcctactttagtgtaagactaagaaaaatacytgaacttcataaaataattgaaaaacaatgtctttcatataggacaacaaattcttgccaggattttgctaaaaattatg

SEQ ID NO: 223875 - DNA, 620 bp, Homo sapiens
ctctcccaagtaaatgttacagacaccccttcctcaacttatgatggggttgcatctcagtaaacccaccgtaagttaaaaatgtaagttaaaaatgcaccatatacccctaacctaccaaacatcacagcttcgcctggcctaccttaaacatgctcagaacaactcccttagcctatagctaggcaaaatcatctaataacaagcctgttttacacacgttgaacatctcatataatttgttgaatactgtaatgaaagtgaaaggcagaatcattatatgggtacttgaagtatggtttctactaaatgtgtatcacttccacgccatggtaaggttaaacagtcttaaaytgaaccactagaagtcagggaccatctatgcatttctaagaaacaataatcaatctgttattcatatatttatattaaatgtaataataagcattgtattgtgaaatttatcttgtttgaacgttcagtacagtgagtgatttgattcaagatgcctaaggaacaaaaacacaagtttccctcattaatgaaccacaatagtaacataactacattatataaaaaaatgcacggaccagacactgacacccaattgtttctaacct

SEQ ID NO: 223876 - DNA, 552 bp, Homo sapiens
gctttaggctaaacttaatttaacagtcctaacagtgacaggtttctaaagtggaaatgacgtcactaggacaggataagagaaagaaatggctcacttgtctacatggaccattagacgcaaygcaaaggagaagaagtcaagaatggtgtccagttttctggattaggcaactgagtgaataaaagcaaaaagctgcaatgtagacaaggtgtctaagaggcaaagttgcaaacaaagtccaatatcactatctgcttccaaaggaacagctgctggtggctgtagtagcagaaagaatttcagataaacaaatcatctttttcagccgcatgtaaacaaccatagctcagcaataaccttaaataagaaaagaaatgcttgccacaatactgtattgagtggcattcaaattaaatacttcagataatggggtcaggttggatccttctaagagactccagcccaggcccagacatctagaaaatatttgaagcattaccgaatattttagaagccaaatgtctgctttgccttcttagcacaaaagag

SEQ ID NO: 223877 - DNA, 523 bp, Homo sapiens
ttctgagaagaccttcaaccaaaaaacctgcttaggcttgcttaacctcgtgttcccctgaacacaaacctgtttatctcatcaaatctaatccaatttaatctaatctacctacctacctatctacctatcttttttttaaycatacccactaccccagaaaactaacactcctctgtgaaatatgaccgactgcttagggaaacattgctctattctcctaaaatgttgtgttctagaaggagctgttggtcttgaactagtttttgatacaggctaaattaatggtatcacatatcctgttcaccaacaaaataccaaaaagaaattgcctcaagcatgctgaacttggaaaccacaactctaagattacagccatatcatgctggcccagtgtagtggattccacaaggacattccttgtatattttatttgttccgtaaaaggaaagaatgtgtgcattccaattatttccctcaagtcctctgctggccagaagactattctaatattctatagatc

SEQ ID NO: 223878 - DNA, 523 bp, Homo sapiens
ttctgagaagaccttcaaccaaaaaacctgcttaggcttgcttaacctcgtgttcccctgaacacaaacctgtttatctcatcaaatctaatccaatttaatctaatctacctacctacctatctacctatcttttttttaatcatacccactaccccagaaaactaacactcctctgtgaaatatgaccgactscttagggaaacattgctctattctcctaaaatgttgtgttctagaaggagctgttggtcttgaactagtttttgatacaggctaaattaatggtatcacatatcctgttcaccaacaaaataccaaaaagaaattgcctcaagcatgctgaacttggaaaccacaactctaagattacagccatatcatgctggcccagtgtagtggattccacaaggacattccttgtatattttatttgttccgtaaaaggaaagaatgtgtgcattccaattatttccctcaagtcctctgctggccagaagactattctaatattctatagatc

SEQ ID NO: 223879 - DNA, 523 bp, Homo sapiens
ttctgagaagaccttcaaccaaaaaacctgcttaggcttgcttaacctcgtgttcccctgaacacaaacctgtttatctcatcaaatctaatccaatttaatctaatctacctacctacctatctacctatcttttttttaatcatacccactaccccagaaaactaacactcctctgtgaaatatgaccgactgcttagggaaacattgctctattctcctaaaatgttgtgttctagaaggagctgttggtcttgaactagtttttgatacaggctaaattaatggtatcacatatcctgttcaccaacaaaataccaaaaagaaattgcctcaagcatgctgaacwtggaaaccacaactctaagattacagccatatcatgctggcccagtgtagtggattccacaaggacattccttgtatattttatttgttccgtaaaaggaaagaatgtgtgcattccaattatttccctcaagtcctctgctggccagaagactattctaatattctatagatc

SEQ ID NO: 223880 - DNA, 595 bp, Homo sapiens
caagcatgtgtcaccacactctgccaatttatattattttaaatgttcaatctataactaagaaattayggcatgtaaagaaaaaaagaaagagtgattaatatgcagcaaaaaaaaaaaaaaaaaaaaaaaaactcaatagaacctgtccctgagaaagcccaggcattggacttactagacgaagacttaaaatcagctattttatttatgttcaaagaacgaaagaaaaccatgtctcagaaatatgagatcaacatttaactaagtagagaatagcaataaaaggatagaaatattttctacagccaaacagaaattctggagttaaaaagtaaaacaactaacaagaaaaatcccctggagggtagctctcaatgggctaaagtgacacaatgtgacttctgaggccagattatacaagaggatacagcttcttcctggttctcttggggcatttccctcttggaacccatgtgctgtgaggaagccaaaaccaccacatgaagaatcagtgtttaggccctctggtcagtcaccccagtggagattccacctaacagcaacatcaaccaccagtcacgggaatcaatga

SEQ ID NO: 223881 - DNA, 598 bp, Homo sapiens
cggtacatgtgcaggtttgttacacaggtgaacttgtgttatgggagtttgttgtacagatgacttcatcaccccggcattaagcccagtactcaacagttacttttccggatcctctccctcctcccatcctctcccgtccaacaggctccggtgtctgttattcccctctatgtgtccatgtattctcatcatttagctctcattattatgcagtatttggttttacgttcctgtgttagtttgctaaggataatggccttccaaagggcatatttttaaataaaaatatgttatgtttgagaaaatataaaaggaaacagaaacgacttgccgcactcagctgctcctggtttcgyctcactctctctatctccggggtcatgcttaccggagtggccttgtagttttgctctttatactggagctgagagacaaggtgcaagacagtttgagattatgggaaataaatacgtcccaaaacattgcaacagattttttttaaatgtcacatggctacagaacattcattaataagatcatcatcaggatttcatagtgaaatatgtattgcttatagattttatcttcttggcga

SEQ ID NO: 223882 - DNA, 571 bp, Homo sapiens
atgaactggtactatttgccttttcaaatctaatccttcacttaagctgccaaataaatgttctggggcctttaatcattgtatcagggaaaaatttctttcttccaacttgtggagaggtactgaaatgtatcctttctctgcaaaatttaatagagttaaaattctcttcaaagagatgaaatctaaccctaggtttcattaaaatgacctagctcttcttcattgtgatatatcaaaatgaaacactgcttcagagtcaaggggaacaaggatacagtttttgttctgaaagttagatctttgatatatgatgaaatagcatttcaataaagtgaagaataaaaggaaaaaagccatcagttgagtaaagaactaaaaacatttgtctatagtttyggtttgcttttagaaaagataattaatgctgtagagaacttactgaactaatattctgctgatttttcttcactcgttcgatctctgggctatctttcactgcagtgccagctcccacttctttcttataaaatacctttattataagaaaaggaaaagaataactaagctt

SEQ ID NO: 223883 - DNA, 549 bp, Homo sapiens
atatggaagaatgaaactggatcctcatctctcaccttatacaaaaattaactcaaaatatatcaaagacttacatctaagacctgcaaccataaacattctagaaaataacataggaaaaaaaaacacttttagatattggcttaggcaaagaattcatgacaaagaacccaaaagcaaatgcaacaaaaccaaaaataaatagatgggacctaataaactaaaaagcttctgcacagcaaaagaaataatcagtattttttagacaacacagagtgggaaaaaatattcacaamctatgcttctgacaaaggactaatatccagaatctacaaggaattcaaaccagcaagtacaaaaccaaataatcctatcaaaaagtgagctaaggacatgaataaacaattctcaaaagaatatatacactctgccaacaaacatgaaaaaatgctcaacatcactaattattaggaaatgcaaatgaaaaccacaaagagataccaccttactcctacaagaatggccacaataaaaacagtcaaaaaacat

SEQ ID NO: 223884 - DNA, 515 bp, Homo sapiens
ttgtaatcattaagtacagcattataaaatacattattattattatttttgtttgcgataagaacacataccagaatatagtattgctaactgtaggcactatactttacagtagctctctgggacttcttcattttgtgtaactgaaacttatgtcccctttcactgatacctctccatccccctttcccccatcccctgacaactaccatkccactctctacttctgtgagtttgacaattttagattcatcatataagttgtatcttgtaaataagagagcaggatgacttttggaggttatggataggtttatggcataaatgctggtgatggtttcacaattgtatacttactccaaagtcatcaagttgcatgtattagatatatacaacttttagtatgtcagtcttaccttaataaagtggcttttaaaatacactaaactttgccaaaggtttgattggagtgtggcatttccattctttctggcttttgaatggctacatgtgaa

SEQ ID NO: 223885 - DNA, 589 bp, Homo sapiens
tgtgtcctcagtaaggaggtaaatgtatattccgctgagttaagacagcatacttcggccaacatgaactataaaaggaaagtaatagttttgtcttaaaagtgakgtaggtatgattgaggggatagttgttattttgtctacccagtgcagaagccgtgtggccaatttgatcaactcttaaaaataaagtaatagagacacaagttttaagctgttttgtataaattaatgcttgatatattttcaaggtagatattaagtaccttagatttttttaaccaacatatttaagtgtatactgtagagtatccagtaagctctggtacattactctttgtagcaaacaaagagtacatatttgtttgatatatgaaatacactggtacaaaattcaagaatgaagtgatgttctgctcttaggattggtaatgccattctatgtaaagttattctgtatgtcagaatttcatcttatgactgactcaatgtgtttattgtgtggaagaatagagaggttcattttagtgtataggtgttgccttgtacgattagaggcaaatatctgatttacttaggaactaaatca

SEQ ID NO: 223886 - DNA, 353 bp, Homo sapiens
attttaattaaaaattgtctggctgagtgtggtgactcaagactgtaatcctagcactttgggaagccaaggtgggtggatcacctgagtctargagtttgagaccagcctgcgcaacatggcgaaacctcatctctaccaaaaaaagaaaaaaaaaattagccaggcgtgatggcacatgcctataatgccagctactcgggaggcttaggtgggaggatcacttgagctggggaggtcatggctgtagtgaactgtgatcatgctactgcactccaacctgggcaacagagtgagaccctgtctcaaaaaaaaaaaaaaagaaagaaaaagaaaaaattgtcatactagga

SEQ ID NO: 223887 - DNA, 353 bp, Homo sapiens
attttaattaaaaattgtctggctgagtgtggtgactcaagactgtaatcctagcactttgggaagccaaggtgggtggatcacctgagtctaagagtttgagaccagcctgcgcaacatggcgaaacctcatctctaccaaaaaaagaaaaaaaaaattagccaggcgtgatggcacatgcctataatgccagctactcgggaggcttaggtgggaggatcacttgagctggggaggtcatggctgtagtgaactgtgatcatgcyactgcactccaacctgggcaacagagtgagaccctgtctcaaaaaaaaaaaaaaagaaagaaaaagaaaaaattgtcatactagga

SEQ ID NO: 223888 - DNA, 576 bp, Homo sapiens
ttatgtttcacctcctccatgctctttggagccaggagttggcaaacttttgctagaaggaccaaatagtaaaaattgtaggttttgtaaaacagatagcctctgttggaactactccaaactgccattttagacaaaaggagccatagaaaatacatacatgaagaaacgtggctgtgttcccartaaaactagaatttgaatttcacataattttaatgtgtcacaggatattatatttcttttgattttttatcctatggcaaaggtgaaacatatgactttataaagacatagctgaggaatgattgtatgagatactctaaatgaataacgaaaaagaataaaggagcaaacattctatattataataaaatataattctgtatatataataacatagatattatgcagccataatattagatttgagatgataaaatgtaaacatgtacaaataattaaactagataatcaaattgtcaaattatctgtctagacattaggtgctacaagagtactaaaaagaaaaaacaaaaacaaaaacagtggaaatgagctgagctggattttgaa

SEQ ID NO: 223889 - DNA, 597 bp, Homo sapiens
ataaaaagctctgaattggagtcattttgggggaatgttggagtgaatagtgtaactttctctaaatctgtttagcagctcgtggtaacaatatgccaaatacataaattatgtggttacaaaaatcagctttacacccctgtaatgtctattaacatttgtattaatatcaaaatgtgtacattttagagatttactataaaatacatcaaactggatattttttattcttgacatttacaacatcctttcaagatttttttaaaaaacaatattatgattctacactcacacyacataattcttttctgcattttatttggtttttaaataactaaaaattttaattgcttgagctgaaaaactttaactataaaagtagtttaattattcaaacaatgtaaagatttaattagcatcctgaattagaatgatgaataatggctaatattctttgagttctccttaaatggtagatattgttttaagggcttcacatgtattaactcaattattacaacaatcttataaaataacattatgactactttcattttacagatgtggcacaatggggttagtgacttgccccaggtc

SEQ ID NO: 223890 - DNA, 615 bp, Homo sapiens
aatggctaatattctttgagttctccttaaatggtagatattgttttaagggcttcayatgtattaactcaattattacaacaatcttataaaataacattatgactactttcattttacagatgtggcacaatggggttagtgacttgccccaggtcacacagtcagcgtgatcagtagttcaggcagtctgatctcagagcctatgtccttgtcagtatgctgcctctctgcagtagcatccgtttagtgaatacatagtatgtgccaggtcaatgctgagaactttgtgtatcaaattgtatttcatataatctaacctctttaatatctctataaagaatgactattgtactcattttacacataagtaaaaggaggcttatagaaatgaggtcatctgcttaattcttgttatttttttggtgctgctcactattctgttgccttatttggtatctttgctgtttctgatgcttctgttggggaggctcccaaaattaagccaccatcatgtatatctctttgctcatttggtcttagttatattgactttttctcctcctaagtactaatatacattcccctgaggtgaaagggctctctacagacagg

SEQ ID NO: 223891 - DNA, 381 bp, Homo sapiens
acttcggtacatgcctcgcagctgtggcatcagcacttgccaccttgccacataatttgatattctacagattcagactgacttcaagtctttggaagccacatcatggcttttaagaagcatatttaccatgctttgcctttaagtttggaataaactccctgcctttctttgagytacagggaggctaatcaatatcttacttaggtggtgaccctggagtcacatccttacttttattctttttgtgatcaattgtttttttaataaggactttttaaaagcaggtcattcacacaaagggtacacatttaagtataaagctcaagaaattttcagatagtgaacacactagtataaccacgacccagacaaagaaat

SEQ ID NO: 223892 - DNA, 415 bp, Homo sapiens
cttctccttattgacttcggtacatgcctcgcagctgtggcatcagcacttgccaccttgccacataatttgatattctacagattcagactgacttcaagtctttggaagccacatcatggcttttaagaagcatatttaccatgctttgcctttaagtttggaataaactccctgcctttctttgagctacagggaggctaatcaatatcttacttaggtggtgaccctggagtcacatccttacttttattctttttgtgatcaattgtttttttaataaggactttttaaaagcaggtcattcacacaaagggtacacatttaagtataaagytcaagaaattttcagatagtgaacacactagtataaccacgacccagacaaagaaataaaaattaattagagtgtatg

SEQ ID NO: 223893 - DNA, 496 bp, Homo sapiens
cattatatactatggtgatagacatgtagacaaacagattgctagagatagagagatatcactaaaatggataggtactaaatagtatgcaaggtactcaaattaacctgaaaatatagagaccttgctatccaattaagtagacaaaaatagatgcagaataccctgaattcatttccatttccaaaagacaaaaatatatgtgtgtgtctatacacacacacacacacatatayagaagtattcatatgcatgtttgtcatccatgtcaccttctgttgctgggtagattttgttttgtttcataaattctcattctgagcacgtataaaaatacaggtgatttgtgcaaggtggacttacagaaaacaggctggggagtaaagagggcaagcaggtggtctgccatatgactttcttttttttgatatttctcttttacctttgttattcttacttttcatttcttcctgtctcacttaatctcaaggtttgt

SEQ ID NO: 223894 - DNA, 444 bp, Homo sapiens
ctcttttctgaaaagcttagatgtgcagcatgaagaatatcataaacaccaggtggtgaagaattagacatgaaaaggaaaatagtaaagatgccatgagtcaccaaaagtcatgagttaatggaatccatggagtggaacaaatatgagtaaagtcccattagctggtggacagagcacagtaaragtagagacagagagaagctaagggcacatggccttaaggagagggcaatgaagaacttctttgagaggatgacgtctagaattgatgttgagttagctgctttctaactgctagaacttctatcgcatctgaatagctttctgttttccatgcatcctcgttatgcaactgctaaaattgatgccattgattcttactgtcttgaaaacttgtggcaaattctattaactgaggtaatttaggaatatcactaatcc

SEQ ID NO: 223895 - DNA, 530 bp, Homo sapiens
ctgtggaatgtctaaacctaagagcatcatttaggaacacctgttaccttggtccctattattaatctgaggactgatttgtgatattgcaggagcataagatttggtagacactatcattctcaatttcattcttgcttgagactttgaccactcayagatggcccctttcgtcatttgatggagggtggaaaaagctatctggggttggggcccagcagcctgcattttaaccaaccctccaggtgattctgatgcacttaaagtttgagaaccccactgtacccctacttacttaagtaactttggtattagaaataacattgctagtttttcagagttgtagttggaaaattttctctactttacctcttcccctacttgttagtcttaggaacaggagtaggtaacttaacccactgacccacagtgatgcattttatctgcaaaataggtaatagtgatagcttccttgcttaaagtcccacagccaggatctatacagtctttgattagcttccattatttac

SEQ ID NO: 223896 - DNA, 537 bp, Homo sapiens
tactttttccgacgtttttcatttcagcaccagctgctgggttttycccttagggagatgcagagccagcttgattgggaagtgcttaagatttagtacccattccaaagaattccatctgtgcccttgaaatgaatattaacataaaatgaaaaatttggtaagttacatcaagctgatttttctgccctggccacagtctctactgttagtaatagctaactttctttatgccaggtagtattcttagcactttatactcatttaatcctaacagtaactctgtaaggcaatttgttgttgttacagccaattaatagaagaggaaactgaggcatggagctagtaaggaaatagtaaaggtatctactaaatagaagtgttgaagattaaatcaggtagtagtgtaaagtatttataaaagtatctggcatatgttaaataataacttgcttcaatttatataacaaacagagagactggaatttgaatctgggtgatccggcttcagagtctgtgcattctttggcctctcaa

SEQ ID NO: 223897 - DNA, 537 bp, Homo sapiens
tactttttccgacgtttttcatttcagcaccagctgctgggtttttcccttagggagatgcagagccagcttgattgggaagtgcttaagatttagtacccattccaaagaattccatctgtgcccttgaaatgaatattaacataaaatgaaaaatttggtaagttacatcaagctgatttttctgccctggccacagtctctactgttagtaatagctaactttctttatgccaggtagtattcytagcactttatactcatttaatcctaacagtaactctgtaaggcaatttgttgttgttacagccaattaatagaagaggaaactgaggcatggagctagtaaggaaatagtaaaggtatctactaaatagaagtgttgaagattaaatcaggtagtagtgtaaagtatttataaaagtatctggcatatgttaaataataacttgcttcaatttatataacaaacagagagactggaatttgaatctgggtgatccggcttcagagtctgtgcattctttggcctctcaa

SEQ ID NO: 223898 - DNA, 618 bp, Homo sapiens
aaaaaaaaaaaggttagctgtaaaacagccttaaacaggtcctttaggagttattccagaagaaggcattgttatcatagragaagatagtttcaagtgtgttattacccctgaaaacattccagtagaacaaaatgtgaatgtggaagatggtgatattgatgatcctaaccctgtgtaggcctaggccaatgtgtgtacatcttagtttttaacaaaaaagtttaaaaaaaaaaaaaaatttttttaaataaaaaaaagttcatagaataaggatataagggaggaaaatattttacccagctgtacagtgtgtttgtattttaaactaagtgttattacagagtcaaaaagttaaaagtaaaagaaatataaaagtttatagagtaaaattatatatattattatatataaaatatataatatgataatatataatgtattctcaatattatacatttctcatatttactagaattttttttctttccaacttgtattttaggctcaaggggtaaatgtgcagatttcttacatgagtaaattgcgtgtcacaggtgttgtacagataattttgtcacccaggtattccacgtaatacccaattatttactagaa

SEQ ID NO: 223899 - DNA, 318 bp, Homo sapiens
ctgttaagtttctgaggaaattttatttccaaagaaaatgtaagtctgggacaaagaatagtcaaggcataaaacaaccaccacccttgggctctcagctttccatgagaaggaagttgactccaaaatctacatatcccatagakagcttactccctatcacccacttcggatatcaccacagaggataatggcaatgaagagaattccgaaagagtggagccagggaccacagaaaaatgggcaaaataatttctgccatagaacagaaacagtccaagtaaatttcctaatgcttcttggtcaaggaaacttcac

SEQ ID NO: 223900 - DNA, 587 bp, Homo sapiens
aaattactcaaccagaaagaaccatatctataccagatggacatgcatcccagggcttttagctgaacacaacaactgggaataatctccaggggagtttggtgggggagtgtactctatttatgagaggaagaataaaataataatttattgaccaaaagggcaagctgtggtagagactggccatatgttttccaaaatcatttcttttccctcctaggcatttgaactacacttctcagcctctcctacaattaaggaccatgtgattgagttctggccaattagatgtgggaaaggttgatgtatgatacttccagacctggtcccaaaaacatcccacacaaacctctatgctctcttttgctcctcatctgytagctagatgtcaacacataaggtccctaaataactgcatggtgcagaaaccctcagctgaccacactgaacagtttgtgagcaactaataaatctcttactatactaatttaacatgaaaaattgtacaagagaaaatggccagctaaatacttatttaagtttccagacctataaatgtcttatttcagctattagatgattgcact

SEQ ID NO: 223901 - DNA, 554 bp, Homo sapiens
attttagaggtcctgttctagtttggggatttaagttatcactttttttcatttttattctaggccatggaagagccagcatgtggggaaacttctttattctgctatccaaatataaaatatatacagaagtagctcctttgtcccttaaccttagtaagcaaatttgattaagcatttgaacgctatagaggtgcaaggtgggagaaattctgcctctgctacttggcagctctatkatattgggcaagccattcataccacatttatattccttatatccaaaatggacataataataccttcttacttatctcactgggttattagaatgatcatagtgtttaggtggttggttgtttcaaggaggtaataatgtatgtgaaaataattggtatatggaaaagcattaaataatagtgctgaaacattatacatattaacatgcctttaaatctgtctccctaccattccatcatttattttgggggtcagttttactgagatataattaatgtattaatataagtgtacagcttaatgagttttgacaa

SEQ ID NO: 223902 - DNA, 401 bp, Homo sapiens
cacgacctggaaacatagaaatcagcccagccacacctctcccttaccctcccattgaccaagtcctatagattctaaaataattcttgaatccacccagtgctcttattccaactgctgtgtccttcactcagtcccttatcacttcttacctgtttttttccagtagtcttcttggtctccctgactagggatctccttccccaatctcctttctgaggctgctgctgaggatcctcccacaatgaaaatctagtagttcttatgctgcctaaaactcttcagtagtttccaatggccctcagttaaaagtccaaactcgttcctatgggatagaaagccatttgagatttggatccyattcaattgaaaccacctttgcaagaaatataacagtgaga

SEQ ID NO: 223903 - DNA, 604 bp, Homo sapiens
gttgctagagctaacctctttatggaggaatgyatgcttacttttaagatggcagtcagggggagagaggagcccatctagggaatttaattatatgtggaatgtttctaaaccacagccatggggtttagtcatggctggataatacctagtacttcaaaagctgcatttaaaatttgaaaatcacctattacactcatgttataaattgccaataaataatttcattaacaagcaattagatgtgtctgggaatggcaacacctgccagttggtggctgtgcattgccctcagctgtctgcctcagagttctgtgctcagtttcaagcaagagccactcctacaaactccagtttctcacttttaaaacatagtccaagctggccgtggtggctcatgcctgtaattccagcactttgggaggctgaggaggagaatctcttgagcccaggagttcaaggcccagcctgggcaacatggctaaaccccatctctaccaaaaaatgtaaaaattagccagaagtggtagagtgcacacttatagtcctagctactcaggatactgaggtgggaggatcacttgagcctgggaagttgaggctg

SEQ ID NO: 223904 - DNA, 604 bp, Homo sapiens
gttgctagagctaacctctttatggaggaatgtatgcttacttttaagatggcagtcagggggagagaggagcccatctagggaatttaattatatgtggaatgtttctaaaccacagccatggggtttagtcatggctggataatacctagtacttcaaaagctgcatttaaaatttgaaaatcacctattacactcatgttataaattgccaataaataatttcattaacaagcaattagatgtgtctgggaatggsaacacctgccagttggtggctgtgcattgccctcagctgtctgcctcagagttctgtgctcagtttcaagcaagagccactcctacaaactccagtttctcacttttaaaacatagtccaagctggccgtggtggctcatgcctgtaattccagcactttgggaggctgaggaggagaatctcttgagcccaggagttcaaggcccagcctgggcaacatggctaaaccccatctctaccaaaaaatgtaaaaattagccagaagtggtagagtgcacacttatagtcctagctactcaggatactgaggtgggaggatcacttgagcctgggaagttgaggctg

SEQ ID NO: 223905 - DNA, 618 bp, Homo sapiens
aaatatatcagcacagactatcaggccgaggatcactgtcttccaacacagtaaacatggacctggttcttgtgctccagagaaacaaatgaaagagcaggcctcaaggaattttgttcattgggatcagtgggatcacaagtrtagatctaaagaatggagttccttcagagctcacttcaggtggccaagatgaaaatatgtactttccttcataatatacttaagaagataaggtcagttttgtcattgatctggtcctattcaccttgtttttctctcttaaattatttctttaccattgtggagataatcaaccgcatggtgtcatcactcatttatctctaagcataacagacattttcaacccatttcaggtgtcctcaaattattcattttttatttaaatgaagaattgtccagagttagcatgtaaatattagctaagggcaggatgtgtgtgtgtcatggaggggaggacctctcctgtttaggaggaactgctggccctaatatgcatgtcacatacatatgaaccttgatcggctgtcatgcggaaggaattacacttccgctggcctcccctaccacaaccacaggtggaatctaagctaggca

SEQ ID NO: 223906 - DNA, 484 bp, Homo sapiens
ccaggtaaatccatcctacactttttattccagagacaagttggctaaactttgaggagactaaaacaaaacaaaaaaaaattattgtttggttcatttgataaatgtggattccaatcatataatttaggccaaatattatactttgacttcttagacttagatttccagatagtctggtttataaaataagattttaactatgcttactaaactctatgtatttctactttccaatgacccatgttcttattttctgaatttacttattgatgctttaggtatgataaaggtatgtaatggctraggaaacataaatgaagcataagacatcagttgagagttttgacggaaaggaagtggtgatatgaaggaaacagataaaccaaagaaaaaggaaaaggtcagggagctgataaaagtaacttgaagaaactttagtgcaaatgttggattcagacaatcgctacttttaaagtactta

SEQ ID NO: 223907 - DNA, 441 bp, Homo sapiens
tatttgttctgtggcctgatacaatgaaatgaatgttggattaggcattttgggacaagttttgaatcctaactctattactaattcctcttcactagactgagattctggtatgtggtattcaataagtgacttgacttctttaagcctggtttctttttcagtgagatttacagcttagactagtttctgaatcttgaccctgtggacaatctagttggagaactgagatgacctgggcattgtaggatgtttagcaacattcctgcctctgtaaactagacacagcagcacatttacccaacctgctctgactgtgacaaccagaaatgtctccaggcattgccaaatgtcaamtgagggcaaaattgcctaccctagccaccttaactgaaaactacaaacttcattgaaataatttctttatggctcccagcagta

SEQ ID NO: 223908 - DNA, 521 bp, Homo sapiens
acattaggcaaggagattaaattagtgtaggaaaaaaaatcagttttgtttaaaacgaaatatctacttgtgttaatagaacattctaactccaccataggatggaatcaagaggttttttttttaatacatatagtgtatatatataaatatatatatacacacacacacactgtatgtattcctatgtagattaaatattttgatttacctctttctagtaaagcaaagttcattctgaaatccaaaatattcacttactagagcagaaaaaaattagctgtgcatttatgctgatcacagtgtagataattaatctttaagaaagtaggtttttmtgtttatagttgataaagtgttagtggcaagaactttttctgttattgaatattatcatcagattactcgtgctttccattttattcctttaaaaaaatccaacttttgtaagccaccactattttctgaagattttatttctctctaagctaagaaaggatgtcaagaataaaccattttct

SEQ ID NO: 223909 - DNA, 635 bp, Homo sapiens
ttgagcttctttttcatggctgcagcatttgagaatttttcttttcttgaaaatatttcctcttatactctgtgaccccaccatttcctactttcctcccacctttgtatcacttctcagttttcttatctagttcctcttccatctctttcctcttaagctcagacattcccccaaggttctgttctcatttatttcctctacctttcactctgtctttgagtcactcattctcttccatagcttcaattatcagagaagttgctgactttctgagtcatagactttaagtagctgaccaaagcaatgaaactcctccttcaaatattgacataataataaaccattttataacatgtgctcgtaacatttattgagcacttactatttgatctattaaatcctcacaacaactccatgaagytggataagaaaacttgccaaagagccacactttccaacttaatatagctgggattcaatccccagcagttgactataaataacctagggcactcaaattctgcatatattagaagaattgtggcaccttgaatttatttgcaggaactcctaagctatcaccactaggatggtagctacaaaatctttctgtctagctacagcctgaattc

SEQ ID NO: 223910 - DNA, 620 bp, Homo sapiens
atcacttgcgttcacatttcattgggccaagcaagcgtgatggtggaactattcaggcttgaatagagaacaacaaagccacatcgttaaaccagatggtggtggtcaaagttcatggttgggttatcaagccatggttagaaacacagctgccgatatctggggctgtaacaactgcaggtctaatgatccaaggccaggaacaaagattaagggagcactctagggatgggagaacccatggtgagacttagctgcattgtaacagaacagacttagagaggcagatagcagagcctccctacagtatctagaatgtgcatctagaagctttcyatgctcacttcctgtttcccctggtatttattcaaatgtcaattacaaagaacacaaaatgtctagtactttatagcctccttatgtttaggtttcactcctgacctcaaagaccttaaaactaagtagattctgaatttttcaaattatttcagggtattgcaacaatggacattttatttgattgtatacttatttttctactggaaactgtacttgaaaacagttaactaaacatctatttaccctctcacagtaaaatttctatggctattgttctggag

SEQ ID NO: 223911 - DNA, 643 bp, Homo sapiens
attgcctagcacaatggataaaaaaaaaagattcttagcaaggcatgtaattatgaaattttagaacaccctgacaaaaaacagattctttccagctggatgaaacagaatacagttccagaaactagaagaaaatcatgtgatgtctctaaacttctgaaggaaggtaatttgtaatctagatttctatgtccatttacagtctaggtttctatacccagacaaattgtcaattataagagcagcaaaaatatttccagacatgcaaggtcttaacgttacttcctaagaatgctttctcaggaagttattggagaatgtgctcttccaaaacaggggattaagccaagaaagaggaaggcataaggtccaggcagtaggtgatgccacatgggagaaaggcaaaaggaaatcctaggatgagggagcagtttagagccaagaagatggtcctggggccgatctagagataaatcagtccaaattggagtagaattgtggggaactccaggagagacatctccaagtaacaaaaaggttatagatcatctaasgtgtttaactgaattgaaaggaaatttactatgtagtggggagtttggggagggttaatgacaggaaaagagaaaactaaacaaatgaa

SEQ ID NO: 223912 - DNA, 627 bp, Homo sapiens
gctaggctggaagtcaggggctgactgtgaggggctttgtgggtggggatgcttggcagaggggagggatcatgagtgctgagtggggggcggggaggggctgggaagggatttggtgaaaggcttatggggtcctgggctggagatggggttcttcaaacatgctgaggggtgatggtggggtttcctggacctcccaccccaagacaactgaggaggcttcagtgcctccctcttctatcttgtgtgtcacactctgtggcttgccaaccaagactgtcagcggattgcrtaggtgtttcctctctcagaagtcagtggagtcccccatttcttcaaagaaagcatgagtgcctgccttagggatctggagctctgagttaagtctccttcagttcttcaccagccctgcggcttgggcaagccacttcacctctcccagtcttgttttcgtcatctatgaaacagcagcactgtggggtcagattgactgctgtgtgaatcacagctcagcctctgttagcctctgttagctctgtgtcttcagacaaattaacctctttggtttgcttgcagagtttttgtctagagttttcaatcactcacttccagatgagtattgcactt

SEQ ID NO: 223913 - DNA, 627 bp, Homo sapiens
gctaggctggaagtcaggggctgactgtgaggggctttgtgggtggggatgcttggcagaggggagggatcatgagtgctgagtggggggcggggaggggctgggaagggatttggtgaaaggcttatggggtcctgggctggagatggggttcttcaaacatgctgaggggtgatggtggggtttcctggacctcccaccccaagacaactgaggaggcttcagtgcctccctcttctatcttgtgtgtcacactctgtggcttgccaaccaagactgtcagcggattgcgtargtgtttcctctctcagaagtcagtggagtcccccatttcttcaaagaaagcatgagtgcctgccttagggatctggagctctgagttaagtctccttcagttcttcaccagccctgcggcttgggcaagccacttcacctctcccagtcttgttttcgtcatctatgaaacagcagcactgtggggtcagattgactgctgtgtgaatcacagctcagcctctgttagcctctgttagctctgtgtcttcagacaaattaacctctttggtttgcttgcagagtttttgtctagagttttcaatcactcacttccagatgagtattgcactt

SEQ ID NO: 223914 - DNA, 406 bp, Homo sapiens
ggctgccgtgccaacagctgctccagcaggcccaggctgccattcctcgaagcacctccttcgaccggaagctgcccgatggcacgaggtaatgctggttccgtttcctcaagggsggcccttgtaaatcactggggtgagaacttgacattgtagggagggttttgcttaatcacttctgagttagcttgttcacagcaagttggcaagcagggtagcaaggcaggccccagacacagtggtgcctggggtcgggcactctcctggccccaagatggtgctggtaaaatgcaggttctgcccaccagggtcacagcttttcctcttcatccagtatccttcctccatgtccactggctctcttccccaagatgggaaaggcaccccagaaactattctgctggag

SEQ ID NO: 223915 - DNA, 418 bp, Homo sapiens
catgccagaacaattcccataagtgaataagcaaaagagtaggcaactgccactgtgaaagatgctacaaataataacccagaaaccccagaatacagctggagacatgtcagaaaccctaacaaattaaatgtatggctgtggccatttgggatttgccaggtttccaaaaaggataggaagtcaaggttcaagtatctacttaaaaatagaactgtggaaatacttcatcttacacacttcatatagtaattagggtwatcttctaagtcggaaagaaaaaaaggctacaaacctttaagtttttctctgtagtaataccttttatttctttatctgaattttatatatttcttgtaaatatgtaagactataaggaaaaaacaaatcaaattaaggtctggtaagggtaggattc

SEQ ID NO: 223916 - DNA, 563 bp, Homo sapiens
ccggaagaacacgagactgtgttaatgaaaacagcctctgtccagcttaaagaataaatcttcagaaaatgaggtacctgctattgttcactggtgttcattaaaaaacacccccttgatacggttcatctgaatcttcagtaagttttcaytggacctcaaattcccatgtaggcaaaaagtaagccagcttcagtgataccatatgttaggggacaagtaattagaaatcccatttttggaaaggtgagaaccaccggggatatagtggaagtctgtgccaccctgaaacaagaatatgtgaaggaaggaacattcctcagttacaatgcaagaagtatctttagaaacggaatgtatagctcagaatcctataaccttacataagacatggcacacagaggccgagactgtaaaatacagcttcaagaatcattcagccgagataacagtggtgcttcaaggaggcctggtggtggagggtgctgggacaggatgggggacggggcatctgtaacttgaggtcccagcagacagctattctcccagcaaagcatgtagtg

SEQ ID NO: 223917 - DNA, 549 bp, Homo sapiens
catcaggtgcccccgagtcctgagtctacttgggaatattgtgatggtccctgttgacataaacatccttgtgcctttgtcttaaagcaggagaagaaagcagtctgcactattattcatgacgtggcatcccaagccgtaagactaaagaatggctttggcaacaggacttaaaactgatcttggcacaacctttcattaacctgcaaaagattaattttatttcccagtaacttaacagaattcaaaagctaggagaaaaggcttaaaggaaagtcaaccttagatatgtttctaaatatatcttaactcagaaatattccccctcagtccyagcatagaattataatagctcttcatcttcaaaaagtgtgcatgaagggttccagctcttagtggtccataaacaaatggttgcaggagtcaagaactcagggtcggagaggctcctggatctagaaacatcactgccagtcactcaggggcagggacaaaccccagagagggtctaccttagcaacaggacacatcctgtgtgcccatctcaac

SEQ ID NO: 223918 - DNA, 483 bp, Homo sapiens
acatcaaaaacctgaataaaaacaacattaatctgcatgccaggatttccttaagaagagattcactgtttgtaccgcggctttttcttcttctccaatattatctactcatgagcaaatacatctcttaactaacaagttccaaggtaagcatttgaaataaattgaaaaagaagaaaaagtcttttttctttgttggcatgctgttaccttgaaatcccctgacattcttcatcccgtttagagactgcgcacagacctaatacattgtttgacaaaatggactgtttttcacacagtctccaagactgccacactgagcttttccatttccaatttaaaatactgccataagcagtatcggctatgaccactcacgtttcaatacaaaattttctttcctaattgatcttggtgattgaaatggtgcaaygaggagtattgattaaataactgctttcacttcaacatccgaattgtcat

SEQ ID NO: 223919 - DNA, 597 bp, Homo sapiens
agccaaaaatcataggagaaatgattaacattattaatcagggaaatgcaaattaaaaccactatgagataccccaggcagaatggccattattaaaaagtcaaaaaacaaaagctactgatgtggatgtagtgaaaagggtatgcttatacactgctagtgggaatgcaaagtagtacaatctctatggaaaacrtggagatttctcaaagacctaaaagtagatctaccatttgatccagtaatcccacttctgggtatccacccaaaggaaaaagagtcatcataccaaaaaggcacatatatgtttattgcagcacaattcacaattgcaaagatatggaatcaacctacgttcccattaaccaatgagtggataaagaaaatgtagcacatacataccatagaatgctactcaaccaaaagaaagaatgaaatagcatcttttgcagcaacttggatagaaccagattccattatcctaagtgaaataactcaggaatgaaaaacaaaaaccgcatgttctcacttgtaagtgggaggtacgctatgggtacacaaaggcagagtggtataatggacactggagactcagaa

SEQ ID NO: 223920 - DNA, 577 bp, Homo sapiens
gccattattaaaaagtcaaaaaacaaaagctactgatgtggatgtagtgaaaagggtatgcttatacactgctagtgggaatgcaaagtagtacaatctctatggaaaacgtggagatttctcaaagacctaaaagtagatctaccatttgatccagtaatcccacttctgggtatccacccaaaggaaaaagagtcatcataccaaaaaggcacatatatgtttattgcagcacaattcacaattgcaaagatatggaatcaacctaygttcccattaaccaatgagtggataaagaaaatgtagcacatacataccatagaatgctactcaaccaaaagaaagaatgaaatagcatcttttgcagcaacttggatagaaccagattccattatcctaagtgaaataactcaggaatgaaaaacaaaaaccgcatgttctcacttgtaagtgggaggtacgctatgggtacacaaaggcagagtggtataatggacactggagactcagaaggggggatggtgagaaaggaagtgaggaataaaaaattgcctattgggtaaaatgtacactattc

SEQ ID NO: 223921 - DNA, 566 bp, Homo sapiens
aaatccttatgaataaagaagtttatccaagggcacagcagagcagcaaagcatgtcggccaggcagcagggttgggtggctccctgggaggctgggtagagcttgtctggcttcccccgcctcagtgcagtatgctccagaaaggagagggctggggtgtaaaggaaccgtaccatgtgcactccagtgccaacagaggggtgatccaggggagctggtggcagccggggagtggcctctgtgaggggaatggagcaggagaatggaggaagggggtctcttaggcacatgacgaagtggccatgcctccctccaggtgcttctgggagcaaagtgatctagtagaagggggcattcagatcccaaaggaaaacgcacctagaaatcccgaggaatgytttggaagggggatcatgagggggtaaaatagaatttttgctgggaaaagaagcaggaggagggagaattacaaggtcaccgtatatgtgaattgtgtgtattttcttacaaatgaaacttgctggaaactaaaagctttgtataacgcgtgctgctatgagcctgg

SEQ ID NO: 223922 - DNA, 595 bp, Homo sapiens
gtaaatatgtaatacacgtgtcatattttggctgtaattatattaattctttttttttcttgactggacatttctcatacaactgggtttcttgagtttctcgattagagaaaacagtttcatttgaattccaccaaaatgggattttcaaaaactataaactcagaaactayaaagatgttacactgattagagaatgaaaaacaagatttgtttattcgaaagcaaacatttactgagcacttaaaataagccagaactgttataggcatgtggagacagaagcgaataaaacagacacaaatttctgtcttcataaaggaagagaaaaatcatatcctctcctttgctgtaatccaagctagaacttatggcacctgccaaccccaggggctgcatggggcttcaaggaaggtctcccccagcaagcccgaggaacagcctcagtttccctctcttggcctgcatggagttcccaactcacttcactttggactgagagaagttaactttttgctttccaaactggtctatcgtttttggacacaatataaaatgtaattttgtggtttatagttactcgaacagttgctct

SEQ ID NO: 223923 - DNA, 595 bp, Homo sapiens
gtaaatatgtaatacacgtgtcatattttggctgtaattatattaattctttttttttcttgactggacatttctcatacaactgggtttcttgagtttctcgattagagaaaacagtttcatttgaattccaccaaaatgggattttcaaaaactataaactcagaaactataaagatgttacactgattagagaatgaaaaacaagatttgtttattcgaaagcaaacatttactgagcacttaaaataagccagaactgttataggcatgtggagacagaagcgaataaaacagacacaaatttctgtcttcatraaggaagagaaaaatcatatcctctcctttgctgtaatccaagctagaacttatggcacctgccaaccccaggggctgcatggggcttcaaggaaggtctcccccagcaagcccgaggaacagcctcagtttccctctcttggcctgcatggagttcccaactcacttcactttggactgagagaagttaactttttgctttccaaactggtctatcgtttttggacacaatataaaatgtaattttgtggtttatagttactcgaacagttgctct

SEQ ID NO: 223924 - DNA, 598 bp, Homo sapiens
agggagggggcaagagagtgggacccaggggcatccctgcagcaccctatatagtccagcaactgtgggcccaatgcaacaacggacaccacagtggatgctgtacagacaagtgacagagaatcagtgggctccctgaagccatgggatattataaccccttctctctttctcatagaagcacttgagtaacctatttgccttccccaggtagacagaacaaacatcaggccagaagaggaaaacctggcctccggaagccactggatctcactttccattttcctcctgagccttttctaacccttgtattagtctgttttcacgctgctgataaagacatacctgagactgggtaatttataaagaaaaagaggtttaatggactcacagttccaaggggctggggaagcctcacaatcatggcagaaggcaaaaggcacgtcttacatggtagcaggcaagagagagcacgtgcaggggacctcccctttataaaaccatcacatctcctgacacttattcactatcccaagracagcatgggaaacccccacaccatgattcaattacctctcaccaggtctctcccacaaca

SEQ ID NO: 223925 - DNA, 548 bp, Homo sapiens
tgggctggtgaagtttgcagtggccactaawgacctctcaggccagcccaagcctgctgtgcctgtttctgtgttctctttggcaattgcattctctcttttggacccagcttcttcctacatgctgtggtcatcagagaggtgttttttaaactaatctcaacagctaaatacaaactcagaaagactctgttggacaaaaaaaaaaaaaagggcaggaagtgggggatgaggtttacattttaacataaaaagctcctgcttgaaattagaggcgaactttccccttttagtctaaaatatgtatacctatccattcctcatacaacgagtgacaatgagcgtctctccagcctcccatcccatacatactcttgccgtagtcaccaatgacaaatatatttggtcaattttgtgcctgtgattaaagcaaacctctatagagcaggccctcaggccaaccccgagactcccctgaccacctctagtcattttgtttcctaacctgcccctcccagtgtcctgaggcccaacctgttgccaaccat

SEQ ID NO: 223926 - DNA, 521 bp, Homo sapiens
ctagtgtttctcaaccttgacaatactaaaatttgaggctagataattccttgttaattcttctcctgtgcattgtagggtgtttaacagcatctctggcctacccatgagatgccagtagcacccccttccagttgtgacattcaaaaatcttgccaaatgtctcccagggctaaaaggcccccagttgaaaagtactgttcttagatgctttatagcttaatctttgaatataatgtctgtaatccgagttagtagttgcttcatattgttccatatatctaatttctctacatttattgaaaagatcatttccctcatgaactgcatgtatcacctttgtcttacattaagtaatcatattatatatggattctgctcaatttacctaacttcaatcgtcatgccagtaaaacacttgagtagttttttggtaggtcttgaaatctgttcttgtaaatcttcraattttgtcatcataattggcttggctattctcggtcctttgcatttccttctat

SEQ ID NO: 223927 - DNA, 627 bp, Homo sapiens
aaggatttcgttttctatctgaaacataagcaatctacctaaagacaagctgccatgcctctctgcaagcatgctgctaggggccaggggaaagaccctagaggtgttgcgataaaaaggtacctcagaagggtgtatgaaccctttaaattagtcctagatggcccttgctaaattgcatctagcaacgggtaggggccactctctgttgcctccctaacacaagcaggtgaagctgtgggaccaggtcctcctcaaacaagggagataaagggagtcccaggaattggggacccggcctaagaaggtgacaactaagaggttgaccttttcctgaccccctcacggtaatgctaaaaggagggcataggtcggagaggagaaytggaaggcccactagagtcgaagaggtccatcctcctcccctcaatccccagaatcacccagggctcctaaatggcaatgatgatctgaatcaccaaagccaggaaaaggaaccctggaacccatcagccctgctgctccatttgggacactggccctggacccagcaacccatgtcttgggaatagtctgccctccagtggtttacatttgcagaggtcaacagagtgcttcttaagaatt

SEQ ID NO: 223928 - DNA, 304 bp, Homo sapiens
tatcattttcattgcaccatctcccttcccaccttcaactttcaccacatcctcagacttgccttgggcagtggataattcggtttgccttgcagtggttgtccragagtggccagccttgaaaactgctaaatacttttagatgttaagtatctgtgaaccacatttctcagttttcattcatttttgctgtccagcatcctgcccttccgctgtataactggttcatggagcagtgtggttctgtggggctacagatgcgaaggactttcttttctcccttatgatgacccccagtagcagg

SEQ ID NO: 223929 - DNA, 516 bp, Homo sapiens
gaatctgttccaagtttctggaagttattggatccttagttttaaatctttttcatatgcaagcagtttattctcattaagagaaatcctatcttctgcttgtttaactctgtcagttaaatccgttaagtttatttgtgtttgcccagtggtaatttttattgagggaacatctgaaaccatctgcagggaggaagttgaagaagctcttggagtgccccagctctgttactgattttcctgacatctttaccacccagaacggctccttccatccacgggaggctgaccacagggttgctcatctctgagtccttttgagttttgaatttggaataataggaacrgccttaacttttgagatttcatattgtgtgctttttttgttgcaaggggtttcagagagagacagagccctaaagagctaggattaatgatttccagtgcaacattactagggagcacaggcagaagggacagagtccctgtttcctgctttcagatgaagggaaagga

SEQ ID NO: 223930 - DNA, 424 bp, Homo sapiens
taaagtgggcatgattatgcccattttacagatgaagaaactgaagctaagaccaatggaataacttgcaaaagctcacagggctggcagagccaggattcaaatccaagcttgatgggctccaaattagtcyaagctgttcaataactcagctccaagatttggacctttgttttcggttttcctgtaacaaagatccccaagtgatggatttctattcttctcactggttggacaggggatgccatgtttggcagctgggcttagggacacagacagctaatacttcacagctattgtttcacttaatccctccaagggctctgtggggtagaaactattattaacactagttgacaggtgagaaaactgcagcatagagatgttaaataatttgcccagactcttgctgctgttaagtggt

SEQ ID NO: 223931 - DNA, 611 bp, Homo sapiens
tgaatacatttatgtgttttccctatcaaatgaaaatataaccatatattgtrtatatatatatatccttaaaaattggtttttcttacttgaatgttaatttttaaaaatttataatggcattgattaatgttgatgtgatttattgaatctaattcatgtaaaaatgatatattgtgaactgtgatactttcattatcacatcctgtgacatacatggtagttatatgttgaatgttgttgactgacttttattgactaggttactaaattttatctgaatttcatcttaactttgtggcctttatatctcctaagacatctttatatacactttgaaagattaaagaatgtggaaaatatagttgaataaaataactatgatggtgggataattttactaatgcaaataaaatttattcgaagttaatctagaaaaaagttagtgtttatctagggtctattccagtcttccagaagagttctttgtctggttaacacaactgctgtcccactgcctactagggttaattaggttgaccagcctggctagtgagtatctgcttcttccatttctgcttgtggtttctcctttactcattgtgtatttg

SEQ ID NO: 223932 - DNA, 476 bp, Homo sapiens
tgccatggaaggatgcatatggttgaccctttgggaatttcctaggagccaaatgtctctttaccacaattgttcttagaagaaaagcttttcggtaatgcaaaaaggatctaatatgtcagcagattctcttttacaagtcctttgaaatayaagaagtttgtctaagggttttctctctttgcaagttgttttcagccaaatgttagagcagggtaaaaaagtagttaactttaaaagcttagcaggtgtttttacttatttattgaactttgtagagagagggaaaatgttggtaatagttgcaattaatttttcagatgagggcaagagaaattttgaggtgcttgaaatttattaaatgtgctgtgttttctcagtcacttcacttaattattttggctttttttgttaatgttaaaaactagagcgtctctaatgaaaagggctagtttttaaaagatcgttgtaaaagt

SEQ ID NO: 223933 - DNA, 469 bp, Homo sapiens
gaaggatgcatatggttgaccctttgggaatttcctaggagccaaatgtctctttaccacaattgttcttagaagaaaagcttttcggtaatgcaaaaaggatctaatatgtcagcagattctcttttacaagtcctttgaaatataagaagtttgtctaagggttttctctctttgcaagttgttttcagccaaatgttagagcagggtaaaaaagtagttaactttaaaagcttagcaggtgtttttacttayttattgaactttgtagagagagggaaaatgttggtaatagttgcaattaatttttcagatgagggcaagagaaattttgaggtgcttgaaatttattaaatgtgctgtgttttctcagtcacttcacttaattattttggctttttttgttaatgttaaaaactagagcgtctctaatgaaaagggctagtttttaaaagatcgttgtaaaagt

SEQ ID NO: 223934 - DNA, 597 bp, Homo sapiens
aaattttgagatgtgttccatagctagcctgttgagatctttttatatcaaaagttaatatctgtgratttgtaatcattctttctacatatttaacaaagtcattagcaaaatattgaacaaaacctgttattcatatccttagatacagaacatcaatatcctgagatacagtacatcatcaaaatgtggtccccaaatgagcagcaatagcatcatgtgggagcttgttagaaatgcaaatcttgggccccacctgctgaattgggaactctggggatgaggcccagcaatttgcttgaatagaccctccagttgattctgttgcatgataaagtttgagaaccgctgtattacatggacctctcctttgtatctatttaggtcaattattcagaaccttatgggtaccttaagatttctcagccagttgctaatcctctgattgaatctaactcacagtttggcatcttgctccatgttatgagcagcttctgtcagaagccttgctagcatgaagagttaataacagcaattgaattttccttatctaccagtctaattaccctttcaaataagaaaatgacattactcgga

SEQ ID NO: 223935 - DNA, 597 bp, Homo sapiens
aaattttgagatgtgttccatagctagcctgttgagatctttttatatcaaaagttaatatctgtggatttgtaatcattctttctacatatttaacaaagtcattagcaaaatattgaacaaaacctgttattcatatccttagatacagaacatcaatatcctgagatacagtacatcatcaaaatgtggtccccaaatgagcagcaatagcatcatgtgggagcttgttagaaatgcaaatcttgggccccacctgctgaattgggaactctggggatgaggcccagcaatttgcttgaatagaccctccagttgattctgttgcatgataaagtttgagaaccgctrtattacatggacctctcctttgtatctatttaggtcaattattcagaaccttatgggtaccttaagatttctcagccagttgctaatcctctgattgaatctaactcacagtttggcatcttgctccatgttatgagcagcttctgtcagaagccttgctagcatgaagagttaataacagcaattgaattttccttatctaccagtctaattaccctttcaaataagaaaatgacattactcgga

SEQ ID NO: 223936 - DNA, 368 bp, Homo sapiens
ggtaattataatagctaacatctattgaacattgccaatgttttaaacacttaaatgcattatttaatcttaacaagaagcaaagaaggtaccattgttatacccatttgcagctgaggaaattgaggtagggatagatagattaggtcatttgccccctgcactcagtaattggtagaggtagatgtggatgcaggccagttgactccagagcctacacttttaatcactgtgctttgccttttaacctggagtatcagataatgaaagctgcagtgtcaaaagattattaaattttaacctaaaaaaagagagggtttaaagaatgtgatcrgaattgcactcaggaagggagggtcctgtatgtc

SEQ ID NO: 223937 - DNA, 522 bp, Homo sapiens
tcttcctctgaatcagacatgaggaactacagaatggagggcaaagtaacaggtgctaacaatagtctcaagggaaatctttctgatgataagacaaaagcactttggtattcaacataaaacccacaaagacagatacaatacattggtattggcctcatggcctcaattgataggtcaaagaaaatagttaatttctgcttatttgtttttggtttaaatragaaaaagatgggggaaagaaaaaacaacaaacgctttgggactataatgcaactaaggtgcattgggttctaaatcagtgttttagatacctattgctgcataacatcttaccatagacttagtggcttataacacccacatattgactcgtcctttttttagtccagaaatggcatgactggggtctatgctgaaggcctcccaaagccaaaatcaagatcttggcagggctcatagttcatcttgtctggagctcaaggtcctcttctaaggtcattcagattgctggcagaattc

SEQ ID NO: 223938 - DNA, 455 bp, Homo sapiens
gaattcgggtcaggaggtcaccagtaaccaggagttgacagtgatgcggactcagtgcccttgcccaggtattttgttgcttgctgggttcctgtttatgcaggagctgattgctggctgggagcacccctgcacgcccaagcaagagggatccagggtcagcagttagtggcaggagaaccccctgagggtgycttgtatgcagggagagtgcatttcctgtttggtttgggacgagcctggtccaggtgtaattagtaacagaggcttcctccttactcagcaatgactgctgtggtcgacaattaatatggtcaccctactcacgagtacttggttgcagagaagtatttgttatgtgtatgagtgaagatcctgaccaaagatttgaccacacaaggttctgtggtgagtccatggtttacctgtctcatgggcggagcttggctgcctct

SEQ ID NO: 223939 - DNA, 442 bp, Homo sapiens
gaattcgggtcaggaggtcaccagtaaccaggagttgacagtgatgcggactcagtgcccttgcccaggtattttgttgcttgctgggttcctgtttatgcaggagctgattgctggctgggagcacccctgcacgcccaagcaagagggatccagggtcagcagttagtggcaggagaaccccctgagggtgccttgtatgcagggagagtgcatttcctgtttggtttgggacgagcctggtccaggtgtaattagtaacagaggcttcctccttactcagcaatgactgctgtggtcgacarttaatatggtcaccctactcacgagtacttggttgcagagaagtatttgttatgtgtatgagtgaagatcctgaccaaagatttgaccacacaaggttctgtggtgagtccatggtttacctgtctcatgggcggag

SEQ ID NO: 223940 - DNA, 455 bp, Homo sapiens
aaccaggagttgacagtgatgcggactcagtgcccttgcccaggtattttgttgcttgctgggttcctgtttatgcaggagctgattgctggctgggagcacccctgcacgcccaagcaagagggatccagggtcagcagttagtggcaggagaaccccctgagggtgccttgtatgcagggagagtgcatttcctgtttggtttgggacgagcctggtccaggtgtaattagtaacagaggcttcctccttactcagcaatgactgctgtggtcgacaattaatatggtcaccctactcrcgagtacttggttgcagagaagtatttgttatgtgtatgagtgaagatcctgaccaaagatttgaccacacaaggttctgtggtgagtccatggtttacctgtctcatgggcggagcttggctgcctctctttgtgtacttgttatttgaattc

SEQ ID NO: 223941 - DNA, 513 bp, Homo sapiens
gaattctactaattggtatgggtgtttccaaatgatgcttagctggccgacccttctttggagaagcttacatttaaaaaaattaattttcacaattggtatgtcaaattggtaattatttcagaarcaaattaagataacatcttagaaaatcaatttatggacttgagccgagtgcttcatacaacgaatgggttttttctaggtgtttgtcaccgggaattttcctgagaggcttgtatatattaatagaaaaggagtgtagcttttttttctcttcgttataatttaggtaaagtcttacaatgtgtgaacaaggctgtcatttttagcttgcgtttgaacgaaaacatgctatactttttggagaccctgattgagtaatcagtacttggggtagtgataaaccacaggtgagctaacttgcggcattctttagattaaaatttgatcgtcattgtttgttcccaacaatgatttgccaggaatggtatgcatacttctcttctgccc

SEQ ID NO: 223942 - DNA, 524 bp, Homo sapiens
aaactgactttcaaaatagagtcctaaatgattcgccagttagattctaaactccctgagcttgaggaagcctcttccagttcccaacrgggccaagagcagtgttcagcatttaatgtacactttggctctagggccatattttattttgctttatatctgccccaacatctaatactgtgattgatatatcaaacatctgtgtcttactttgtagcactcaggccacaattggaacagaacattctcagaagcaccaaccgccccagacagctggtggagataactctgttggcaacgcagtactttttcctccctctgcaatgggatgccttcacctccagacatccatgggagacagctgggaataaccccaaagcacttaagataatgaatgacgtttaggaacaaagcaccagtcttccatcagcccttatcaaaaggtattccatatttcaagggactaaaatttgtcttttcaaggaacttcttcaattttatttttgactgttgtgggtcagtaa

SEQ ID NO: 223943 - DNA, 471 bp, Homo sapiens
gaattcagtggagagattagggctagaaatgttttaaaaagtgagagccattgcactgcagatggtggggcaggctgggttctggaggatgataaaccctccaagggaaggggaagtggccaggagccttccaagaggcagaggcgtggtgtaatgtgatggtaggtgyttcagaggggatgaccgcttcagggaggaggagagaatgggggtgtgggattggtcaggaggagcacaaggcacctaccccatcttctggttctgtggttcctgcgcagaagaaaaaaatacttgaggggggctgcaagggaagtgtggtccttggggacaatcagaatttggctggcatgaaaagataaaggttcagcgttaggttaatttttgctgatgagaaattatgactcttggagagccccatggagggatttgggggcctgggatggcaaaggttcaggtcagctgggtcaggtt

SEQ ID NO: 223944 - DNA, 487 bp, Homo sapiens
atgttttaaaaagtgagagccattgcactgcagatggtggggcaggctgggttctggaggatgataaaccctccaagggaaggggaagtggccaggagccttccaagaggcagaggcgtggtgtaatgtgatggtaggtgtttcagaggggatgaccgcttcagggaggaggagrgaatgggggtgtgggattggtcaggaggagcacaaggcacctaccccatcttctggttctgtggttcctgcgcagaagaaaaaaatacttgaggggggctgcaagggaagtgtggtccttggggacaatcagaatttggctggcatgaaaagataaaggttcagcgttaggttaatttttgctgatgagaaattatgactcttggagagccccatggagggatttgggggcctgggatggcaaaggttcaggtcagctgggtcaggttaggcaatctttggaggggaatggagcgagctggtggctagaatt

SEQ ID NO: 223945 - DNA, 466 bp, Homo sapiens
ttttaaaaagtgagagccattgcactgcagatggtggggcaggctgggttctggaggatgataaaccctccaagggaaggggaagtggccaggagccttccaagaggcagaggcgtggtgtaatgtgatggtaggtgtttcagaggggatgaccgcttcagggaggaggagagaatgggggtgtgggattggtcaggaggagcacaaggcacctaccccatcttctggttctgtggttcctgcgcagaagaaaaaaatacttgaggggggctgcaagggaagtgtggtccttggggacaatcagaatttggctggcatgaaaagataaaggttcagcgttaggttaatttttgctgatgagaaattatgactcttggagagccccatggagggatttgggggcctgggatggcaaaggttcaggtcarctgggtcaggttaggcaatctttggaggggaatggagc

SEQ ID NO: 223946 - DNA, 559 bp, Homo sapiens
ggcattctggtttttggaattttcagcatttatgtgctggtttttcctcaccttcgtggatttatctacctttgatctttgaggctgatgacccttggatgggatttttgtgtgtgggccttttgtttatgttgttgctttctgttagtgtttcttctaaaagtcaggcccctcttctgcaagttgctgcattttgctggcggtctactccagaccctcttyacctgggtatctccagtggtggctacagaacagccaagatagctgcctgctccttcctctggaggcttagtcccagaggggcaccggcctgatgccagccggagctctcctgtatgaggtgtctgttgacccctgttgggaggtctttcccagtcagcaggcataggggtcagggacccacttgaggaggcagtctgtccattagccgaacttgagggctgtgctgggagatctgctgttctcttcagagccagcaggcaggaatgtttaggtctgctgaagctgtgcccatagctgccccttccctcaggtgttctgtcccagggagatgggagtt

SEQ ID NO: 223947 - DNA, 559 bp, Homo sapiens
ggcattctggtttttggaattttcagcatttatgtgctggtttttcctcaccttcgtggatttatctacctttgatctttgaggctgatgacccttggatgggatttttgtgtgtgggccttttgtttatgttgttgctttctgttagtgtttcttctaaaagtcaggcccctcttctgcaagttgctgcattttgctggcggtctactccagaccctcttcacctgggtatctccagtggtggctacagaacagccaagatagctgcctgctccttcctctggargcttagtcccagaggggcaccggcctgatgccagccggagctctcctgtatgaggtgtctgttgacccctgttgggaggtctttcccagtcagcaggcataggggtcagggacccacttgaggaggcagtctgtccattagccgaacttgagggctgtgctgggagatctgctgttctcttcagagccagcaggcaggaatgtttaggtctgctgaagctgtgcccatagctgccccttccctcaggtgttctgtcccagggagatgggagtt

SEQ ID NO: 223948 - DNA, 559 bp, Homo sapiens
ggcattctggtttttggaattttcagcatttatgtgctggtttttcctcaccttcgtggatttatctacctttgatctttgaggctgatgacccttggatgggatttttgtgtgtgggccttttgtttatgttgttgctttctgttagtgtttcttctaaaagtcaggcccctcttctgcaagttgctgcattttgctggcggtctactccagaccctcttcacctgggtatctccagtggtggctacagaacagccaagatagctgcctgctccttcctctggaggcttagtcccagaggggcaccggcctgatgccagccggagctctcctgtatgaggtgtctgttgacccctgttgggaggtctytcccagtcagcaggcataggggtcagggacccacttgaggaggcagtctgtccattagccgaacttgagggctgtgctgggagatctgctgttctcttcagagccagcaggcaggaatgtttaggtctgctgaagctgtgcccatagctgccccttccctcaggtgttctgtcccagggagatgggagtt

SEQ ID NO: 223949 - DNA, 559 bp, Homo sapiens
ggcattctggtttttggaattttcagcatttatgtgctggtttttcctcaccttcgtggatttatctacctttgatctttgaggctgatgacccttggatgggatttttgtgtgtgggccttttgtttatgttgttgctttctgttagtgtttcttctaaaagtcaggcccctcttctgcaagttgctgcattttgctggcggtctactccagaccctcttcacctgggtatctccagtggtggctacagaacagccaagatagctgcctgctccttcctctggaggcttagtcccagaggggcaccggcctgatgccagccggagctctcctgtatgaggtgtctgttgacccctgttgggaggtctttcccagtcagcaggcataggggtcagggacccacttgaggaggcagtctgtccattagccgaacttgagggytgtgctgggagatctgctgttctcttcagagccagcaggcaggaatgtttaggtctgctgaagctgtgcccatagctgccccttccctcaggtgttctgtcccagggagatgggagtt

SEQ ID NO: 223950 - DNA, 647 bp, Homo sapiens
tggcctcccaaagtgctaaggttacaggtgtgagcctccacaccctgcctggattttgaagccacagtttctttgtttatacagtcgggataataataacacctaatatggattctaaagattaaataggaaattgcatgtcaagtgcttagcacagtgtctgtcacacactagatactcaatgtgtggtggtggccatagcatcgctattatcaagataacatccatggtataaaaataacgtaacaactaagtcacttggagaaattgtagtcatatggtatgaacatgtctgctgttgcaacatcccaggaatcatcttcacaactggtgtttaaaacacatacacacattgttgcttttaggaccttagtcagcttgagctgtcataaaaaaccgtagactgggtagcttaaatgacagaaatctatttcttacagttctagaggttgaagtctgagatcaaggtgccagtatggtcaggttcttcctggtttgcagacagccagcttctcactgtagcctcaygtgtgttggcagggtcatggtgggtgggataggatcaaaagcactcttctgtcacttctaataagggcactgatcacataatgagggctctaagctcatgacctaattagctctcaaag

SEQ ID NO: 223951 - DNA, 565 bp, Homo sapiens
cactctaggttaaattagcaactgtaattttcccgggtcacttcattggtcttctgggctactttactatgactgccccttcaatttgccaactgtttataaagataccagctcagaataatgaaaatatggagtgaaggcaggctggccagaggctccatgaggcgatgcaggtgactctacgggagaggaattcactatctatttaattattattatttttttaaaagacaagttcgcccaggctggagtacagtggtgtgattatagctcactgcagcctcaaactcctaggctcaattagatcctcctgcctcagcgtcctgagtagctgggactacaggtatgcaccaycacattcagctaattttttaaaattttaattgttatttttttttagcaacaggatctctctaggttgcccaggctggtctcaaactcctggcctcaagtgatccccctgcaggtatgagccagtgtgcccagcctagcataggaattcaaaagacatggcagagtttctgccctttaggaagaatgacttctatgtttttaatatagcaat

SEQ ID NO: 223952 - DNA, 619 bp, Homo sapiens
tcagaattttccacaattaatgcacgttataaatctgtagatacagttgggcacagcagctcatatatgtaatcccagcaatttgggaggctgaggcaggaggactgcttgagcccaggactttgagaccagcctaggcaacagaattcgtstctaacaaataaaaaaataacaaaagttagctgggcgtggtggtgtgcacctgtagtcccagctacttaggaggctgatgaaggaagatcacttgtatccaggatttcaaggctgcagtgagctgtgattgtaccactgcactccagcctgggtgacagagtggatccatgtctgttaaacaaaaaacaaacaacaacaacaaaaaaaaaacaaaaaaaagcagaatactcaaagcaatatataagtaagaatactcaaagcatacctagatacgctgtagttaaactaaagaaggccaaatgcaaagagaagaaaggaatggtggccagagagaaaaggcaaacacaacagaggaatgatagtgacagctgacagctagcttctcaaacccactgaacaaaaacaggaatctaacgtcatatagcttctccagttcactttactcaagcatcttatgatactaagt

SEQ ID NO: 223953 - DNA, 619 bp, Homo sapiens
tcagaattttccacaattaatgcacgttataaatctgtagatacagttgggcacagcagctcatatatgtaatcccagcaatttgggaggctgaggcaggaggactgcttgagcccaggactttgagaccagcctaggcaacagaattcgtctctaacaaataaaaaaataacaaaagttagctgggcgtggtggtgtgcacctgtagtcccagctacttaggaggctgatgaaggaagatcacttgtatccaggatttcaaggctgcagtgagctgtgattgtaccactgcactccagcctgggtgacagagtggawccatgtctgttaaacaaaaaacaaacaacaacaacaaaaaaaaaacaaaaaaaagcagaatactcaaagcaatatataagtaagaatactcaaagcatacctagatacgctgtagttaaactaaagaaggccaaatgcaaagagaagaaaggaatggtggccagagagaaaaggcaaacacaacagaggaatgatagtgacagctgacagctagcttctcaaacccactgaacaaaaacaggaatctaacgtcatatagcttctccagttcactttactcaagcatcttatgatactaagt

SEQ ID NO: 223954 - DNA, 442 bp, Homo sapiens
gaattccatctttaagtcatttatctcatatctgactgtatgtgatttaaagtagccacacaaattcttcattattttgcatagacatttcttctgccaaatatcctagttcactgctcttatagtccacctccccataaagcctgaggcatggatataattcagataagttctttgaatctttataacaaggatggcctttcctctagtttccaaaccttgttcctcatttctgcctgacaccttatcagaatgtcctgtccatatctccaccaacattctagtcacaaccacttaaggaatctctgggaagkttcaggctttccccactccttttcttctgagccctcaccagaattgcccttcacaccccattcatagcaatccaggctttttctaacacatacctccaaatccttccagcctctacccatttcccagt

SEQ ID NO: 223955 - DNA, 494 bp, Homo sapiens
gaattccatctttaagtcatttatctcatatctgactgtatgtgatttaaagtagccacacaaattcttcattattttgcatagacatttcttctgccaaatatcctagttcactgctcttatagtccacctccccataaagcctgaggcatggatataattcagataagttctttgaatctttataacaaggatggcctttcctctagtttccaaaccttgttcctcatttctgcctgacaccttatcagaatgtcctgtccatatctccaccaacattctagtcacaaccacttaaggaatctctgggaagtttcaggctttccccactccttttcttctgagccctcaccagaattgcccttcacaccccattcatagcaatccaggctttttctaacacatacctccaaatccttccagcctstacccatttcccagtccaaagccacttccacattttcaggtatttgttatagcaacgatctgatttc

SEQ ID NO: 223956 - DNA, 621 bp, Homo sapiens
atatagtcaacagacagcccaaggtcaacacacacacacacacacacacacacacacacacacacacacacaaatcttaaaggctgctagagaaaaagttcagattatgtacaaagggaaccccataaggctaacagcagatgtctcagcagaaaycttacaagccaagagagactggcggcctactatcagcattcttaaggaaaagaaattccaaccaagaatttctttccccccgaactaagcttcataagtgatggagaaataacaactttttcagacaagcaagacttaagggaattcattgccactagaccagccttacaggagatccttaagggaactctgaacatggaaacaaaataatgatacctgctgccacaaaaataccttaagtacgtagcccacagaccctgtaaagcaaccacacaatagaaactacaaagcaaccatctaacaacttgatgataggatcaacacctcacatatcaatattatccttgaatgtaagtggtctaaacaccccacttaaaaggtacagagtggaaaattgaataaaaaagcaaaacccatcttcaagagacccatctcacatgtaacaacactgataggctcaaagta

SEQ ID NO: 223957 - DNA, 384 bp, Homo sapiens
gaattcgatcggatgaagccatcatccctgagcatatcctgggcagccggaggatgctctaatgtgacacacgttttgtacacgttactatcctgtatttgaatatcacaaatttcaaattctctaaaaaagtggatttttatttatgctagaaatttcagttaagcaagacatttaaccagaacaggtttgccaggcatttttttagcggcaacayttttatttaaatggctgttaagtgacggtcctttatacccagccactagcccacctagtcccttcgtgcaaatgcagcaaaggtatctggatctcagccgggcgcggtggctcaggcctgaatcccagcactttgggaggccaaggcaggtgcatcacctgaggtta

SEQ ID NO: 223958 - DNA, 565 bp, Homo sapiens
cctcagcttcctgagtagccgggactacmgacatgcaccgccacacccagctagtattgtttttatcttttgtagagacagggtctcactgtgttgcccaggttggtctagaattccttggctcaagggatcctactgccttggcctcccaaagtgctggaattacagatgtgagccactgcacctggccggtatattttttaaaatataaaaaaatcatatcacagtaataagtagatggccattaccttagctatgtatacacttttgataatgcatagagaggttgtttgttgctccttctctaaaatgtattcctctaatttgatcactgtcctacttcagtggagtaggagaacattaaaaaagcctgtggagatcggacctatccttggctactttttcttgctgggcattataagaagttctgctgcactctaaatctgctgctgtttcctgaggcacaatcctagaattgtgaaaattgttgatccaatttagatgagagagtcttataaaacagcagcacattttaagcccacattacacagcaaatccagcatag

SEQ ID NO: 223959 - DNA, 549 bp, Homo sapiens
cttgtgtgggaggcaggacctttatgatctatgagacttttactatgttgatattgctgtagatgttccaacagtgtctttcttggaatttatagacagaaaaacccatgaccttgcaatcttcaaaacaggaagaatagaaactgaaaaaatttttatgttttttttgttgtttgtttgtttttgtttgatttttttagcacatccaagattcttttatttggactgaaccctgacctatatattcaacaagaacagctaattagctagtttttctatctgtttacatgcatctaacactgatgaaattttggggaaggcattagcataaagtacagaaaaggaacattgtctctgctctttctacatcatcatgaccccaccccaaatccaagctccacatggcagccaaaggggcattttrcaaataccgtcttgacttgtgtaatgaactgagttgggtttccccaaatttacatgttgaggttatagtatctggtgtctatatttacagatagacctttaaaaaagtaatcaaagttaaatgaa

SEQ ID NO: 223960 - DNA, 549 bp, Homo sapiens
cttgtgtgggaggcaggacctttatgatctatgagacttttactatgttgatattgctgtagatgttccaacagtgtctttcttggaatttatagacagaaaaacccatgaccttgcaatcttcaaaacaggaagaatagaaactgaaaaaatttttatgttttttttgttgtttgtttgtttttgtttgatttttttagcacatccaagattcttttatttggactgaaccctgacctatatattcaacaagaacagctaattagctagtttttctatctgtttacatgcatctaacactgatgaaattttggggaaggcattagcataaagtacagaaaaggaacattgtctctgctctttctacatcatcatgaccccaccccaaatccaagctccacatggcagccaaaggggcattttacaaataccgtcttgacttgtgtaatgaactgagttgggtttccccaaatttacatgttgaggttatartatctggtgtctatatttacagatagacctttaaaaaagtaatcaaagttaaatgaa

SEQ ID NO: 223961 - DNA, 587 bp, Homo sapiens
caagtgtttgtataggaaatattatcttgccttcatggaggaagactcgaagttcatttccttcttcacttcactatgctgagcctaagctcagtttcaatatcaaacacggagagaatgatctgaatctaatagagtagagattggttacggagaagaattgaccaggcccctacaaataaacatggtttctcaaccagtatcttgctaacagctccttccccctattttattaaaatagcttgactaactggaatggttccagatttgttttcccattggcatccaatgcataatttcagtaatttgcagataaagattgtattaggtggtgttatatacttagcattgaatatatacttatttttccccaattgkgcgtaacagaaaaaggctacttcagttcacagaattcttagcacacagatggcttaccagttcattgaacagctctaatgaaaacaggcctctgtaagtttaaatgctaccatcagtctatcccatttggcttatcccgattgcctatgcatgtagaaccgtgtccctattttgctttaaactcaatttgattcaagagaagttgcttg

SEQ ID NO: 223962 - DNA, 606 bp, Homo sapiens
cactttaataagccataaaggtttagggtatatcttatgtaataattccactaatgaaaatcaaaagtgacatcagtggaatcaattgagtgagtggacacttagctggacaatttgtttcttttgtcacttagtcactgcagtcatttacaaaccatctaaccaggcctagagatttagttttcaaattagttattgatctaaactctaggaagcacagtttttttttttttccagattcagaggaatccacaaaagaaaagcttcagggttatgatgaacaaatgtctcatttttaaagaactttcttgtagttctgaatctstaccttaaagagataacacattggtattttctataaggagtgactcaagaaaacatgagggaggatcttaacctagtactctttgtttttttttttttttctttttgagacggagtttcgctcttgttgcccaggctggagggcaatggtgcaatcttggctcactgcaacctctgcctcccattaaccctagtactgtttatcatacacctctgcaatgactcaggtcacagtcacattctgatattataatttgaatggtttattcttatatgtattag

SEQ ID NO: 223963 - DNA, 619 bp, Homo sapiens
taagagtgacgcctccatgcggcatccttcctccagaagactggccagtcccatggtggcaggtcaattaatttggatcccttccactaagaagggagagaattccttcttacaggaatcaacacctactcaaaatatggggcttccttccctacccgctgtattttcaccatcactgcttaaggacttaaaaatacctaacttattgtcatggtagcccacacattattttggaacaagggattcttgtacagcaaaggagctacgaaaaagttgcatgataacagctgcattgttcttatcataaacccgatcacccagaagaagcagtagaatgcrttgttaaaggattagctaaaaaggtagtgagggatcaacatcccgtgacactgaggcactgcccaccaaaatacagtctgtttgctggaccaagagtgctcataataactggtatatataagcctggcaaccaaggagtagaaatagtgctggcttttctcaccttaccccaatgatctgcttgtggaatttgtgatttctgtccccctgactgtaggctttgccaagtcagtggtcatagatcctgagaaaaagaatgtttctcttagagatactaatg

SEQ ID NO: 223964 - DNA, 564 bp, Homo sapiens
tgtacacacatatgatatgtacacatatatctatatgtacacacatatctatatatacacacatctatatacacacatatatctataaatacacatatatctatatacacacacatatatctgtatacacacatatctagatgtacacacagatatctatatatacaaacatatatctatacacacatgtgtatatatttacacaagtgtatatatatacacacacgtgtatatatatacacacatatatgtctgtctttatatacagagagatttatctatacacacacacrcataatgcacattgcacgaaataaaaattgaatctgggtcacttgaaagtgaggttctgacacaaaacaaaattaaaggtatagaataggcatgtgatttaaatataaatgatatagggatgaaacaataaaaacactttttatgaagcatttgtagtatgatgactactgtagtggacatgtttatatattatttcattttacccttcctataaatatatatttataaatcatgatgataagacatgcctaaggccatggaactattcca

SEQ ID NO: 223965 - DNA, 574 bp, Homo sapiens
agggaagcttgccatagaataagataaaaataagaagtcagcatatccagaaaaaaatggcatttacctatcacgtgcaaaattgtcagaagagccaagatgagtcaaaaagaggcacaggctgggcgcggtggctcatgcctgtaatcccagcacttcgggaagccgaggtggaakgctagcttgagatcaagagttggagacaacctgggcaacataatgagacccttacgctacaaaaaaacaaacaaataaatagccagaagtggtggctctcacctctagtctcagctactaaagaggctgaggcaggaggattgcttgagcctaggagtttgaggttacagtgagctattatcatgccactgcacttcagcctgagtgatagaatgagattgtcaaaaaaaaaaaaaaaaggcactgatactgagataactgaatggcttaggtttgaaagtgtcttagatgcttgctgccttctggaacagcaacactcttaccatgcatcaactttttggtcttgatgtataactacagcaccttgactcaattaattagagaaatttgacaggta

SEQ ID NO: 223966 - DNA, 500 bp, Homo sapiens
tatatttgtaccacaaactatcaataataaacatgctctttgtgctacagtcgcacaatgcgatagaaaccatagactcttcagagctagccaaagagcctaccagttatcaatctctgccttataggagatcatcttcatgagtctgagccaccctgacctattcaaaattgggctgatttgggggtatgctattgtagcatacaaatgcactaagtcacagatactcaaggaaacaaggaggcctttttcctcttaaacacagagatgagcaactacagtctgtaataccagccatrgatgagggtgaaccagccttaccacactaaaagatcttggaactatcagcacatgttagtaagagggcaaaattattggtgcagaaatgatgaaggaaatagagtattgtttccattgcaactaataaggtggtatttttcttcattaaaaagccttgacttccttagcaatgaacttgtctcttaagctaaccctcacca

SEQ ID NO: 223967 - DNA, 418 bp, Homo sapiens
gcaatccaccgtgtggccttaaccacaatatatttatccattctcctatcatgaatattgagatgtttctaatttttcaccattacaaatcatgatgtgaaaaatactccttgatataactccttgcttacttttctgagctttttaggaataagagaattgcttggtggaaggaagttatacatcttctgttctagaaggtattaccatagtactcattaataagagctataccaatttaccctctccacagtaaagtgagttccagtttctctctattttcaaacatataaaaggacacatcagcatgatgtgatatattattgttttcattttttacatttcaagtgaaattgagcatatgtccattttttctatttgcattktatcttctgtgaattgtctattcataatctct

SEQ ID NO: 223968 - DNA, 524 bp, Homo sapiens
cccacctcagcctcccaaagtgctagggttacaggcgtgaaccagcgtactcagcctttataccgtttcaatggacctctgtttaactctgacttctttgatcataaccaaagggtcttagcaaggattctttkgccaaaaacaattcaggaggaaacatatatcccataagaatattagtgccatgaaatttgttcattatgttgaccattgtatttctgctgcttagagcaatatctattccacagcagatgctccatagaaagctattaaatcaataaaatgaaatctacatgattgacatgcacatgcattgcagaatctgggatacctcacagatgttgaaatgaagacatagaagtaggttgtgtggaagaataatatgaatatgaggaaacttatttcatttgccctttctttctttgttatcctggtgtgaggttgcctttgctttgttttgactttcatttctttatagatttcaagttaagaaactgagccttggctgccaaatgccactcttc

SEQ ID NO: 223969 - DNA, 286 bp, Homo sapiens
acccattcagtgttctccagtagtaaagagaccaggctgaaatcatccagacctctaagttcctgtcttccatgtggagagacatgtgtacacaggagtaatatttttcttcagatgtaactyactttacatacctgtattagtccattctcacattgctataaagaactacctgagactcggtaatttatgaagaaaagaggtttaattgattcgcagttaggcatggctggagaggcctcaggaaacatacagtcacggttgaagggtgaaggggaagcaggta

SEQ ID NO: 223970 - DNA, 617 bp, Homo sapiens
gcctgtgtaagcccctccagtaggcgcacctgaaaatatttccccttccattctcccatttcattattgggaccccatttagggtcatccactggtactgcttctcttycaattggataaggctcatctccttccctgatactatatgagatacaaagctcatccccaaatctttctgccacttgcagatcatcctgcttctcattgttaatcagagtttgattcaaaagtaacataacatctttccaggagagttcaaatacttggtttaagttctggaaagcctctatatacctgtcaaggtcatctgaaaatttgccaagattccccttaatttgccttaagtcctgtagagagaaggggacctggaccttactagggccatattcactaggcatctgtcataggggcaggagtgagactggtgcctgtctagagtgaggatttctaggaggggacaagctagaggagaaactcctcctgggtggacccagtgaggcagggctggagggagcctgttctcctcctggagatgcctctggggtttgtttctttagttttctgggattgtctcttgcagccttacctgagctggccaacaggagggttggatcagt

SEQ ID NO: 223971 - DNA, 385 bp, Homo sapiens
aaagtaacataacatctttccaggagagttcaaatacttggtttaagttctggaaagcctctatatacctgtcaaggtcatctgaaaatttgccaagattccccttaatttgccttaagtcctgtagagagaaggggacctggaccttactagggccatattcactaggcatctgtcataggggcaggagtgagactggtgcctgtctagagtgaggatttctaggaggggacaagctagaggagaaactcctcctgggtggacccagtgaggcagggctggagggagcytgttctcctcctggagatgcctctggggtttgtttctttagttttctgggattgtctcttgcagccttacctgagctggccaacaggagggttgg

SEQ ID NO: 223972 - DNA, 488 bp, Homo sapiens
cataacagaaagcagatctgtggttgcctggagaaggaagtagtataaatcaagtagatgaaggggaggagggattgcagagaagcatgaggacaccctggggtgatctaagtgtttatttttgtgattgtggtgatgttctcaggggtatgtacatatgcaaagatttagcaaatatgcactttaaccatgtgcaatttgttgtatgtcaacatacctccttaaagctgttaacattttcttagccaaacattcaatgacataaacgtttacagcatctttatttgtaaaagacaaaaactggaaaccactcagatgtccttcccagggtggttaaacaagctggtgcatctacaccgtgggacactactcagtgataaaagaacaaggtacggatgagtaaagcacatggacaaagccagagagttatgctcagtgaaaacctcagtcccaaaagattgcatgycatgtgactccatttatataac

SEQ ID NO: 223973 - DNA, 510 bp, Homo sapiens
gcactggcttctatctgaacagaccatcccaccctgtgggctgcccagcaggtaggcctgctgctgccrtctggtcgttaagtgttcagggggaccttcaattgggaaaggcctgaagctggcctcagtggcacagtaattggaggctcccagcagctgtgcagacaatgctgcacattccagggcaagatacttcataggagcctcctcctcttgaagctgtgacatgtgcctgtcttgtgggccaacagccccccgactcactgaacagattccctgaccacttcttgctgtcttcctgcaaaatgtggcttccctatacagttccccatacagctgagcaccacaaaagtgacagggtcctgctagtccctggggagaagcagatgcttaagacgaggcactgtgccacctgatgcatgtccttcccacacatcgtcatcacctggcccaccctaaactcaaagtcggcttgctagagccattcaaagcccctgatggggggatgag

SEQ ID NO: 223974 - DNA, 643 bp, Homo sapiens
ggaggagaaaaaacaggagagttagagatagaataaatacagacatgagatgaaaaaacaaaaacaaagaagtaggaggaaatgtggaagttacaaaagaaagggaagagcaagagaatgagagaataaaatggctggggatagatggttatatggaaagatgtggaaaaaggaaagagaaaccagcaaaagagagtaagaagcattgaaaaggggagaaagggcatcacagtatttaaacatcagatygtcttaggggttggtacagattctaagccagccagacttcccagactcaggcagtactggcagcaggggtgttcaatggaacttcttattacagtccttaggctgagatttataaaagggctgtgaaatcattaattagtgtagagtgtctggcacaaaacagaatgatggggttgtgcggcggggggaggagtatgtgcacacagaagtgagttgtcagcatctgggaggaagaacaaggctaccgtacgatttttggttaaggtgctttccctagcagggtctcagtttccaatctggccacacagaattaaacattctctctcccttcttgacacaaataccacctaaggtgatcttttctctgaccgccttatctaaaattgcaatccca

SEQ ID NO: 223975 - DNA, 643 bp, Homo sapiens
ggaggagaaaaaacaggagagttagagatagaataaatacagacatgagatgaaaaaacaaaaacaaagaagtaggaggaaatgtggaagttacaaaagaaagggaagagcaagagaatgagagaataaaatggctggggatagatggttatatggaaagatgtggaaaaaggaaagagaaaccagcaaaagagagtaagaagcattgaaaaggggagaaagggcatcacagtatttaaacatcagatcgtctyaggggttggtacagattctaagccagccagacttcccagactcaggcagtactggcagcaggggtgttcaatggaacttcttattacagtccttaggctgagatttataaaagggctgtgaaatcattaattagtgtagagtgtctggcacaaaacagaatgatggggttgtgcggcggggggaggagtatgtgcacacagaagtgagttgtcagcatctgggaggaagaacaaggctaccgtacgatttttggttaaggtgctttccctagcagggtctcagtttccaatctggccacacagaattaaacattctctctcccttcttgacacaaataccacctaaggtgatcttttctctgaccgccttatctaaaattgcaatccca

SEQ ID NO: 223976 - DNA, 537 bp, Homo sapiens
gaaaggagtaactgtttatgagatttaggaaggaacatatttcgtataaactattttctaaaacatttacaatctcaccaagagatagagagctgaatagcaactgggggaagaaattgtgcaaagagaatctaaatgccccacctcttccttcccctcattatgaagcttctaggtctgcagagaacttagccaccagcattggatcgcgggtgtgccaggggctcycagaggaagctggtgttttctcctctttttaaaagtagaagacacagaggcccagggaatgaagttaattttctagaatgcatgggctttggtggctctcatgagattgactcagccctggctcagtgatcctcagaaaaaagtgaaaatacaggttgagtatccctaatccaagcatctaaaatctgaaatgcttcaaaatccagaactttttgaatgccaaaatgatgctcaaaggaaatgctcgttggagcattttggatttcagatttctggattatagatgctcaattggtaagtataatgcaa

SEQ ID NO: 223977 - DNA, 537 bp, Homo sapiens
gaaaggagtaactgtttatgagatttaggaaggaacatatttcgtataaactattttctaaaacatttacaatctcaccaagagatagagagctgaatagcaactgggggaagaaattgtgcaaagagaatctaaatgccccacctcttccttcccctcattatgaagcttctaggtctgcagagaacttagccaccagcattggatcgcgggtgtgccaggggctctcagaggaagctggtgttttctcctctttttaaaagtagaagacacagaggcccagggaatgaagttaattttctagaatgcatgggctttggtggctctcatgagattgactcagccctggctcagtgatcctcagaaaaaagtgaaaatacaggttgagtatccctaatccaagcatctaaaatctgaaatgcttcaaaatccagaactttttgaatgccaaaatgatgctcaaaggaaatgctcrttggagcattttggatttcagatttctggattatagatgctcaattggtaagtataatgcaa

SEQ ID NO: 223978 - DNA, 560 bp, Homo sapiens
cctcagaatagcaaatcagcaccacctagaagcttatcagaaaagcagactttctggctccatcccagacctacttaatgaattagattctgaattttaacmagatccactggtgattcatatgcgcattgaaagtcgggaaatattaccctccagttgtgcatgccagcttgtccctgaccagttatatcagcatcacctggagtttcttattagacacagaacttggggcccagtacagaatcagaatctctgagaagtggagctcagaaatctgtttttatcgaactctacaggtaattttgatagagtatccagccctaggccttgctcaggggaggtactcaataagtctttattaaatttaatggaattcttatatttgtgttttatgtttatcctatctcctgggtgagcaaggtgaaaggtgttcatacttttgtctacgtaggtacaattgccatttctgattttctagcatagtgactaagatctctagcttcactagtgaaagaagccaaatacactatgtagatattttatgattgtatttacatgaa

SEQ ID NO: 223979 - DNA, 560 bp, Homo sapiens
cctcagaatagcaaatcagcaccacctagaagcttatcagaaaagcagactttctggctccatcccagacctacttaatgaattagattctgaattttaaccagatccactggtgattcatatgygcattgaaagtcgggaaatattaccctccagttgtgcatgccagcttgtccctgaccagttatatcagcatcacctggagtttcttattagacacagaacttggggcccagtacagaatcagaatctctgagaagtggagctcagaaatctgtttttatcgaactctacaggtaattttgatagagtatccagccctaggccttgctcaggggaggtactcaataagtctttattaaatttaatggaattcttatatttgtgttttatgtttatcctatctcctgggtgagcaaggtgaaaggtgttcatacttttgtctacgtaggtacaattgccatttctgattttctagcatagtgactaagatctctagcttcactagtgaaagaagccaaatacactatgtagatattttatgattgtatttacatgaa

SEQ ID NO: 223980 - DNA, 288 bp, Homo sapiens
ttcttcctctcccttcctctgtaatcattacaaacagtrgatatgacacagttcgtgcactggcttcccctcttgtgtctaaaagcttgagtcctaaacagcattacacactgcacaccatcttcctgaacaaaacaaaatgactttgctgtaggtgcattgatacagaagcaagaggcaagtattggtgtccgggtgaagaggactgctctttccagccacccataagcccaaatgccttctccccagccaacttacttctgtactttttctttgaatgctgcttcc

SEQ ID NO: 223981 - DNA, 467 bp, Homo sapiens
ttcctctcccttcctctgtaatcattacaaacagtggatatgacacagttcgtgcactggcttcccctcttgtgtctaaaagcttgagtcctaaacagcattacacactgcacrccatcttcctgaacaaaacaaaatgactttgctgtaggtgcattgatacagaagcaagaggcaagtattggtgtccgggtgaagaggactgctctttccagccacccataagcccaaatgccttctccccagccaacttacttctgtactttttctttgaatgctgcttccagcccccattaggatttacctaactgaacctgattttcctaacatcctgggtcaccaaggatagtgatgttttcactagtcaggcagttcctgccctgaagtttagaggaaactcctctccacaatagctcctgtttgcaaatcccacttacgcaaagcaagctcacactggctttctgtct

SEQ ID NO: 223982 - DNA, 467 bp, Homo sapiens
ttcctctcccttcctctgtaatcattacaaacagtggatatgacacagttcgtgcactggcttcccctcttgtgtctaaaagcttgagtcctaaacagcattacacactgcacaccatcttcctgaacaaaacaaaatgactttgctgtaggtgcaytgatacagaagcaagaggcaagtattggtgtccgggtgaagaggactgctctttccagccacccataagcccaaatgccttctccccagccaacttacttctgtactttttctttgaatgctgcttccagcccccattaggatttacctaactgaacctgattttcctaacatcctgggtcaccaaggatagtgatgttttcactagtcaggcagttcctgccctgaagtttagaggaaactcctctccacaatagctcctgtttgcaaatcccacttacgcaaagcaagctcacactggctttctgtct

SEQ ID NO: 223983 - DNA, 467 bp, Homo sapiens
ttcctctcccttcctctgtaatcattacaaacagtggatatgacacagttcgtgcactggcttcccctcttgtgtctaaaagcttgagtcctaaacagcattacacactgcacaccatcttcctgaacaaaacaaaatgactttgctgtaggtgcattgatacagaagcaagaggcaagtattggtgtccgggtgaagaggactgctctttccagccacccataagcccaaatgccttctccccagccaacttacttctgtactttttctttgaatgctgcttccagcccccattaggatttacctaactgaacctgattttcctaacatcctgggtcaccaaggatagtgatgttttcactagtcaggcagttcctgccctgaagtttagaggaaactcctctccacaatagctcctgtttgcaaatcccacttacgcaaarcaagctcacactggctttctgtct

SEQ ID NO: 223984 - DNA, 549 bp, Homo sapiens
tgactgcaaaaacacaacttatrctccaaaacttagtggagatacgccaaaaagcttcaagacaagaatggtactgtgtcattgagagagaggcaaggagggtagaaagaagaaaaggaataagggaaagagacaacaaaacagggtgagaaaaagaggaaacagaagggagagagaacagagaggagaaaatagtgaaaagaggggaaaaaacctgtgccttggagtcaaagaaaactttttcacatataactctaccccttccttgctaaatggcattggccatatgactgagcttagtaagccccagatcccttatctgtgaagcagagattaactgagatagttaaggctggtacttagttaaggttggtactcttcagtagttaactgaaataatatcgtaaggatgaatgaagcaattataaaaactcaatacaaatagttatttcctcttgcctttggtgtctttttacccccttgggctcatctctccatctccctttttggcctcttcctctctctcctgttttcttcctccttctgtct

SEQ ID NO: 223985 - DNA, 521 bp, Homo sapiens
gatttctcaaagaacttaaaacagaactaccatttgactcaccaatcctattagtgggtacatacctaaaggaaaataaatcattctacaaaaaagacacatgcacttgtatgtttagtgcagcactattcaccatagcaaaaatgtggaatcaacctaggtgcccatcaacggcggattggataaagaaaacgtggtacatatacaccatggaatactatgcaatcataaaaatgaataaaatcatattctttgcaacarcatggatgcagatggaggctatgctcctaagcaaattaacaacaggaccaaaaaaccaaatattgcatgttctcacttataagtagcagctttacattagatattcatagacataaagatggcaacaaggccgggcacggtggctcacgcctgtaatcccagcaatttgggaggctgaggcaggcggattgcgaggtcaggagtttaagaacagcctggccaatatggtgaaacctcctctctactaaaaacacacgtga

SEQ ID NO: 223986 - DNA, 521 bp, Homo sapiens
gatttctcaaagaacttaaaacagaactaccatttgactcaccaatcctattagtgggtacatacctaaaggaaaataaatcattctacaaaaaagacacatgcacttgtatgtttagtgcagcactattcaccatagcaaaaatgtggaatcaacctaggtgcccatcaacggcggattggataaagaaaacgtggtacatatacaccatggaatactatgcaatcataaaaatgaataaaatcatattctttgcaacagcatggatgcagatggaggctatgctcctaagcaaattaacaacaggaccaaaaaaccaaatattgcatgttctcacttataagtagcagctttacattagatattcatagacataaagatggcaacaaggccgggcrcggtggctcacgcctgtaatcccagcaatttgggaggctgaggcaggcggattgcgaggtcaggagtttaagaacagcctggccaatatggtgaaacctcctctctactaaaaacacacgtga

SEQ ID NO: 223987 - DNA, 521 bp, Homo sapiens
gatttctcaaagaacttaaaacagaactaccatttgactcaccaatcctattagtgggtacatacctaaaggaaaataaatcattctacaaaaaagacacatgcacttgtatgtttagtgcagcactattcaccatagcaaaaatgtggaatcaacctaggtgcccatcaacggcggattggataaagaaaacgtggtacatatacaccatggaatactatgcaatcataaaaatgaataaaatcatattctttgcaacagcatggatgcagatggaggctatgctcctaagcaaattaacaacaggaccaaaaaaccaaatattgcatgttctcacttataagtagcagctttacattagatattcatagacataaagatggcaacaaggccgggcacrgtggctcacgcctgtaatcccagcaatttgggaggctgaggcaggcggattgcgaggtcaggagtttaagaacagcctggccaatatggtgaaacctcctctctactaaaaacacacgtga

SEQ ID NO: 223988 - DNA, 435 bp, Homo sapiens
cacatatgtgggtggggaactcatagtacagataaaatacaaactaagcgattctgtaagataaagacagrataaagttagtacacaaagatgcaaaccataagacaaactcaaagaaggaaacacaacaggtgctaagatttacagtttcttagaagctctttgacacactgagatctaaaaaatattcctgtcattaaaaggcatactacatgatgtggtctacaatgttctccacagcatctccaagttaaatacaaaaaaatgtttcacagtacatttattagagtagctctcaaagcacactctaggatataatattctgcaaaatatagacccttcagggacctacatatcaaggcaactgccttacctacagtaggttgcaataaatatttgagaagtaaaaacacttccagtagttggctcttcact

SEQ ID NO: 223989 - DNA, 574 bp, Homo sapiens
catctgtttcttaaatgaacttcctaattatgtgatgtagccctcatcactgggaacaccttcgcctcagcacttgccactctgcacttgctcacctgggaccttgcctgctgagcgctgttctcctctcacctcctgtgtgcttatctttctatttaggtccataggctaccagctataggaggcctttgagratctctaacccaaatcctttattttaaggacaagaaaagtgactcttgaagaaggaaagtgagtttccccatatcacacagtggcatttctgggatcaagacagggcttcctggctttcaattctattttctgtttctcgtatcctagattatcttattcaagacaaaaattatgactttttttctcggtgaaacagccaccccagcattataatgcaatgttggggacataatgaatatacaataaatgtttcagagttaaatggatcatgatgtgcttgacagcaaagaaatatcatggcatcagggaaaaacattgaacttggatgtcaggatatctctgtgctgggcttttctctatagccacttacctgtgactc

SEQ ID NO: 223990 - DNA, 659 bp, Homo sapiens
gggaacaccttcgcctcagcacttgccactctgcacttgctcacctgggaccttgcctgctgagcgctgttctcctctcacctcctgtgtgcttatctttctatttaggtccataggctaccagctataggaggcctttgaggatctctaacccaaatcctttattttaaggacaagaaaagtgactcttgaagaaggaaagtgagtttccccatatcacacagtggcatttctgggatcaagacagggcttcctggctttcaattctattttctgtttctcgtatcctagattatcttattcaagacaaaaattatgactttttttctcggtgaaacagccaccccagcattataatgcaatgttggggacataatgaatatacaataaatgtttcagagttaaatggatcatgatgtgcttgacagcaaagaaatatcatggcatcagggaaaaacattgaacttgkatgtcaggatatctctgtgctgggcttttctctatagccacttacctgtgactctggattctaaagttccagcttaaacatcctatgttaaaaggctaccctaaccagtatggtagccagtagccttaggtggctatttaaatgtattgaaataaaataaaataaaaattcagttcatttgttctagcca

SEQ ID NO: 223991 - DNA, 600 bp, Homo sapiens
atgaaaacgttttcaaaggcaaacacccagggaagacagaaactacatggttttgacaggatttgattttctacccagagtccaattttgccggattacatcagtggctccagactttctgtgaggagttatttctcatttttctgaagctctgactttcctgggtaaaaatgctattattggtggagagaagaattggagggtaaggatgagacagtaaagtccctaagataaagagggaatgaagcacaggggccgtggcaggccgggtgaggacagcgggtagagtggtggcaaggagcttggaaatctccyaggtaagagctgagcatctatctacctgtaagactagaatctctctgcttgacacagtgagcactggaccctttctccattgattcatgccattctctccttccataggaggccagcatcttcaaaacaaagcagctatcaaaagccctttcttccttcttccctccctctctcactgtctgggtagctcacgtgcccctccttccatctttatgttaaactttcctttctatatatcataatcctatatgaatgactgaatttactttttgatcctggaaaaat

SEQ ID NO: 223992 - DNA, 600 bp, Homo sapiens
atgaaaacgttttcaaaggcaaacacccagggaagacagaaactacatggttttgacaggatttgattttctacccagagtccaattttgccggattacatcagtggctccagactttctgtgaggagttatttctcatttttctgaagctctgactttcctgggtaaaaatgctattattggtggagagaagaattggagggtaaggatgagacagtaaagtccctaagataaagagggaatgaagcacaggggccgtggcaggccgggtgaggacagcgggtagagtggtggcaaggagcttggaaatctcccaggtaagagctgagcatctatctacctgtaagactagaatctctctgcttgacacagtgagcactggaccctttctccattgattcatgccattctctccttccataggaggccagcatcttcaaaacaaagcagctatcaaaagccctttcttccttcttccctccctctctcactgtctgggtagctcacgtgcccctccttccatctttatrttaaactttcctttctatatatcataatcctatatgaatgactgaatttactttttgatcctggaaaaat

SEQ ID NO: 223993 - DNA, 507 bp, Homo sapiens
cacgattgttccgaaatacaacccactgtgtgcctgtgctttagcagagcaggatgtggcccaagggtggtgacggggtagagccaagacgaattggaaagaggaaactgtagggcttattgagcaacctgtttgttgggaggctatgtaatatagtgtttaagtgcatgggttttgactcagactgtctataaaatcttcctgctctcacttaatagctgtggaaccttaggaaagtttcataacctctctaagttgcamcttctccaaatgcaaaatagagataatgacagtaccttcctcataaaggttttcttctgccaaattaaagaaggtcatcttctaaagtgcttggcttggcatcttcaaacttagaaaggcaccagaaatgttaggtgtgatgatgatgatagtagaggaaggtggaagggtggtggtttgagaaatggaactgagaatggctcctgattttggtgagtgggtggaaatcatgtcaatagagaattc

SEQ ID NO: 223994 - DNA, 600 bp, Homo sapiens
agaaagcagcctaatatagtgtctggcaggtgggaaaactcaaatgttagtatcttgtagtaatggtctgaggtcaggttgtgatgtaggaatgaaacagcagtgatttagctggcatgtgttgaggccctcccgggacaccacattcaaattgtatgggagctctttccccagtgttttgtctgctagggttgccatgataaagtttcacaatgggcagcttaaacatgagaaatcaattttctcacagttctggaggctgggagtccaagctcaaggtaccagcaaggttgatttcctctgtggcatctctgcttggcttacagatggcagtcctcttgctgcctctgcatggggtcctctctctgtgcactcttgttcctcgtgcctctttttgtgtcctcatctcttctttttataaggacaccagtcacattggattagggcccaccccaacagcctcatttgagcttcatcacctctttaaaggccctatctctatagtcacattcygaggtactggggtttaagattcaatataggaatttaggcagggggatacaaatcagtctataagaagacccaggaactcactgagac

SEQ ID NO: 223995 - DNA, 470 bp, Homo sapiens
agtatgatacccaatggaaatttggatctatataaaggtataaaaagtatcagaaataataaatatatgagcaaatattaaaaatgtatttttctaatttttaatttttttgtaagataactgcttaaagaagcacaaatagcttcttgtgagacttgcacacatgtagaagtaaaatatatgataacaatagcacaaaatatgggagaaggaaatagactactgtaagtttcttgtgctacatatgagggtagaatgtggcaaattaaagatatatattgtaaaccattgagcaatcattgaaaaagagggagtagggctaataagctaatgtgtagataaaaaggaatcattaaagataatccaaaataaggcartaatagagagagaaagaacaagaagacgggactaatagaaaatgaatagcaaaatgataagcctaaaagcaattatagagataattacattaa

SEQ ID NO: 223996 - DNA, 470 bp, Homo sapiens
agtatgatacccaatggaaatttggatctatataaaggtataaaaagtatcagaaataataaatatatgagcaaatattaaaaatgtatttttctaatttttaatttttttgtaagataactgcttaaagaagcacaaatagcttcttgtgagacttgcacacatgtagaagtaaaatatatgataacaatagcacaaaatatgggagaaggaaatagactactgtaagtttcttgtgctacatatgagggtagaatgtggcaaattaaagatatatattgtaaaccattgagcaatcattgaaaaagagggagtagggctaataagctaatgtgtagataaaaaggaatcattaaagataatccaaaataaggcaataayagagagagaaagaacaagaagacgggactaatagaaaatgaatagcaaaatgataagcctaaaagcaattatagagataattacattaa

SEQ ID NO: 223997 - DNA, 470 bp, Homo sapiens
agtatgatacccaatggaaatttggatctatataaaggtataaaaagtatcagaaataataaatatatgagcaaatattaaaaatgtatttttctaatttttaatttttttgtaagataactgcttaaagaagcacaaatagcttcttgtgagacttgcacacatgtagaagtaaaatatatgataacaatagcacaaaatatgggagaaggaaatagactactgtaagtttcttgtgctacatatgagggtagaatgtggcaaattaaagatatatattgtaaaccattgagcaatcattgaaaaagagggagtagggctaataagctaatgtgtagataaaaaggaatcattaaagataatccaaaataaggcaataatagagagagaaagaacaagaagacgggactaatagaaaatgaatagcaaaatgataarcctaaaagcaattatagagataattacattaa

SEQ ID NO: 223998 - DNA, 584 bp, Homo sapiens
tacctttggtctttgatgttggtgacctactgatggggattttgtgtggatgtcctttttattgatgttgatgctattcctttttgtttgttactttttcttctaacagacaggcccctcagctgcagatccactccagaccctgtttgcctgagtatcaccagtggaggctgcagaacagcaaatattgctgcctgatccttcctctgtaagcttcagcccagaggagcacctgcctgtatgaggtgtctgttggcccctactgggagatgtctcccagtcaggctacacaggggtcagggacccacttaaggaggcagtctgtccattactggagcttgaatgccgtgcttggagaaccactgctctcttcagagctgtcaggcagggacatttaagtctgcagaagctgtctgctgccttttgttcagatatgccctgccccagaggtggaatctagagaggcagtaggccttgctgagctgcagggggcgccacccaattcaagcttccctgcagctttgtttacrctgcgagcataaaactgcctatcaagcctcagcaatggcagacaccccttcccc

SEQ ID NO: 223999 - DNA, 602 bp, Homo sapiens
aatgcagattgataggaataattaccctgcatttttagtcttgcttggttacgttcatctttgaggttccacacagggatttagtattgccttctattttttgtagggtaatcccaggtccttccacttggttatttctaccataataactgttattcgatgtgtcagaaagccaatgtgggaattccatcagttgtcaggtgtgcttattgaagcattcactcaggaacagtataaataaccacaagacaggtttatggatacattgaaccagctatgagaaggactcaacaaaattccatttgttatcacacccgtataaacacccattttgatgggtgggccacagtggagtcctgggttccrgcaaattaaccatgtccagaattcctagaaagtctggatattttcctttctctagaacacaattattctaatacatggctgcatattcctttggggaaatactaggaagaagcaacagagtatacattccttttacaagggtatctggcctcttattttaggtcaagttattgaagaatagtttacatacaataaaatttacttttaaaaagtgtatagtacagttcaacaagctt

SEQ ID NO: 224000 - DNA, 600 bp, Homo sapiens
gttatttctaccataataactgttattcgatgtgtcagaaagccaatgtgggaattccatcagttgtcaggtgtgcttattgaagcattcactcaggaacagtataaataaccacaagacaggtttatggatacattgaaccagctatgagaaggactcaacaaaattccatttgttatcacacccgtataaacacccattttgatgggtgggccacagtggagtcctgggttccggcaaattaaccatgtccagaattcctagaaagtctggatattttcctttctctagaacacaattattctaatacatggctgcatattcctttggggaaatactaggaagaagcaacagagtatacattccttttacaagggtatctggcctcttattttaggtcaagttattgaagaatagtttacatacaataaaatttacttttmaaaagtgtatagtacagttcaacaagctttgacaaatgaatacaatcatgtaaccaccatcataattgagattcattaggggttttaatgtcagttgacaagctcatccaaaaatttgcacagcagagcaagactccaaaaattaacatgaaaattc

SEQ ID NO: 224001 - DNA, 576 bp, Homo sapiens
tagcttctttctcttccccgccttacccatgcattgcatcccggagcccaagctctgcccttcctgaaggaccatcaagcctccctcctcagaagcattcctctctgtcctgaggctgcgagagctcctctctgatgctcctgtaaataaaacattcaccaagatgtgtcattctctgtgctacactgccacggcagcatccaggagcagacagagccaggcagtggagccaggcagacccaaaagtgtgaatgtggctcagaaacagaactacatggttctgggcagtcactaaatctccgtggatgcttcttcatgagtgaaatgagtgaaataatgtctatcttgtagagctattgtcagcattcacaataatgtatgtaacccaattaccacagttctcargtaatgtgggagcccaataaatggtagccattgttgtaaatctcagctagatagcaagcccctaaagggagtatggtggggatggtgcttttctgtactacagaggatggaaagttaaacctacaagtctcagactcccttgcaactaaagttcagattatacataaggtt

SEQ ID NO: 224002 - DNA, 500 bp, Homo sapiens
tgtatggggaactgctctttttaaaaccgtcagctcttgtgagacttactcacgatcatgagaacagcacgggaaagatttgcctccatgattcagttacctcccacagggtccctcccacaacacatgggaattcaaaatgatatttcagtggggacaaggccaaaccatattatgtgctttatgctactaataaaaaggttaaaccgaacaagttcaaagacaaaactcagtagtactttattcagacaggttagtctaaatctgttaaccttatacttgcaactctgatcattcattaattctgcaaattttaataaatgctttattttaagctaaatgctgagatgaaaaaatgaaaccatatgagttagcaaagtagaaaatataggcatattaaycagtaaatgcagaatgataaatgctccatcaatatgcacttgttgtagtgaggccaccgaggagggtgcaatcctctcaacctgggaggagcaggtagg

SEQ ID NO: 224003 - DNA, 374 bp, Homo sapiens
cctttcaagatgctggacagatgagattggttatccaatccagattctcctctgcttggccactggaacccaaccagagaaggacctgtgaagaaatccctcatgctttggcttttttcagggaatcattcctttgatggtgtcagcagcctgacagttgcctttgagaactcttggccaacattaagggattttcatgcaaataataaactctggcctggaaaaagtcractggagcctaactcttctttttttttctctctctctttctttaaactaagggatactgctcaaagttaagatgacaattatcagtgatgtataataagagatgctgaaataagggtgataataaaggtcccgggcttgctcac

SEQ ID NO: 224004 - DNA, 598 bp, Homo sapiens
tatcagaggagtttaatgtgtttgttgagtgaatggcagatgggtaagctaatctgtgtatccccagccctccactggtggtcctcaagctccttcagaaacaagatggtcccattgaaggcagttccagtgtcctgctctgcaggagttggatgaacgctgcaggagctggatgaacccactgatagctcaaggctagggcttgtcatccagatcttttcatggtgtgtaagaggggttggttggaaagggaccagatgtggtatatgctctgggatgatcagtgaccatttttgctctttctggctgaaggcaatggagtgggaattctcattgtaaaggaagagactgctcccctgaccagaccaggagggactcagacaactccctcgggagagagcaagttgtkcaattgagcagaggggcagggaaatgctatgaggagctgagagccaggcatgggagtggcaaagggaggggtgaggagtggtggccagacatgggtgtggatcagaaggggaggccaggccaagtcatgaagggccatgctaactggtttggatttgagcctgttctgagatttttcagcaaggagagt

SEQ ID NO: 224005 - DNA, 526 bp, Homo sapiens
gtggtggcttatgcctgtaatccaatcactttgggagactgaggcgggcagatcacctgaggttgggagtttgagaccagcctgaccaacatggagagaccccgtctctactaaaaatacaaaaaattagacgggcgtggtggtgcatgcctgtaatcccagctcctcaggaggctgaggcaggtgaatcgcttgaacctgagaggcagaggttgccagtgagccgagatcacgcaattgcactccagcctgggcaacaagagcgwaactcagtctcaggaaaaaaaagaaaaaaaagcagattaaaattatatatataatttgaatgcatcataaaaatctgaagctgagaaacttcatgtacatatatagagagaagaagaaatcaaagtgttaaaattgatagtggcattaagggtattagaatatatttacagttatagtcagaaaaggtttttttttttttttttgcactaatcacagcaagtaagtcttcaaacagaaaccaagtaaaaatagcatcata

SEQ ID NO: 224006 - DNA, 585 bp, Homo sapiens
aataaaaggaaatagtcaggaaaccaaagcggtaagagtgtacttagtataccagggaaggaaaatttcaagcagggaacgtggtcaatgatgacatttgctgtagtgaaattgagtaaaacaatgactgcagtgaaatagaataaaacaatgatttcagagtgaacattscatttggcacttactgaggctgccggtaagtgttgccaaagcaatttcagaggagtcaaaagaatgatatgtgataacagtgatttgaggagcaaatgagaggtaaagaaatggtaacagcaattatggattaaccctttagaaagtttgcttatgaaagtgtcatttaaagaagtcagaaccaatgccaacaagtatgttttcatttcccttggataaaaaaaaaactagatgtgaaattgctgggtcatggggttgtgtatatttagctttacaagaaactataaacttttccaagtagtcatgccattgcacactgccaccaccaaagtatgagagtccctcttgggccacattcttgtcaatgcttggtattaactttaaccattctagtagataaagagtggcatatca

SEQ ID NO: 224007 - DNA, 585 bp, Homo sapiens
aataaaaggaaatagtcaggaaaccaaagcggtaagagtgtacttagtataccagggaaggaaaatttcaagcagggaacgtggtcaatgatgacatttgctgtagtgaaattgagtaaaacaatgactgcagtgaaatagaataaaacaatgatttcagagtgaacattccatttggcacttactgaggctgccggtaagtgttgccaaagcaatttcagaggagtcaaaagaatgatatgtgataacagtgatttgaggagcaaatgagaggtaaagaaatggtracagcaattatggattaaccctttagaaagtttgcttatgaaagtgtcatttaaagaagtcagaaccaatgccaacaagtatgttttcatttcccttggataaaaaaaaaactagatgtgaaattgctgggtcatggggttgtgtatatttagctttacaagaaactataaacttttccaagtagtcatgccattgcacactgccaccaccaaagtatgagagtccctcttgggccacattcttgtcaatgcttggtattaactttaaccattctagtagataaagagtggcatatca

SEQ ID NO: 224008 - DNA, 585 bp, Homo sapiens
aataaaaggaaatagtcaggaaaccaaagcggtaagagtgtacttagtataccagggaaggaaaatttcaagcagggaacgtggtcaatgatgacatttgctgtagtgaaattgagtaaaacaatgactgcagtgaaatagaataaaacaatgatttcagagtgaacattccatttggcacttactgaggctgccggtaagtgttgccaaagcaatttcagaggagtcaaaagaatgatatgtgataacagtgatttgaggagcaaatgagaggtaaagaaatggtaacagcaattatggattaaccctttagaaagtttgcttatgaaartgtcatttaaagaagtcagaaccaatgccaacaagtatgttttcatttcccttggataaaaaaaaaactagatgtgaaattgctgggtcatggggttgtgtatatttagctttacaagaaactataaacttttccaagtagtcatgccattgcacactgccaccaccaaagtatgagagtccctcttgggccacattcttgtcaatgcttggtattaactttaaccattctagtagataaagagtggcatatca

SEQ ID NO: 224009 - DNA, 421 bp, Homo sapiens
aaggggacttatacatacactgtttgtgggactgtaaattacttgtagccattatggaaaacagtatagagacttctcaaaatattaaaaatagaactaccttatgatccagcaattccactactgcttatatgtatccaaatgggaagcggtgtgtcaaacagatatctgtactcccatgtttattgcatcattagtcacaatagccaagayatgaaatcgacctgtgtccaccaatggataaatggataaagaaaatatggtatatatatacaaggagatactatttagccataaaaaagaatgaaatcctgtcatttgtgacaacatggatcagtctagaggacattatgttaagtgaaataagccagcacaagaaaataaataaccatatgttctcaatcctatgtggaagctaaat

SEQ ID NO: 224010 - DNA, 519 bp, Homo sapiens
gtgactatagttaataataatttattgtatactttaaaatagtttgaagagataattttgaatgctcccaacacaaagaaataataaatgttagtggcaatggatacasataataaaatatcacatatcacactgtactgcctaaatattgtgatggttaatattaggtgtcgacttgattggattgaaggatgcctagatagctgataaagtattggctctgggtgtgtatgtgagggtgttgccagaggagttaacatttgagtcagtggactgggagaggaagacccaccttcaatgtgggtgggcaccatccaatcggctgccagggtggctagaaaaagaaggcggcaaaaggtgggataaactggcttgctgagtcttctggttctcatcttactcctgtgctggatgcttctgtctgttcctcctcccctcaaacatcagactccaggtcctttgacctttggactcaccagtggtttgccagggcctttggccacagactgaaggctgcac

SEQ ID NO: 224011 - DNA, 460 bp, Homo sapiens
aagagggagagggtgtaacaagggagacttgtctgacctgctgggaactcagtttttaaggtttctctagggccccttagccaagaaggagtccattcaatttggggcttagagttttatttttatttcccagttgaaggagcccaattttgaaagagtttgagcattaaggggatttgagaatgaaggaaagcaatgaaatttgtactgtaaaataatgtaaattactaactctaaagtgaaaaatacactttgcaaattttgagacagttaagactatccttctatttctcctgkatggtgcacaccgtacagtctctgtgaattcatattttacttggaatgcatgtgtatgcctctgtgtgtgtgtgtgtgtgtgtgtgtgtgtctgtttggctaaatgcttaatgtgaaactttccctattagtctgtaatcaacttatctagacctgaaacatg

SEQ ID NO: 224012 - DNA, 533 bp, Homo sapiens
ccaggtcccaagggaattggccaacatttcctgccttcctccttctgcccccactaagaagccggggaggcacttggggaagaggcacatcaatcaatcagttccaccagcacttacagcaggaaggcgtgagccccggcccgtaccaggcccggggaggaggtggcagtacaccagctaccatctaatggtcaccattaggagcagccgtggcagaggaaaacaagggccctggcctcctggggatcagggcacatgagtccgagtgctgggtcctggcacagcaacgtcacaggtctacccggagccccagaacagcaggctcgcagccagcagcttctctatctttttccagggcsaacggggtgtgaggctggaaaggttgcatggggcaagaaaggtagcagggagggcccggctttagggagctgggtggcctggatgaaaaagacagaaaaacgtggttgcaaaatgggaagcaagagttctgctcttggagggagggggaggacaaggcgcagagagaaggggct

SEQ ID NO: 224013 - DNA, 527 bp, Homo sapiens
ggggaaggctgaggatcaggagcagggtgtccctgctctctgcctagtcctgccatcctggaaagggcagacacatatccagatattctaccacatggaagactctgggaagctgtctctgccacacatgaagaatggataccactgggtgtctccaagtccctgttcactggaggagcatgcaggccctcctgtgaccccagaagctcggccagtttaacgagggcagggtgtccacctgagtgccagacaggtgcatggctcctccctaaagctgtcatctcctaagccaatgcagagacaccataaaggaacaggtttgcttcacagactctctcccagggcagaaccccacgctggccacttttactytgagcatgaagagctgtatgggtgggctcagtaagggctgctcctggcctgctccctcccacctcctccccctcgcctctgacttgaagcccaatctgggacctccgcctgccatgacagcaggtggccccatgaccacatggtggaggatgggg

SEQ ID NO: 224014 - DNA, 504 bp, Homo sapiens
acctgtctctggaggctgaggccggaggctgtgtggctaggctgactatggctctgcctggtacctactcctggccaggggcaaacctttcctttaggtgttttggcagagtcagacagggttgctcctcacattccacacaacagctctcgccttcataaagcacttaaaggctggttggctctctatgggtttccaaagaggagcagacttcctgcagtccagatgtctggcaggggcctggtccttgtgctggttccctctccagctttgttgtgatgtagggagaagcctctctgtctgtttgggataaacttaatcctctaaacagcaactgatccaaaatttccatataggcggggtctggggggcagccatctggttggaaggaagattagggaacttgtattagaactacytctctctaatgtatggtgagcaccctggtttccctttggggtggctttatagaggggtcagttgatattacaaggaagctaaagg

SEQ ID NO: 224015 - DNA, 605 bp, Homo sapiens
cctcttgctctaacaagtaggcagattcccacctcaggcttactacacactggctgttccctctgcctggaaggctcttccacaggtgttaatggtgtcctccccaacctccttccacattccgctcaagggttccctgtcctgtccacactgttgaaagtgcagcccccaaacttattctgccttgttcttggccctgctttgtccttctccatggtacctcctgagaggtgacaatgtgctggcggccctcrctcgctctcagtgcctcctcggcctcagcgtctgctctggccatgcttgaggagcccttcggcctgctgctgcactgtgggagcccccctctggactggccaaggctggaggtggctccctctgcttgcggggaggtgtggagggagaagcgcaggcgggaaccggggctgtgcacggtgctcactggctagcccaagttctgggtgggcatgggctcagctgccggcactcggagcagccggtcggcgccaccggccaggcagtgaggggcttagtacctgggccagcagccacagagggggcacagggtcccatagcactgccggcccgcccgcgccaggctggaattc

SEQ ID NO: 224016 - DNA, 605 bp, Homo sapiens
cctcttgctctaacaagtaggcagattcccacctcaggcttactacacactggctgttccctctgcctggaaggctcttccacaggtgttaatggtgtcctccccaacctccttccacattccgctcaagggttccctgtcctgtccacactgttgaaagtgcagcccccaaacttattctgccttgttcttggccctgctttgtccttctccatggtacctcctgagaggtgacaatgtgctggcggccctcgctcgctctcagtgcctcctcggcctcagcgtcygctctggccatgcttgaggagcccttcggcctgctgctgcactgtgggagcccccctctggactggccaaggctggaggtggctccctctgcttgcggggaggtgtggagggagaagcgcaggcgggaaccggggctgtgcacggtgctcactggctagcccaagttctgggtgggcatgggctcagctgccggcactcggagcagccggtcggcgccaccggccaggcagtgaggggcttagtacctgggccagcagccacagagggggcacagggtcccatagcactgccggcccgcccgcgccaggctggaattc

SEQ ID NO: 224017 - DNA, 360 bp, Homo sapiens
tgggatgtagcaccttaatatcctatcaggtgaacttgacaatgagcccaggcgatccttgccccaggggcttcaatttgcattgtcactgaggcctccaagaagttaggattgccaaactagaatgttctgtggaagtttgacagtayaaggaggggttatgagccaactgctacattaaactctgcattgaacaagaattaggtaattttagcctagggcaaaacattaccgatccccatcatgtgcactgcactatactggctatgccttcaaagctgctcatcagtgatttgtattttctgagactcaaagttgggaaagatggaaacatatggaaagaaattattggaagtcacc

SEQ ID NO: 224018 - DNA, 360 bp, Homo sapiens
tgggatgtagcaccttaatatcctatcaggtgaacttgacaatgagcccaggcgatccttgccccaggggcttcaatttgcattgtcactgaggcctccaagaagttaggattgccaaactagaatgttctgtggaagtttgacagtacaaggaggggttatgagccaactgctacattaaactctgcattgaacaagaattaggtaattttagcctagggcaaaacattaccgatccccatcatgtgcactgcactatactggctatgccttcaaagctgctcatcrgtgatttgtattttctgagactcaaagttgggaaagatggaaacatatggaaagaaattattggaagtcacc

SEQ ID NO: 224019 - DNA, 492 bp, Homo sapiens
ggtttcaccatgctaaccaggatggtctcgatccacccgtctgggcctcccaaagtgctgagattacaggcgtgagccactgtgcctggccataatgttttaactgatactttggtttgagctcagatatgtgtatctgttgggggtagtaccaggcaaaaatgtgagacagctggaaaactttgttgtacagggtcctgggcctcccttactaggctacacatccagtgtcctcatcatactatctggcaactgtcaggttgtcctgaatgccccactaggaatcctcctctcttcccagatccctgtctccatttcataatcatactctcggtcttcctcaacacaccctctgactctgtgaacatctacatactgcacctgtgaatcctgtggrcaaaacccaacatgtgaatctccccagacattcatccccacctgccaccttggagacatggtgagtctggccacagctgcctttccctcatctcc

SEQ ID NO: 224020 - DNA, 458 bp, Homo sapiens
gaattctttcaggaactcctgaactacaataaaccactcttaacttagaggaaacgaagtattctttagggttgtctggcagatcctggggaaaaggggctggaggctatgacccctgagggttcttaccacatcaggatagatagacaagtccatattcctgcagtaagctctgaagagaatgtcaayggttatttttgtccagtggaactcacagttatagatgggcttcatttatgagtttatcatgaaagcatttggttctaagtgtggaaaaatctctttagcagccaaaaaagaacaggaattttgtctaacatttagatgcattcaaataaagactttggaattaaataagaagcatgatcttcatatcttaaatgaaatcccaactaagcataagcatgtgctgagagtttgttcactcattttgccatcacagagaagaccagctgtaa

SEQ ID NO: 224021 - DNA, 430 bp, Homo sapiens
ttgccattagccaaggatagaagctgcagtggtattaattttgatataatctttcaaaccagcttcwtgtggcttcccttttctttgttcaagatgagggccaggaggggaaacatcacacctgccctaaaccctgttcctggaggtcagcatttgatctgttgcaagcccctctttctgtcccctcttcctaccctgcctcccttgactttgctcctcacacttttggaaccatgccttccgggggggcccatctcttctggccgtccttgtctctgggccacttggagtgtgtgataaatcagtcaagctgttgaagtctcaggagtctctggtagcctgcagaagtaagcctcatcatcagagcctttcctcaaaactggagtcccaaatgtcatcaggttttgttttttttcagccactaagaacc

SEQ ID NO: 224022 - DNA, 474 bp, Homo sapiens
tagaggaaaagaaagaagttattttccaggtacccttctcgcttttgccattagccaaggatagaagctgcagtggtattaattttgatataatctttcaaaccagcttcatgtggcttcccttttctttgttcaagatgagggccaggaggggaaacatcacacctgccctaaaccctgttcctggaggtcagcatttgatctgttgcaagcccctctttctgtcccctcttcctaccctgcctcccwtgactttgctcctcacacttttggaaccatgccttccgggggggcccatctcttctggccgtccttgtctctgggccacttggagtgtgtgataaatcagtcaagctgttgaagtctcaggagtctctggtagcctgcagaagtaagcctcatcatcagagcctttcctcaaaactggagtcccaaatgtcatcaggttttgttttttttcagccactaagaacc

SEQ ID NO: 224023 - DNA, 430 bp, Homo sapiens
ttgccattagccaaggatagaagctgcagtggtattaattttgatataatctttcaaaccagcttcatgtggcttcccttttctttgttcaagatgagggccaggaggggaaacatcacacctgccctaaaccctgttcctggaggtcagcatttgatctgttgcaagcccctctttctgtcccctcttcctaccctgcctcccttgactttgctcctcacacttttggaaycatgccttccgggggggcccatctcttctggccgtccttgtctctgggccacttggagtgtgtgataaatcagtcaagctgttgaagtctcaggagtctctggtagcctgcagaagtaagcctcatcatcagagcctttcctcaaaactggagtcccaaatgtcatcaggttttgttttttttcagccactaagaacc

SEQ ID NO: 224024 - DNA, 505 bp, Homo sapiens
tgttagggtagtttttggaagcttggagaaagcatggcctgcaccatctgagctagaaatgtcagagcgaatgtggcagatggtgaaaaaagagatagagcacactagaataaaaatgctatgtaaggctagaaaacccactgggtgactaygctactccaagggcccagagaacattctgtttatgaaaataataaggaatgtgctggtgagatgagagggttaccagcatcactgagaagcttgttagtggctttttcacagtcaaaggagatttttctttaaatttaattttcttgaataaatacaagaataggagttcttttgggtttaaaaagtaaataatacagaaaagcataaaattagggagaaaatactaaaatttcaccatcctggtgaaaatatgaacatgtttgtgatcatcctttcatacatttctccacatagttatacctccctgggtataattgtatactagttcaatgttgtatctcctattggtact

SEQ ID NO: 224025 - DNA, 379 bp, Homo sapiens
ttgattgagggggccttaaaattgcacccccccttttttaatctctcctacatctatccaacttagaccacctctctccagcatccatcagcacgactgcatgagcaaacttgatgcagagaggcttcataggtgggatttcaccttcataraaggtgaaactgtcactgctgtgataagtttggtggggagaggggaatgccataaacagaagtatttttaaatatttgttaaaacatattttaattattttgttcaaaaaagttatgttttcttacgatatgttcaggaaagagttggaatgacacaggaggaaaaaataagcacatggctctattagttttctagggctgtggtaataaaataccacagactgtgt

SEQ ID NO: 224026 - DNA, 476 bp, Homo sapiens
atttaatccacaaatatttatagattgcctatgatgtttcagatcctggaaatacaaggatgaacaaaatatagcccaaggatcttatagctgagtattttgctccaacaatgtgaacctgatttgtgtagcccaaagaaacataatcaataagggctttttaaatcgacatttaaactccattcttgcctgcctaaaactaattcagatcatctgactctcttagtacttcaaagcactggaggagggaaagtaaaataaaatatttacctttcaacaattgtgaaggyaggttttatattcaaaaactaaaccacccaaaggcaaattaaaatcttagcttttaagtctctcactcttttctacaactcaataaggatttcaaaaatcttataatctagtctcagtggaaatccactacactacactttgagaagcttgaagccagtcatttctttctaagcttctcattcatg

SEQ ID NO: 224027 - DNA, 555 bp, Homo sapiens
actcacacaatttgatactcccttagcactttttagtccaagatactgtatgtttgggttcatggcaaaagatgcaaggattcttgaaggattgtagctaggcttygacaaatcctcatcccagatgctctccagacagtggaagtgttacatcaacagccccattcttgggaagggactaatttttaggtagtagcttgtttcttagtgactcatttttttttctggctctcttaacagaataaaatatagtcacattacaggagctagcaattgctgatgacaaatataagattatttgcattctctgaaaatagcccatttagaacataaatgtacttgatacttgagcttttttcttctcaagggaaaactgttaaggaaagcacctttcaaaaatattatctttgaagaaataaaaggaaatttatcatgatttgggaagtagaattagtctaattatgcttttttttttttgcatcactgccagcacacatatatgttgagagccattacgtgtaaaataccttgtcaatggatgtttaaagaagcatt

SEQ ID NO: 224028 - DNA, 542 bp, Homo sapiens
ttcttgatggtgtcctttaaagcatacacatttttaatttgatgaaatctgacttacctgtttttgttttttttgttattattgttgcttgtttgtgcttttggtgtcatctaagaaactattgtttagtccagggtcacaragatttacgtctatgttgtctttgaagcattttctggttttagctcttatatttaagcctttgatacattttgagctaatttttatttatgatgtggtaaaggttcagccttattcttttgcatgtggatatccagttgtcctctattatagtctttttatgaaagttactgaattgtaactgaatcaaggaagcaacaacttccttgatcacttaaattatgtagaagttttctgcagctgtttttgacccatggtaaaaaagccctgacagcattataatttgtgaaacttatttcttacaatacagttttaagtatttagttttctaatgtctaatgttatacagtgatacagtcttaaaaatcttaaatagttctcagctggaggtttttatcaac

SEQ ID NO: 224029 - DNA, 634 bp, Homo sapiens
tatcagcatattacagtttctgagccagatctgccctgttgtctgcttttctaaacaaagttttattgaaacagagcctattcatttgcatcttgtctatagctgcttccctgctataacagcagagttgcatagttgcaacaaagcctaagatgtttaccatccagtcttttgcaaaaaaagttaatgaacatctgctccagacaggtgcttttctcagatcagattccgttagtttccttgggctgccacaacgaagtactgcacaaactgggcagcagaagtttcttctctcacagttayaggagctagaggtttgcaatcaagatgttggcaggattggtttcttctgagggagaatctgccccatgccaatctctgcctccatcttcacatggcattcttcttgcgtgtctgtgacttcacacggctgtcttcccgctttgtgtttctctgcgacacttcttttcttagaaagacaccagtcctactggattaaggtcccacccaactccagcatgacctcgtcttaactacttacatctgcagcaaccctctttccaactagggtcatactctgaggtgctgggggttaagacttcagcatatgaatttcgaagagacacaattcagc

SEQ ID NO: 224030 - DNA, 480 bp, Homo sapiens
ttattcttgtcatagcattagctagtttctttgtagtctctattgcatagttgccttatgcactttttgggctaygtgcttgtgcgtgcttttgtagtagcaagtattgttctttcatttccacatttagaactcccttaagtatctgttgtaggtctggtctggtggtgacaaattcctataacaattgtctatttgggaaagaccgtttctcttttgttcatgaagcttaaattggcaggatatgaaattctttgctggcatatcttttctttaagaacgctaaaaatgggccctcgatctttggcttttgaggtttctgctgagaagtatattgttggtctgatggggttccttttgtaagtgacctgatccttttctctagctgcctttaaggctttttcttttgcattgacctgggatcatctgatgactatgttccttgggattgtcatcttgtatagtatctcataggaattc

SEQ ID NO: 224031 - DNA, 478 bp, Homo sapiens
attcttgtcatagcattagctagtttctttgtagtctctattgcatagttgccttatgcactttttgggctatgtgcttgtgcrtgcttttgtagtagcaagtattgttctttcatttccacatttagaactcccttaagtatctgttgtaggtctggtctggtggtgacaaattcctataacaattgtctatttgggaaagaccgtttctcttttgttcatgaagcttaaattggcaggatatgaaattctttgctggcatatcttttctttaagaacgctaaaaatgggccctcgatctttggcttttgaggtttctgctgagaagtatattgttggtctgatggggttccttttgtaagtgacctgatccttttctctagctgcctttaaggctttttcttttgcattgacctgggatcatctgatgactatgttccttgggattgtcatcttgtatagtatctcataggaattc

SEQ ID NO: 224032 - DNA, 492 bp, Homo sapiens
gaattctttggttatttacattcaaggttaatattgatatgtgaagttttattcttgtcatagcattagctagtttctttgtagtctctattgcatagttgccttatgcactttttgggctatgtgcttgtgcgtgcttttgtagtagcaagtattgttctttcatttccacatttagaactcccttaagtatctgttgtaggtctggtctggtggtgacaaattcctataacaattgtctatttgggaaagaccgtttctcttttgttcatgaagcttaaattggcaggatatgaaattctttgctggcatatcttttctttaagaacgctaaaaatgggccctcgatctttggcttttgaggtttctgctgagaagtatattgttggtctgatggggttccttttgtaagtgacctgatccttttctctagctgmctttaaggctttttcttttgcattgacctgggatcatctgatgactatgttcctt

SEQ ID NO: 224033 - DNA, 580 bp, Homo sapiens
tattaataatatcaacactgctctgctctctaagcatcagatttcccatggaaaagaaatcagaaatcattaattttccacatcaaaatgactgtatagtggtgccatgatgctatagagacctcattttcacctgttgctttggaacagtgagtcctaaatgcttggatgtcaaaattgatcctgctggacctaaaytccacccaacctccacctcatgccacaaaggctgaattttatgtttcaccctagtatggaagaaaattctataatttctttcttctgtaattaaaatctaaagaaccagttagtcaaagcagtgcatcatttttctttggctttctttttttatttttattttgagaatgtgaattttattgttgtgtgtttctttttggtattagcactttatgcagcagccaagatggtcactttctgtgaaggagataatggaggataatgcaaccatccagctgcttgagcaagagacctgggcatctccaagaacaatcgattctactttccctattttcttgctgctgccattgccttagttcaggccctggaaatcatttgctat

SEQ ID NO: 224034 - DNA, 580 bp, Homo sapiens
tattaataatatcaacactgctctgctctctaagcatcagatttcccatggaaaagaaatcagaaatcattaattttccacatcaaaatgactgtatagtggtgccatgatgctatagagacctcattttcacctgttgctttggaacagtgagtcctaaatgcttggatgtcaaaattgatcctgctggacctaaattccacccaacctccacctcatgccacaaaggctgaattttatgtttcaccctagtatggaagaaaattctataatttctttcttctgtaattaaaatctaaagaaccagttagtcaaagcagtgcatcatttttctttggctttctttttttatttttattttgagaatgtgaattttattgttgtgtgtttctttttggtattagcactttatgcagcagccaagatggtcactttctgtgaaggagataatggaggataatgcaaccatccagctgcttgagcaagagacctgggcatctccaagaacaatcrattctactttccctattttcttgctgctgccattgccttagttcaggccctggaaatcatttgctat

SEQ ID NO: 224035 - DNA, 429 bp, Homo sapiens
atgggacattgcagaaaggatggcatctgacttccaggcagcttccacttgtcttctcttgcttggattacttgctctggtagaagccagctgccatgtcatgaggacattcaagcagcaccacaaaaaagtctttgtggtggacaacaaaggactcctgccaaccaccaacactaccttgccaagcatgtaaacgagtcaccttgaggccctattcttgggctccaatcaaattttcagatgaatgtaacctcatgaaaagacctgaaccagaactatccagctaagcgttccaatattcctgacccataaaarccatgtgaggtaataaacatttattgctttaatccagtaagctgtggggttgttatgcagctacagaaatataacattctttgagaaagctgttttacaaagaggtttgaggaa

SEQ ID NO: 224036 - DNA, 429 bp, Homo sapiens
atgggacattgcagaaaggatggcatctgacttccaggcagcttccacttgtcttctcttgcttggattacttgctctggtagaagccagctgccatgtcatgaggacattcaagcagcaccacaaaaaagtctttgtggtggacaacaaaggactcctgccaaccaccaacactaccttgccaagcatgtaaacgagtcaccttgaggccctattcttgggctccaatcaaattttcagatgaatgtaacctcatgaaaagacctgaaccagaactatccagctaagcgttccaatattcctgacccataaaagccatgtgaggtaataaacrtttattgctttaatccagtaagctgtggggttgttatgcagctacagaaatataacattctttgagaaagctgttttacaaagaggtttgaggaa

SEQ ID NO: 224037 - DNA, 605 bp, Homo sapiens
atttatttaagcaacatctttttagaatctttttatcgttacttccaatcaaaaagcagagaccacagcctataattctggagtattttcagcctggcacattttgctaggcaacttccaatatgctttctcttcttttttggtaacagaagtttatgccaggttaattacttctcagaaggttacattgctcagtgtcccaccctgaagatggatgtggctatttgatatacttataggcaacagaaggtaatggaaaatgtgaacagttttggtgaaacttccctaaaagttatctagctcctgttctttactgttttcttctttgcccattaccatttcctgttagctggaatagcatcatacctggtgctggagtaatagttttgatttatgaratgaatttggaaaagataaccatgcacaactgagacaaaatagaacttggctctctgaggatattgtagaacagtaaaccagctgtggatataccctccctgaattccatgagaaagaatgaattgaattaatttcattaatttctatcttgtataaatcactgtttctttgttgttgtttgtttgtttgtttgttttttgaaacac

SEQ ID NO: 224038 - DNA, 550 bp, Homo sapiens
ttctgaagagttagagaaacagaaggtttctcttcaaatagatttatcacccactgtttctgcaaatatctgaggtaggcactccataatatacagagaagaggacagcgaagctaacaattatcaggcgtgtttcatgtgcaaacactgtgttgggctctgggaatgtatatcatttactttctcaacaactctgttagttgggcattattgttttcattttagatgagaaagctgcaacccagagaatcaattgcctctctcagcaagctaattatttaatagttggagaagttaagccaaattgatgcaaaatttaaaagaacaataaaatagayaagttatttacaattcataaaacacatctaaatgatgacttcaatctattttcgcagcagtatgaaatggatattgctattcccattgttacaggacccaacactcacccaaagttaacctttgggtcgggggtttctgtactatattcccttctgtggtcgccagagaaatgttacaggaaaggagtcccgatccagacccccggagaggg

SEQ ID NO: 224039 - DNA, 574 bp, Homo sapiens
tgttagagttttttatatattccaggcacaagatccacattatatcaatgagttgcaaatattttctccaaactttcaaatttctaaggacattttcacttaacaagaaaaaaaaaaaactgtcaacttcttgctagtgtccttcaaaatatcaaagctttttttcttgttgtttatttctttttttaattttgacaaagcccaatttattgatttatttttcctttgttgcttgagcttttgttgtcatatttaaggaactgttgtctaaacaatgaccatgaacatttacacttatgtttgtaagtattctgtaatttttgcacttacccttggatctttgataaattttgtgttaattacagcttgaacattctaaatctagaatcccaatrtctcaaatgctccaaaatttggaagtctttgagcacagaaataaactcaaagaaaatgctcattggaacatttcagatcttgaatttttggatttggaatgctgaaccactaagcataatgcaagtattccaaatccccaaaaaatccaaaatctaaaatacttctagtctcaaatatt

SEQ ID NO: 224040 - DNA, 425 bp, Homo sapiens
atgtgccacaggctgccccctggtaactttgagtgagatagctttttctatagccaaagacgattctcaatgatggatgcagatgcaaatatacaaaaagaaaagaaaaagattttcctatcagatattgcataagtgtgttcatcattaatagggaatcagtagakaaacacagtatatactataaaaggtaaatttaaaaataaggttaataaccagaagattacattaaatagcatacataaagtttaaaatagactattgtaaagaatgcatttttgtcaagattaattaaatccatttttatttgtgatatgtttttcatttaacaatttattcgaaaaaacttagtctaaaattcataggattaatttttgcatttttgttttatatatttgtgtttctacttatcctattgttttatc

SEQ ID NO: 224041 - DNA, 425 bp, Homo sapiens
atgtgccacaggctgccccctggtaactttgagtgagatagctttttctatagccaaagacgattctcaatgatggatgcagatgcaaatatacaaaaagaaaagaaaaagattttcctatcagatattgcataagtgtgttcatcattaatagggaatcagtagataaacacagtatatactataaaaggtaaatttaaaaataaggttaataaccagaagattacattaaatagcatacataaagtttaaaatagactattgtaaagaatgcatttttgtcaakattaattaaatccatttttatttgtgatatgtttttcatttaacaatttattcgaaaaaacttagtctaaaattcataggattaatttttgcatttttgttttatatatttgtgtttctacttatcctattgttttatc

SEQ ID NO: 224042 - DNA, 425 bp, Homo sapiens
atgtgccacaggctgccccctggtaactttgagtgagatagctttttctatagccaaagacgattctcaatgatggatgcagatgcaaatatacaaaaagaaaagaaaaagattttcctatcagatattgcataagtgtgttcatcattaatagggaatcagtagataaacacagtatatactataaaaggtaaatttaaaaataaggttaataaccagaagattacattaaatagcatacataaagtttaaaatagactattgtaaagaatgcatttttgtcaagattaattaaatccatttttatttgtgatatgtttttcatttaacaatttrttcgaaaaaacttagtctaaaattcataggattaatttttgcatttttgttttatatatttgtgtttctacttatcctattgttttatc

SEQ ID NO: 224043 - DNA, 602 bp, Homo sapiens
ttgattatatttctgaatatatttaaattacaatagggcaaaaatattaaggctaataaataaatggctaattctgcatatcagtcatcagatacagtgagaaaatataatagaaacaggagttttctgccttccccatattccttaaatcaaatgcataaacagccagtctattaagaggtgaggtcatatgtacaagaataggttttgtttccaaaatctccataattttgttgaactcacaattaaagcataagttagaatgtctacaattttctctcttactttyaattatgtttattttcaaattaagaaacacaattactctaaaacacaaatattgaataggaaatcaactatactatttactgaggagaggagaaatatattttttaagtaagggtctagacgaaataagaaattttactattgcatagaaatatcattttcattactaatgattggttatattttatctccccttgaaagctaatgatagtaattttaattttctaaagacttgaaaacatacaatcagaactttagaactatgtattactctatcttgactctttcgtgattaatacaggcatttgggcaaa

SEQ ID NO: 224044 - DNA, 436 bp, Homo sapiens
ctaataatgcccaagatctccatatcctaatatgttaattaaattggcaaaagggactttgcagatttgattaaattaaggatattgaagtgtaaagatatccrgaattatggtcctatgtaacgacaagggtctttatgagagagaatgcattctgaaaacatagcaaagagagatttgaagatgctgcactgatggctttgaacaaagattgttgtggtcttaatggttgcgtctttctcaaaatgtatccaatgcaatctattaggaagtaggaactttgggaggtcattagatgatgagggtggggccctcatgaatagaatagtgcccttataggccccagagagatgccttgctttttccaccaaaagaagacgcagctaaaaggcaatattatgaaccagaatgtaggcccctgctagttactgaaatc

SEQ ID NO: 224045 - DNA, 569 bp, Homo sapiens
tttcagactaatagaacccactttggactttggcctctaaaataataagagaataaatgtgtgttactttcagtcatcaaattggtgaagtaattgttacagcagcaatagaagtctaatggaaaatgtattccaaattgatagctttttcttatttattcaactaaccattttgtagtttttygtttaatcaatttaaaccagttgccagttttgtaaccaacatgtttttgtagtctacatttttccaaataaatggccattgctgcattattaattattaaaaatgcctttacttgtctgaatttattttccactgtttaattaatatatatttataaagttgtttccaaattttctctgctatgccttagttctactatagaattatattattgtgataataatacattttataattttttttgttacttggtaagacaaaattttcttatttttttctttgaaaaaaatctaaaatattctggtacacttattccagaaacccaaaaataatcttcacatcaattatttaaaaattcttattagaacaataattatgaggattt

SEQ ID NO: 224046 - DNA, 556 bp, Homo sapiens
ggcgatagttaacagaaatttattgtatattttaaattatctagaagagtggaattggaatgttcctaacacaaggaaaagataaataattgaagtgatagagacttcagttaccttgattcaatcatcacacattgtatgctcgtaccaaaacatcacatgtgccctataaacatatacaactgttatatatgtataataatgaaatatttaaamttttaaaaaagtgttgtttagtgcatcacctttatcaatgatctcagttagattttctgaataacttcctgcagcctctacatcagcacttgctgcttcaccttgcactgttatgttatggaaatggcttcttttcttaaacctcatgaaccaattctgccagcttcagatttttcttctgaagcttcctcactcctttctgccttcatagaattgaggaggatagaattaaggttcttgctttggattaggctttagcttaagggaatggtgtggctggtttgatcttctatccaggccactaaaactttccctttactatcagtaagacttttttgct

SEQ ID NO: 224047 - DNA, 556 bp, Homo sapiens
ggcgatagttaacagaaatttattgtatattttaaattatctagaagagtggaattggaatgttcctaacacaaggaaaagataaataattgaagtgatagagacttcagttaccttgattcaatcatcacacattgtatgctcgtaccaaaacatcacatgtgccctataaacatatacaactgttatatatgtataataatgaaatatttaaacttttaaaaaagtgttgtttagtgcatcacctttatcaatgatctcagttagattttctgaataacttcctgcagcctctacatcagcacttgctgcttcaccttgcactgttatgttatggaaatggcttcttttcttaaacctcatgaaccaattctgcyagcttcagatttttcttctgaagcttcctcactcctttctgccttcatagaattgaggaggatagaattaaggttcttgctttggattaggctttagcttaagggaatggtgtggctggtttgatcttctatccaggccactaaaactttccctttactatcagtaagacttttttgct

SEQ ID NO: 224048 - DNA, 587 bp, Homo sapiens
tcaaagcacttttgttcaccagtttatttattacatctcaacactcttgtgctttgcatgtggtatctattcacaataaaaattatttatctaaaatattaggaacatcagatgataatgaactgttatatgaacatatttacattctcacatttgtatttttgaattggaggaaaagcaaactaatcatcgatatatacaatcctcagtctgtcttacctgagcaaaagcatgatatgattattccttaagaaatttcgagccaggtgaatcagaattcattcatttaacaagtatttgtggagtcctttccatgtgtctggtgctgttctggacagagaggataaaatggtgaatggataytggcatatttctgacacttaaaatcatagggtctagtggaggaggcagacatccatcaagtaatcacaaaaaataaatgctaacaatgttataagtgttatatgacacataaagagatggtaacaagaagattctatttaatctgggagtattgtctctcacaggctctaaaggaagcaaaaaagttaactgtgatctaaatattgaatcaaaattaactagat

SEQ ID NO: 224049 - DNA, 559 bp, Homo sapiens
tggggattagtacatggacatttttggggtgccattattcagtttaccatagctcccaaattctgtattgagttcagatcagatatgtagctcctaaacacacaagtaccataaaggctacttgtctgaaactcagctcacttgtgcctaccaagtcctcctttatctaatttatgaatctccatttgaamtttcttttttttttctttttttttctttttttttttttttttttgaggccgagtctcgctctttcgcccaggccggactgcagtggcactatctcggctcactgcaagctccgcctcccgggttcagctttcccgacttattatcacatccagagatatgttactcatctatggcactctttcttccctacttctcacacatatccagggattaaatctcatttgtccttcctcctttgcatctctactgctgtaatctcagttcaggaagtcacaaagggcactgagatgctgactgaggtgtcattcctaagaacaatgtccattctttagagtctggatactttcagctcatttttttttttttt

SEQ ID NO: 224050 - DNA, 559 bp, Homo sapiens
tggggattagtacatggacatttttggggtgccattattcagtttaccatagctcccaaattctgtattgagttcagatcagatatgtagctcctaaacacacaagtaccataaaggctacttgtctgaaactcagctcacttgtgcctaccaagtcctcctttatctaatttatgaatctccatttgaaatttcttttttttttctttttttttctttttttttttttttttttgaggccgagtctcgctctttcgcccaggccggactgcagtggcactatctcggctcactgcaagctccgcctcccgggttcagctttcccgacttattatcacatccagagatatgttactcatctatggcactctttcttccctacttctcacacatatccagggattaaatctcatttgtccttcctcctttgcatctctactgctgtaatctcagttcaggaagtcacraagggcactgagatgctgactgaggtgtcattcctaagaacaatgtccattctttagagtctggatactttcagctcatttttttttttttt

SEQ ID NO: 224051 - DNA, 559 bp, Homo sapiens
tggggattagtacatggacatttttggggtgccattattcagtttaccatagctcccaaattctgtattgagttcagatcagatatgtagctcctaaacacacaagtaccataaaggctacttgtctgaaactcagctcacttgtgcctaccaagtcctcctttatctaatttatgaatctccatttgaaatttcttttttttttctttttttttctttttttttttttttttttgaggccgagtctcgctctttcgcccaggccggactgcagtggcactatctcggctcactgcaagctccgcctcccgggttcagctttcccgacttattatcacatccagagatatgttactcatctatggcactctttcttccctacttctcacacatatccagggattaaatctcatttgtccttcctcctttgcatctctactgctgtaatctcagttcaggaagtcacaaagkgcactgagatgctgactgaggtgtcattcctaagaacaatgtccattctttagagtctggatactttcagctcatttttttttttttt

SEQ ID NO: 224052 - DNA, 530 bp, Homo sapiens
aacttgaagggccctggtgaatactcgaagcatttaagatatcaccacaggataaaataaacaataccatattctgacagaaattaagtttttaaatgttctaatctctgaatagattaaaatgatctaagttggtagtatgtctaattcacttcttgtcagaaagaaatgtaaatcatatcaggttcacatggtctctatagcagctttctgcataatagcctcaaattagaagcaactaaarttagtatcaattaaagagtggtgaaataatttgtgataagtcaatatgttggaatttttttattgaataaaagaaaatgaaactataataaataattatgaatacatattattataaatattacattaagttaaaaatgctagaagaaataaagcctacaaaaattataatttccaatattaacattctttaaaaaagtaaaattacaaggaaaaagatcagggccaggatgctgaaggggtttcatagcaaagaggctttagggaactttctgctgtagtggtaa

SEQ ID NO: 224053 - DNA, 551 bp, Homo sapiens
gggccagaatccttttgcacatcttgacgccatcttatttttttgctgacctagcagttccagcaacattgtgacaaatttcccatatagacgtctatctgtttgaaataaagagaatagagactgttttcttttgtgtcaggagtgtggtttttctctgcccgtgcataagtctcacaaaggcatctaggatacttgctgcatccagatctccagttctaattagcatgccagcagcgaaatggatgggcatgatgttctatgggctgctgagaaaatcaaggcccatgagtggtaattagggaagacagtcagagtattgacagactttgatttaggatactgcacgtgaactgctgttctggacttttgaaagtacctacttctggtggtctttgcttgttgatataaagggaaaaaaagaaggcacaaagtattttccagctctccacatcagtagctgaatattcagtgctttgctctgttaatttgttccaatacagagatcacagcttgaatarcagctacaattggagtcactaacaaattat

SEQ ID NO: 224054 - DNA, 586 bp, Homo sapiens
taagctctcttgctcaggctgaatgaaaagaaagggcagaaggaggatagtgaggacctcattgttccaagcctaggatatgtcagcacttgtgctgtttgggaagtagtatgtaaggtatgacctggtatctgtttcttatttactgatggagtggcaataatccctgttgctggtaatcaacaagccaacaagcaagcaaacaaacaaataaatgaaaaacattacatttgatatttctcagggcatttagtatgtcactatatgtaagggacttagagaatagaggaagcgtggttattcctaaaaagactgtttttcagaatacaattaagaagtgttataaatatgatatctgacactctatatgatttaaaactagacaaaatttcttatccaataatgaatgtaccagcatatatrgagaagtaagaaaaatttaaaaattatattaagagaaaaaccaagcatcatggatcatctgggcttctcctgagtctccttatgttgctctctttacaggaaaaatagagcaaacatacttatttagatgctcccagaaggtcaattggggcagtggcctccc

SEQ ID NO: 224055 - DNA, 587 bp, Homo sapiens
ctcattggattgttttgaagacagagaatggtatgtggagcactgattaaatcattacttcaagtaataaatctaactccatattcaaaaacctcatatttgtttttaaaataatataggtaaaaacagatatttataacagatgaaatagaaattttaaaaaatgaaaattgagtttaacaagtttgctacatgggagacaatattaaaaattatacttctgacaacattttcacacatttattagattgcttaaaatcccaaaacagaaaataccattggctggtgaagatgtggagaaacatgtgctttcaattattgccaatgggaatgcaaaatgttgtagtcattttaaaagaaggtatggctgtttttaaawagctgaacatagtattaccatacgacccagcagtcacactcctagatatttacccaaaccatttgaaaacttatgaccatacaacagcttgtgtgtcgatctttatagcaggtttatgtataatcactcaaaactagatacaaccaaaattcatactatggattattattcaatgatttaaaaataagctaccaagtcctgtaaagac

SEQ ID NO: 224056 - DNA, 587 bp, Homo sapiens
ctcattggattgttttgaagacagagaatggtatgtggagcactgattaaatcattacttcaagtaataaatctaactccatattcaaaaacctcatatttgtttttaaaataatataggtaaaaacagatatttataacagatgaaatagaaattttaaaaaatgaaaattgagtttaacaagtttgctacatgggagacaatattaaaaattatacttctgacaacattttcacacatttattagattgcttaaaatcccaaaacagaaaataccattggctggtgaagatgtggagaaacatgtgctttcaattattgccaatgggaatgcaaaatgttgtagtcattttaaaagaaggtatggctgtttttaaatagctgaacatagtattaccatacgacccagcagtcacactcctagatatttacccaaaccatttgaaaacttatgaccatacaacagcttgtgtgycgatctttatagcaggtttatgtataatcactcaaaactagatacaaccaaaattcatactatggattattattcaatgatttaaaaataagctaccaagtcctgtaaagac

SEQ ID NO: 224057 - DNA, 579 bp, Homo sapiens
aatattttgttgttgatattgatgaagtagaatgtcagakgatattccatgtgtacattcatctataagatacttaggagatagaatcaaaatgtctcattagttattagcttgtcagtgtaagaattaagtacaaatcatctgtcgaagaacaggtttctggcttctagaaattataaatgattgcactgatataataagcacaggaagagaaagggacttgggaaacaaagtaaagagaagccaaattcaattttggaatgttaagttgaagcttcaagagaaataattaaatagatattgacaacgattcatgtttgcttcattgtgaaattattttcaatataggttaaaattatttttggtgtaggttgtttatttgtgttacaggtatttaatatttttcgtaagaaagaagtatcattgtttctcttagttcaaatattctttgatttccttccatattccattttctcaatataagaatacatacatacatttcattgtatatatatttcaaccattatatcctttgactaatagaaaataaattctaaacaatataattcatatagttta

SEQ ID NO: 224058 - DNA, 484 bp, Homo sapiens
ctatcaacgattcctgaagtaatttactactgatggcgtggaaatctctcactgttgaaagaaaaggggaaaaaaaagagggtgaatattctgagtcaaatagttgttatggtggcatctttatactgccagyatgtgttttaatattttaatcacttttgctatttgaataaattaaaatggaaatactgcttctaaaagcaacaaggtgcttttactttcatttaaaggtatacaattccattctttataggaaagcactgatcatacattcaaaagaaaactgtgtgaagatttattacaattacatgatataaatctgatttacataatttttacagactatattatattataattacataatataaatcttagttgaattattgtcattattatgccagttttataatataattttgtaaaccaggtaataaaatatctggcttatagcacatatttggtaactgattatatttaacat

SEQ ID NO: 224059 - DNA, 573 bp, Homo sapiens
ggatgactacagttggagcaaatgaaaatgattttgccagaggcaaaatacaacatgtttccaacaacagtcatagttccaccagggccattggtgaaactccatggtattattatataagttgtttttactacaatgacatatgttaagcacttacaaaatgcttacccttaattggaatgagtttagcctgaagacagaatataatttatttaatgttctttcacttgtcacaattaaataaatacattgactaaatatgtgataatttgtaatcccttccttttgagttctttgtaaggtacataatacttcagggttttgataatatagacattacatctattgaatttttccctcttcataatttttattcaagagagtatttataatgataactaactaataataaataaacaatgtaaacaaatctactgtgaaaaccacattgactttctaaaatttagcctgggcrtccatttgaaatttctatgtcatcagagatctggtttttcacagtacaaaaaaaaacaaacaacaaacactctctccttttcacaattctctttattt

SEQ ID NO: 224060 - DNA, 539 bp, Homo sapiens
tattgttagtgtagacaacactttggaaatatttggttgtaaagagttagaaagaagttagaaaggttgagggagatctagggtcctaatagagatttttttgtgagtgatttttgttttggtttgaaaatggaaaaatgtgattataaaaaatgtgtaaggkatgattatattagaaagaattatttcaagagagaggggctaggtataaaaagagataaattatagagaaagaactaccaagaaggtaagaaaacataagacctggaacacagggagctggtcttaggtgggaggaggtgcacattttctattcctctcattacaggaaagaagtatcataagaatataggtatagctgactattttaataaaaagaatacgaggaaattttttttctttggtgaaactgatatatttcccaaagatggccatgataatgtatcccatagcatatgctgttctttgaaagagttgttgacttttctctattgagacacagggtcctgttccttttccttgaactacatggacttgtg

SEQ ID NO: 224061 - DNA, 443 bp, Homo sapiens
acttctttccagccgtttgccatattttgggaaactcattctgaaataatttcagcgttttttggttcttcctttcattaattcttaaccgtctgtttcttttctagcagtcagatgtatatactcagatgaatgcttcagaaatttaaatcattctttgcattatttttatcwgttgaattttgaagtgggattataattcttatcattttgcttctttaatcaatggattctcgattctaaagtttcgatccatatacagaggaaaacatgattaagtttctgtgctgatgagttagctgtaggcagccttaagggccttggagagctacctgagttccaataaactgctgggtttatcctctccactttgtcctgttgtgacaaaggctcctaaaccggtggcatttgctgttgtcatcgatttcttttttggtgaattc

SEQ ID NO: 224062 - DNA, 539 bp, Homo sapiens
tattgttagtgtagacaacactttggaaatatttggttgtaaagagttagaaagaagttagaaaggttgagggagatctagggtcctaatagagatttttttgtgagtgatttttgttttggtttgaaaatggaaaaatgtgattataaaaaatgtgtaaggtatgattatattagaaagaattatttcaagagagaggggctaggtataaaaagagataaattatagagaaagaactaccaagaaggtaagaaaacataagacctggaacacagggagctggtcttaggtgggaggaggtgcacattttctattcctctcattacaggaaagaagtatcataagaatataggtatagctgactattttaataaaaagaataygaggaaattttttttctttggtgaaactgatatatttcccaaagatggccatgataatgtatcccatagcatatgctgttctttgaaagagttgttgacttttctctattgagacacagggtcctgttccttttccttgaactacatggacttgtg

SEQ ID NO: 224063 - DNA, 344 bp, Homo sapiens
taaataaaagtgttaaaatgcacctttattgataggaaaatgttaacaattttttctgatcttatcctggctcatatggaactaattaccattgctacatttttcttataattttaagggtttgatacattgtccctgatgctaagataaattttaaatatactttattggtatcttgtcaaatagtmtaaatctgttattcaaatatttacttggcctaccactaaacattctggctatataataatgccaccttcatttcagtgtcttgcttttggaactatgttatcaggaaataaatttgctgataattccgtttattttaccagttacagtttggaaaa

SEQ ID NO: 224064 - DNA, 601 bp, Homo sapiens
tttaattcatcaattgcaacaaataaaccattctaatacagtaagctaataatagggtaaaccatgtgaggtatgtggaaaccctactatcttcataatttttctatgcatttaagattttttaaaacataaaattttaaaaaattgtggctgggtgcggtggccgatgcctttaatcccagcactttgggaggccgaggcgggcggatcatgaggtcaggagatcaagaccatcctggctaaaatggtcaaaccccgtctctactaaaaatacaaaaacttagccgggcgtggtggcgggcgcctatattcccagctactcgggaggctgaggcaggagaatggcgtgaacccgggaggcsgagctggcagtgagcccagatcccgccaccgcactccagcctgggcgacagagcaagactccgtctcaaaaaaaaaaaaaaaaaagaaaaaaagaaaaaaaaattgtatatgaaattccaataaatgcaaacaggtataaatatgtccgtagcaaacagtaatacttgtaaaaatgtagaaatttataaaaataaatagttatttcctcagctcaccatcaactacagaagtagctttt

SEQ ID NO: 224065 - DNA, 600 bp, Homo sapiens
gcgattgagtttgtttctattgccattgaaaattatttcaaacggtcttataagaaatatattcacatcatcttgagataaaatttgtttacacattaaatacatctagaatcattcactctttcaacttaccataatttcctaaaatgcatggaaacaaacagctcagcacagcagttactgaaaagaattgatgtkacttcccaatgtaactaaattaaaaccagaaagtaatttatactccctgattctatgctgtgttttgtatagaaagtgagacttttaaaaaaaatcatttagtttacttggaaaaaatgttcaagctctgttattttccatggagatttcaagagtgaatctgtcagttctataagcaattcataatgtgatcaaatgaaggattaaaaaaaccgtgagtgggattttcttcacctgtaataaataccctgacgcctcttccccctgccaccaggaagtgttgcattttctgacttgtgtaatttttttcatggtgttgtcctcttttcataaaactgaccatcacatcaagaaacatgcaaatactcatcttgggtctcataaagttaagattaagtaaac

SEQ ID NO: 224066 - DNA, 603 bp, Homo sapiens
caggtggggactctctgttgaagttttcctgagcatttttctgctaaagctttggccaactttctcaaaatgctctcataatcagaaaatgttatcatttttcagtcctttgggaagtcaacaagccaaatgctttgagcataccaaaaaactgttgccataaattttgctcttgaagagtctgattttggtttgactggcccatttccacctcttggtagccattgctttgattgtgctttgtcttcgggattatactggtaaagccgtatttcatctcctgttacaattatttgaagaaatgcttcaraatcttgatctcacttatttaaaatttccattgagagctctgcttttgtctgcagctgatctgagcacaattattttgggacccatgaagcagaaaatttactcaattttatttttttagtcataattgtgtaagctgaagcaagtaagacatctatggtattggctttgtttctgctattaatcattcgtcctattcagttaggggacaaacaagatgattttttttctggcaaattgatgtgaatggtctgtcactgtagacttcaggacgtcagtttaattttgaccctt

SEQ ID NO: 224067 - DNA, 603 bp, Homo sapiens
caggtggggactctctgttgaagttttcctgagcatttttctgctaaagctttggccaactttctcaaaatgctctcataatcagaaaatgttatcatttttcagtcctttgggaagtcaacaagccaaatgctttgagcataccaaaaaactgttgccataaattttgctcttgaagagtctgattttggtttgactggcccatttccacctcttggtagccattgctttgattgtgctttgtcttcgggattatactggtaaagccgtatttcatctcctgttacaattatttgaagaaatgcttcagaatcttgatctcacttatttaaaatttccattgagagctctgcttttgtctrcagctgatctgagcacaattattttgggacccatgaagcagaaaatttactcaattttatttttttagtcataattgtgtaagctgaagcaagtaagacatctatggtattggctttgtttctgctattaatcattcgtcctattcagttaggggacaaacaagatgattttttttctggcaaattgatgtgaatggtctgtcactgtagacttcaggacgtcagtttaattttgaccctt

SEQ ID NO: 224068 - DNA, 603 bp, Homo sapiens
caggtggggactctctgttgaagttttcctgagcatttttctgctaaagctttggccaactttctcaaaatgctctcataatcagaaaatgttatcatttttcagtcctttgggaagtcaacaagccaaatgctttgagcataccaaaaaactgttgccataaattttgctcttgaagagtctgattttggtttgactggcccatttccacctcttggtagccattgctttgattgtgctttgtcttcgggattatactggtaaagccgtatttcatctcctgttacaattatttgaagaaatgcttcagaatcttgatctcacttatttaaaatttccattgagagctctgcttttgtctgcagctgatctgagcacaattattttgggacccatgaagcagaaaatttactcaattttatttttttagtcataattgtgtaagctgaagcaagtaagacatctatggtattggctttgtttctgctattaatcattcrtcctattcagttaggggacaaacaagatgattttttttctggcaaattgatgtgaatggtctgtcactgtagacttcaggacgtcagtttaattttgaccctt

SEQ ID NO: 224069 - DNA, 530 bp, Homo sapiens
taggtgcacccatgcccaacctgctctacagattggatgctaatcacctacagctatgtccttctctggaggattacccttgcctgacagaagcttcctatccctgagatgcttgaaagtttctgtccccactcccgactcccagggcttcctcatattccatgacttacggatgctggtcacagaacactatctgagcagaacaagttctgtgttgcaatttgtactccagagcttcctgggagatctgcctgcagttattttcctgtttttgttctttgaaattactacctctataaatctcttacacactatacccgtctcaggcctttctttctgtaaactcaaagtaagttgastataaaatagaatgtccaataaactcaaggtaagttgagaataaaatagaatgtcacaacctgagctcacctatgatggcactactctaagaaaataattatccagttataaaagaaagtactagaaaatctattaatacatcaatttttgaaaagtaatttcaataactg

SEQ ID NO: 224070 - DNA, 601 bp, Homo sapiens
aattatgcacagtatgtaatatttgatactgataatagacaattatattaaggatttatatattaacagtattatactgtttaccttttagagtgtattccttttatttatataaaaaaaaaaactgtaaaacagcctcagacwggttcctcaggaggtattccagaagaagatactgttataggagaggacagctccatgtgtgtttctgaccctgaagaccttccagtaggacaagatgtggaggtggaagaccgtgacattgatgatcctgaccctgtgtaggcctaggctaatgtgtgtgtttgtgtcttagcttttaacaaaaaatgtttataaagtaagataaaaaattaaaatatagaaagctttatagaataagagtataaacaaagaaaatatttttatacagttgtacaatatgcttgcattttaagctgcgtcattacaagggccaaaacgttaaaaaaattaaaaaatttataaagtaaaagttatagaagctaaggttaatttattattgaagataaattattttgtataaattaagtgtacagtatttacaaagtctgcagtagtatacagtactgtcctagccctt

SEQ ID NO: 224071 - DNA, 549 bp, Homo sapiens
aagaagtaaaatgatcgtttcccccactgtaaatgtgccagggtgccttttcattaatgttttgtcatttgcttcaacattcagctgctcgtcagagattcagtgactaagaaccacaacaaggacagaaacatttctccatgcgacactctgtacctatttgcaatttgatctcatccaaacaaatttccctgttgtttstgctgctattcaggggaacatataaaacagaaccagtcatctctggggaagaactagcaaaccattttagatcatgtgtaacattgtacaccaagcagtaatctatatcactttaatttatcttcctacaaaatatatgttacctgccatgtaattaaaactctccaaagttatctacaataaaactgtaactacctgggacacatacaataaattatagagaatcttattaagtaatgataatcaattattaattgaataaatttgtggtgaatgccatttagatacttgcggattttaaaaataacttgaggattaattaacgggcagtgtcatcttatatcaata

SEQ ID NO: 224072 - DNA, 549 bp, Homo sapiens
aagaagtaaaatgatcgtttcccccactgtaaatgtgccagggtgccttttcattaatgttttgtcatttgcttcaacattcagctgctcgtcagagattcagtgactaagaaccacaacaaggacagaaacatttctccatgcgacactctgtacctatttgcaatttgatctcatccaaacaaatttccctgttgtttctgctgctattcaggggaacatataaaacagaaccagtcatctctggggaagaactagcaaaccattttagatcatgtgtaacattgtacaccaagcagtaatctatatcactttaatttatcttcctacaaaatatatgttacctgccatgtaattaaaactctccaaagttatctacaataaaactgtaactacctgggacacatayaataaattatagagaatcttattaagtaatgataatcaattattaattgaataaatttgtggtgaatgccatttagatacttgcggattttaaaaataacttgaggattaattaacgggcagtgtcatcttatatcaata

SEQ ID NO: 224073 - DNA, 551 bp, Homo sapiens
tagaattttattttttgcatatacaactgcctcatcgaaatattctcttgtatgcaaaataagcatttcaaatatagaacaaaaataataaaactctgcactattcctctctttatctcataacctgcatccaatacgttgcaattttgrttagttctaccttcaaacagagccttattctaaccattgttttcatctttccagctcaaacattggccaaagctatcatcacttgtgacctatattactgcaaaatcctaacttttctgttcctgcgtacagcctaatgaagttgactatctgtccaggaagcagagagatttttatagcataaattaggtttatttctcccttgcttaccacctaccagtgagttccaaatataagtaaaataatattaaaatcacctactgacactctaaaggtcctgtatgaaatgaaggtgggtagtaagattttatatattggttataaatgaaagcaatccatctatgaaggattcttctaattacaactcatagatacaagtcttgaggtaggtaactgagata

SEQ ID NO: 224074 - DNA, 551 bp, Homo sapiens
tagaattttattttttgcatatacaactgcctcatcgaaatattctcttgtatgcaaaataagcatttcaaatatagaacaaaaataataaaactctgcactattcctctctttatctcataacctgcatccaatacgttgcaattttggttagttctaccttcaaacagagccttattctaaccattgttttcatctttccagctcaaacattggccaaagctatcatcacttgtgacctatattactgcaaaatcctaacttttctgttcctgcrtacagcctaatgaagttgactatctgtccaggaagcagagagatttttatagcataaattaggtttatttctcccttgcttaccacctaccagtgagttccaaatataagtaaaataatattaaaatcacctactgacactctaaaggtcctgtatgaaatgaaggtgggtagtaagattttatatattggttataaatgaaagcaatccatctatgaaggattcttctaattacaactcatagatacaagtcttgaggtaggtaactgagata

SEQ ID NO: 224075 - DNA, 551 bp, Homo sapiens
tagaattttattttttgcatatacaactgcctcatcgaaatattctcttgtatgcaaaataagcatttcaaatatagaacaaaaataataaaactctgcactattcctctctttatctcataacctgcatccaatacgttgcaattttggttagttctaccttcaaacagagccttattctaaccattgttttcatctttccagctcaaacattggccaaagctatcatcacttgtgacctatattactgcaaaatcctaacttttctgttcctgcgtmcagcctaatgaagttgactatctgtccaggaagcagagagatttttatagcataaattaggtttatttctcccttgcttaccacctaccagtgagttccaaatataagtaaaataatattaaaatcacctactgacactctaaaggtcctgtatgaaatgaaggtgggtagtaagattttatatattggttataaatgaaagcaatccatctatgaaggattcttctaattacaactcatagatacaagtcttgaggtaggtaactgagata

SEQ ID NO: 224076 - DNA, 618 bp, Homo sapiens
tacatgccttaatgcacaggccactgctctaggccattgcattgactctatggtttcaaagtagcactgttttagatcgtttcaaattgaaccatcaaaaaaataattattaaacatctaccgtgtgacagtcactattctaggaattgaaaagtaaaagcacatcaagtactaattacaagactatctgatatagatatctatattttaaatcaagaggttatttctgattccaggcatagatttccattgcttttgtttaactgaaagtgcctttatttctcactcaytcaaataatattttaatctggtgtacataatcttgactgtgtttttccccagcatttggaaattaatgtaactattttcagacttccattcttttggcaaactatttttctctttgcaaagcctgcaaataatttctctcttttgtaaataatcccatttttctttgtaaatgttgtgattttctttattttttattctgtagcttcactgtgaaagtgtgaattgttaatttttaaaattgctagtttattttgctgaatggtcgtcatgtttttccagctaagaatttattttttcaattctggaaaaattttcatccagtatctt

SEQ ID NO: 224077 - DNA, 618 bp, Homo sapiens
tacatgccttaatgcacaggccactgctctaggccattgcattgactctatggtttcaaagtagcactgttttagatcgtttcaaattgaaccatcaaaaaaataattattaaacatctaccgtgtgacagtcactattctaggaattgaaaagtaaaagcacatcaagtactaattacaagactatctgatatagatatctatattttaaatcaagaggttatttctgattccaggcatagatttccattgcttttgtttaactgaaagtgcctttatttctcactcactcaaataatattttaatctggtgtacataatcttgactgtgtttttccccagcatttggaaattaatgtaactattttcagacttccattcttttggcaaactatttttctctttgcaaagcctgcaaataatttctctcttttgtaaataatcccrtttttctttgtaaatgttgtgattttctttattttttattctgtagcttcactgtgaaagtgtgaattgttaatttttaaaattgctagtttattttgctgaatggtcgtcatgtttttccagctaagaatttattttttcaattctggaaaaattttcatccagtatctt

SEQ ID NO: 224078 - DNA, 525 bp, Homo sapiens
agtatcaagtattttgtaatatatgtctaatctacataaaagttatgctacaggtagaggaaaataattataccaagtaaaagggaaacattaacaatattcagatgccaagttcagtagatcagggcccataatcccagtgctttgggaggccgtggcaggaggactgcttgtggccaggagtttgaggctgcagtgggctatgatcatgccactgtactccagcctgggcaacaaagtgagaccctgtctctaaacatacatatagatagaaytttttttcagaatttatatatttttgagagctctctctcttgctctctctatatatatgcatgtatctataatatatactagatctatatatccattatatatacttacatacgcttgatgtatttatccattatatatgcttttatatactagatatatttattatatgtatgtttgtatgtgtatatatatacacatacacatgtatatatacacatacaaacatatatatatagagagagagagaga

SEQ ID NO: 224079 - DNA, 525 bp, Homo sapiens
agtatcaagtattttgtaatatatgtctaatctacataaaagttatgctacaggtagaggaaaataattataccaagtaaaagggaaacattaacaatattcagatgccaagttcagtagatcagggcccataatcccagtgctttgggaggccgtggcaggaggactgcttgtggccaggagtttgaggctgcagtgggctatgatcatgccactgtactccagcctgggcaacaaagtgagaccctgtctctaaacatacatatagatagaactttttttcagaatttatatatttttgagagctctctctcttgctctctctmtatatatgcatgtatctataatatatactagatctatatatccattatatatacttacatacgcttgatgtatttatccattatatatgcttttatatactagatatatttattatatgtatgtttgtatgtgtatatatatacacatacacatgtatatatacacatacaaacatatatatatagagagagagagaga

SEQ ID NO: 224080 - DNA, 515 bp, Homo sapiens
ataagcctctcagggaaaaaaaatcctgtatttagtgccaatgcagaagaaagcaaggttggttcaaggcagggaatggagttcgagtttgggacaaaatgatgatgagaatgtgaaatggggctggagaggcagaagtggattgcaataccttggtgctactgcaacaaccacccagcctccaactcaacaacaacaaggcagagtttggaattcaattagatgtactttggctttgcttttctttttgttgttgttgtttttttttttttggaaaggggcttcgtagtaaaagttaagtatctttactaatttgtgagttcaaaattcatcagagtatttctctattcatgtgtattgtatcagcaatcaaaaaatttatgagagcaaatggttgcaatttattaaggaattttttaaaaaattttaagagagctcaacattaagcrcacacggacaaaaatatgagaataacagacaccatggactactagagggggtgaagggagaagggc

SEQ ID NO: 224081 - DNA, 554 bp, Homo sapiens
tagcagcatcaccataacaagagttttcatcatacgtaacattcaaaattatgcagttttggaatagttgttcttattagaaagagatactcttatctgtacatgtgagtttttttttctacaagatatcatttccaatgtctttccattttaactcagtgttcaaggaggcaaaacagaattagagacaagacagaagcatgttctcatgtcatgttctcatggagagtggctatctttctgaattggaatcacctgataacccactcaactagctcattgactagacgattaacagctgacaggttagtgatgtttagtaaatgcagtaaatgtgattggaagtgatgaggtaggagttactctataaaacagaatgacagaggttttgtctataaaacattagactatgtagactattaactctatggaaayctaataagccatgtttactttatttaacctatcccaagtaattttaggctgctttagccattatgtggtttctccaagaatcattgtgaaaagtgatcgcattttatttctactgactt

SEQ ID NO: 224082 - DNA, 481 bp, Homo sapiens
tgtccttcattctgttgatatgctgtatcaaattgactgatttgcatacgttaaaccatccccatatccctgagataaatcccayttggtcatgatgaatcatctttttaatgtattgttgaatttgttttgctcatgttgaggatttttgcatcaaaaatcagagatattggggtgtaattttcttgcattttcttttttatttttgatgtgtctttgtccggttttggtatcaaggtaatactaaactcattggatgagtttgaaaacattctctctcttctatatttcaggatagtttgagtaggattgagattatttactttttaaatgtttggcagaatcaacagtgaagccatgggttccaggcttttctttgctgggagactttttattatgacttccatctcattacttgttcaggtttcaaattacttcatggttcaatattggtagtttgtatttgtctaggaatgtatcc

SEQ ID NO: 224083 - DNA, 405 bp, Homo sapiens
agcctgtccccttcctaccatccatgtgtggagagcttgaggccaaagatgtttcccagctccatgtctaggcaaaagactgggcatttggtggcagcactggattctccctcagtgttggtgcttgtgcctgccatcggcagatctgtaggcaaacttctccagcccagcactacgtatctttcccctagcccctgaggctgagcggggagctcagaccactgtgcwtttcacaaattgggccattgcctgaggcaaaagaaagcttctgccagtaaacaaggatcaagtattgttttaggctactcttgaattgctataaagaaatatctgagactgggtaattttaatagaaaagatgttcaattggctcatggttcagagaaggccttacagaaagcatga

SEQ ID NO: 224084 - DNA, 594 bp, Homo sapiens
ccaaactctgcctgttacccaattccaaagctgcttccacatttttaggtatctttatagctattccccactcctggcatcaattttctgtattagactgtttttgcactactataaagaaatacctgagactgggtaatttataaagaaaagaagtttaatcagctcatggttctgtaagctttacaggaagtgtggtgctgaaacctcctatgcaaaaattataactgrgacaattatgacaatgaaagagattagacctaaccagctccatcttacctctaacccttaagctgtctttgttcattcctgagcataggctgaaccttgggaaaaaattcagtttatgatttgactctgaaacaaaattgataatacttctttcccaaaaagaccctcctcacctgggaactagtctgtcttcgtcagactaacaaattatctacaagactagaaattactacagtttaggagtcatgcagcctctggcttcaagagtctgaacctctccaaattgctcctgggcataacatcagtatcgtagaacctaagattggtgcttatgatatgttgcagaccctgcacaatggatca

SEQ ID NO: 224085 - DNA, 594 bp, Homo sapiens
ccaaactctgcctgttacccaattccaaagctgcttccacatttttaggtatctttatagctattccccactcctggcatcaattttctgtattagactgtttttgcactactataaagaaatacctgagactgggtaatttataaagaaaagaagtttaatcagctcatggttctgtaagctttacaggaagtgtggtgctgaaacctcctatgcaaaaattataactgggacaattatgacartgaaagagattagacctaaccagctccatcttacctctaacccttaagctgtctttgttcattcctgagcataggctgaaccttgggaaaaaattcagtttatgatttgactctgaaacaaaattgataatacttctttcccaaaaagaccctcctcacctgggaactagtctgtcttcgtcagactaacaaattatctacaagactagaaattactacagtttaggagtcatgcagcctctggcttcaagagtctgaacctctccaaattgctcctgggcataacatcagtatcgtagaacctaagattggtgcttatgatatgttgcagaccctgcacaatggatca

SEQ ID NO: 224086 - DNA, 543 bp, Homo sapiens
tgagataccatctcataccagtcagaacggctattactaaaaaagtcaaaaataacagatgcaatgctgacaaggttgtggagaaaagggaatgcttatatactgttggtgggactgtaaattaattcaaacattgtggaaagcagtatggtgattcctcaaagagctaaaaacagaacaataattctacccagcaatcccattactggatatatacctaaataaatataaataattctatcataaagacacatgcactcatacattcatcatagcactcttcacaagagcaaagacatgtaatcaaccttaaatgcccatcaatgatagattggataaaaggagatgtggtacatacacacatggaatactatgcagccataaaatagaatgagatcatgtccattgcacgaacatggatagagcttgaggtttatcaagtacagcttgataagtacagcaaacaaagtgtgacacsttctcacttataagtgaagcttaatgatgggaatgcatggacaaaaagaggggaacaagagacaa

SEQ ID NO: 224087 - DNA, 622 bp, Homo sapiens
  misc_feature (1)...(622): n = A,T,C or G
gaagcctgggcaacatggtaagaccctgtgtctctacaaaaaaaaaaaagaaaagaaaaattattcagacatgttagtaatcacagaagtaaaaactaatataatgagaatgtttctcttgttaaattgcattacaagacccacttattggtctaactgcagtaaaattagtaatttttaaacaaaagtttctggaagacaatttataaaaaggttataaaaaggtttaaaatgttcatattctttgaccccccaaaatttcactttaggaatttttctaaggaaattggagctgtacaygatagttagtatatacaagactgttcattttagcatttagacaagacatgttcattttagcaatttagaaatgaanaactttaagtgactaatagtaaggagttgattaaataaattttgcttattacttaaaaaatatatttggcagccatttaaaaattatatttttcaaggtatatttaataatgcaataaaatatatatgagataatatgttttaaaagatataaagaatatacttatccttccaatatttattagatgcctactatcttccaggaattgttctgtagtataatcattgtgtgatttgttttgtatat

SEQ ID NO: 224088 - DNA, 622 bp, Homo sapiens
  misc_feature (1)...(622): n = A,T,C or G
gaagcctgggcaacatggtaagaccctgtgtctctacaaaaaaaaaaaagaaaagaaaaattattcagacatgttagtaatcacagaagtaaaaactaatataatgagaatgtttctcttgttaaattgcattacaagacccacttattggtctaactgcagtaaaattagtaatttttaaacaaaagtttctggaagacaatttataaaaaggttataaaaaggtttaaaatgttcatattctttgaccccccaaaatttcactttaggaatttttctaaggaaattggagctgtacatratagttagtatatacaagactgttcattttagcatttagacaagacatgttcattttagcaatttagaaatgaanaactttaagtgactaatagtaaggagttgattaaataaattttgcttattacttaaaaaatatatttggcagccatttaaaaattatatttttcaaggtatatttaataatgcaataaaatatatatgagataatatgttttaaaagatataaagaatatacttatccttccaatatttattagatgcctactatcttccaggaattgttctgtagtataatcattgtgtgatttgttttgtatat

SEQ ID NO: 224089 - DNA, 581 bp, Homo sapiens
tcaagaaagagagctgaaaatgatgtgtctgaagtaaagagtggggatgagaagggaagaatagcaagattaatagatgcctcccaggagttctagatgtaataacctttcttcttttgccaaaatccaagtaggatatcaggactattgccttatcttttcacttttctggagtcacttggaatttatagatacagagtcacttctagactgcactaacaccctataatgtgttaatcagccttctattctatyccatttccaattccacacgtgtcattacttgcttgtaatcccaatccaagcgctcaactttttgatactggggaaaaaagtacctttggagatcaatttctgagtaatcctcctctcgtattgcactttgaaactatggctgcacaggtcagctatttatgtagaaaagggttcctcctctattgtcactaggaccttgaattagcctctctttctagaacacagaactcaggaaaggaagagtagcaggattctcacatcattcctattttccttctctggggccttcctgtctatctgaaaaggttaccctaagtggttgcttc

SEQ ID NO: 224090 - DNA, 581 bp, Homo sapiens
tcaagaaagagagctgaaaatgatgtgtctgaagtaaagagtggggatgagaagggaagaatagcaagattaatagatgcctcccaggagttctagatgtaataacctttcttcttttgccaaaatccaagtaggatatcaggactattgccttatcttttcacttttctggagtcacttggaatttatagatacagagtcacttctagactgcactaacaccctataatgtgttaatcagccttctattctattccatttccaattccacacgtgtcattacttgcttgtaatcccaatccaagcgctcaactttttgatactggggaaaaaagtacctttggagatcaatttctgagtaatcctcctctcgtattgcactttgaaactatggctgcacaggtcagctatttatgtagaaaagggttcctcctctattgtcactaggaccttgaattagcctctctttctagaacacagaactcaggaaaggaagagtagcwggattctcacatcattcctattttccttctctggggccttcctgtctatctgaaaaggttaccctaagtggttgcttc

SEQ ID NO: 224091 - DNA, 598 bp, Homo sapiens
tatataggatactggcttgttccttatagtagaaaatcaactgataatggtggagactagcttgggcaagaatcaacaatggttgttaaatcttagatgcaatgtttaatgacaagtaggatatatgcacaatctcacagcattttctcataaattatttataagaggaaaaatggtaactatacagtggagaaactggataaaacctttaccgggtgatcaaaattaaaactaccaagaggcagataggtattgtggcacctctggatgtgaagccctgcaaaagacatacgtcacttttgtagtgttctggtaagggatacataacctaaatttaattatgaggtaacactaaatgaacccaaagyaaggatcattctataaataactgacctctattgttttaaagtatcaatgcaacaaaagacaaaaaaagacaatattcctttaacagagattaaggaaatatgaaaattaaatgcaatacataatcctagactagagcttggactggaagaaaaattattatataaagacattactaacaaaatggacaaaattggaatataaattatatagacaaataaaaatagcaatg

SEQ ID NO: 224092 - DNA, 609 bp, Homo sapiens
aaacacattggcattttcaaagagaaattgacccagttaaaaggaaaaataaaagaaataaatacccaaaaaatgaaaaagaaagaaaacatttacatctgactctgcaaagtaaaagttctcatcccataaaggctgtcacaactccacaggcaggctggctccttctcacctgagagcacctcaggaacctgctctagaaacgctctgatgttgctcttggcccttcctagaccaaggtcaaaggctcagagtcaagcactttgactatccttggtaaagtaatcccytttatcagttggcatacatgatataatataaaatagtttaagtttagctttttaataaatggctttatgatgactgattctatagcaagatcagtgttcattttacctcttcagtaggaaaccttaagtaaattggcacacttggtggaaaaatatgaaatgtacagacatgtcctgggtcagcttttagcaacagcaaagagaatcttgccagattcaagggttatgatgaccacatagaagtaaaatttaaatttctgcctaacgatttgacgtctatgtatccttgccaggaactgatacctggtgtcactgtagg

SEQ ID NO: 224093 - DNA, 587 bp, Homo sapiens
ttatttgtggtctgacagccaggattggagaggactcccaataatttcctttaagccaccactgtcattttatgcctgagtcatccctactttaaaagccttaggagtgtgttgaaagaacagattgcagatgaccttgaacaagaacatcgaatataagacaatgaaattaagaagcaaaactgactcttcctctagttttgagtgaacttargcaagttgcataactttatgtcactgttttctcatttataaaatgaaactttatggcaaaatatctcactgtccacttgcactgcaactttaaactggaaaaaaaatcatactttgcaaaaaaactcctatagagatagctatctggattagctaatgtgagtagacagattgggtaatagataatccaatgtttgtcctgaaaataaatagttggttggttaaatgattgcctagaatctgcttggaatacatgtgttaatttcaaccgggaatcttgatcatcataatgagaaagcagatttttagaaaaactgtacaatcagaaagcaaaacaaaattttcaagacaattctggcctaagaaaattacct

SEQ ID NO: 224094 - DNA, 587 bp, Homo sapiens
ttatttgtggtctgacagccaggattggagaggactcccaataatttcctttaagccaccactgtcattttatgcctgagtcatccctactttaaaagccttaggagtgtgttgaaagaacagattgcagatgaccttgaacaagaacatcgaatataagacaatgaaattaagaagcaaaactgactcttcctctagttttgagtgaacttaggcaagttgcataactttatgtcactgttttctcatttataaaatgaaactttatggcaaaatawctcactgtccacttgcactgcaactttaaactggaaaaaaaatcatactttgcaaaaaaactcctatagagatagctatctggattagctaatgtgagtagacagattgggtaatagataatccaatgtttgtcctgaaaataaatagttggttggttaaatgattgcctagaatctgcttggaatacatgtgttaatttcaaccgggaatcttgatcatcataatgagaaagcagatttttagaaaaactgtacaatcagaaagcaaaacaaaattttcaagacaattctggcctaagaaaattacct

SEQ ID NO: 224095 - DNA, 587 bp, Homo sapiens
ttatttgtggtctgacagccaggattggagaggactcccaataatttcctttaagccaccactgtcattttatgcctgagtcatccctactttaaaagccttaggagtgtgttgaaagaacagattgcagatgaccttgaacaagaacatcgaatataagacaatgaaattaagaagcaaaactgactcttcctctagttttgagtgaacttaggcaagttgcataactttatgtcactgttttctcatttataaaatgaaactttatggcaaaatatctcactgtccacttgcactgcaactttaaactggaaaaaaaatcatactttgcaaaaaaactcctatagagatagctatctggrttagctaatgtgagtagacagattgggtaatagataatccaatgtttgtcctgaaaataaatagttggttggttaaatgattgcctagaatctgcttggaatacatgtgttaatttcaaccgggaatcttgatcatcataatgagaaagcagatttttagaaaaactgtacaatcagaaagcaaaacaaaattttcaagacaattctggcctaagaaaattacct

SEQ ID NO: 224096 - DNA, 656 bp, Homo sapiens
ggttggtttttatttaatgatgagaacattgagatattgtaactgccctaatctcacgcagctaacagatgccaggatgagacaacttatatatattatgcatggaaaatcccatcatttccagtgtttccccaggaagcttcttactgcagatctcaataacaacatatacacacatgcagactataggctgatgatctaacacacaattacccttttggcctgtttaagccagttcaatgagcttcagtgtacccatcccttctctgcatttgcttactccagaatcctattctaatcctgctctgaagcataaaatgtgatagttttctacattggagtaaggcatacaccaggaatcactgtatacatatgatgagaaatgtactatggttcagcctgggataattaactgtgcttcctggatttgcttacatcyttgttcaggatttatttagttttattaaattatcttcccttatactatctaaagcaaaccttcctcagactctaaggctgcatacactgctcaacagaaatagaatgcaagccacacagtaattttaaattttctaatggccacattaagaaaacatataaattaataggtgaaagtcattttaataacaatggttttaaaaatcaaatccagttga

SEQ ID NO: 224097 - DNA, 606 bp, Homo sapiens
  misc_feature (1)...(606): n = A,T,C or G
ctgcctattagactatgaaatatgaaaggtgcttgatgaaaaagnaanagctctttttaaaggtaattggagaggcgtatttaacatttccagttttttgacagagattttgtattattttacatgggctaggaaattgcatattgaattgtatattaggttagaaattgtatacatatacaatatatattatacacatactatatataatatttaaatatatatttatataatatattgtatatatacaattttctaacccacataaatataaaatcttgatacagaatatacatattctatattttacagacacatctacattatatattttacatattatatatatctattttttccccaccaaaaatacaatctctggccatttccacttcctttggaagttcagatacaggttctcagttccttcacctaagattttctctctcctctctctgcaggcttctcctaagcatatctcatccattctcatggctttrtatatcatgactaccataattgtatttctggatcagaattattttctgagctccagacacgaacgtgcagccagcctcttgaaaagtccacttagttgtcccaaaa

SEQ ID NO: 224098 - DNA, 404 bp, Homo sapiens
attagaggagaacaatggcagatggctcacaatcaatgataacagaaatactccagaggcttaaattctaaaacttggcttgaccatcctcatcaaaattccaaatctccatgtacattaagcctacaacattccaacattcttccactgacaaaatacaggaagataagaaattgagagtatttcatgattgaccagtgggggccattatttgttacccagatcagttgttctgacctccccagaagacccacctccagtwtagaagattggacccctgagattacttagagtgaaaacttaagcaatattgcacagcccagtcaagtgcaacagggtcaggcaccactgatttttccattctagccatcctctgctacatgataaccaacaagcagctgatc

SEQ ID NO: 224099 - DNA, 598 bp, Homo sapiens
caatatagtaatggtagcattagaaatatagtaatgaaggtttttgttatctttagtttattcctctgacaaacaaaaaattacgatactataaagagtgctattttgaaaaacctaagcagattttagcagggatagccgttgtacggctgtgaagcctgtaaacagtaaagcctataaaattatatagaccagaatcctcttgttacaaagagaagtcagaaaattattgagaacattcttagcgtcaatactcttggtaatgtcaggccttaaaaatgtagaaatatggaaacattttggctgaaggtatggctcagtgcttttaaatattcagtttgtataaaccgaagtcaattactgactaatactttatgtgtctcttatgtgctcctaccatcattcccacagactgcttctgaaagcaggagtgctatttttttaatgaaatttggaccgttaatcaatcaaatgtgaaataaaatactgattctacagatcctagacttrcatttcatttttggtttgtagacttttccataataaaattttacacattaaataaataacaaggctgccagtattgcatataactaca

SEQ ID NO: 224100 - DNA, 563 bp, Homo sapiens
aaaaacaacactcttcccctaagaaggggcaaagtcctcctttctcagcagtaaggaggtctaggcctcagcggttttggagagtcactgctgccaaagagtctatttgggaccgtagagtaaggatagattttgttatttcttgcaaactgtctgagaaatcctttgatagtgtgtggtagtaggataatgcagtagataaacctactattctggtttctgtagcagtagccattcctaaccctataagtaggggtattagttgtatggccctgcactgatggacttgagctttgaggagcactgatagggtctgactaggattacaggcttgagccaccacacccagcccaaactgmgatattttttatagtaacagcaatgtttattaaaaagtagagtcaagataacatgagtaaacaaaaatgtaagtcatcctatttctgggacacccacttctcatagccacggcaaccagaaatagacatcagaggtgacatggactccaaaaatagttgtgacatatcagctttaccagaatttatgatactatgaaactttga

SEQ ID NO: 224101 - DNA, 563 bp, Homo sapiens
aaaaacaacactcttcccctaagaaggggcaaagtcctcctttctcagcagtaaggaggtctaggcctcagcggttttggagagtcactgctgccaaagagtctatttgggaccgtagagtaaggatagattttgttatttcttgcaaactgtctgagaaatcctttgatagtgtgtggtagtaggataatgcagtagataaacctactattctggtttctgtagcagtagccattcctaaccctataagtaggggtattagttgtatggccctgcactgatggacttgagctttgaggagcactgatagggtctgactaggattacaggcttgagccaccacacccagcccaaactgagatattttttatagtaacagcaatgtttattaaaaagtagagtcaagataacatgagtaaacaaaaatgtaagtcatcctatttctgggacacccacttctcatagccacggcaaccagaaatagacatcagaggtgacayggactccaaaaatagttgtgacatatcagctttaccagaatttatgatactatgaaactttga

SEQ ID NO: 224102 - DNA, 426 bp, Homo sapiens
aatggggctattctgatgtcagtctgctcaacagggagttctcctgaaagtacagtaaagctctcaagtgctatttagacatttgtgtcttcacatgacttagtcgggacagcagacaagagctgtggctccaactgcaagatctgtttctggaagctcctcaccaagcaacagcagaaagtaatcaaacaatggcccaacaatctcactggcacctgtaggagaaaaatgaccctggagtgaagccagatgcaatttttatwttcatattgttgttgtggaatgttcctagcaaatgagaaaaccaagtccccccagagccccgcactcaagggctgtagacatagaacttgaggattaagctgctgactgtgtttaaaaggaaaagattacaaagcggaataaatcaaaaagctacaagaattc

SEQ ID NO: 224103 - DNA, 600 bp, Homo sapiens
tcaagaattgctatcattgaagggagttgcctcactaaagattaaaccctctctggggcaagtccatatctcatggctagttaatacagaggcacaacccttgcctcaatcgagggcaactctgaatgaccatcccaactctagagctctccatgggatcaccagaggcctttgttgtaactgcatggccttcaactcgacactgttcaatcctgctctcatccagccccaaaggtcattgttcctgacagcatttaccaagaaacttcttgaataaacatttccagctcacagaccttttcctagraaacgtaccataaatcagccaatacgtgtgaggattcatctggaactctgttttgacatgtaatgggggatgaaaacaatttccaattcatagcattgttgtaaagagtcaacaagttaaattaacaaaacagctgtgcaaactgaagagcaacacaaatttaacatgacatttttattattgttattacttttgtgtgtcagatgtagcaaccaaagagaggtagtggtcttgccatgcttgtctgcaacaaaggaacttttaaaacagtgttagtgaatacactatggctt

SEQ ID NO: 224104 - DNA, 599 bp, Homo sapiens
atgtgcaaaatgattttaaaacttacattttagttttgtttcagatctctaagatctccaagagcatagcaatttacaagtatattttctattaacaaattattagatgacctaaagaactagtcagagccacacatcatccaggacacatatatcagaaacagaaaagttctaattcaaggtgaggaagttgaatacactctctgatatttgattcataataagagaggcctattacgttctcactagcactttagaaaatgtaaagaatgtgcacatgtaagtgtgaacaggaaggaatcttcatgaccacacaaccctaccttaccctaatcacctcaatttgtcagttgacaaatctgtggttttgagtgatggcattatttactcaagtgcacacagctggcaagagaaaaaactcactcaggatcyaagtcttctatacatgaatctaattctttctccctgcaccatgctgcttctccaaatttgtgtagaatcctaagaacagtctgagcaccttgccttctttgttccacctctccaataatcaatattttgttctttttactcattaattttacttcagtaagattctc

SEQ ID NO: 224105 - DNA, 556 bp, Homo sapiens
aaaaaaaaaaaaaagaactaagttcgtaattcaaaagcctagaaatagaacaacaaagtgagtcaaaagaaagcacaaggaaggaaataataaagatagaagcagaaattaacaaggaagaaaacagtataaaagagatctaataaatcaaaattctgttttttgagaaaattagcaaaataaataaaacactagctaagttgataaaaatgagaaaacacaaatacacaacacatggaatgacaagtgaaaagtaaccattgaattagaagaaataaaaaaggagagacaactatgcagaactctgcaaataagcttgaaaaccatgatgaaacaggcagttccacagggaaatagtgattgctaaaattgatctcattaaatgagaaagtttgatcagacctgtgtttatacaagaaatggggaagttaaaaaactaccccacataaaagaaccaagcacagatggtgtcacaagcraattctaacaaactttcaaaagctggatagtcacaatgctctgtaaattattccagagtattgaaagtaagtaagct

SEQ ID NO: 224106 - DNA, 543 bp, Homo sapiens
cactggactagtgggataaagtaataattagactctgatagacatggaaatctagtatatgataatgacggcatttcaagtttaaagatggacttttttttcttttttggagacagagtctcactctatcacacaggttggagtgtagtggcgtgatctcggctcactgcaacctctgcctctcaggttcaagcaattctcctgcctcagcctcccaaatagctgggattacrggcgcgtgccaccacgcctggctaatttttgtatttttaatagagacggggtttctccatatggtcttgaactcctgacctcaggtgatctacctgcctcagcctctgaaagtgctgggattacaggtgtgagccgctgcacctggcctaaggatggacttttaagtaaatgatgttcagataacaacttagaaaagataaatttagattcatatctcataccacacaagaataaacttcacataaattagggaactaagtgttaaaaagtgaaatcatacaaacactacaggaaaacataggtgaattc

SEQ ID NO: 224107 - DNA, 588 bp, Homo sapiens
ttgtttctctagttccttgaggtgtgatgtcaggtttgcaatttgtgatatttcaaactttgatgtaggaatttgggctataaactttcctcttagtactgcttttgctatatcccaraggttctgataagttgactcactcttattcactttgaaacatttttaaatttccattttaatgtcattgttaaccccaaaatcattcaggagcagattctgtaatttccatacatttgtataattttgagggtttcttttggaatttatctccagttttattttgctgtggtctgagaagatacttgatattattttgctcttaaaaaatttattgagacttggtttgtggcctatcatatgatctaccatggagaatgtttcatgtgctgatgggaagaatggatattctgcacttgttgagtataatgttatttaaatatattttgtgtatttgttctagagtacagtttaagtccagttttctttgttgactttctgcctcaatgatttgtctaatgccgtcagtggagtattgaagtcctccactgttattgttttgctgtctatctcttttcttaggtatagtag

SEQ ID NO: 224108 - DNA, 588 bp, Homo sapiens
ttgtttctctagttccttgaggtgtgatgtcaggtttgcaatttgtgatatttcaaactttgatgtaggaatttgggctataaactttcctcttagtactgcttttgctatatcccagaggttctgataagttgactcactcttattcactttgaaacatttttaaatttccattttaatgtcattgttaaccccaaaatcattcaggagcagattctgtaatttccatacatttgtataattttgagggtttcttttggaatttatctccagttttattttgctgtggtctgagaagatasttgatattattttgctcttaaaaaatttattgagacttggtttgtggcctatcatatgatctaccatggagaatgtttcatgtgctgatgggaagaatggatattctgcacttgttgagtataatgttatttaaatatattttgtgtatttgttctagagtacagtttaagtccagttttctttgttgactttctgcctcaatgatttgtctaatgccgtcagtggagtattgaagtcctccactgttattgttttgctgtctatctcttttcttaggtatagtag

SEQ ID NO: 224109 - DNA, 615 bp, Homo sapiens
tgtagggtgactacagctatactgttttgatcaattgttttctccttaaattatgactctatccaaaagaaattttaaaaattctatagtcactagaagtaattatatatataattatataaatatatttcttgtggaraaataggatagagtgatcaatgaaatactgtcaatcactaagtagtgtatattaggaaaaaattttgggtaagtgaactgtaagtattaggtcaaggacaaaaagaaaacttttctgactccataagaagagcttgtttgtatgtttttcagttctttgatggtgggtatcaaatatccatgcttcttagattccatccatacattttaaaaagtaatgaaaataattttatttcaaaattatttatgttatttaaaccataaaaggtcatcattgctaaactgacttggtaaatatttccttttatcatcaagtagtgttcccattgattttttttctttttgagatggagtcttgctctgttgcccaggctggagtgcagtggtgtgatttcagctcactgcaacctctgcctcccgggttcaagcgaattcttctacctcagcctcccaagtagctgggattacaagtgtgca

SEQ ID NO: 224110 - DNA, 615 bp, Homo sapiens
tgtagggtgactacagctatactgttttgatcaattgttttctccttaaattatgactctatccaaaagaaattttaaaaattctatagtcactagaagtaattatatatataattatataaatatatttcttgtggaaaaataggatagagtgatcaatgaaatactgtcaatcactaagtagtgtatattaggaaaaaattttgggtaagtgaactgtaagtattaggtcaaggacaaaaagaaaacttttctgactccataagaagagcttgtttgtatgtttttcagttctttgatggtgggyatcaaatatccatgcttcttagattccatccatacattttaaaaagtaatgaaaataattttatttcaaaattatttatgttatttaaaccataaaaggtcatcattgctaaactgacttggtaaatatttccttttatcatcaagtagtgttcccattgattttttttctttttgagatggagtcttgctctgttgcccaggctggagtgcagtggtgtgatttcagctcactgcaacctctgcctcccgggttcaagcgaattcttctacctcagcctcccaagtagctgggattacaagtgtgca

SEQ ID NO: 224111 - DNA, 615 bp, Homo sapiens
tgtagggtgactacagctatactgttttgatcaattgttttctccttaaattatgactctatccaaaagaaattttaaaaattctatagtcactagaagtaattatatatataattatataaatatatttcttgtggaaaaataggatagagtgatcaatgaaatactgtcaatcactaagtagtgtatattaggaaaaaattttgggtaagtgaactgtaagtattaggtcaaggacaaaaagaaaacttttctgactccataagaagagcttgtttgtatgtttttcagttctttgatggtgggtatcaaatatccatgcttcttagattccatccatacrttttaaaaagtaatgaaaataattttatttcaaaattatttatgttatttaaaccataaaaggtcatcattgctaaactgacttggtaaatatttccttttatcatcaagtagtgttcccattgattttttttctttttgagatggagtcttgctctgttgcccaggctggagtgcagtggtgtgatttcagctcactgcaacctctgcctcccgggttcaagcgaattcttctacctcagcctcccaagtagctgggattacaagtgtgca

SEQ ID NO: 224112 - DNA, 615 bp, Homo sapiens
tgtagggtgactacagctatactgttttgatcaattgttttctccttaaattatgactctatccaaaagaaattttaaaaattctatagtcactagaagtaattatatatataattatataaatatatttcttgtggaaaaataggatagagtgatcaatgaaatactgtcaatcactaagtagtgtatattaggaaaaaattttgggtaagtgaactgtaagtattaggtcaaggacaaaaagaaaacttttctgactccataagaagagcttgtttgtatgtttttcagttctttgatggtgggtatcaaatatccatgcttcttagattccatccatacattttaaaaagtaatgaaaataattttatttcaaaatkatttatgttatttaaaccataaaaggtcatcattgctaaactgacttggtaaatatttccttttatcatcaagtagtgttcccattgattttttttctttttgagatggagtcttgctctgttgcccaggctggagtgcagtggtgtgatttcagctcactgcaacctctgcctcccgggttcaagcgaattcttctacctcagcctcccaagtagctgggattacaagtgtgca

SEQ ID NO: 224113 - DNA, 427 bp, Homo sapiens
ttatgcccaaatacagagcatatttacaactttttcaaagtaccctttatctagctacttattattaaagtgtgctcttcagagccctgggatttttgcagaaatactttggaggcaacaaagggagcacgtggggcagtgctgtgaaggcagcagagcagctccacttttggatgtctgataaactaaaacactcagaagrtatttccttgggttgaagggggcagtttttactgattttaaccactggcctagaaattaacagtttctttctaagtgaatttagtatttcagagtataacatttataatatcagtaggaacaaaatgaaaaaaaataacaccatacatctacaggtatatttttcccagagaaataaaaaacatctcaaattcgatcttgtatagacactaacattcaatattct

SEQ ID NO: 224114 - DNA, 585 bp, Homo sapiens
gtggaggtctgttttgtttttcctgaaatgaaatatagtgaaacatatttaactgctaataaaaggggcagtagaagtaaacactaaaaatacaagcagtagctcaatatttagctaaggattttaaatgtaatacaaggaaaaggtacaattattaaataatgtgacaaattttgtttgagctacagaattagaggaaaagtttccatwtcagaaaaaacatatgatgtttccattttatgcagtagtacttccaagactggccaatcagtgtttactgatcactcataaacagaattccatagtgctctgtgtcagcaaagcaatggagtaatcattatgtagagcaaaaaatatcaaatgtagttacatgtctgtgatgctccctaccatatatgaagggggctccataaacataatactccgcctttcttctcctgtactcactaattcccccaataggccccataccaccagaaagcaagatgacttacatgattggtaagttgagaaaaagcatctgcacatgctcagcaggactcaaagggacagatgtttagtaggggcaggacctctggaaggaag

SEQ ID NO: 224115 - DNA, 585 bp, Homo sapiens
gtggaggtctgttttgtttttcctgaaatgaaatatagtgaaacatatttaactgctaataaaaggggcagtagaagtaaacactaaaaatacaagcagtagctcaatatttagctaaggattttaaatgtaatacaaggaaaaggtacaattattaaataatgtgacaaattttgtttgagctacagaattagaggaaaagtttccatakcagaaaaaacatatgatgtttccattttatgcagtagtacttccaagactggccaatcagtgtttactgatcactcataaacagaattccatagtgctctgtgtcagcaaagcaatggagtaatcattatgtagagcaaaaaatatcaaatgtagttacatgtctgtgatgctccctaccatatatgaagggggctccataaacataatactccgcctttcttctcctgtactcactaattcccccaataggccccataccaccagaaagcaagatgacttacatgattggtaagttgagaaaaagcatctgcacatgctcagcaggactcaaagggacagatgtttagtaggggcaggacctctggaaggaag

SEQ ID NO: 224116 - DNA, 585 bp, Homo sapiens
gtggaggtctgttttgtttttcctgaaatgaaatatagtgaaacatatttaactgctaataaaaggggcagtagaagtaaacactaaaaatacaagcagtagctcaatatttagctaaggattttaaatgtaatacaaggaaaaggtacaattattaaataatgtgacaaattttgtttgagctacagaattagaggaaaagtttccatatcagaaaaaacatatgatgtttccattttatgcagtagtacttccaagactggccaatcagtgtttactgatcactcataaacagaattccatagtgctctgtgtcagcaaagcaatggagtaatcattatgtagagcaaaaaatatcaaatgtagttacatgtctgtgatgctccctaccatatatgaagggggctccataaacataatactccgcctttcttctcctgtactcactaattcccccaataggccccataccaccagaaagcaagatgacttayatgattggtaagttgagaaaaagcatctgcacatgctcagcaggactcaaagggacagatgtttagtaggggcaggacctctggaaggaag

SEQ ID NO: 224117 - DNA, 578 bp, Homo sapiens
gatcttcaatctctgatatcttttcttccgcttgattgaatcagctattgatacctgtatatgtttcacaaagttctcatgttgtgtttatcacctccattgggtcatttatattcttctctaaactggttattctagttagcagttcctgtaaccttttatcaaggttcttagcttccttgcattgggatagaacatgctcctttagctcagaggtgtttgttattacccaccttctgaagcctacttctgtcaattcgtcaaactcattctccatctggttttgttcccttgttggtgaggatttgtgatcctttggaggagaagaggcattctggtttttggaattttcagcatttttgcactgctctttcttcatcttcatggatttatctacctttggtctttgaagttggtgagctttagatggggtttttgcatgggcatactttttgttgatgctgatgttattgttttctttttgttagttttcattctaacagtcaggcccctctgctacaggtctgttggaatttkctggaggtccactccagactgtatttgcctgggtatcacca

SEQ ID NO: 224118 - DNA, 553 bp, Homo sapiens
gctttgctcagaggcatctaagaaccttgaactcaacatttcaaaatttgaactcatcatcttcccaatattgtgtctcctccagtgttgttatgtcagtgaaaggtggctctactacccaaaccagwaacctggggccatctgtgacttctctctcactgcttaatcaatcaccaggtcaataaacagtgaacagaagaattatatttcaattctgtccatctcgccagcattattaccacaaccctaatccattccctcactgacactcacctggactactacaaatacctcattatttagattcttccctccattcttaatctcacaaattcgtttttcacattgtaccttaaatgattttccacaaataccaatgccacagttcatatcattccttagttccaaacatttctaaactttcccagtattattgacatcaaaatataatataatgtgcaagaccctccatgacctatcttctacctgtgtctcctgcctcttctccagtgcccatacaccactgtgtactgttgtcataccaaaccttgct

SEQ ID NO: 224119 - DNA, 529 bp, Homo sapiens
aaatcaaggcccagataaggaggaatgtgagtgagtatttagtgccaaagaaccttggtagtaattatagtgttaagatgagtttcctagtagctatgttaaaatgaagatagcatcatttaagcatttctcaccttaattaaaggggagtttgtctgtgaaggaaatcatttcctagtactgaattatgatataagtgccgttgctgagacattatatatatatgggccattgaattatgatactcttcaacaatatttttgtattaggcaacaaaatggatttcatatgactatttgttgtactgttcttttattaaaagaagtagggcacraccccaaaacttaatttggggaaagaaattctgttggggactaaggcaatatagttcaagtttgtagcctcctcgtgatttcatttgaccaaggctaaaatttataatacccagaggagtgacagccttcaagtgattttctgtaagtattaaagttgaggtgtgtattaaatgtccacttctgtttggtgacac

SEQ ID NO: 224120 - DNA, 606 bp, Homo sapiens
actcactcttcctgctctctaaggacacagcaagaagacctttaacagacaccatgttggtatgttgttcttggcttcccagtcttcagaactgtggtatacagtggcatttaaaaaactaatacagagtctagtatctgaaagtaagggtctgttgtaacaaatcttaaaaatgtgcaagaggctttggattttggtgataggccaaggatggaagaactttgaggagcatgacataataaacmtagatggtctgaaaagagtgtttgtagaaacatggatatgtatgaatttgctagtaaagagtcaagaggaagtgagaagcatgatagagaaaaactaaagcacctaaacaattccaaaactatcaggaatagactgtcttagacgtatgaatgttcaaggatatgctggtgaggtctcagaaggaaataagaaacattttatgggaaactggggaaagaggattcttgttacatagtggcagaaagtttagcagaattgttatccactgttatgcggaaaggagaacacataaattgtacatttagctgaagaggtttcctagaaaactgttgaaggtccagccttgttttctcttgctgc

SEQ ID NO: 224121 - DNA, 606 bp, Homo sapiens
actcactcttcctgctctctaaggacacagcaagaagacctttaacagacaccatgttggtatgttgttcttggcttcccagtcttcagaactgtggtatacagtggcatttaaaaaactaatacagagtctagtatctgaaagtaagggtctgttgtaacaaatcttaaaaatgtgcaagaggctttggattttggtgataggccaaggatggaagaactttgaggagcatgacataataaacctagatggtctgaaaagagtgtttgtagaaacatggatatgtatgaatttgctagtaaagagtcaagaggaagtgagaagcatgatagagaaaaactaaagcacctaaacaattccaaaactatcaggaatagactgtcttagacgtatgaatgttcaaggatatgctggtgaggtctcagaaggaaataagaaacattttrtgggaaactggggaaagaggattcttgttacatagtggcagaaagtttagcagaattgttatccactgttatgcggaaaggagaacacataaattgtacatttagctgaagaggtttcctagaaaactgttgaaggtccagccttgttttctcttgctgc

SEQ ID NO: 224122 - DNA, 561 bp, Homo sapiens
taaacatccgtatcaaaagagaaggcatagccttggttcttaagaagtgattacatactttatttcaaaaatgaaatatatgactatacagcaaaataaaattgggataaaaaataacctgaaaatcaggaaacaggagagacagtgtaaacatttagttttgtggtcttgcytaattatttttcttatcgccaataaggaataatttaaaatgaccttattcctgagtacctggagacttctaagtttttaaaacaatttaatgttgaagaatcataccaagaaatacttccaacatatatttgtgttgccatcctagttactataaaccagagaaaaatgttctaattaccctttttaatatgtacaaaaatgcttcattataaatctggaatataggaatattttcaaaaatggatttttgcaaaaagtctgttattttttttttcccctgcagcagggacagaactgtagcttcatgatctgagatatcaggtaaggaagtcctcccctattctttctcaagggataggctgtttatattcctctcctccaatccct

SEQ ID NO: 224123 - DNA, 533 bp, Homo sapiens
gtcagagtagatctaaaagaatgaatttaaaatagggcttggaatataagaaataaagcttgaaaaaatacaaaatcataactcccaacttctatccagtgcaagacgccctgcataaatcagcaatggagactatgaaaagagtcagataggacaaaaggggaagggactaggttcaatggaacccagagagaggcttccggtgatgtgccacagggttctgcactgtcaggcccactaaacatctccatgatcactgataagactaaacaaatactcaccaaattttaaaactatgaatttaattaasttgacagcaatcccacctgtttgataggtctgagaaaatgtattagtccattttcacactgctataaagaatacctgagactgggtaatttgtaaacagaagaggtttaattgacacacggttctacaaggctggagaggcctcaggaaacttacaatcatggtggaaggtgaaggggaagcagggcacttcttacatggtggcaggcgagagagatagcaca

SEQ ID NO: 224124 - DNA, 531 bp, Homo sapiens
tcactaatagttgttatatatcagtgtccaaatcttaatcataaatgatgtgatcagtgagtgattcttgaacattcattgctgagggtggtcatagcacttcacactccaccatccttgggaaggcagcakaagcatcattggtgcagatgcaggtattgtaactgctattccatagacagatggaagtggcatgcaggagaggcaataaccctcccacagtcctcaccacatgcccctctcctccgccttgggagctttccaagcatgatagtggttgggcctcacaataacctctgagaaagctgttagcatcaggaagtcagagaggccatccgaatacacccttctgacctcccccctctttacctcagggcataatgtgaagtttcttcaacaggaccctccccatgaatgtttgtagggctcatgactcaatcaatgaatggatggcaaatccactcatgtcatcgagacatgaacacttggaaactgagggaaatgtagcttcctgtgagagtagcaggatgg

SEQ ID NO: 224125 - DNA, 546 bp, Homo sapiens
ccagtcttccaaagaatcactaatagttgttatatatcagtgtccaaatcttaatcataaatgatgtgatcagtgagtgattcttgaacattcattgctgagggtggtcatagcacttcacactccaccatccttgggaaggcagcagaagcatcattggtgcaratgcaggtattgtaactgctattccatagacagatggaagtggcatgcaggagaggcaataaccctcccacagtcctcaccacatgcccctctcctccgccttgggagctttccaagcatgatagtggttgggcctcacaataacctctgagaaagctgttagcatcaggaagtcagagaggccatccgaatacacccttctgacctcccccctctttacctcagggcataatgtgaagtttcttcaacaggaccctccccatgaatgtttgtagggctcatgactcaatcaatgaatggatggcaaatccactcatgtcatcgagacatgaacacttggaaactgagggaaatgtagcttcctgtgagagtagcaggatg

SEQ ID NO: 224126 - DNA, 531 bp, Homo sapiens
tcactaatagttgttatatatcagtgtccaaatcttaatcataaatgatgtgatcagtgagtgattcttgaacattcattgctgagggtggtcatagcacttcacactccaccatccttgggaaggcagcagaagcatcattggtgcagatgcaggtattgtaactgctattccatakacagatggaagtggcatgcaggagaggcaataaccctcccacagtcctcaccacatgcccctctcctccgccttgggagctttccaagcatgatagtggttgggcctcacaataacctctgagaaagctgttagcatcaggaagtcagagaggccatccgaatacacccttctgacctcccccctctttacctcagggcataatgtgaagtttcttcaacaggaccctccccatgaatgtttgtagggctcatgactcaatcaatgaatggatggcaaatccactcatgtcatcgagacatgaacacttggaaactgagggaaatgtagcttcctgtgagagtagcaggatgg

SEQ ID NO: 224127 - DNA, 570 bp, Homo sapiens
ccagtcttccaaagaatcactaatagttgttatatatcagtgtccaaatcttaatcataaatgatgtgatcagtgagtgattcttgaacattcattgctgagggtggtcatagcacttcacactccaccatccttgggaaggcagcagaagcatcattggtgcagatgcaggtattgtaactgctattccatagacagatggaagtggcatgcaggagaggcaataaccctcccacagtcctcaccacatgcccctctcctccgccttgggagctttccaagcatgatagtggttgggcctcacaataacctctgagaaagctgttagcatcaggaagtcagagaggccatccgaatacacccttctgacctcccccctctttacctcagggcataatgtgaagtttcttcaacaggaccctccccatgaatgtttgtagggctcatgactcaatcaatgaatggatggmaaatccactcatgtcatcgagacatgaacacttggaaactgagggaaatgtagcttcctgtgagagtagcaggatggtgatgtggtgatgccaggatgaa

SEQ ID NO: 224128 - DNA, 464 bp, Homo sapiens
agggtagtgattataaacatggattttaaagtcacacaaatatagattccaaaacctgctctaaccccattttagctgtgtgaccttgggcaaggtattaatacttttatcattgttaaaataggtacgatgatgtacaaaagaggaagcaaagcactgaacacagaacctggcaagctgtaatcatctggcacatctgaactgtctgggtggtgtctcygctgctaccgcctcagtgcaggtttccatcatctgttgcctgttgaccatgaaactcccaactcaatcctctcactccagccttcctcaaaccccagtgtcttccacatactaggaccagagtgatcctctgaacataaaactgattgataacagatcatccaaatggactaataattgaccaattaataattgacaatcaaaaaattctctcctcaaaaaaaaaggcaagaaaactggcaaaa

SEQ ID NO: 224129 - DNA, 464 bp, Homo sapiens
agggtagtgattataaacatggattttaaagtcacacaaatatagattccaaaacctgctctaaccccattttagctgtgtgaccttgggcaaggtattaatacttttatcattgttaaaataggtacgatgatgtacaaaagaggaagcaaagcactgaacacagaacctggcaagctgtaatcatctggcacatctgaactgtctgggtggtgtctccgytgctaccgcctcagtgcaggtttccatcatctgttgcctgttgaccatgaaactcccaactcaatcctctcactccagccttcctcaaaccccagtgtcttccacatactaggaccagagtgatcctctgaacataaaactgattgataacagatcatccaaatggactaataattgaccaattaataattgacaatcaaaaaattctctcctcaaaaaaaaaggcaagaaaactggcaaaa

SEQ ID NO: 224130 - DNA, 462 bp, Homo sapiens
ttccccactgccaattctaaccagatacgatgacaggttggctaagtatatatatttaacaggctaaagaaggagttacgaatactcatgaaagtggtctaagccctgtctagttcttgagaatggaccagcttagttaaatagctgtgtctcatccaggaagtagcatcgcaggtgggttagccctctgcacttgatgaaggcaaatagattttgaataataggcatttctatggaaacagaagaacaacaaaagttaatgttgggcacaatctatccagatattagactcaaagcatctttaggtacagaggaggaaggcagtggcagtctgccactatggcactacagtctgccatactacaaagaataatgtagtagtaatttcattsagtccaaatcagaaaaatggaagaaaattttgaaagtgttaatttgagacctgtagcccagaaagaattc

SEQ ID NO: 224131 - DNA, 613 bp, Homo sapiens
ctgctacagtgagttctccctgcctagacgacagagccagggagagagagtgggggttcgtgggacccaggtctatagagttaacctctacctttgtcttttgcttaattattaaaatgcatattacagtagagacaatggggaccaccgtgtttgattacaaacacacaggaaaaattgtaaacacttgtagcaggtcaatcacttatttgttagtacacccatcacactcatacattgcatttctgtgtgattatcatgtaatcaatcaatgaaaaatttgtccttggataaaatagcatgttagctttgttaggttaattttagtttttatttatttacaaccctaaactctatcttatatagcctygcccttcctggatagatagtgattgactgtatttatttggccacaactaaagcttactaggtagtgttggtctgacttatcatgtcggtgctttgctggggaacttcccagagagagttcacagccctgagagtgagtccaaaggaggaggctttccctaccttctccacaacaagaacaaacatgcctatgtgaaaatagagtaggaagggcacctcatcccagcagaatgtggaggggtca

SEQ ID NO: 224132 - DNA, 613 bp, Homo sapiens
ctgctacagtgagttctccctgcctagacgacagagccagggagagagagtgggggttcgtgggacccaggtctatagagttaacctctacctttgtcttttgcttaattattaaaatgcatattacagtagagacaatggggaccaccgtgtttgattacaaacacacaggaaaaattgtaaacacttgtagcaggtcaatcacttatttgttagtacacccatcacactcatacattgcatttctgtgtgattatcatgtaatcaatcaatgaaaaatttgtccttggataaaatagcatgttagctttgttaggttaattttagtttttatttatttacaaccctaaactctatcttatatagcctcgcccttcctggatagatagtgattgactgtatttatttggccacaactaaagcttactaggtagtgttggtctgacttatcatgtcggtgctttgctggggaacttcccagagagagttcacagccctgagagtgagtccaaaggaggaggcttyccctaccttctccacaacaagaacaaacatgcctatgtgaaaatagagtaggaagggcacctcatcccagcagaatgtggaggggtca

SEQ ID NO: 224133 - DNA, 527 bp, Homo sapiens
tgaattcagataaacaacaagtacttttttagtacaagtgtacaatatttgggacacacagtaaacattatttgttgtttatcataaattcgaagttaactgggcatcctgtacatggtctggacaagacctaatcacgaagcatcactcaaagcaggagtgcctgggagccaggcctcaaggccaccatcargggccacagtgtgggatcaggggccctgggtcagccccgagcacagggtcggctaaagctgcctgtggcagcgcgaaaggagactaagtttctgagatgatctgaaggagtctgtacagtaccggccagctgtgaatatgcctccatcattttcatgacgaattatttttttctcattgattttcatgcaggttgagttttatttgcaagaccattggaggctatttcgcttcttttgatttcatttgtttttttcaccctgccttgtactctactccttagtcattatgcacaagcgacattctatcatcattagctgaatgtattgtgtcca

SEQ ID NO: 224134 - DNA, 553 bp, Homo sapiens
gaattcagataaacaacaagtacttttttagtacaagtgtacaatatttgggacacacagtaaacattatttgttgtttatcataaattcgaagttaactgggcatcctgtacatggtctggacaagacctaatcacgaagcatcactcaaagcaggagtgcctgggagccaggcctcaaggccaccatcaagggccacagtgtgggatcaggggccctgggtcagccccgagcacagggtcggctaaagctgcctgtggcagmgcgaaaggagactaagtttctgagatgatctgaaggagtctgtacagtaccggccagctgtgaatatgcctccatcattttcatgacgaattatttttttctcattgattttcatgcaggttgagttttatttgcaagaccattggaggctatttcgcttcttttgatttcatttgtttttttcaccctgccttgtactctactccttagtcattatgcacaagcgacattctatcatcattagctgaatgtattgtgtccaaactcactctaggcacaagccttgggg

SEQ ID NO: 224135 - DNA, 495 bp, Homo sapiens
agtaaacattatttgttgtttatcataaattcgaagttaactgggcatcctgtacatggtctggacaagacctaatcacgaagcatcactcaaagcaggagtgcctgggagccaggcctcaaggccaccatcaagggccacagtgtgggatcaggggccctgggtcagccccgagcacagggtcggctaaagctgcctgtggcagcgygaaaggagactaagtttctgagatgatctgaaggagtctgtacagtaccggccagctgtgaatatgcctccatcattttcatgacgaattatttttttctcattgattttcatgcaggttgagttttatttgcaagaccattggaggctatttcgcttcttttgatttcatttgtttttttcaccctgccttgtactctactccttagtcattatgcacaagcgacattctatcatcattagctgaatgtattgtgtccaaactcactctaggcacaagccttgggg

SEQ ID NO: 224136 - DNA, 495 bp, Homo sapiens
agtaaacattatttgttgtttatcataaattcgaagttaactgggcatcctgtacatggtctggacaagacctaatcacgaagcatcactcaaagcaggagtgcctgggagccaggcctcaaggccaccatcaagggccacagtgtgggatcaggggccctgggtcagccccgagcacagggtcggctaaagctgcctgtggcagcgcgaaaggagactaagtttctgagatgatctgaaggagtctktacagtaccggccagctgtgaatatgcctccatcattttcatgacgaattatttttttctcattgattttcatgcaggttgagttttatttgcaagaccattggaggctatttcgcttcttttgatttcatttgtttttttcaccctgccttgtactctactccttagtcattatgcacaagcgacattctatcatcattagctgaatgtattgtgtccaaactcactctaggcacaagccttgggg

SEQ ID NO: 224137 - DNA, 564 bp, Homo sapiens
attcagataaacaacaagtacttttttagtacaagtgtacaatatttgggacacacagtaaacattatttgttgtttatcataaattcgaagttaactgggcatcctgtacatggtctggacaagacctaatcacgaagcatcactcaaagcaggagtgcctgggagccaggcctcaaggccaccatcaagggccacagtgtgggatcaggggccctgggtcagccccgagcacagggtcggctaaagctgcctgtggcagcgcgaaaggagactaagtttctgagatgatctgaaggagtctgtacagtaccggccagctgtgaatatgcctccatcattttcatgacgaattatttttttctcattgattttcatgcaggttgagttttatttgyaagaccattggaggctatttcgcttcttttgatttcatttgtttttttcaccctgccttgtactctactccttagtcattatgcacaagcgacattctatcatcattagctgaatgtattgtgtccaaactcactctaggcacaagccttggggtggttggcattga

SEQ ID NO: 224138 - DNA, 564 bp, Homo sapiens
attcagataaacaacaagtacttttttagtacaagtgtacaatatttgggacacacagtaaacattatttgttgtttatcataaattcgaagttaactgggcatcctgtacatggtctggacaagacctaatcacgaagcatcactcaaagcaggagtgcctgggagccaggcctcaaggccaccatcaagggccacagtgtgggatcaggggccctgggtcagccccgagcacagggtcggctaaagctgcctgtggcagcgcgaaaggagactaagtttctgagatgatctgaaggagtctgtacagtaccggccagctgtgaatatgcctccatcattttcatgacgaattatttttttctcattgattttcatgcaggttgagttttatttgcragaccattggaggctatttcgcttcttttgatttcatttgtttttttcaccctgccttgtactctactccttagtcattatgcacaagcgacattctatcatcattagctgaatgtattgtgtccaaactcactctaggcacaagccttggggtggttggcattga

SEQ ID NO: 224139 - DNA, 564 bp, Homo sapiens
attcagataaacaacaagtacttttttagtacaagtgtacaatatttgggacacacagtaaacattatttgttgtttatcataaattcgaagttaactgggcatcctgtacatggtctggacaagacctaatcacgaagcatcactcaaagcaggagtgcctgggagccaggcctcaaggccaccatcaagggccacagtgtgggatcaggggccctgggtcagccccgagcacagggtcggctaaagctgcctgtggcagcgcgaaaggagactaagtttctgagatgatctgaaggagtctgtacagtaccggccagctgtgaatatgcctccatcattttcatgacgaattatttttttctcattgattttcatgcaggttgagttttatttgcaagaccattggaggctatttcgcttcttttgatttcatttgtttttttcaccctgccttgtactctactccttagtcattatgcacaagcgacrttctatcatcattagctgaatgtattgtgtccaaactcactctaggcacaagccttggggtggttggcattga

SEQ ID NO: 224140 - DNA, 584 bp, Homo sapiens
agctaggctgcccctcctcatagcctgattcgacagcccaactcttagacaattaattccctgccctggagtccccagtccccggtacctggtaacgtggcagctatagatgggatacggtgagtagcagcacagtaccagacaaacagttctggattcttccacagaaagctgggtgccttggaaaagttacagggttcagccttgatttctggagtgtggtgggcagggaagaagcctgcaggacttccatgagaccctcaggtctcaggctgcaggtgtgaacggctccaatgcacacatggaaacggcgcccccagcagagamaacatcgctccctccagctcccagatcttttaacctggaagggccttggtcttttgagaagctgcccctgtgtagaatgtcaggcgcctccaccatgggtggggagtgacagctccctgctctgtggcccagcacttcaggaggcctggagacaaatccactccagatggtcccagaggaaatggtctagtggtcaatgaagggtgggaggacagacaccaatgccatggcctggatcccagcaattaccctagatg

SEQ ID NO: 224141 - DNA, 708 bp, Homo sapiens
gtcactctcctgctccatgtcactgccttcagtgttgttcatctcacttgggataaaatacaaaatccttaacagggatgcaaggcatctgtgttctgcccctgcctgtctctccagccctttttcctgcagaactgcccctcatgcacttcgctggctacacgggccttttcagtctctcaagttgagtcaagctctcctgtgtctcttcatagaggttagaaatccctgttacactttctaataggactcaggactttcatttcatgcagttatctaaatgcataaatttcttgtttgtgtgattattggttattggtttaatatctgtctctcccattagcttacaacckctatgagggcagagaacatgtctgctttgttctccattgtatacccacccaatgcctagcaaggtatccggctcatggtgagccctcatcacatgtttgtcaaatgaatgattaagtgaacaaacccagatatcagttatatcacaagaaatatttcctggttatgcccttaatctgttgcatccaaatttattcaagagttacatgatgaagagcaaacaaaacacataattcttttgctaaagtggaggatgcattccaaggacatacttcttggtttgacagttcatttctagaggcagaaatattgcaggcaatcatcagatgtagcccaaggcagcagacaagggtttat

SEQ ID NO: 224142 - DNA, 216 bp, Homo sapiens
tgcaggcaatcatcagatgtagcccaaggcascagacaagggtttatcttgcaaacatcatgaaatactttataaattaggcaatttcagtctgcaagagataaagacatactcagcttgtctcagtggaggtctatcagttaggattcttaatattgcatgtgacaaaagacctaactcaagctgcattaaacaacaaagaggacgtattggctt

SEQ ID NO: 224143 - DNA, 624 bp, Homo sapiens
ttcccgtctctccccgacgtctcgtcaggatgttagcaaagccagtacccgttacgggtggcagtatcaccaggagcacgctgttgagcaggggactcctgacatgaggctggaagctataatyacccggtgtataatttggttgctaaatggattgttgacaaaggtgtgcatgatgaaatcacaggcatgttagagctgagaggcaggcggggtcagggaggaggcaggcagtcgttaactccccacctccctccaggctcccctctgccaactgccgccaccgccaccacagcagactctgacctcgctgaatcacctgggcctcgtgttccatgacgttcaggaaatacctggccttcctccctcaggtttcatctcgtaataactcccagcagaagcagactcaccttggcacagcactggggatggagttctgatgtcacaggcccctggggttagcctgcaagggaaaggagcccagaggaaagcttagtggcccaagaggccagaaggggaggtcaaagtcacagtttattccagggaggtgctccatgagggtccccccaaagggatcaggcctggacatggggcacttcatacatccacccgcagctgaagtaa

SEQ ID NO: 224144 - DNA, 469 bp, Homo sapiens
tatgtctcttgccatgtttgtatgaatgtcttgattttaattagatcrtctattctttagaggttagacttaagggttttcttgtcatctctttttgcatgtgctttaggataatgcattcaagaattttaaaatataaagagctgaaggtttaggaacacttttttatgtgtattttattttaaaatatgggtgttagcattaagagataacataaataattttttttggctaaccttgtaatttacagatatttagcttaagcttttcattaattaagcagctatctaaatcatatgaaaatagagctttaggaacaaatgttttatacattatatcctttctatttatttcaatgttttcactatttccttggttttattctctgtcatttattcagaagaattgacaaggcttaaaaatattacttctctgaaatgttttttccctcatgtagagatgggcatca

SEQ ID NO: 224145 - DNA, 503 bp, Homo sapiens
tgtttccatgacccaaataaaattctatgaaaatttataattttgttttcatttccttccaagtttggacaattccctagttcatttctgaaatttaccttactattctggttttggtgagggctccaaatccttactgattctragatatttacacaatgtcttctttgaatgacagaatagcatgcaatgtaatactaaggcaaccaccattcaaagtaatagacaagctctcctgcattgcctcaaagtacagactgtcaatagagatggaaaattaaatttagaggaagcactattatatattgttacaaagggttaaatcatgtccctaggaatataaagacagaagagcaggttgagtctatatgtatataaataaataaataagcaaataaagttaagagatgtttttttcacccaacctggggatagaacatattcagaagtgaatttaccatgtatcataaaatatcattaagcatagaatagtgcttaaattt

SEQ ID NO: 224146 - DNA, 503 bp, Homo sapiens
tgtttccatgacccaaataaaattctatgaaaatttataattttgttttcatttccttccaagtttggacaattccctagttcatttctgaaatttaccttactattctggttttggtgagggctccaaatccttactgattctgagatatttacacaatgtcttctttgaatgacagaatagcatgcaatgtaatactaaggcaaccaccattcaaagtaatagacaagctctcctgcattgcctcaaagtacagrctgtcaatagagatggaaaattaaatttagaggaagcactattatatattgttacaaagggttaaatcatgtccctaggaatataaagacagaagagcaggttgagtctatatgtatataaataaataaataagcaaataaagttaagagatgtttttttcacccaacctggggatagaacatattcagaagtgaatttaccatgtatcataaaatatcattaagcatagaatagtgcttaaattt

SEQ ID NO: 224147 - DNA, 568 bp, Homo sapiens
tgattcgaggaaaatctctctccccccaccaacaaaagcacgaatgtccctcccctttttcttaataaccaatttcttaattaaaaatatcctgtatctataactttcaggttctcagaagctgagctgattttcaagatactctcccacttctccaattttgtggtcattgaataaagcctgcactgcttaacacttatgtttggttttgtgtgttgactttgtaacactaaatggaaaagaacgccttttgggacaactgagacccctggtaacactctcactctatgatcaaaatgacctttctgtgaatttatttttacttttaattgtatatttacaaattatataaatatatatttatggagcacagagtgatgtgatgatttataatamaaagtggaataattaaataaagctaactaacatatccatcacctcaaatatatattattttttaagatgggaacatttgaaatgcactctgatagtaattttgaaatacaatatacattattatttactacatttaccatgctttgcaatataactcaaaagagataaaaag

SEQ ID NO: 224148 - DNA, 495 bp, Homo sapiens
cttaggaaatgtcatgaaatgtgaataaatgttgcttaatagcaatccctatatttttggttgtataaccgtcctctttttttgatatttcaggaatagtcaagaacrtattcagtaatataaaagttgtattacttttcatatatttttttcagttgatcgtttttttgaagagaatgataaataaggggttttttttttagatattttaaagccacagataaaactggagtctggataaattagtatacagatatctaagactcaaaactttttttctctgtttttattctgtttgtgatccctcgaataaatatttggagaaaagaacatgttgtctaatgccatgcattgattgtgtactattcttttggatctgagacattctaaataatagatcagttacctttgttctaaatgtgggtcattctgtctgtctcaaaaaggaatccatagctttttgaagcaggagaaattctatttcctggaacaaca

SEQ ID NO: 224149 - DNA, 468 bp, Homo sapiens
caggggttctcgagcaagtccatgtcatctgtaagccattgtcactttttgaaaaacaatacctcgtgctattgaactctggaagagaaagactctctaaccacaggacactgagtaaccatgcagcaaaaatcacytgtcatgaactggattctgcaaaactcacaaagatctaaggcaggggaagtccacatacaatccattgtatgatggagtggtatatgcaggatcaagcactagcagggacagggaacatgagcaagctgcataagcaggcagcctagaccactgcagcactggcacacttcaagctgttcatggctatgaccaggagaaagaagaggaaagtgcccaatcttggtttacaaatctgtcacctcagtgtgtgagttcagaccataacaatgtatggtcattgcattacggttcaactaaagagtacagttttagacatttgtgagataaaat

SEQ ID NO: 224150 - DNA, 468 bp, Homo sapiens
caggggttctcgagcaagtccatgtcatctgtaagccattgtcactttttgaaaaacaatacctcgtgctattgaactctggaagagaaagactctctaaccacaggacactgagtaaccatgcagcaaaaatcacctgtcatgaactggattctgcaaaactcacaaagatctaaggcaggggaagtccacatacaatccattgtatgatggagtggtatatgcaggatcaagcactagcagggacagggaacatgagcaagctgcataagcaggcagcytagaccactgcagcactggcacacttcaagctgttcatggctatgaccaggagaaagaagaggaaagtgcccaatcttggtttacaaatctgtcacctcagtgtgtgagttcagaccataacaatgtatggtcattgcattacggttcaactaaagagtacagttttagacatttgtgagataaaat

SEQ ID NO: 224151 - DNA, 468 bp, Homo sapiens
caggggttctcgagcaagtccatgtcatctgtaagccattgtcactttttgaaaaacaatacctcgtgctattgaactctggaagagaaagactctctaaccacaggacactgagtaaccatgcagcaaaaatcacctgtcatgaactggattctgcaaaactcacaaagatctaaggcaggggaagtccacatacaatccattgtatgatggagtggtatatgcaggatcaagcactagcagggacagggaacatgagcaagctgcataagcaggcagcctagaccactgcagcactggcacacttcaagctgttcatggctatgaccaggagaaagaagaggaaagtgcccaatcttggtttacaaatctgtcacytcagtgtgtgagttcagaccataacaatgtatggtcattgcattacggttcaactaaagagtacagttttagacatttgtgagataaaat

SEQ ID NO: 224152 - DNA, 319 bp, Homo sapiens
tcaaacaagtaaaaattaattctctaaatgtaaatattcttgtgtataaaatttgaaaatgatgatacctgacattgttaagagttataaatatgaaaatagctaatgcatattaagtgtggtggacactgtgttatgtgcccaaattctctttcaggattaaagatgtatttgtccagccactgaaggtgycactatatgacagccctcagatgttagacttgaccaataattttcctgaactgaaagaacggtctctgccttatctaagatgatacacttcctagggcagccatcatctaataactcgaaatacggg

SEQ ID NO: 224153 - DNA, 319 bp, Homo sapiens
tcaaacaagtaaaaattaattctctaaatgtaaatattcttgtgtataaaatttgaaaatgatgatacctgacattgttaagagttataaatatgaaaatagctaatgcatattaagtgtggtggacactgtgttatgtgcccaaattctctttcaggattaaagatgtatttgtccagccactgaaggtgtcactatatgacagccctcagatgttagacttgaccaataattttcctgaactgaaagaacggtctctgccttatctaaratgatacacttcctagggcagccatcatctaataactcgaaatacggg

SEQ ID NO: 224154 - DNA, 508 bp, Homo sapiens
ggtaaagacagacttgaattcagaaatgaagagatgaaattagtgcaagaaacttatcaactcttggcatttaagggggagggatctaataaaagaaattaagagtttacaggttcattgagatggctagagaagtatatatcatgaaactgccccaggaggtatagacagccagggcaaactattttattgaagccgtgcttcagaagtaaargagccactgctcatgtgttgacttttcaatatccacaaagcagtcaccagatactggaacgctgaatccaaccaatgaagttttccacttactattcaccttgctgtgacttctactgcccactgaaagggcagcaaaaagatggattttaccttttccatcaaatatcataaaaaatcatttaattaatagaacctaattttaagacaattacctttcaatataagaagttatccatgacaaacaattgaacaaactcacaatattctccactgatcatctttttcagtattc

SEQ ID NO: 224155 - DNA, 446 bp, Homo sapiens
aaactacaagtaaataaaactgaatgatgaaataatgactagattctctctgggacaaatgtgttgtggatataaaaacatcactgctttttttttttagcctattctgaaaggctgtttctatggtttttcacatttaaaatggctgtcttgagataaacacgtcagtcgtgataaagttgcactgaattattttaattttacattattctataaaatgggccataaatacatacaaatatattctgtgacacattctatatgaatcttagaagttatcagcagtacacattacatyctattctcctcctacatgaagagtgggcaattggcacatccagatagagcaggtggttgtgaaaggagtgccaagccagaatgtggaacgtttgtagacatctgctattcttttctgctacccccagtcactgatacgaaataaatga

SEQ ID NO: 224156 - DNA, 571 bp, Homo sapiens
tcctattatatagagataggatagcctgatttatttagtttcttttcctaattctgaaatttgtgtgaaaaaatcagaaaaattatgcaaataattcacttcatgataaatcttttgaaaggatactctgatataggaacaaaattgactctatatacagtttttacttacaaaaattgaaagcaaaataataaatacacaaatacatttcttrtatctgtacaatgcatttctgcatttgtatacatgtaatatgtataaataaggaggaaatgctggatatattatctagtgcttcaagttttgttattttttaaattaatttctttaggctcattgtccacagtaattctagtgactaggtttgctcacatctattgctccatcatctatgacaagaataaataatcatataaaaccagaaacatgctacaaatcaagtttgccttcatgagcttggttttggcagaactctgatccaagagaatgctcctacgcttttatatgcataaaactgtattgaaggctcatttatcccatatgtctcttatttttatttaaccacagacaa

SEQ ID NO: 224157 - DNA, 571 bp, Homo sapiens
tcctattatatagagataggatagcctgatttatttagtttcttttcctaattctgaaatttgtgtgaaaaaatcagaaaaattatgcaaataattcacttcatgataaatcttttgaaaggatactctgatataggaacaaaattgactctatatacagtttttacttacaaaaattgaaagcaaaataataaatacacaaatacatttcttatatctgtacaatgcatttctgcatttgtatacatgtaatatgtataaataaggaggaaatgctggatatattatctagtgcttcaagttttgttattttttaaattaatttctttaggctcattgtccacagtaattctastgactaggtttgctcacatctattgctccatcatctatgacaagaataaataatcatataaaaccagaaacatgctacaaatcaagtttgccttcatgagcttggttttggcagaactctgatccaagagaatgctcctacgcttttatatgcataaaactgtattgaaggctcatttatcccatatgtctcttatttttatttaaccacagacaa

SEQ ID NO: 224158 - DNA, 571 bp, Homo sapiens
tcctattatatagagataggatagcctgatttatttagtttcttttcctaattctgaaatttgtgtgaaaaaatcagaaaaattatgcaaataattcacttcatgataaatcttttgaaaggatactctgatataggaacaaaattgactctatatacagtttttacttacaaaaattgaaagcaaaataataaatacacaaatacatttcttatatctgtacaatgcatttctgcatttgtatacatgtaatatgtataaataaggaggaaatgctggatatattatctagtgcttcaagttttgttattttttaaattaatttctttaggctcattgtccacagtaattctagtgactaggtttgctcacatctattgctccatcatctatgacaagaataaataatcatataaaaccagaaacatgctacaaatcaagtttgccttcatgagcttggttttggcagaactctgatccaagagaatgctcctacgcttttataygcataaaactgtattgaaggctcatttatcccatatgtctcttatttttatttaaccacagacaa

SEQ ID NO: 224159 - DNA, 632 bp, Homo sapiens
gtaatccttaatcataatttcaggactcagggcattaaaattaatttactctttagagatgagaacagattgcccatcagaagaggaaaagtttaaatgtacgttttataagaagcttaaagggctcacaaggcattgataaagccttagggcgatmaaaaaaaagtcacctgataaattaagtgtattttactctaatacaacgtatattcttctaattactttttattatataaatttagaattttttgagtttctagggtatccagaatgattgatgaattatctctgctgattatgcaatcttatggagatgaaaaaacaaatactcctctttgttttgatagtttaatcttttacctaagcagctatatttcacccacttaggtgtatttaattttgaaacccataatcaaaaatcaaattttattactctttaatctttctttttgattcattattccctctggtatctcaaaatattttgataatgaaaattcccaacacacaattatgagataagggctcaccaaaacataatcatgaaatatacttatctactccttgataacatgatagtgatttacattcaatccaaaacatgttaataagtggcatatttcattctgtct

SEQ ID NO: 224160 - DNA, 484 bp, Homo sapiens
ttgttttgaaataagaaatttaattttatcaaaattaaaaacttatctgcaaaagacacttgaaataaaggaatgaaaaacaagccacagaattgagaacatgtttatatatatatatatgtatatatatacatatatgtatatatgtgtgtgtatctatctatctatctatctatatctgacaaagaatgtgtacctagaatatataaagagcttttaaaatgcaataataagaaaataagtaacatcattktttaaatgggcaaatatttggacaattcaccaaagacaatatgcagatgataaatgagcgcatggaaagatgctcagtatagttagtcactgggacaaatgtacatgaaactgtgatgagatacaagtgtatacctatggaatggctaaaattgaaaaagattgatgacatgaagttatttcacgggtcagaacaactataattctcatatgttcctggtgagaaggcaat

SEQ ID NO: 224161 - DNA, 645 bp, Homo sapiens
tatattgttaagaactaagttgtaagtatgagaaaaaaatataaaagcgaagaagcgcaaaccctataatcctaaacttgaattgaaaacatcagtatgagctcatgatatgttttctcttaacaaaacaaaataacaacttatttcctaactctgcctgctaaaaaggcctagaaacagtgaccagctcagcagcaatgagttcccataacacccagactgtagtttctaatacaattttycactaaaaggaatccatattcttggaaagtcagctaatttgaagactggggagcaaaaaattcaagaaggcctttatcttggttcttttgtgctgttataacaaagtacctgagactgggcaatttataaaaatcacaactttatttctcacaattctggaggctaaaagttcaagaataaggcaccagcaagttcagtgtctagaaaggacccagcgtttgcttcgaagatggcgcctttctgctgcattctctgaagaggatggatgctgtgtcctcacattgcagaagtcagaaggggaaaaagggcctaagctagttccctgtagcctttttgcaaggtactaatccatgtctcgtggctgaatcacttccccaaaagtcttaactcccaacatcacca

SEQ ID NO: 224162 - DNA, 645 bp, Homo sapiens
tatattgttaagaactaagttgtaagtatgagaaaaaaatataaaagcgaagaagcgcaaaccctataatcctaaacttgaattgaaaacatcagtatgagctcatgatatgttttctcttaacaaaacaaaataacaacttatttcctaactctgcctgctaaaaaggcctagaaacagtgaccagctcagcagcaatgagttcccataacacccagactgtagtttctaatacaatttttcactaaaaggaatccatattcttggaaagtcagctaatttgaagactggggagcaaaaaattcaagaaggcctttatcttggttcttttgtgctgttataacaaagtacctgagactgggcaatttataaaaatcacaactttatttctcacaattctggaggctaaaagttcaagaataaggcaccagcaagttcagtgtctagaaaggacccagcstttgcttcgaagatggcgcctttctgctgcattctctgaagaggatggatgctgtgtcctcacattgcagaagtcagaaggggaaaaagggcctaagctagttccctgtagcctttttgcaaggtactaatccatgtctcgtggctgaatcacttccccaaaagtcttaactcccaacatcacca

SEQ ID NO: 224163 - DNA, 645 bp, Homo sapiens
tatattgttaagaactaagttgtaagtatgagaaaaaaatataaaagcgaagaagcgcaaaccctataatcctaaacttgaattgaaaacatcagtatgagctcatgatatgttttctcttaacaaaacaaaataacaacttatttcctaactctgcctgctaaaaaggcctagaaacagtgaccagctcagcagcaatgagttcccataacacccagactgtagtttctaatacaatttttcactaaaaggaatccatattcttggaaagtcagctaatttgaagactggggagcaaaaaattcaagaaggcctttatcttggttcttttgtgctgttataacaaagtacctgagactgggcaatttataaaaatcacaactttatttctcacaattctggaggctaaaagttcaagaataaggcaccagcaagttcagtgtctagaaaggacccagcgtttgcttcgaagatggcgcctttctgctgcattctctgaagaggatggatgctgtgtcytcacattgcagaagtcagaaggggaaaaagggcctaagctagttccctgtagcctttttgcaaggtactaatccatgtctcgtggctgaatcacttccccaaaagtcttaactcccaacatcacca

SEQ ID NO: 224164 - DNA, 620 bp, Homo sapiens
tcatcagctaaattaactcaaatttactatctggatttggctgtttcrcttgtaggttaaaagttaaaaggtttgctatttcttggaatcaaaggttatttaatgaaagaagattaatttcaataaatgatgcatttaaagttttttccaacaaagagtgtaagagatttatcacaggttctaaataacaaatttaatttccctaacatgttaaggagaattttggttcccgcagaggactgagtggactaatcatttataataagactgactttaaacttccttttaacttgacagtagttaattctaactttattaaattagaatccccattaattcacccatttttctttcaccaattttgttttacaattaaggtttatctgcagagttctgttttgaccattatgctgaaagtgctgagttctgctgtttgccttccttcagcctttctggctgaatggcttcctgaatcttctcagaggtttccctctgagcccatgatggggttctaaaagcacattctgttcatgtactgggatagtgggatgtgagggcagagaagttcttcctgagcatgagtccttcatcctctacccactgttttataaacctgtctc

SEQ ID NO: 224165 - DNA, 620 bp, Homo sapiens
tcatcagctaaattaactcaaatttactatctggatttggctgtttcacttgtaggttaaaagttaaaaggtttgctatttcttggaatcaaaggttatttaatgaaagaagattaatttcaataaatgatgcatttaaagttttttccaacaaagagtrtaagagatttatcacaggttctaaataacaaatttaatttccctaacatgttaaggagaattttggttcccgcagaggactgagtggactaatcatttataataagactgactttaaacttccttttaacttgacagtagttaattctaactttattaaattagaatccccattaattcacccatttttctttcaccaattttgttttacaattaaggtttatctgcagagttctgttttgaccattatgctgaaagtgctgagttctgctgtttgccttccttcagcctttctggctgaatggcttcctgaatcttctcagaggtttccctctgagcccatgatggggttctaaaagcacattctgttcatgtactgggatagtgggatgtgagggcagagaagttcttcctgagcatgagtccttcatcctctacccactgttttataaacctgtctc

SEQ ID NO: 224166 - DNA, 534 bp, Homo sapiens
tcagcttaggtcctgggccttttcctcttcttcctctacacactcttcctgtgcaatctcctcccttgcatagctttgattatcttgtatgtattcatctcttccaaagcaatgtctccaattgaagtcactctcctgaccatcagaaatccagccatctactgaaaaacatctcttggatatctctcaggcacctacctcaatctcagtatgtccaaaactgaagattgaaacctccgcttcccccacccgcacactgctttttgctccctcagctctttttgtatcccatctgcagtgtctgacatggctgtttacctagttacccaagagagaaacccaggcatcatccttgagttcttccatctccagttcattcatatgtcccaccagttctatccccatgaatagttcttgtttaaatccagttctcctcatccgcacagccacattaccatgttacccagccccragccatcctcttctcttgcctagattatgaagcagctttgtaactggagcacttgccccggc

SEQ ID NO: 224167 - DNA, 586 bp, Homo sapiens
tgaataccaattctgctacttactagctgtctaggcaaataactttatctctctgtgcctcggttatctcatctgtggaatgggaayaatactaaaaacaactgtttcgttcacaggactttttgtgagggttaactcatttaattgagttaatagattgaaagtggttatacaatgttagtaagctatctctaattccctaagtcccattgtgtaaggtaaagtacatggtgcatgcttaataaacgcttgatgttattatttttactgttgtcccttagcttcccatgcttatagtgcttactggacaatttaaaatcattatattttatttcccctttcataaaagcagtcttcatataacttcagaagaaataatcatagctgttgcctgagatttactatagagtaatatataaacacaacattttcatttaaaacaataagtatttcatgtatgccaaagcattaagtgttactttctgaaatttagcagtaattcaacactataaatgacatcaaataaagatttttgcttaaatttctagtaccataatcaccaacacatgtaaagatttataaggaa

SEQ ID NO: 224168 - DNA, 586 bp, Homo sapiens
tgaataccaattctgctacttactagctgtctaggcaaataactttatctctctgtgcctcggttatctcatctgtggaatgggaataatactaaaaacaactgtttcgttcacaggactttttgtgagggttaactcatttaattgagttaatagattgaaagtggttatacaatgttagtaagctatctctaattccctaagtcccattgtgtaaggtaaagtacatggtgcatgcttaataaacgcttgatgttattatttttactrttgtcccttagcttcccatgcttatagtgcttactggacaatttaaaatcattatattttatttcccctttcataaaagcagtcttcatataacttcagaagaaataatcatagctgttgcctgagatttactatagagtaatatataaacacaacattttcatttaaaacaataagtatttcatgtatgccaaagcattaagtgttactttctgaaatttagcagtaattcaacactataaatgacatcaaataaagatttttgcttaaatttctagtaccataatcaccaacacatgtaaagatttataaggaa

SEQ ID NO: 224169 - DNA, 426 bp, Homo sapiens
tgacctgaaaaaattctcccacttgaacaatgaggcataaatatttttgtcattgtattgtttataaaagtgaaaaaattggggtgaaaatttatgttcatcagtaagatggtaattcaataaattataccacattcctactctgggtaactacactgtcatttaaaaggatgcaggacatttgtcattactgatatgatagtattttgaatatagacttaacttttttgaaagtcacatatgaatacttagaacatatgcttttcattgctgaattaaggaacatcttarcatggcatataagagttctagagtcaaactattgggtccaaatattgtccctctaccaatcacttttatgatctctatttctcagtttcccggctacctgataaagagagatggtaatagtgcttcacagggtgt

SEQ ID NO: 224170 - DNA, 440 bp, Homo sapiens
agcatgataagctgctctgtgaataaaagtgttacacgatcaaacatgctggagaacagctkgtactatatccccctccgaaagttatacaacccatattgtcatataaaaggatttgaaaagaccagaaacaaaaaaaagtatttatctgtgcttagtccaaaatttttcaaatttgtttgacttacttttttttccatgtgatgcttacagggagctagtttcagaggaaacactttgagaaatcctgggtaaatttcttaccagtaatagctaatatctaaattgttgcttttagccttcaaatatgaattgtaattgaatttacttctatgccagtccaggtccaggtcttacagtatatgctttcattactctctgaatgtttcctatagcacatttgttagtcgtattcatttttaactacatgcaattacatt

SEQ ID NO: 224171 - DNA, 614 bp, Homo sapiens
tgaacagagtgaatgtttggtaaatatttgctaaactgaactggaaaggggtgttcatttgaattacaactacatctgctaccagatgcaaagcaaatgcttttactaatggttcattgcattagaatggttctaatgcaatggttcattgcattgcatacctctttgggaagtatctccagtttttccaagcatgtgtgataagattaaatacctcaagcagtgtatctgacatacaggagatactcaacaaataatagttttttattttatttttgttttatttcaagttaagaatgcggatggtaagagaagaawgtggaggggcataaattcagtataatatatagtctaatttggagatatcagagcaggtattgatggtaagtttttttgaaaaaagaaagatacaatgaagagttagaactcttgatttaaattctctgatttcctgcaaagcttctttacttactggctgggtaaaacttgagcaagttaccctctctgcatcccagatttttcatctgtaaaaacagggataataacagaatccacttatagagtggtagtgagaattatatgaaaaaaaaatccttgtaaaatacttagtatgg

SEQ ID NO: 224172 - DNA, 614 bp, Homo sapiens
tgaacagagtgaatgtttggtaaatatttgctaaactgaactggaaaggggtgttcatttgaattacaactacatctgctaccagatgcaaagcaaatgcttttactaatggttcattgcattagaatggttctaatgcaatggttcattgcattgcatacctctttgggaagtatctccagtttttccaagcatgtgtgataagattaaatacctcaagcagtgtatctgacatacaggagatactcaacaaataatagttttttattttatttttgttttatttcaagttaagaatgcggatggtaagagaagaatgtggaggggcataaattcagtataatatatagtctaatttrgagatatcagagcaggtattgatggtaagtttttttgaaaaaagaaagatacaatgaagagttagaactcttgatttaaattctctgatttcctgcaaagcttctttacttactggctgggtaaaacttgagcaagttaccctctctgcatcccagatttttcatctgtaaaaacagggataataacagaatccacttatagagtggtagtgagaattatatgaaaaaaaaatccttgtaaaatacttagtatgg

SEQ ID NO: 224173 - DNA, 469 bp, Homo sapiens
aaatgagaacgtcatccccagggcctggaatggtattgttgtatcctccccagccttcttcaacaccttgccatgtttcagggagggaccattttaaagctgattcaggggcagaggtagaagctagaaaataaaaaaaaattttgaaaatctaatccattgtgataacttccaaattctatccttattttaggatgctagtggtattttcacctcccaaagaagctgcctatcaatattttataagtttctgtacaaatatttatcagttaaaaagcaagtaattattcaatccttagattaccttcacttctgaaaaaaatcccacttttgttattatacatctgttttgccttataataaatatggcatgcttatcatgaaatatttaraaaatgcaaataagaaaggtaataattgcccataatctcactaccttgcaataactaccttttatttctgtttcctt

SEQ ID NO: 224174 - DNA, 469 bp, Homo sapiens
aaatgagaacgtcatccccagggcctggaatggtattgttgtatcctccccagccttcttcaacaccttgccatgtttcagggagggaccattttaaagctgattcaggggcagaggtagaagctagaaaataaaaaaaaattttgaaaatctaatccattgtgataacttccaaattctatccttattttaggatgctagtggtattttcacctcccaaagaagctgcctatcaatattttataagtttctgtacaaatatttatcagttaaaaagcaagtaattattcaatccttagattaccttcacttctgaaaaaaatcccacttttgttattatacatctgttttgccttataataaatatggcatgcttatcatgaaatatttaaaaaatgcaaataagaaargtaataattgcccataatctcactaccttgcaataactaccttttatttctgtttcctt

SEQ ID NO: 224175 - DNA, 576 bp, Homo sapiens
cttgtgtgtgcttcacaaaattctcatgctgtgttttttggctccatcaggtcgtttatattcctctctaaactggatattctagttagcaattcctctaactttttatcaaggttcttagcctctttgcattaggttagagcatgctcctttcactcattrtagttttttattacccatcttctgaagcctacgtctctcaattcatccatttgatcctccatccagttctgtgcccttgatggagaaatgttgtgatcatttggaggagaagaggcactctggcctttttggttttcagcattttctcgttgattctttttcatccttttgagcttgtctagttttggtctttgaggctgttgacccttggataggatttttgtgggggcctttttgttgtttttgttgttgttgatgctgttgttgtcgctttctgcttgtttgtttttctttcgggtccctcttctgttgggctgctgcagtttgctgggggttcacttcaggccctattcatctgatttgctcccatgcctggagatgtcactcaaggagacaggagtgcagcaaagatgg

SEQ ID NO: 224176 - DNA, 576 bp, Homo sapiens
cttgtgtgtgcttcacaaaattctcatgctgtgttttttggctccatcaggtcgtttatattcctctctaaactggatattctagttagcaattcctctaactttttatcaaggttcttagcctctttgcattaggttagagcatgctcctttcactcattgtagttttttattacccatcttctgaagcctacgtctctcaattcatccatttgatcctccatccagttctgtgcccttgatggagaaatgttgtgatcatttggaggagaagaggcactctggcctttttggttttcagcattttctcgttgattctttttcatccttttgagcttgtstagttttggtctttgaggctgttgacccttggataggatttttgtgggggcctttttgttgtttttgttgttgttgatgctgttgttgtcgctttctgcttgtttgtttttctttcgggtccctcttctgttgggctgctgcagtttgctgggggttcacttcaggccctattcatctgatttgctcccatgcctggagatgtcactcaaggagacaggagtgcagcaaagatgg

SEQ ID NO: 224177 - DNA, 462 bp, Homo sapiens
gtaaataaatcaagacaagttagatttagacacaaaaaattgcttttacccattacaartgttatgtatatcttttgctgtgagtctttgaagggtagccatgtgatctttgaaattaaatggttactttgtcaaccaatcttatgataaagattaggttttatcttggccattggaagattttaaacgagacatggacagagcctgacttatattttaatctgatttatgatgtgtggagaattgactattggtggtggtgatgaggaagagataagagtggaaatagagacactaactgttaagacattgctatggcagttttttgggtaacacatgatgatggcttagattaggatggcagtgatggaggagtaaagatgtggataaatatatgttgaagacagaagtgacatgactcctgatggactgaatattgaggaaaagagaaagagaagagtc

SEQ ID NO: 224178 - DNA, 462 bp, Homo sapiens
gtaaataaatcaagacaagttagatttagacacaaaaaattgcttttacccattacaaatgttatgtatatcttttgctgtgagtctttgaagggtagccatgtgatctttgaaattaaatggttactttgtcaaccaatcttatgataaagrttaggttttatcttggccattggaagattttaaacgagacatggacagagcctgacttatattttaatctgatttatgatgtgtggagaattgactattggtggtggtgatgaggaagagataagagtggaaatagagacactaactgttaagacattgctatggcagttttttgggtaacacatgatgatggcttagattaggatggcagtgatggaggagtaaagatgtggataaatatatgttgaagacagaagtgacatgactcctgatggactgaatattgaggaaaagagaaagagaagagtc

SEQ ID NO: 224179 - DNA, 462 bp, Homo sapiens
gtaaataaatcaagacaagttagatttagacacaaaaaattgcttttacccattacaaatgttatgtatatcttttgctgtgagtctttgaagggtagccatgtgatctttgaaattaaatggttactttgtcaaccaatcttatgataaagattaggttttatcttggccattggaagattttaaacgagacatggacagagcctgacttatattttaatctgatttatgatgtgtggagaattgactattggtggtggtgatgaggaagagataagagtggaaatagagacactaactgttaagacattgctatggcarttttttgggtaacacatgatgatggcttagattaggatggcagtgatggaggagtaaagatgtggataaatatatgttgaagacagaagtgacatgactcctgatggactgaatattgaggaaaagagaaagagaagagtc

SEQ ID NO: 224180 - DNA, 462 bp, Homo sapiens
gtaaataaatcaagacaagttagatttagacacaaaaaattgcttttacccattacaaatgttatgtatatcttttgctgtgagtctttgaagggtagccatgtgatctttgaaattaaatggttactttgtcaaccaatcttatgataaagattaggttttatcttggccattggaagattttaaacgagacatggacagagcctgacttatattttaatctgatttatgatgtgtggagaattgactattggtggtggtgatgaggaagagataagagtggaaatagagacactaactgttaagacattgctatggcagttttttgggtaacacatgatgatggcttagattaggatggcagtgatggaggagtaaagatgtggmtaaatatatgttgaagacagaagtgacatgactcctgatggactgaatattgaggaaaagagaaagagaagagtc

SEQ ID NO: 224181 - DNA, 572 bp, Homo sapiens
gaattcaaagtcaaataacacctatttttgcctttcaaatcagcaagattggtaatacctaatgttggtgaggrtgcaagcaaaatggtacttcacataggtggtggtggtgatataagttggtattatctgctctgactacctatgaccccaccatctctgctgagctgcttctgctgaagttaggaatgacgcccacatcactaattcaggaccacttttcagcatgtgtccttcttgccacaacttccttgctttggcttatatgaccccatagttccattcatttattcgttaaaaatacatgttcctggaattgtgctaagccttagaggtaaaatagtgagagaaaactaacctgctccccaaccacagggagcttgcaattctacaggttttccctctctctggcttctctttctcagcctgcctcatttgtctccacccagcctgtaagtcctggatttcccccaggtccagtccccttctcatttagtctctccatgagggaggatcactgccctagcctgccccaccaatttgcatctaatacaccactgagctgtactcca

SEQ ID NO: 224182 - DNA, 492 bp, Homo sapiens
gcttcattattttttattcttttttcttttgtctcatctaactgttattttcaaatagcttgtcttgaagctcactaattccttcttctgcttgatcagttctgatatcaaaagactccgatgcattcttcagtttgctaaatgcatttttcagctctagaatttctgcttgattctttatagttatttcaatctcttttcaaaaattgtatggcagaattctgaaytgcttttctgtgttgtcttgaatttctttgcgtttcctcaaagcagctcttttaaattctttatctgaaaggtcatacatcttcatatctccaggattggtttctggtgacttatttagttcacttggtgaggtcatgttttcttggatgtttttgatgcttgtagatgttcttctgtgttggggcattgaaaagttaggtgtttattgtagcctttttcactctgggcttgtttgtacccatcattcttgagaaggctttccag

SEQ ID NO: 224183 - DNA, 604 bp, Homo sapiens
tttgtcatattctgcattctgtcttgggattctttgacctcctaaatgatttttaaaaatttgcatacattaaggttcattcttggtgctataaagttctatgtgttttgacagatgcaaattggaattgactgactttgtacagcttcagaatccttgagaaaggaaaacaacctcagcatagccgactctgctctctaggcacacttggaaagcctggaagcccccatgaagcatttaaagcagttctgcccccatggaaatagaatacgaaccatatatgtaattttacattttctagtagccataaagtgaaaagtaaaaaagatacaggtgagattaattccaataatgtatttgatttaacccaatatatcaaaactattatttcgatatgtaataaatataaagacttattaataagtcctgttacctttttggtactaagttttcaagaccagtatgtattttacacttccgrcatatggcagtttggaatagccacatttcaagacttcattagacacatggtggctagtggctaccatactggatagtttaagacttaaaaatacccttctattcaggagttttctttcagatt

SEQ ID NO: 224184 - DNA, 567 bp, Homo sapiens
tctttaccgactttacaggtcaaccttactttgacccattgcccaactcagaaatataattctataagacaaacagcactccaataacttttcagacaaattccttctaaaccatgaccagttctatattaatttgtacatcctattttgtctttgctatccactcttcaactctctcctaaaccactgacgttttttcaactttgattcccaaagagacgattttgaaacatagtttcattggtttcccaaagcacataaaaataatagatctgattaggtgaatccatatttcacaaatacratgtgtagagtctcatcattgaatatgttaaacacaaaatgatatctgttccaggaaagtttctggccataaagaccacaaactgccttccctttgtctcgattatgtttttccttcattgtactgttctgttatactcttctcagctctttggggcagggagtcagggagttgtttgttcagcaggtgctatgtatagtaaattgctgcatgcatttatgttgctatataaataatgaacaattctgtactcacagacactt

SEQ ID NO: 224185 - DNA, 428 bp, Homo sapiens
aatcctagcaaggcaggaggttgcggtaggaggatcacgtgagagcccaggagttcgaggctaaagtgaactgtgatagcaccactgcactctggcttgggtgagagagtaagaccctgactcaaaatatatatatatatatrtgtgtgtgtgtgtgtgtgtgtgtgtgtatttttttctttttagcataatattggacttctacagatttgcaaaaaaaatttcatgaacttaacattttactacatttgctctatctttttctttgggtcctaataacaaggagtttccttacataatggcatagcagtgggcaaaccccagaacctaaccattggcccaccactgtaatctacagattctatttacatgttgtcacttggcctaaaagaagaaattctaacatcatgtcttgcatttagttgtca

SEQ ID NO: 224186 - DNA, 542 bp, Homo sapiens
tgaataagtaaaaataaagacatctatagtttaaaaattaccatattgctatttcataaatattattattattgtttttattttgaaaaaatacatagattgtgcatgcccaatgaattctggtgggtctccactgctccaactcytcttcttaataaggcccagctggctctgccatagcttctgttgaactgtgaccttcaggtactgagaaatctatagagcataaggaagatgccaggatacctgggaatctggggaatggagttaaatccatttatattaaaataattactgaccaagagaccagaccttcaagaagactgacacactccaaacagatctttggatggaaggcatgaaaagtagacagagggaggacactgacaataggttgaagcgggaggaagctgggaaacccgcactgggctgccaagcaaagagacttattccaggagcccagtggctcctgaagaaggggtgagttaaataggtgaataggggcccactcaccatggacctcttgaatcctaattgcagga

SEQ ID NO: 224187 - DNA, 537 bp, Homo sapiens
tgtcagatacaattaaggagtaaaaaattgtacaatcaatattaaaaatataattttgttaagtatatcagttagattgtaggtaaatcttccaagaagaagtggttggtaactgtgcagctgaattgcttaaacctagtcttggcactgcaacagaacatgtgaaacatgaaatgcacactgtagcttttagttattatgttttagtaaggaatgtagttgagcaagttggccttatcttattccaattcatgtctgaaaagttacctgaaaagcaaaaaaaaaaaaaaaaaaaaaaaatgttaactgattccacatttccattgatgccattattattcattcagacatgtattcacccaagcaaaatattttggccaattatgcaataatgcaaattccactaaacctggtctaagtcctaaagtttgagctatartttccaagtatgactaacccaatgtttattttgtagacaaaaatcaaaactctctaactcttaaaatgttcagaagaagaatatgtttaggtttcaaa

SEQ ID NO: 224188 - DNA, 400 bp, Homo sapiens
gggaaatcaaccccatgatttaattatctccaactggccccacccttgacacatgggaattattacaattcaaggtgagatttgggtgyggtcacagccaaaccatatcaacccaattcagcttaaggaataagtaaaatgaacaaagtgaagacctctgtataccctcacaaatcagattctcttccttttactctggaaaaataactatgctgatttttatttatattatttctattcatgacttcacactatatactacatacgctgatacagtttggctgtgtccccacccaaatcttatcttgaattttcacttcatgtgggagggacctggtgggaggtaattaaatcatgggggaaggtctttcccatgctgttctcatgatagtgaataagt

SEQ ID NO: 224189 - DNA, 440 bp, Homo sapiens
gtgtgtaaattctccacgggtagggaccataagtacaayatattttccgattttttctctgtcttaaatagaagacaaatcttagggtggtggagcaagatggtgaaatagaagcctgcactgttcatgcccactgctggaacactaaatttaaaaaactatctgcacacagaaaagcatcgccacaagaaccaaaaggcagatgagcaatcacagtacctgattttaacttcatatcagagaaagaggtattgaggaaggcaggagacacagtcttgtattgccattcccacgcttccctcatcccccagcagcagctgtgtggtgcggagagagaaactgtgtacttatgggagggagagcacagtgactgggggacttcacattgaactcagtgttgtcctgttacagtggagagcaaagcctcaatgggctcagct

SEQ ID NO: 224190 - DNA, 467 bp, Homo sapiens
ttttgagaaaaagacaacaagctttgtacaaggcgagaggaaatttgactggtttattgtgttttttctaggggaaaatatgcatacagacaaaggggacacagtagataccatctatttagattctcaaaaaaatctttgacaakaatccatatcttcaaagtctgttaaaaacaaaacaaaattaaacaaacaataaaacaaaccactttcaccacacaatagatagtttgcttcaatttaggaaagaagtaggcatttctaaaacagagaattacaaatagtgagtttccccaaggatctgtgtggttaatgtcttacaaatgatctcgaggtagtcttcaagctggaagttgtccttaagttcttctgggcagttaaagggtggagggatgtaggaaggtgtagaaaggccccagtgactgtgcaaagtggcaacgtggcttagtgtgagggaacgttctcag

SEQ ID NO: 224191 - DNA, 493 bp, Homo sapiens
atcttttactaaaaacgcattttactttccaacacaccttgtgcgtaacactgtttcttcagtactctcaactacatgttacaatgttaactcttagcaacttttatttttggtgaaaaacctggcaagtaagtgattttaattattaagtataaagcctgggacactagacagaagtgcagatgagctctgaccctttcctgtgtagccagagggaatggataactccacacgtgcccaggcattacctaaaatcaaatggttcccaaacaggtaagttgaacaattttcaatagtcacagaagcagattatgaccttaaagcatttagaaaactggaygtcttacctgcctaatttagaccaaatgtttaaatttctgaagattttttattttaccaataatctttaaaactgtctttatttattaaagattacttaagtaacatgaaacaaaatgcattacagtttttatttttctgaaaaaatatttga

SEQ ID NO: 224192 - DNA, 590 bp, Homo sapiens
cattaaactaaataatagatggacaaactctttgaaatgtttaaatgcataataataaagctcataccttggagatgcatcttggaatcatagtactaccatggtgtgaatattaaggacacacattctgaagccagaccaccccagttagaatmctggatcacctacctattccctcacctgcaaaatgaggataataagagcaagtacatgataaggttgtagtcaggattaaaagagtaaatacatgtaaacacttggaactaaacctagcatgtagtaaatgttcagtaacactagctgttatgagtaccactctatgtctggctgtggagagtattttaatagaactctgtgcctgtctcctcatatacagaactatttacacatggtcatgagcacttgactctttcaagaacttaatatattccctggaagagataagtggtccataacccttccttttgtcctctcctcttcctttgtaaatacacttatttattgcagctttcaacacatagtaatcaagtgcctacctacctactgcgtgcagaaatttcagatggtaacttggtaaagtgagaagaagg

SEQ ID NO: 224193 - DNA, 315 bp, Homo sapiens
tccagttgggtgactttgttctgcccgaggaagtgacagctaatactgggctggcagmggagtgcacgccatggttcatcataactgtccaaatcagcaggatctgtccagtgcagccaagaaaagttgagctttatttattctctctttggggaacagagggaatggcaaggataggtgtgctttagaatgtcagtctaactacttaatacttaataacacgcacacacatatgcctatgtgtatggataaacatacttgcacaaacacctagaaagaaaaccgcatcttcatatataggctgataaagccaca

SEQ ID NO: 224194 - DNA, 315 bp, Homo sapiens
tccagttgggtgactttgttctgcccgaggaagtgacagctaatactgggctggcagcggagtgcacgccatggttcatcataactgtccaaatcrgcaggatctgtccagtgcagccaagaaaagttgagctttatttattctctctttggggaacagagggaatggcaaggataggtgtgctttagaatgtcagtctaactacttaatacttaataacacgcacacacatatgcctatgtgtatggataaacatacttgcacaaacacctagaaagaaaaccgcatcttcatatataggctgataaagccaca

SEQ ID NO: 224195 - DNA, 579 bp, Homo sapiens
agatgcagtgagatctgtgctgcattaaatgtttacatcaaagttggtgamtaattctaagagattcatgtgagatacatcaatatttcaacttttaagtctattacaactctcaaaatcaactattgaaaagactaagagaagacaaacagagagtttaaaaaataagtaaataacagagaacttctctttctgacaaaggtggggtatctaggattgaacatcctcccactgtaaaaatgacagcactagaaaagtatggcattaggctgaggaggagtgtgtcccctgaaacaaggggagcagattaagtgagccttatgatgagctttctacttggaaacactttgtggttagcaggtgcatgaagctggtggggaagcagtgtcacaaaaatgagttcagaaaactcatgggagaagatgtacatcatagtcagggaagactgaagtggttagaatttataaagcaaaatacagaagaagaggaggatcagtgtaaagaaaaattacttcagaaatctgtatgtgggcttcattgtcttttgctgaatagtaagatatgcatgcagagggcgaa

SEQ ID NO: 224196 - DNA, 600 bp, Homo sapiens
agatggatgggcataatggctgcataacaatttgagtgtacttggtaccactaaactgtacaattaaaatggttaaattatatgtaatacacacataggtacatttaaaatgggaagctaaaagggtaaaatagaaaacagacagcaaaatgctatatttaaayatgagcctagtcatttaatttatagctctatgctgcaacagatacattctatgtatgaagacagaagcactggaagaaattaaatggaaaatatacttttgcaaaaataagcatatgaaagctgatgtgtcttggttactatcaggacaaaacaaaatgcaagaaaataatttttagcagagataaagtaaatcacttcaccatggtaggtgtcaattaatcaaaattgcaaatattaaattaatgaaagaatttttatagaagtatgggacaaatacattaaaacttagccataattggagatttcagtacttctatttttgtaattaaaaggaaaagcagagaaaagattaataaaaatacagaagattagaactacagtataaaccaatttgatatgacaacagtactcattcaaaaactgcaggacaaacac

SEQ ID NO: 224197 - DNA, 535 bp, Homo sapiens
ttggattagacaactagtcagagggcagaaaacatagggccttataagtagtcagatatcctgtattttattttatttttttgagacagtctctcactgtcacctgggctggagggcagtggtgtgatcttggctcactgcaacgtctgcctcccaggttcaagcaattctcctgtctcagcctcccaagtagctgggattacaggcgcccaccaccacgcctggctaattctttgtatttttagtaggacggggtttcactrtgttggccaggctggtctcaaactcctggccccgtgatctgcctgcctcggcttcccaaagtgctgggattacaggcatgagccactgcacctggcctgtattttaatttctaggaacctacatagagttctcagacctctgaatagtttcattccactatcatttattcatttgtcaatcatcagtagtatatagcagacacagataaaactagagatgcaaaaatgattaaggttatttttgcctttaagtggcttacagttattattta

SEQ ID NO: 224198 - DNA, 535 bp, Homo sapiens
ttggattagacaactagtcagagggcagaaaacatagggccttataagtagtcagatatcctgtattttattttatttttttgagacagtctctcactgtcacctgggctggagggcagtggtgtgatcttggctcactgcaacgtctgcctcccaggttcaagcaattctcctgtctcagcctcccaagtagctgggattacaggcgcccaccaccacgcctggctaattctttgtatttttagtaggacggggtttcactgtgttggccaggctggtctcaaactcctggccccrtgatctgcctgcctcggcttcccaaagtgctgggattacaggcatgagccactgcacctggcctgtattttaatttctaggaacctacatagagttctcagacctctgaatagtttcattccactatcatttattcatttgtcaatcatcagtagtatatagcagacacagataaaactagagatgcaaaaatgattaaggttatttttgcctttaagtggcttacagttattattta

SEQ ID NO: 224199 - DNA, 605 bp, Homo sapiens
agataactcttatcactgaagattgtaataacttgagtctgcataataaaactrattaaataatccacatcttccactagtttcctccatatacttactttcctacaatttgttgcacatagaagctgtattagtctgttcttgcactactataaagaaattcctagaccaggcatggtggctcatgcctgcaatcccagcactttgggaagctgacacaggcggatcacttgaggtcaggagttcaagaccagcctggccaacatggtgaaacctcatccactaaaaatacaaaaaattagccggatgtggtggcacatgcctgtagtcccagctacttgggtggctgagggacaagaatcacttgaacccgggaggtggaagttgcagtgagctgagatggaaccactgcaccccagcctgggtgacagagtgagactccatctcagaaaaaaaaagaaaagaaagaaagaatttcctgaaactgggcaatttaaagggagaagaggtttaattggctcctggttttgcaggctatacaggaagcatggctggggaggcctcaggaaacttacaatcatagcaaaaggtggagggcaagcagc

SEQ ID NO: 224200 - DNA, 620 bp, Homo sapiens
gctgtcacagtgagaacaacaggcctgaccctcatccccaaaggcactctgcatccttgkatctgtctgagccttctggacattaagatgtttttagccgttctgtttttattggaagtaaaagtaaactaaatggttttacccaccttctactggttaaagagttgctgcaatttctttagccttttcttgaaaaactcaaggacgtctgtcattatgctggccaggaatatactgacacttgcaagctactaaggctggcagggctatagtcctctacgctgaatggcttcaggttgctgtgccttttcattttgttttctatatttttttctcccccatgacacaagtggtgcttgagatgattttaatggctttgtgaggtgagtttagattcagattgtattgggttggtgcaaaggtaattggggtttttgccatgcttttttttttttttaaatggcaacaaccacaattacttttgcaccaatgtaatacatggatgtgacccaccttctaccacagtcatggagaagatcccctggggatcatgttaaatgcagactctgatccactaggtctggggtggggctggagattctccatttttaacaagatcc

SEQ ID NO: 224201 - DNA, 620 bp, Homo sapiens
gctgtcacagtgagaacaacaggcctgaccctcatccccaaaggcactctgcatccttggatctgtctgagccttctggacattaagatgtttttagccgttctgtttttattggaagtaaaagtaaactaaatggttttacccaccttctactggttaaagagttgctgcaatttctttagccttttcttgaaaaactcaaggacgtctgtcattatgctggccaggaatatactgacacttgcaagctactaaggctggcagggctatagtcctctacgctgaatggcttcaggttgctgtgccttttcattttgttttctrtatttttttctcccccatgacacaagtggtgcttgagatgattttaatggctttgtgaggtgagtttagattcagattgtattgggttggtgcaaaggtaattggggtttttgccatgcttttttttttttttaaatggcaacaaccacaattacttttgcaccaatgtaatacatggatgtgacccaccttctaccacagtcatggagaagatcccctggggatcatgttaaatgcagactctgatccactaggtctggggtggggctggagattctccatttttaacaagatcc

SEQ ID NO: 224202 - DNA, 571 bp, Homo sapiens
atgcttgaacaaaggagggaggcaatttttatcccttatgcagcttgtccctgctactgtgtcccgtctccattggctggagccggacctcacagtctaaactaatacccgattggctaacagctgaaaactttcttaaataggtaaaggcaagggagaacaaaggaaaagaggaagttgcttatgaaagatttaaagaagcaataacatttccaaataaggaaggggcataagctataagctaagatttgcctcggcctgtctagacatgcctgagtaagccaaagcaactaactgggctaaagtgtaagaactaacagttgataggaggctttagagtaagaagctattattcctagtgcctattttatttttaaactaagacgagctttgaagaggaacktttctactttctacaagtcattgcccagtattgtggaatgagaaaggacttgtttgtctgggctatgctgagttacagtaaaggaagactagaagccagtgatgagaattttctgtcccctctctttttaggataagccttgattctgccaaatgaaggtacccagat

SEQ ID NO: 224203 - DNA, 486 bp, Homo sapiens
aaattcttttcagatgcactcaaaagtcttgcttaacatttctgggatatgccccaggcctttatggaaggctgtttcctcattcaaaagaggtaccggtttcctgctgagtgtgagaggtttatcagaatattttttaaaacctactttttgtgtaggacaacttaatcggtattagttgttgctctttggtatactttttgttgtctatagtagttgtgtctttgtacattcaggggacattttcagggagcctgctgtgggtaaagaaaaccataggggctataggggatgagaagtccaatgagacttgggaggtaccctcagggaccttccaggatccctggtacattaggatggtactctaatacaaaatggaatctgaaaagggccagaggagaggctcaggtaaacttctagggaagttcttcatcatcatcatcatyatcatcatcatcatcatcatcatcattatcatcatcatca

SEQ ID NO: 224204 - DNA, 410 bp, Homo sapiens
tttagcgctttggtcaaacaagtatccagtctaggacttattatgtatttggatgaaccaagttctcaatgttaaagtcagttttatcagtcctttgctttgtgattagtattttttatatctttttaaacacatgtctttcaatcccaagactgtattatcttctaacagtcctatagttttgctttctcctctaaattcataatccagaattgatttctgggtatagtagcagtccaattttttttccatatggataccggcaccatttattgatattcactgacctacaacatatcatgacccctgccatatttcatgttcatgtaaggatgggyctttttcttggcttttaaaattctgattcatgggtctgtttgcttattcctataccaatgctgcagtgtcct

SEQ ID NO: 224205 - DNA, 189 bp, Homo sapiens
cttttagtttgaaagttctatcaaacctctagtttaacacacatagttaacgaagtctcaagttaataccttttcttccttctgagcaatktaagaacattaaatgctttaactctgatcgataatatgttctaacctatttgacaatgttatctggtattttaattctagcttgattctttctccttc

SEQ ID NO: 224206 - DNA, 639 bp, Homo sapiens
cataatattatatgtgcctaaaatctttggctaaaatgaatcagaacttttagttttctatattaaaaaaagaacccaatatgagtttctttgccagattctttaaaataggaagcctagagtattatgctattataaactggtcttttaaaaaaatttttttctcccaacttcttacatccagtggaatgtctactccatggggcttctgacatagaatagtcagttgccaagaaataacgcgttgtcagccagagaaaacgagaaggtgaaaaatgcaagcgggaaagcagggtatgattacaatagtcaacaatgtgagctctgagggttgctgtggatcattgctgtgcttggggccttggtcaatgtaaagacatcaagatgrgaaatccctccagtagggatttttttgtattgtggtgatacatataaaataacatttatcattttaacaatttctaaatgtacagttttatgggagtaatcacatccgtagtgtgtaactttccaccatccatctcccagtctgaaactccagacccattaaacactaactcctcattctcccatctcctctcccctggtagccatcattctactccctgtgtctatgaatttgactagtctaggtacctc

SEQ ID NO: 224207 - DNA, 558 bp, Homo sapiens
tttgggggttaaaatgtcataatgttgtcaatatattttcaaatgattcaggaaagaaatatatatggacatagatacacacacatacatgcacaggtgtgtgtgtgtgtgtgtrtatatatatagtgagagagagagaaagaagaaagaaagaggagaatgtggcaaaagtgttaatacttggtgcatctaggtatggatgttcactgtgctattctgtaaatttaacatatttgaaaatgaaaaaaatcaggaaaaaacagatctacatgatttgaattctatttccaatgctagtgcagacccatcccctgtgggatgtgctcctaccctgtgtttcagtcaatgaccagtggctgatccactcaacatcctccctccctaacctggtttcagggggtgggattgggggagggtcctgctttggagacagctgttggcgattaaagggatagctggctgtccttcctgatgggccaactgtgaccttggcctatttattaaacttctgcttcaactcagcagacacaactaaagcaaaacttctaggttattggt

SEQ ID NO: 224208 - DNA, 607 bp, Homo sapiens
ggtaaagaatgcaagttagggtcatttttctaaaagctgaagaagagtcagcatgagcaggcagaggctttgcattgggagctttgctttacccgcacggcctgttctggtcctctctctgccagtcccgctgccttccatgccctgggagctggatagatggatgacatctccaggcttgggccacacatttccayactgtccactcaccaatccccccccatcctaccccagtgtgtttaggagggtacagcagtagagtacgtgttttcattgtctcttatacacgttctcgtcgagggagggattcctgccctagggttatgaggatggtcatacatgacactcaacactgggcagatgagatcaacggcagcttactccccacatatactcacagcccaggggaggagtacactgcacgccatgcagggacacaaggaacagagtgaacagccagggactatgggaggcaggctttgtagtgtatcaggagggtggggtggtccctggtagtggcaggaggatgtaattgacttattgaataattccacgagctagcaggaagctgagactcactattccgagataagcagaaactgtgcct

SEQ ID NO: 224209 - DNA, 607 bp, Homo sapiens
ggtaaagaatgcaagttagggtcatttttctaaaagctgaagaagagtcagcatgagcaggcagaggctttgcattgggagctttgctttacccgcacggcctgttctggtcctctctctgccagtcccgctgccttccatgccctgggagctggatagatggatgacatctccaggcttgggccacacatttccacactgtccactcaccaatccccccccatcctaccccagtgtgtttaggagggtacagcagtagagtacgtgttttcattgtctcttatacacgttctcgtcgagggagggattcctgccctagggttatgaggatggtcatacatgacactcaacactgggcagrtgagatcaacggcagcttactccccacatatactcacagcccaggggaggagtacactgcacgccatgcagggacacaaggaacagagtgaacagccagggactatgggaggcaggctttgtagtgtatcaggagggtggggtggtccctggtagtggcaggaggatgtaattgacttattgaataattccacgagctagcaggaagctgagactcactattccgagataagcagaaactgtgcct

SEQ ID NO: 224210 - DNA, 581 bp, Homo sapiens
tactatgcagccatgaaaaagaatgagatcatgtcctttgcagcaacgtagatggaggtggagacctttatcctaagcaaactaatgcagaaatagaaaaccacgtaccatttgttctcacttataactgggagccaaacactgagtayatatgaacacaaagacgagaatgacaaaaactgaggcctatttgagggtgaagggtgggaggagggtgaggatcaaaaaaacacctattgagtactatgcttattacctgggtgaccaaataatttgtacaccaaaactccacaacacacaatttacctatatagcaaacctacacatatacccctaaatctaaaagttaaaaaaaaagtttggcaattttaaacaattgccatctacattaattccccaaatctaacaccaatcatcatggtccacatgtgttcattattcttaagaaattcaatagcatgtgactaaaacaaatcagcatatttggaaagtttcatgatataaccctcataataatattatgaactattattatatccatttcaaaaatagaaaatcaaagcttagagaaattaagcaat

SEQ ID NO: 224211 - DNA, 423 bp, Homo sapiens
ctgaaaggtagagaaatacctgtcattgtcaaacgtataaaaatgaaaggtaaatatataaaacatcttttttaatattgagaacgagaaagaaaggagtaaaaaaaaagatcaaaagagaaagttcaattctccaaaggtaaggtagtgttggcattggctttggccttgaaaggtgtgcacgcttctggtgggctaagggctgagtgtcaatgggttgtgtgtggaggacaggagaaagagctwgtgtcccttggcagagtgagttcaaatcaaagacctctccactaattaaggatcttcaatgtgtgaccagctcagagagtaagcaagagaagaactacaagtatcaacctttgccttgacaagagtagaaaaatttcctgactataaaacccacacttagagctgtagatggaattc

SEQ ID NO: 224212 - DNA, 603 bp, Homo sapiens
cctgcaaattgtctctgatcctgaaatttagtagagaatctctcagtcagctgcaaatggagatatgctcaatggcgtttattgcagcattgactataatataatactaaaattacaatttaatgggaaagggatcgaaaaattggtatagccatacaactgtgcacatagttaaaattactaaacgtgagtttatatatccatatagataagcctrggaaaacaaaatttaagcaaaaaacttcagagtgacatggagtatatgctatccattaagcaatttttaaaacatgttaaacagttttatataatgcttacagataaatacgaaataaatatgtgaaagaatacacaccatcttcagagtaatagctctttgaaaacctttgcctcaagttattttctcagaattacccagaattttaattttaatgtctgtggtctttaaacttgattgctgggaaatcgggagctgaaacaccatgaggatagagggaactgaggaatggggagaagcattaatagaatgtgggaggtggtttggaaagggaagcaaagaggcatgtcttccttccagaactgtctttgtcatacctcatgcag

SEQ ID NO: 224213 - DNA, 511 bp, Homo sapiens
ttaataagtatggggtactctttgggggtgataaaaatgttttggaacttgatataggtagtggttgcacagtaccatgaatrtactaaaagccactgaattttacggtctaaaatggctaattttatgttatatgaattttacttcaataaaaagcatagcagcaaaagaaacagaatgggtgtgagaactgactgggaggttgttggattagttcaggcaagagaggagagtgtttttgactagggtggagatggagataaaaagaagtaaaccatctatgacaagctgggcttgatgtcagaggaagaggggaggagaagggcagacactaacagacaggctttgatttgggtcatggccaacttaatgctgcaaaggggtattaatgggaattcatccagatcagacttaccctcaaactcattatctgaccctatttaaaatggacttacagacccataaaaccaattctggttaggtgtgtttgtgtgcttaagggagtgagaaa

SEQ ID NO: 224214 - DNA, 511 bp, Homo sapiens
ttaataagtatggggtactctttgggggtgataaaaatgttttggaacttgatataggtagtggttgcacagtaccatgaatgtactaaaagccactgaattttacggtctaaaatggctaattttatgttatatgaattttacttcaataaaaagcatagcagcaaaagaaacagaatgggtgtgrgaactgactgggaggttgttggattagttcaggcaagagaggagagtgtttttgactagggtggagatggagataaaaagaagtaaaccatctatgacaagctgggcttgatgtcagaggaagaggggaggagaagggcagacactaacagacaggctttgatttgggtcatggccaacttaatgctgcaaaggggtattaatgggaattcatccagatcagacttaccctcaaactcattatctgaccctatttaaaatggacttacagacccataaaaccaattctggttaggtgtgtttgtgtgcttaagggagtgagaaa

SEQ ID NO: 224215 - DNA, 600 bp, Homo sapiens
aggttgctgcaaatgacagatttcaatcttttttaaggccaaaatagtatcccattgcgtgcctatgccatattttctttatccattcatccatgatagacaattaggttgattccatatctttgttagtgtgaataatgctgcaattaacatagggatgcaggtatccctttgatattgatttcytttcctttggatttagaaaagaaaaatagctcagaccagtctgaactatgtgcagtatgtagacataggtcatgttccccaaacctgctcccccatatccatgcctgcggataattgttaaagacattttgttcctcattagctgtctcactcattaccttcatgttcttggaatttgtgatacaaaaaacaatgtatagccaatcaatatcttatgttattttaatgtaaattcttggtaaacaacttaggaatttcatcttcttttcctttaaaaatctacttgtaactgctgctaattagagtggctgtactaatttacattcttaataaaaatgtatgagttcccttttctctgcatccttgtctgcatcggttattcttgaatttttaataataaccattctaattggt

SEQ ID NO: 224216 - DNA, 600 bp, Homo sapiens
aggttgctgcaaatgacagatttcaatcttttttaaggccaaaatagtatcccattgcgtgcctatgccatattttctttatccattcatccatgatagacaattaggttgattccatatctttgttagtgtgaataatgctgcaattaacatagggatgcaggtatccctttgatattgatttcttttcctttggatttagaaaagaaaaatagctcagaccagtctgaactatgtgcagtatgtagacataggtcatgttccccaaacctgctcycccatatccatgcctgcggataattgttaaagacattttgttcctcattagctgtctcactcattaccttcatgttcttggaatttgtgatacaaaaaacaatgtatagccaatcaatatcttatgttattttaatgtaaattcttggtaaacaacttaggaatttcatcttcttttcctttaaaaatctacttgtaactgctgctaattagagtggctgtactaatttacattcttaataaaaatgtatgagttcccttttctctgcatccttgtctgcatcggttattcttgaatttttaataataaccattctaattggt

SEQ ID NO: 224217 - DNA, 597 bp, Homo sapiens
tcccaccatgattaagggtctctatggaataaaggatgatgtcttccttagtgttccttgcattttgggacagaatggaatctcagaccttgtgaaggtgactctgactcctgaggaagaggcccrtttgaagaagcgtgcagacacactttgggggatccgaaaagagctgcaattttaaagtcttctgatgtcatagcatttcactgtctatgctacaacaggactttagttggaggttgtgcctgatatcctttttatctgatctgtgattaaagcagtaatattttaagatggactgggaaaaacatcaattcctgaagttagaaataggaatggtttgtaaaatccacagctatatcctgatgctggatggtactaatttgtgtagtcctaaactggtttgtgtgaaatagttctgccacctctgaggcaccactgccaatgctgtacatgctgcatttgccccttgagccaggtggatgtttaccatgtgatatataacttcctggctccttcactgaacatgcctagtccaacatttttttccaatcagtcacatcctgggatccagtgtacaaatccaatatcgcatgt

SEQ ID NO: 224218 - DNA, 597 bp, Homo sapiens
tcccaccatgattaagggtctctatggaataaaggatgatgtcttccttagtgttccttgcattttgggacagaatggaatctcagaccttgtgaaggtgactctgactcctgaggaagaggcccgtttgaagaagcgtgcagacacactttgggggatccgaaaagagctgcaattttaaagtcttctgatgtcatagcatttcactgtctatgctacaacaggactttagttggaggttgtgcctgatatcctttttatctgatctgtgattaaagcagtaatattttaagatggactgggaaaaacatcaattcctgaagttagaaataggaatggtttgtaaaatccacagctatatcctgatgctggatggtactaatttgtgtagtcctaaactggtttgtgtgaaatagttctgccacctctgaggcaccactgccaatgctgtacatgctgcatttgccccttgagccaggtggatgtttaccatgtgatatataacttcctggctccttcactgaacatgcctagtccaacattttttyccaatcagtcacatcctgggatccagtgtacaaatccaatatcgcatgt

SEQ ID NO: 224219 - DNA, 510 bp, Homo sapiens
cctacctctccctcctcctgccccctctttgatctttgttgttataatgtctgtgtttcctgcttgactctatgccctgtgtagacaggggtctggtttctcttgctgtctgttggttttccacatatcagggaggcttccaaaaatgttgagataatttaataagtagtggtttaaggggaaaacaagttattttgtgggtaattggaaggacatctaatccagaactgggggcagttgaggggggagatactttcctagggaaagtgacactcagccaagatttgaagcactcatagaaattaggtagaggtcagctgggtgcggtggctcacgcctgtaatcccagcactttaggaggctgacatgggcagatcacttgagaccaggagttcgagaccagcctggccaacatggtgaaagcccatctctactaaaaatacaaaacattagcygggcatggtggtggacacctgtaatcccagctactcgggaggctgaggtgggaga

SEQ ID NO: 224220 - DNA, 343 bp, Homo sapiens
ttatctctctgtgaataccagagctgagggttacatgggtctgtgattacacagtcatttggaaattgtgcaagttggaagcagcactgtcattgacttcctgttaagaggaggcagcaggagaagccttccagagagggacacagggcagccatctggttggaagtcattgtgcttacataagttgtctgttcacttaaggaggcaagggttaagcaggctgcaaggcaaggagtgtgaatgaccctaagccatgcttgacaccatgcattaaygatgttttttatcttctgtagtttataaagctttgacatcctgaggccttgctaatcctggagagact

SEQ ID NO: 224221 - DNA, 571 bp, Homo sapiens
acagggtaatctaaaaatgttagccttgcaaagatcaagcgttccaagaatcatgggcaaaaattgcgaggcttaataggacagcatctgaagycccaaaatgtcacttccaccacattttactgctcaagtcactaaatgtcttagtgtttctataaaggaataactgaggctggataatttataagaaaaataaactaatttggcttagagttctacagactgtacaagaagcaaggcaccagcatgggcttcagactgcatatactcatgacagaaggagaagggctattaaacctgtgcagaaatcacctgataggagaggaagcaagagagagatgggggagatgccaggctcttttaaaaaacctactgtcatggaaactaatagagcaagaactctcatattgctatgaggatcagcaccaagtcatttgtgagggatcctaccccatgacatgccttccattaggtcacacctccaacaccagggatcatatttcaacatgaggtttgtaggggacaaaaattcatactgttcccagaccaaactgaggatcgggctgctgtt

SEQ ID NO: 224222 - DNA, 531 bp, Homo sapiens
catatatgatggaatactactcagccatgaaaaggaatgaactaatggcatttgcagcaacctggatgggaccggagactattctaagtgaattaagtcaggaatggaaaaccaaacatctttgttctcactcacaagtaggaactaagctatgaggatgcaaaggcrtaagaatggcatacaatggactttggggactctggggaaaggatgggaggtgggtgagtgataaaagactacatacaaattgggttcagtgcatattgctcgggtgatggatgcaccaaattctcaaaaatcatcactaaagaaattactcatataactaaacaccgcttgttcccccaaaacctatagaaattaaacattaaataaaataaatatttcgttaatccataggcttcctaattaatttattttcttctgtcttacaatttttatcacaatacagttttcatttggctggaatacttccttaaagatttttaaaaatatgatttttaaaaatattgcctactgttattgaacctt

SEQ ID NO: 224223 - DNA, 531 bp, Homo sapiens
catatatgatggaatactactcagccatgaaaaggaatgaactaatggcatttgcagcaacctggatgggaccggagactattctaagtgaattaagtcaggaatggaaaaccaaacatctttgttctcactcacaagtaggaactaagctatgaggatgcaaaggcataagaatggcatacaatggactttggggactctggggaaaggatgggaggtgggtgagwgataaaagactacatacaaattgggttcagtgcatattgctcgggtgatggatgcaccaaattctcaaaaatcatcactaaagaaattactcatataactaaacaccgcttgttcccccaaaacctatagaaattaaacattaaataaaataaatatttcgttaatccataggcttcctaattaatttattttcttctgtcttacaatttttatcacaatacagttttcatttggctggaatacttccttaaagatttttaaaaatatgatttttaaaaatattgcctactgttattgaacctt

SEQ ID NO: 224224 - DNA, 577 bp, Homo sapiens
ccagacaggctgcctctagacattccccaagctactgactttgagtgccaaaaagaagtgtatgattttgcaaaggtgccaagaataacctcttctctaactctgtccacaatccatcaacacttgacccagaagtagctctgatgatgtccrcaatttgacaaagtttctcacgcaatgttactgtttccgatggtcttttcttatgatcttaccaagtttctcataaaaacttctgtttttatccctctacccatagaagcacaaacggagtcttctaaaaaaatgtgatcaggacatcacatttcttttattgttttttctcctcattcccaaagcatctttataagagtaaattactttacctatgataccactctgtctttctaaaatttgatttttttttagttatgtaaaactaaatagctctatattggtgggagttttgagaagtatcagtagggataagtcacctacaattaacgaaaaactcaaatataatagctgtaaatgataagagttattttctgtccaataacaagaagtctggagattggtagtttagtgaaggtagagt

SEQ ID NO: 224225 - DNA, 601 bp, Homo sapiens
aagtaaacatattaaaatattttattagaaagataaattgggagaaattatttatattgtaccaagtgtacaaagtttatgcacatcaagttacactgattgaatktactaaacactttatcattaagtgtacacctattgtataaggaaatatggaaataaaacatcaactttttaaaaaaaaaaaaactagggtatatttttaccaccaaaaagttgaataagaatggatacatgttttttgttatcctttcaacaatacttctaaacatctggctaaatcctgtgtgcctgttatgtgtaaattcctagactcgagagaaaaaacttgtttcattggtttccctaaaatactcatgcagatactgttgagttttggtgtgctctaaagtttaccatttatatttttaatgccatatagcctgaccctgatattcagattctataatgatgtcatgatcttctgaatgattctcagtagtgtaccaatatcaccagacttgctcaccaccactacccagtcaaaagcatggactcacacaatttaaaggaaatgtttcagtttgaaaatatatatattgtctcctatgcatggggagat

SEQ ID NO: 224226 - DNA, 601 bp, Homo sapiens
aagtaaacatattaaaatattttattagaaagataaattgggagaaattatttatattgtaccaagtgtacaaagtttatgcacatcaagttacactgattgaatgtactaaacactttatcattaagtgtacacctattgtataaggaaatatggaaataaaacatcaactttttwaaaaaaaaaaaactagggtatatttttaccaccaaaaagttgaataagaatggatacatgttttttgttatcctttcaacaatacttctaaacatctggctaaatcctgtgtgcctgttatgtgtaaattcctagactcgagagaaaaaacttgtttcattggtttccctaaaatactcatgcagatactgttgagttttggtgtgctctaaagtttaccatttatatttttaatgccatatagcctgaccctgatattcagattctataatgatgtcatgatcttctgaatgattctcagtagtgtaccaatatcaccagacttgctcaccaccactacccagtcaaaagcatggactcacacaatttaaaggaaatgtttcagtttgaaaatatatatattgtctcctatgcatggggagat

SEQ ID NO: 224227 - DNA, 601 bp, Homo sapiens
aagtaaacatattaaaatattttattagaaagataaattgggagaaattatttatattgtaccaagtgtacaaagtttatgcacatcaagttacactgattgaatgtactaaacactttatcattaagtgtacacctattgtataaggaaatatggaaataaaacatcaactttttawaaaaaaaaaaactagggtatatttttaccaccaaaaagttgaataagaatggatacatgttttttgttatcctttcaacaatacttctaaacatctggctaaatcctgtgtgcctgttatgtgtaaattcctagactcgagagaaaaaacttgtttcattggtttccctaaaatactcatgcagatactgttgagttttggtgtgctctaaagtttaccatttatatttttaatgccatatagcctgaccctgatattcagattctataatgatgtcatgatcttctgaatgattctcagtagtgtaccaatatcaccagacttgctcaccaccactacccagtcaaaagcatggactcacacaatttaaaggaaatgtttcagtttgaaaatatatatattgtctcctatgcatggggagat

SEQ ID NO: 224228 - DNA, 425 bp, Homo sapiens
acttcataattatcttttatttatttccaagaaatggaaataagttaakgacagtttttcctagtgccttaccttgatttgttttgcttatgtattatgggcacacacagcaagcttctctattataatacccaacacctaatatgtatctgtctccctagcgaggctgggcttcttgtggctcattcacatttatgcccccagaagcaagcccgatgcctgacacacggaggtcaggaaaagtctgaagaacatttgagtgaatgaatgaatcagtgatgtccctttatgctactacaaagttaatttcattaaaatagtgtctttacattgctatgaaagcaaataaaattttagttaccctagatttttagaattgatttccacacattctagaaattttgttcttatatttttaaacattc

SEQ ID NO: 224229 - DNA, 500 bp, Homo sapiens
gaggacccaccataactgcctgcctgacctgtttcttcctttctcctctctcagaggtgagcagattacttgagtccaggagttcaagaccaccctgggcaacatggtgaaatccagtctatacaaaaaatacaaaaattaaccagacatgctggcacatgcctgtagtcccagctgcttgggaggctgaagcaggatgatcatttgtgcccaagatgcggaggttgcagtgagtcaagatcacaccattgcactccagccaaaaaaaaaaaaaaagcaaaaaaacaaagaactgtaacattattcaattcccaggtctactgccatttgccaggtatcctctggttcatgtaccrgtcagatggggctgtgaaataggctttgagctggacagataatatgcacctttgccagttcctcaacagttgcacttatttcagcatgattcccaagcagtttgtattgtttaatgttgacagcttgactaggggcagggaata

SEQ ID NO: 224230 - DNA, 619 bp, Homo sapiens
tcatagcattaaggttttataacaattaaagagaacctatttttaaatctccaaatctcacacagaacactatctattttggaaggttttccctatcaaatactaactaatatatttagaaaatgagataaccaggttagtcacrctgagttgatgttacttcagtcagttgagaagtaacttggagtggcaggtggtctgtatagctttaggggaataattttcttagtcttcttaagatagtaaaaatagtatagtagaattcactcaggaaactgagttgtgaattattgcatgtatttatatgtcctatccctggtgagattttaatatcttttaatcttcagagcactatccagttcatgtgaaatacacaataagttactggttgattttatattagattaaaataaactttaaaaaactgtattactaaatatttcagacacatacaaatggaggaaataatgaataatatgatctctcatatactactcatgatttgacttcaataatcatcaccacacagaatatttcatctatacttccctctactgtttttacctctatttattaaattttatttatttatttttatttttggagacaggatctcact

SEQ ID NO: 224231 - DNA, 600 bp, Homo sapiens
gataaagccttaaagggtagaaaacttttcttgtcctgttgagtctcaattgtctttagctcagagtaattcttatgccaatgtagcataattttggagtggcatattctgattcctttcagaggaagctcagataggcaatagaaacaataaaccttcaacaaatagccaacaattttttctcatgtcacacaacttcgacaaatataaatatactctggaaatgtactgccaacatcagcattgacttcaggttgctttctcaaacagtgacttcgtgagatcttgatctcactttggccttcatgtaactcattacttacactcaaaccgagttctggacttgaatctaatgttccttggctatgtgttcctagatgtgcccttgtctctaccattgcccaagaccttcccttgtcctgagctgaccagccttcttcctggtccttgtcaggataacgtgcctaggcccaagctgtactgaagacaccaaaatgtctctcttagccaggtatcagttggactcataggctgacttgactgattattctgaagakgtatttgatgtagattatgcagggggaaaaaaaagtactacct

SEQ ID NO: 224232 - DNA, 459 bp, Homo sapiens
aaaaaacaagacctaactatattctttctatgagaaacccactttaagtataaagccacaaatagattaaaaataaagggatggagaaagatatattatgctaatacccatcaaaagaaagctgaagtaacagtattaattacagacaaggctgacttcagggcaagggaaataatcagggataaagaggggcattgcataatgataaaggggtcaattctccaagaagacatgacaatccttaatgcatatgtacctaaaaacagagtttaaaaaaacgtgagacaaaatctgataaaartgcaagaagaaataattgaattaactataatagttggtacagttggagaatttaatactgtctttaggtaattgacagatctagcaagcagaaaatcataaggatgtaatgaaccaaacagcaccatctatcagctggatctaactgacattcaacta

SEQ ID NO: 224233 - DNA, 643 bp, Homo sapiens
tggaaagctttgcttcaattgttctcccatttacattgccttttcagcccattagtgtggttccgaatagttttcctmacttaaaaatgtgaacaagattgcttaaaccatacaaatttctgatcactttgtttcttagcatctcatgtgttagcactcacacagagaggacaagtttacaatgaaagagagggaaatagaagaaaatcttgacactttgactaaacaatttatgtcatggtgctgattttcacctactatcaagatcattcaagtctctgaaatttagtgctaaatcatcatttgaataattttaacttcagctccaactgctgtggattctaagctgtatagaatagagccttctgttgagcaagattttattcactttttgaaacatttcctaaatatattatagatcatctcatcttttttatttgcatgaagatttcagataaaaacatgacaaatgctgctgttgagtttattgttacagttgcaaatacgctaagttgttaacggggtatggagatgaatgacgttggcttctcattcatttgtgctgtaatataaaagacaaagcaagaacttgccttgcctttgcctttctaaaaatcaactgagggaagaaatgtggggagaa

SEQ ID NO: 224234 - DNA, 643 bp, Homo sapiens
tggaaagctttgcttcaattgttctcccatttacattgccttttcagcccattagtgtggttccgaatagttttcctcacttaaaaatgtgaacaagattgcttaaaccatacaaatttctgatcactttgtttcttagcatctcatgtgttagcactcacacagagaggacaagtttacaatgaaagagagggaaatagargaaaatcttgacactttgactaaacaatttatgtcatggtgctgattttcacctactatcaagatcattcaagtctctgaaatttagtgctaaatcatcatttgaataattttaacttcagctccaactgctgtggattctaagctgtatagaatagagccttctgttgagcaagattttattcactttttgaaacatttcctaaatatattatagatcatctcatcttttttatttgcatgaagatttcagataaaaacatgacaaatgctgctgttgagtttattgttacagttgcaaatacgctaagttgttaacggggtatggagatgaatgacgttggcttctcattcatttgtgctgtaatataaaagacaaagcaagaacttgccttgcctttgcctttctaaaaatcaactgagggaagaaatgtggggagaa

SEQ ID NO: 224235 - DNA, 406 bp, Homo sapiens
gaattccaagatgaggacttaagagaattgcacgcataggggctatgattgtcagaatttgccacctctgggctggcmcttgggactggagtgggaaaggaagattgacatttgaggcaatgacattgtaaaaaactaggggattacgcagaaagtctgggtacaaaattgaagtgcagagtgctaaggtgccagatgaaagtgccaaattcagagtatgaagtcagaaatctaggtcccaggagaaagagcaagtatgcatgagccaagaacaggagggcagcggttctgggaatgttgccactgactcccaactggccagggtgaacatggccgggcttaaagaaccaaaataggagaataacttttgcatcttatgagggagcttgaggtgcacatatagaca

SEQ ID NO: 224236 - DNA, 405 bp, Homo sapiens
aattccaagatgaggacttaagagaattgcacgcataggggctatgattgtcagaatttgccacctctgggctggcacttgggactggagtgggaaaggaagattgacatttgaggcaatgacattgtaaaaaactaggggattacgcagaaagtctgggtacaaaattgaagtgcagagtgctaaggtgccagatgaaartgccaaattcagagtatgaagtcagaaatctaggtcccaggagaaagagcaagtatgcatgagccaagaacaggagggcagcggttctgggaatgttgccactgactcccaactggccagggtgaacatggccgggcttaaagaaccaaaataggagaataacttttgcatcttatgagggagcttgaggtgcacatatagaca

SEQ ID NO: 224237 - DNA, 406 bp, Homo sapiens
gaattccaagatgaggacttaagagaattgcacgcataggggctatgattgtcagaatttgccacctctgggctggcacttgggactggagtgggaaaggaagattgacatttgaggcaatgacattgtaaaaaactaggggattacgcagaaagtctgggtacaaaattgaagtgcagagtgctaaggtgccagatgaaagtgccaaattcagagtatgaagtcagaaatctaggtcccaggagaaagagcaagtatgcatgagccaagaacaggagggcagcggttctgggaatgttgccactgactcccaactggccagggtgaacatggccrggcttaaagaaccaaaataggagaataacttttgcatcttatgagggagcttgaggtgcacatatagaca

SEQ ID NO: 224238 - DNA, 621 bp, Homo sapiens
gcgtcatctattgctattttcaaggttttctctgtatctttggtcagcaatttgattaggagaagcctaaatgtcattatacatgcatttacctttcttgggcttcaccaagcttcttcaatctgtaaatttatgtcttttacaaaacttaggacaattctgtccattatttattcaaatattttattctgccctattattcatctcctgctgagactgtaatgacatatatgttctaccttttgatgttattctataggtttccgagactattttattttccttcaatcttattctttctgttttttagatcggatattttttattcatctattttcaatgctgactactctgtaatctcccatttcctttaagaccatccagtgaatttgtaaaatttcagatatccttttttgtttcagaatttccataaatcctttctatagtatctctttcttcactgagcttttccatactttcactcattccaagcatattattcttcccatctttgagctttgctaatgtagctgctttaaatttcttgtctgcagctgagtcaactcatagtctctattaagaatgagytatcatttgcttgtttctttatattttgagtac

SEQ ID NO: 224239 - DNA, 580 bp, Homo sapiens
gctttccttgaagtgataaatcaggagtctaggctcctttcttcatatggatctatcatatttgacatgtgccctggaagctcatctccattgcagccatccaatggggcaaagccatgggagaattgcattggagatrcctgaaagtggtaaacacgatttctgatcaccttcctgtggttaactctcaatcttatggtaaaattaaggaagggtgggaaatgcattctacatgggctaccaagaaaaggaataaatttggtaagcagatatccagtgatatggtttggttctgtgtcaccactcaaatctcatcctgaattgtaataatttccatgtgtcaagggccaagtggagataactgaatcatgggggcagtttctcccatactgttcttgtgatagcaagtgagttctcacaaggtctgatggttttataagtgtctggcattttccttgctggtacttcttttctcgcctgctgccatgtaagctgtgcctttcaccttctgccatgattgtaaggcctccccagccatgtggaattgtgagtctattaaacctctttttctttataaatt

SEQ ID NO: 224240 - DNA, 580 bp, Homo sapiens
gctttccttgaagtgataaatcaggagtctaggctcctttcttcatatggatctatcatatttgacatgtgccctggaagctcatctccattgcagccatccaatggggcaaagccatgggagaattgcattggagatgcctgaaagtggtaaacacgatttctgatcaccttcctgtggttaactctcaatcttatggtaaaattaaggaagggtgggaaatgcattctacatgggctaccaagaaaaggaataaatttggtaagcagatatccagtgatatggtttggytctgtgtcaccactcaaatctcatcctgaattgtaataatttccatgtgtcaagggccaagtggagataactgaatcatgggggcagtttctcccatactgttcttgtgatagcaagtgagttctcacaaggtctgatggttttataagtgtctggcattttccttgctggtacttcttttctcgcctgctgccatgtaagctgtgcctttcaccttctgccatgattgtaaggcctccccagccatgtggaattgtgagtctattaaacctctttttctttataaatt

SEQ ID NO: 224241 - DNA, 606 bp, Homo sapiens
aattttctgagtatcttttatgacatcaaaatcgtgacaataaaaaggaaaattcagatgctgagaaaygtatcttcttttgtaatttataaagtgacaaatcttctgttccacaagttagatattatgttcacatagtaaacatgctaaatgtttaaagaaaaatagatcctatgattacatttatgttttccctcttgtttttacgagatttggaaaaatcttgatgtatctaacgtcttgttaatctgaatgttatatgcattcgaaataaaacttataatcttactctgtgatttgttccactggcattatcaatattgattgagacattcagtaagggaaaatacatcttttagaaattatgggaagttgaagaaacagtagctcttgctgtttgaaaagttcacaattagaaagagaaatgagagaggtaaatatgacataaaaatattatgaaatcaatgaattatcaactaatgattgtacttgaaaagaattatagaaaattgtgtgactgaatgcagagtgggtgctatggtttgaatgtttgtgtttcttcaccccaaaattcatatagtaaaaactttaaccccaaagtgatgg

SEQ ID NO: 224242 - DNA, 335 bp, Homo sapiens
aaatgttttccaaatatgtctttgttacttgttttttccatttttaacagtgggtagctattctytatgagtgcattttggaaactggataaatttttcaaggatgctgctttgttaacttgtcaagattttatgcatttcacactgactgtatacattatttataccataacagaaaatcttttataaagaaaaaccagatacattatatttcatgtaggctttgatctatgaatttgtcttaggcttgtgtttcaaaaaagaaaaaaacagccagatgcagttttatctatcaaacctagcttccttaacaaagtctggggaaatcaaatcat

SEQ ID NO: 224243 - DNA, 459 bp, Homo sapiens
gtctaactaactaacactagtgataggtgataagcaaaaccaaaaaccaaaaaacaaacaaaaaccaaaaaaaaaaaaaamaacctcaaaatgttttaagaaagtttacaaatttgtgttaggctgcattcaaagctgccctgggcggcttgctaaaacacctctcgggccctgggtaggaagtaggctaagaaaacttcatattctctagtatctattttatatgagcccaagaagggagaaaggaaaggacaaatatctccctgagggtggagacagaagacacagagaacaagaaccaagttgaatcctccaggagagcagagtccgggcctcgtgaaggtagggggctcaaaaaacgtctgcctggaaggacagaatttttcagcaacagggactcctgtttcctttttcaattacgagatgtgtaagtgccagataacttgtcattttagttgc

SEQ ID NO: 224244 - DNA, 458 bp, Homo sapiens
tctcctggatggcaattcccaggttttcactcaaataagctttaaaactggattctaatccttttgattatttcaggttgacagaagcaacttgggagatggggtggcaggtcagagtctcttgaattgtttggtaattcctggcataattctaaggtataagccagctgctgttttgtcaagttattccctggaaaatgatcattgtattaaatacatgtaccattttaaaataccaaataatgatacgaaggatgattttcttaggcctgatcatctctttcaggctttgtggtactcatgcttgccatgaaaaactatcctagagagttatccactgtcctgaggtccctacatcatgtcttcctcccaagaatcatcccctatcccstgaggttttcacatttcctcctactcctggggagatctttgtaatattctgatctcttatttcacct

SEQ ID NO: 224245 - DNA, 431 bp, Homo sapiens
gagcaggagtagagctgcatgaaggtgatttgtgtctttgctcatgaatatggattctccccagagagagttggagaaggctaaagcaaacaatgaagaaagaaaaagagggggagagaggacacaacaggcactggccaccaacagacaaataaattggtgtttaaatatccctgctccttttcctccctggagggataatgttccctgtattttccccatgggactaatgggattckccatgtgaccattgtggaggcagacttaatcatgccctcttccccactccctgctcaagttcctgtgtttcccaaataacttcatgcacgcaaagttttgtttcagggtctgttatggaggagtgaatactgagaccccacctaaactgatgaatgtcctggtaccaggagagggtatatacatgctatggg

SEQ ID NO: 224246 - DNA, 577 bp, Homo sapiens
ttaactaattacatctgtaaacaacygcatttctaatccccaattaattacatctgcaattctaccgcaaggtagaattttaacatttgaattttgacccaattgaatttctcctgggaccctctcctgggaccaggacatctgacagtttaggtgatgtctcagtattcatgcctccttagttcttttaaggatctgtgtcctgaaaagaagagacactataaaaagggctctctctctttctccctctctctctctcattccctgccccacaaccatttcactaccatgtgaagacacaatgagatggcagccatctacaaatgaagaatacagcccacactagaactggaatcaacccgtaccttgatcttgagacttttcagtctccagatctgtgagaaatttatttctggggtttaagccacccagtctgtagtattttgttctggcagcttgagctgattaatgcaagggtgatgagtctacaagtcaagaaatgccaaagattgccagaaaaccaccaaaagctaggagacaggcatagtatagaggttgctcatggccctcagaagga

SEQ ID NO: 224247 - DNA, 324 bp, Homo sapiens
tacataggagagacagtaaaaggcaccaatatcacaaggccttgagaaaataacttaaaaacatcttgttagatgtagctgtcttttttaaatccttaagtctctttttgacttttcttgatttttttcccgcctttgaccctctttccaaacacacttaatctcactgactcctctgaatktttttcttgaattttttaaaaatggaaatgcatttttacctcctcccttatacagaataattatttctttctcagttcacaccttgacacttatatctgcaaatctattaatacatgtagtaaaacaatgatatttcccaat

SEQ ID NO: 224248 - DNA, 607 bp, Homo sapiens
ggagtggaatttttaaagtaataggacagaagacttctggtgacagtggccctatgcacactggagccagacctgtgctgtacagcaaaggaatttacagtatggtttaactccacagtaaaggatcaaaacataaggggtaggcactataatatgtctataaggtgggatgggatgatatgtctaactctgttttccattatgcaaaagaaacatattaacggaaagaacattatgaaagcagtaagacagctagaataatgktcatgcaaaatgaaccacctggttcttatgaagaactacccacccactaaattaccttgggttctatgtagtagagttggtttgcagaacaaacatagttgcttagatatgtttataaaaatgtaccatttggatgaagaaaaaaattaaatattcaaatgtatgagtgatttcaatctgaaaaacacgaaggctgtttttgtcatggggtgatttaaactatatctgacccagagccattcttaaaagtatgtggtgaaggaggccaatcctgattagttaattagacagaggataacaacagaagaaaattgtgtactaaaaaaaaaaatcaagcttagag

SEQ ID NO: 224249 - DNA, 344 bp, Homo sapiens
tttttttttaacttttaagtttaggggtactagtacaggttacataggtacacttgtgtcatgggagtttgttgtacagattatttcatcacccaggtactaagcctattacccattagttatttctcctgatcctttcctttytccaccctctgaaagtcactcccaataattttaataccttttgaggactgaactttccattgatgatataatgagtattaaaccaatcttctctagagctaaagggaaaagtcattcccagctttggaaacagatcagatataagcaaatccatctcttctttgacatcattgttcagatataatggtactattaagtaa

SEQ ID NO: 224250 - DNA, 344 bp, Homo sapiens
tttttttttaacttttaagtttaggggtactagtacaggttacataggtacacttgtgtcatgggagtttgttgtacagattatttcatcacccaggtactaagcctattacccattagttatttctcctgatcctttcctttctccaccytctgaaagtcactcccaataattttaataccttttgaggactgaactttccattgatgatataatgagtattaaaccaatcttctctagagctaaagggaaaagtcattcccagctttggaaacagatcagatataagcaaatccatctcttctttgacatcattgttcagatataatggtactattaagtaa

SEQ ID NO: 224251 - DNA, 504 bp, Homo sapiens
ctttaaacattaaacatacaactatcttatgatttagccactcaattcccaagtatttactcaagacaaatgatagcaaaatagttatgcaaagactggcacataaatgcayataacagctttacttccaattgctacaagttgaaaatgatgcaactgttcatcaacaagtgattggataagcaacccatggtatatctgcccaatggcatacaactcagtgataaaaagggatgaactaatatcatgcagtaacataaatgaatctcagaataattgtttaaaaagccagacaaaacaccacaaattgtaagtttccattagtatactttttttattattattattatacttttaagttttagggtacatgtgcacaatgtgcaggttagttacatacgtatacatgtgccatgctggtgtgctgcacccattaactcatcatttagcattaggtatatctcctaatgctatccctcccccctccccccaccccacaacagt

SEQ ID NO: 224252 - DNA, 546 bp, Homo sapiens
tgctgtttaaaatggtgcacatttttataggcagcctgttttaaagccaggcatgatgtaagaattaactgccttaatctgacatgagttttagtcaatttagaacaccagcttaattagtcccttctttactgacatctctaagatttactgcctcttctagagcctcaaatattcagactaaattttgctaatcttactcattgacatcttgtaactatttcctccttggaaaaattattttttcttctatcaattcaaactattgggccaaaaatcattaactttgttgggcgtttctattatctaaactgttaactaaatttcagccttgctcataacactcaatgattcatggtagtctttccctgcttagtatgagtttcaagatgccctggatagcccatctataataacagaatttttwaaaacttttaatctcaattaggccaggtatggtggctcatgcctgtaaccccagcacttcgggagaccaaggttggcagatcacttgaggtcagtttgagaccaacctggcaaaggtgg

SEQ ID NO: 224253 - DNA, 532 bp, Homo sapiens
tctttttggaatgcagaaagagagagaagagaaaaaaaaagaagctcttcggtgtttcttatgagatcagggttttacccttattatttcatttaattttaattactcccttaaagktttcatttctaagtatagctacactggggattaggcattcaacatatgaaatttgaagagatccagacattcgatccataatatttggatatcttctgccttttggctgttgtgaatactgctactgtgagcatcggtgtacaaatatctatctatttttgtccctatttcatttctttcatttcttttaaatagccaaaagatgaattgcttgataatatcatagcatttattcattttttccaacaattaactacctactatgcaacaggcattattctgtgtcttgagaacaagcaacaaacacaatcatgccttggattctttctttctcgccacaattttcaaccttaaatctgtctaattcatcactactcatcttttcaaaatacatcttaaataactgcctgtatta

SEQ ID NO: 224254 - DNA, 546 bp, Homo sapiens
aaaaatgaagtaagccaccattacattagcaataggttattgtaatccttaaatctgaagttttattattaatgtatctcaggttctaacatcacatttctgtctctcactgcaaactctcaaaagaaataaactgtttagcccagcctgattacatacctttgtctaatcaagcatgaccaagttgaaagtgtcatttgaaagacaaatatgtggccaacagttctcctatttgtgttttagttttctagtgaaaaagacatgtatatttagaattagccagctgtatttgatataaatgattccaattgtkttggcagtatccaaaacattacaatcaagagccagtcaaacatatgcctccttctgtccattaggcccgaacagggtgttgaccttggccacatcagtgtcatagagcttcttcacagcctctttaatctgttgctttttggccttaacatccaaaagcgtgttatattttattttctttatggctgattcagtggtcagcaacaacttgataatgacatagtggtcaagttt

SEQ ID NO: 224255 - DNA, 546 bp, Homo sapiens
aaaaatgaagtaagccaccattacattagcaataggttattgtaatccttaaatctgaagttttattattaatgtatctcaggttctaacatcacatttctgtctctcactgcaaactctcaaaagaaataaactgtttagcccagcctgattacatacctttgtctaatcaagcatgaccaagttgaaagtgtcatttgaaagacaaatatgtggccaacagttctcctatttgtgttttagttttctagtgaaaaagacatgtatatttagaattagccagctgtatttgatataaatgattccaattgttttggcagtatccaaaacattacaatcaagagccagtcaaacatatgcctccttctgtccattaggccygaacagggtgttgaccttggccacatcagtgtcatagagcttcttcacagcctctttaatctgttgctttttggccttaacatccaaaagcgtgttatattttattttctttatggctgattcagtggtcagcaacaacttgataatgacatagtggtcaagttt

SEQ ID NO: 224256 - DNA, 609 bp, Homo sapiens
aaaaaaaatctacctgtattatccaacacattttaaagaaatttctccatgagaagaaaaagtagaataaagtctatgtcttttgaggagggcatttcctccagaattttatacatattttaatgctctaattctatctgaaatattaatcagcagtgtttaattcagcaaactttaatatttacatgtattagttttagtatatgggttttctgatttataatcatttttgactatccatttctacaaattgatttgcatgtctactttttactctgtacgtcatttagtattttatttgtttctcaataatccttttttgtggttagcccttttctaataattatttttcttttcttaacaagcaattattaagcataccaccagaagcaccctccaaaaaamataagtaagcaaaaaggaaaatcaagagattttttcctttttcatataatttgttgtcttttccacttatcagcaacccttctcacaagagccaaaaaaatttcatgtatttatttttatttttgttttttatacattgtggaatatatcaagtgagttaccatttgccacttcacatgcttgtcattttttgtttgaggagaa

SEQ ID NO: 224257 - DNA, 609 bp, Homo sapiens
aaaaaaaatctacctgtattatccaacacattttaaagaaatttctccatgagaagaaaaagtagaataaagtctatgtcttttgaggagggcatttcctccagaattttatacatattttaatgctctaattctatctgaaatattaatcagcagtgtttaattcagcaaactttaatatttacatgtattagttttagtatatgggttttctgatttataatcatttttgactatccatttctacaaattgatttgcatgtctactttttactctgtacgtcatttagtattttatttgtttctcaataatccttttttgtggttagcccttttctaataattatttttcttttcttaacaagcaattattaagcataccaccagaagcaccctccaaaaaacataagtaagcaaaaaggaaaatcaagagatwttttcctttttcatataatttgttgtcttttccacttatcagcaacccttctcacaagagccaaaaaaatttcatgtatttatttttatttttgttttttatacattgtggaatatatcaagtgagttaccatttgccacttcacatgcttgtcattttttgtttgaggagaa

SEQ ID NO: 224258 - DNA, 678 bp, Homo sapiens
tatgtgttatctcactaaaaactggatttggaatgcatgaagtttatctgcatctatttccattttcgacattaacattccgttaatcttaatttaatgacaaaacacctaagactgaaaactttaactgcttccagcccacattccttttagagaaaatttattaaacccacaaatgattactgacacaaataaaggatttaactttaaataaaactggtagagataaaattgagtgatatcgatttaaaattaaatgtgaaaaatgtcaaaatcagtgaagattcatatgcaggtggctttttgtaatgagagaaaccgaagagtcacaaggcttttattagtttaaagataaagttgacttctaaaagcaatgattatgaataactgttataataacctctctggcatgacatgtacttatattttatgacccttttaatattttttatttttgatatatgaatgttttaacttaaaaattttgaaatttcaaytacaatttgaggccacagatattctcaaatatagaaatgaaatagattttaaaagattaaatcatatcaaccatagaaaatcagatgattttacaatgtatatctgattgaagagaaattttcagagcgaatttgcattttgtgcattacaactctcaagtcacatattatgttattgcaa

SEQ ID NO: 224259 - DNA, 602 bp, Homo sapiens
ggtgtttttaccctattattaaggcttaagcccggtggggcttggcccatttttgccattgtttcacctcagataaactcatacagagataatcaactatttcctttattatattatcaaagcattgcttattgttctataattgtatctgtaacacagtattgcaataattttcttatgtatttttctcctactttgggactgaaatccagttaatggaatcaatgtctctgatttttgcttgcttcagagtacttaataaatatttattgagagaccagcagattaaatgaatggtctccatgtatcaggtacaaataagaaagtgatcaagtaagtgacaatttttacatayagatttagattatttcagattgtgtatgttgaaggttgtattcattctttcattttaaaaataaaattaatgaacttaaaaatagtttgcagaattttggcaagatggcttgtagagtaactgttgtatgctaggacaattcttagggaaaattctgtgtgtgtttgtgtgtgtgtacacatatgtatgtatactaaaatttgtgaacaatcttaatccttcaagattggaaaagttagaaaatata

SEQ ID NO: 224260 - DNA, 575 bp, Homo sapiens
gtgttcaactcccagaggaatctctcttatggggtgaaaacaactatggagtctgttaactgaacagcacagcattgtatcattgaccagagccctgaataaacagaagtcacaacagaggcgatgtgcgtatacccaaggatccttttagtgatcrttgtgtcagctgagaaatgcttcccatagagtcagcccctctgctgtattttgccccttcaaaattcaccatacttgcctaattctcactacttttactaactggtttgaaaggcaataaggccttttgtactctttttccaaaaataacagaaacagaggcagcgtggagtaattaaggcacttacattgacagatgaatttattgtcctattttctacctagttgcatgtgctttctgtagatgtaaagtgtaagtttttggaatagccatattggcatcatgcatgactgtcacctaaagctgaatggcaagcaatgatttaccaaataaactgctattcaagaatgtatccatcatgagaatggaaacaatgattgcagaggtatagatctgggagtaaggatgggtatgtaaa

SEQ ID NO: 224261 - DNA, 477 bp, Homo sapiens
caatagcaaagtcagacgacaccaggccrtggggtggaaagcttttctgtattatcttctgttgtgggttacggattttccaatgtgaatgaaggacactctatcagagatcactgatgactgtgatgtgcattttaattacatagattatattgtttgttgatcaacaaatgacgaagatatcacattctaatccatattacatattatggattttaaaaatatttatgattcatactttcacccaagttagtgagaaacaccaatatattcaaattatatatatatacacacacacacacatatatatacacacatatatatacacacatatataaatacacacacacacatatatatatacacacacacacatatacacacacacacacattaaactggaaacaactttgcttttgatgtatgctcttaactagagaatccatcttaatggtccttgtgaatataataattctc

SEQ ID NO: 224262 - DNA, 475 bp, Homo sapiens
ttaaaccttctcctccttctctattattttatttaatgaaatcatttaccccacccactggctaaaaaaatctctagtcttctttgatttttgaaccaaatatttagtatctactatgtacaaggcaatgtgctgtcacttagaatggaacacaattacttgctcttgtggagcttacattcttttgagaaaaaaatataaaagaaataataaacatattacttgtgtgtggaataagggcagattctacatccttgcaggggtagaataggctttgttgatacacactgtaaggcaagggtcaccgagagaagtatgggtcccctgattcttccacagtctggcagggccttctgctggccatgcagtggatctgggttgcgrtgaagggacatcaccctctgttgcttttctttcttactgtgatggcatgtggacaactttgctggctgttggaatgactatttgagcagaa

SEQ ID NO: 224263 - DNA, 347 bp, Homo sapiens
cttccagccctattttgtttcaaataatgaaaaaycattaaatttgttgatgccaagttatagctgcttcaattacattaatttttaactttaaaataaattttaacagatggggtcttgcaatgtttcccaggccggccttgcactcgtgggttcgaaggatcttcttgcctcagcctcctgagtatctgggtccacaggtgcatgccaccatgcttagctctacaataacatctttgaccattactgattccagatatattttttgtgcacttactctgaaccaggtcctgattatacaatcactataatataatgaaagatactttagtttttaaggaattgga

SEQ ID NO: 224264 - DNA, 347 bp, Homo sapiens
cttccagccctattttgtttcaaataatgaaaaaccattaaatttgttgatgccaagttatagctgcttcaattacattaatttttaactttaaaataaattttaacagatggggtcttgcaatgtttcccaggccggccttgcactcstgggttcgaaggatcttcttgcctcagcctcctgagtatctgggtccacaggtgcatgccaccatgcttagctctacaataacatctttgaccattactgattccagatatattttttgtgcacttactctgaaccaggtcctgattatacaatcactataatataatgaaagatactttagtttttaaggaattgga

SEQ ID NO: 224265 - DNA, 556 bp, Homo sapiens
gactcttttattaagtataatttacaaaattttaataaatctaaataaaatcaattttgtgtgtttttctatgatctgcaagagaccatattaatagatagggcaactttattttgatgcatgaagttaactatttgttttggtgttaatgttaccttacagtatctacgactatgtatcagcattctgaactttgccataacgtgatctgattatataatgtaggttattaaaattttttagcctatttaagtgctttgtcctagttatagctttttttttccattaagttatcacaatagtttataataattactattactgctttactgctaataataatatatgaaagaatgacattaaatgcagttataattagtttcaagtgaagagcagtgtagactatttcaagtgtcataactcatgtgttatttcaggtagatcatacatatcatgtagctatgtttaaccgtagctacctatcatttgtatctayctgtctgtctgtctgtctgtctatctctctatctatctgtcatctatcaatcatttatca

SEQ ID NO: 224266 - DNA, 499 bp, Homo sapiens
atttagttctgaacctgggcaggaaacaggggacctgtttattggaatcactgaaattcattatcctgtgcattggaccagaaaacttaagcaagacacagagtggaatttagggatgaatataccagcatagccagaatgggtgacttaaggccttaggtattggcaagtgtaccactttggtttttggtttacattacacagattttttaatttgtgtgattgttttttaactgatggggcctggccagttaccttcayaccttaggtttaatgacatggaccttgacgctatgctttaggaagtctttcaccaaacatatgtgactgtttttgtactggcaggtatacagaatatgtctttaaaaatcactagccatttggaagccagagcatgtggcctattggtaaactgaactacatagggaggcagaacctagtatggactcaaggaacagacatgctttaaaacatcaaaaaataagtgttttagacctca

SEQ ID NO: 224267 - DNA, 595 bp, Homo sapiens
cctagagatttacattttaattgtgaatgggtgaccttaaaaatgttaaatgttttccagaaaaagacattcccaggcaacagtggatcttttattttattgagcttactgtctgtggacaagggatatagtcatgtaggatgaaaggaagtwggtaccaaatgaattcatatttctggaaagaacaagaagtgatagttgagttcaagaaaagctattacaggactgaaaatagggacgaacaggagaaacggcttaaaaagagctgggaaaccctgatacagataagaggaatattgaatccacctatccaaaagtcccactgctaaggcgaagagagaaaggagtggtacaaaacagtattggccataaaagagaattcaaggggaccttcggtgggaagcaatcttgacctacaaaaatgaagtttaactttgatgcctaaattggattttgttttccaagaccatgagagtgagcacagcactggactgagatgaagactctactcattcttcaagaactcctctgtgaagcgggctgtcagccattgcttctcctgtgttccctctataaatgtgactgcctgatttgt

SEQ ID NO: 224268 - DNA, 420 bp, Homo sapiens
taatatatgggtgtttagtatagcaactggattcatttattcatctttttattcattcaccaagcatttattgaacagctcttatgtatctggtactatccyagtggttggtttttgtgtatttttttcaaaggtaaatgctgggaaatgaatctgttagccattctgaaatgtggctttcacgttttctatttcctcctggcaaaatgccatcacttactctgggcttgcttattgggttaaactttctcacctaaaaaagattggttactgtgctttcttactttgacaccagatgcctcacatctgttaataatataggaagtactagagcatgtatttttgggtgtgataagaataatctctgtcaatttgccatgtggaaatggatttgaagtacatctattaaatggttttatt

SEQ ID NO: 224269 - DNA, 420 bp, Homo sapiens
taatatatgggtgtttagtatagcaactggattcatttattcatctttttattcattcaccaagcatttattgaacagctcttatgtatctggtactatcctagtggttggtttttgtgtatttttttcaaaggtaaatgctgggaaatgaatctgttagccattctgaaatgtggctttcacgttttctatttcctcctggcaaaatgccatcacttactctgggcttgcttattgggttaaactttctcacctaaaaaagattggttactgtgctttcttactttgacaccagatgcctcacatctgttaataatataggaagtactagagcatgtatttttgggtgtgataagaataatctctgtcaatttgccatgwggaaatggatttgaagtacatctattaaatggttttatt

SEQ ID NO: 224270 - DNA, 590 bp, Homo sapiens
agcccagtaatcagttggagaaaagaaaattggcaggaatggtgacaacctaggagcttcaagagactggcttgcatatcaaagagaggtccttggaagagtaatggagccctaaaatatttttgggaaaataatgcccttttgtatgatcatgcttaggaagttaaacttagaatggaggatattayatgatatgagatggtcagaaaaattatactccaaaggtgcttttattcagtctttgttttgactaagaattaatgcatagttataattacaacccaaattttatcataaatgattaaataaatttctaaaatagacatttaatatatttaataacataaacttttcatcaaatgtcttccccacaatttcctattaatttttggttctaattctaagcatgctcattttaagtggccttttctagtgagtctcagaaaacgaaggctacttagatagcacttcatgacaaatatattttcctgaacaacacattgccattttctcctaagactttttctccaggaggagaaaaaaaagccacatatgattttcttaagaaaagttttgttagctaaagtggt

SEQ ID NO: 224271 - DNA, 590 bp, Homo sapiens
agcccagtaatcagttggagaaaagaaaattggcaggaatggtgacaacctaggagcttcaagagactggcttgcatatcaaagagaggtccttggaagagtaatggagccctaaaatatttttgggaaaataatgcccttttgtatgatcatgcttaggaagttaaacttagaatggaggatattatatgatatgagatggtcagaaaaattatactccaaaggtgcttttattcagtctttgttttgactaagaattaatgcatagttataattacaacccaaattttatcataaatgattaaataaatttctaaaatagacatttaatatatttaataacataaacttttcatcaaatgtcttccccacaatttcctattaatttttggttctaattctaagcatgctcattttaagtggccttttctagtgagtctcagaaaacgaaggctacttagatagcacttcatgacaaatatattttcctgaacaacacattgcyattttctcctaagactttttctccaggaggagaaaaaaaagccacatatgattttcttaagaaaagttttgttagctaaagtggt

SEQ ID NO: 224272 - DNA, 583 bp, Homo sapiens
cattttctttggtgtagaatactasatatttttagagtaaattctgcaggcttttgttatttataatctagtttagtatttacaaaaaatcagtatttcatctaattacgaccagaatcaggaccataatttttttttgtctcttttgctttgcctctttagatattctaagactgaaattagagaacaacattgacatcatcgatcagcttaacacactatcttccctgacagtaaatatttcctcttgtgtattatatgaccgtattcaggcagcaaaaaccatagatgaaatggagagagaggctaaaaggctctacaaaagcaacgaactctttggaagtaagtgctgttctattagggtttgagcatctctttgtgctaaaattggccaaattctttcctcatgtctttcatccagaactcagaaaactagtgtgggggtccttaggtcctctgatgtccttagaaaagagaacctttcatgtaggcaaccaactataatctctaagtatgtctaattttgttggtgtacttcaaattaagattgaaaaggattacatagttacagagtgaagttgag

SEQ ID NO: 224273 - DNA, 558 bp, Homo sapiens
ttattctctgctataaactgggcagactttggctactaggcagcggggttttctttgagcaacaggttatcagatattgatgaattgctctggcaggtttgggaggcttgataaaagtgactctctgattacaaagctggcacctgacatctgtcactttgaggaggaactaatggcatccaagaaagcacatctagccgctctcggtgggcccccttccatcagcaaatttggtcttgtttattacaacaaagttggcagtgaatctggataatttatggatgacttatatgctctcactggtctttctctttatgartagcagctgttttcctcgtggcataaaatcctgaagtttaacactgaagtttcatgctagaatgttaaatagtgaatgcttttggaagcacctaactcaccctgtttcaggaaaaagcaaaatgatgagtctctaacttttgcaaattcctgggactggaatctgatcttgagtatcaaaaatttcaaaattacagtgattaaacacctttagtcctggtgttcaagcctgccaaatta

SEQ ID NO: 224274 - DNA, 586 bp, Homo sapiens
tataaactgggcagactttggctactaggcagcggggttttctttgagcaacaggttatcagatattgatgaattgctctggcaggtttgggaggcttgataaaagtgactctctgattacaaagctggcacctgacatctgtcactttgaggaggaactaatggcatccaagaaagcacatctagccgctctcggtgggcccccttccatcagcaaatttggtcttgtttattacaacaaagttggcagtgaatctggataatttatggatgacttatatgctctcactggtctttctctttatgaatagcagctgttttcctcgtggcataaaatcctgaagtttaacactgaagtttcatgctagaatgttaaatagtgaatgcttttggaagcacctaactcaccctgtttcaggaaaaagcaaaatgatgagtctctaacttttgcaaattcctgggactggaatctgatcttgagtatcaaaaatttcaaaattacagtgattaaacacctttagtcctggtgttcaagcctgccaaattatcttttaacaagyctatgaatgaagaacattctcaatat

SEQ ID NO: 224275 - DNA, 531 bp, Homo sapiens
ctggtgggaggtaattgaatcatgggggcaggtctttcctgtgctgttctcgtaatagtgaataagtctcacgagatctgatagttttaaaaagtggagtttccctgcacaagttcttcttgtctgccaccatktgagacatgcctttcaccttcagccctgattgtgaagcctccccagccacgtggaactgtaagtccaataaaactcttccatttgtaaattgcccagtctcaagtatgtctttatcagcagtgtgaaaatggactaatacagtgatcaaatactcctatcaaaaaaaaaatctttcatcagggtaaattctaaagaagtgatgtggttgctactaaattttaataacatattggtaaattgcaaatttgagcttttaaaaaattatttattctttgataaacactgtattcttcatgaaggaaaactaggagaactcccaggtaaaactaggagaacttccaggtaaagtgtatacactttacctggaaactggggaactaactcatcacagaattc

SEQ ID NO: 224276 - DNA, 587 bp, Homo sapiens
ttaggaatctctttctagctagcttggggggcaatttctacctccatcacctctgaagctatatatttctgcatttaactggtagatttgttttktttatttggttttgtttgttttgttttgtagagatagggtcttagtcttgctctgtctcccaggctggaatgcagtggcacaatcatagttcactgtagcctcaacctcctggactcaaagtgatcctcctgccttagcctccagagtagctgggatcataagctcgagccactgcaccaggctatttttatttttatgtttttataaagatgggccctcactttgttgtccaggcaggtctcaaatacctggcctcaagcgatcctcctgcctcagccttccaaagtgctcagattacaggtgtgagccaccatgccagctaactagtaggttttaaacaagcaatgatagcattgtgattgcaaagatgaagaaacagaacttgttacttcaattctgtcattctatgtagccacttggaatttttatgtttaaaatattttgactgtagggacatttgaaagctgctagaatcaatcccaaagaaagac

SEQ ID NO: 224277 - DNA, 584 bp, Homo sapiens
tgaaggggaacatcactcttgcattctttagktcttaaagggttacactagtctgtgccatctctttgggatgcaagattgcttttgatttactatattgcctggggaggggagcagtttcagagcatgtccaattctctgagcctcttaaatcttttcttccattgcctactatggcaattctggtatttaatacttcatttactgtgggtcatcacttttccatgcttctaggaaaaactaccatactctagagtcttttccaagtattaaatcccgtatattggagagacctgtcaaatcaataaacaactttatgttttgtccctttaatccagcactctcacaatccagttccatatgtactccccaactcctgtcgatatattttggctaagtcctacagcagtttaagggttattttagttttctatttgctgtaaaacaaatttctaccaacttagtggcttaaaacatgacccattttttaactcacagttgtgtaggtcagaagtccagcactgcgtgacagggttctctgcttagggtataacaggtctgaaatctaggtgtaagccagatta

SEQ ID NO: 224278 - DNA, 590 bp, Homo sapiens
tttcagtttttctccattcagtatgatactagctgtgggtctgtcatatatggcttttattatgttgaggtgtgttccttctatacacagttttttgagggtttttattatgaaaggatgttgaattttatcaaatgcttttcagcatcagtagaaatgctcatatggcctttatccttcaatctgttgacatgatgtatcacattgattgatttgcatacgttgaaccatsattgcatcccagggatcaatccctcttggttgtcatgagttatctttttaatgtgttgttgaattctgttagatagtattttgctaaagattcttgcatcactattccttagttgatattggtctgtagttttctttttttatgtgtctttggttttggtatcagagaaacactggccttgtagaataaatttgcaagtattcactcctcctctgtttttcagactagtttgagtaggattggtataagttcttccttaaacgtttggtagaattcagcagtgaagccatcaggttctgggcttttctttgctggaagcctttttattatccaaatcggtaaacagaaagtcaaactg

SEQ ID NO: 224279 - DNA, 542 bp, Homo sapiens
atgcaaaggcataagaatgatacaatggactttgcagacttaggggaaaagggaggaaagggggtaaggaataaaagatgacaaactgggttctgtgtatacttcttgggtgatgggttcaccaaaatctcacaagtcaccgctaaagaacttactcatgtaaccaaatactacctgttcttcaaaaacccatggaaataaataaagtaaaataaaataaaatagtcatagacacacacacgcgcacacacaaaagttaaaattaggtactgtgagtgtttacctgatttctggttcttatgaaggtgctttttctgtgtaaytagttgttaaattggtgtccttgcagggggacaataagtggaaccatccattccgccatcttgctctgcccctccaatggtttacttttttttggtatccattgaactaagagctacttgaaagcagataaatttttttgtctgcatcctcatatctctaaatttctttcatccatccctgcacttgctacttactagatgttcactacacataaatag

SEQ ID NO: 224280 - DNA, 550 bp, Homo sapiens
cataaataggttttcaattactctgtttttgttttaacaaatatcaacagaatactctaaaagatacatattaatatattaatattggttgtctctgggtagtgggattatgtaatttttctttttggctaaattgcattttcaaatttgtaattaattaccagaaaagattactaaaagattactaaagactactaaaatcaagactaatcatagcatccacttatcttcctgtccagaattcttctagataacagaaaatgcatctttaaaaaagtatttcggctgggtgtggtggctcatgcctataatcccagcattttgggaggccaatgtgagcagatcacttgagcccaggagttyaagaccagcctgggcaaaatggcgaaatcctgtctctacaaaaaatacaaaaattagccaggcattgtggcgcccacctgtagtcccagctactcaggaggctgaagcgggaagatcacatccaggagacggatgttgcagtgagcttagatcacaccactggcctccagactgggtgacagagtga

SEQ ID NO: 224281 - DNA, 409 bp, Homo sapiens
actttgtttaaagtcattaaatctattagtcatagtttcatccaaaaactatcgagagtctgtattttgccatggtgctggtagttggtcataagtcgaagactaagtcttcattttcaggaaagtcatgattgtctaaagcccccattaaaatgcctaaagccccacaagaagagttgtmcatcaaatgcagcaccatatactgacccctaaaggccttactttcagacctagtccaatgacagatataatcaaactttctatatgtcatgttggttgagctgtgcaaaattaagacagtacagaagtgataaaggatgacctaataagtctgtagttattaaatgcaaatgtaattaagacagatgatgtacgttgaacggaaaggattctgcatttaccactttaa

SEQ ID NO: 224282 - DNA, 626 bp, Homo sapiens
agactctgtgtcttaaaaaaaattttttttaagaattaagaaagctattctttcctagagaaatagagaagttagccaaacttggagaggctgaggcaaaggtattttatgaagataaaataattatttttaaaatgcagtttattttctctaaaatcacttcaaattaacattgtgccttataatttatggagtatctttrtggacaccttatcatttaattctcacatcagttttgtgaagtagatgttactgtagtagtactcccttatttgtggttttgcattctatggtttgttacctgtgatcaaccaagttctaaaactattaaatggaaaaatacaaaaataaacaatttataagctttaaattgcatgcctttctgagtagtgtgatctaattttgtaccacccgatctggcatgtgaatcattcctttgtccagtatatttatgttgtgtaagctacctgcctgtttctgtataagaaaaagcatagtgtataccagatttggtactatctatagtttcaggcatccactggaggtcttggaatgtatcacccatgaatagtgggacactcctgtattcctatttacaaatgagaaaaatgaggctcagagattaa

SEQ ID NO: 224283 - DNA, 434 bp, Homo sapiens
tgcaacctctgcctcccaggtacaagcgattctcctgcctcagcctcccaagtagctgggattacaggtgtacgccaccgtgctcaactaatttttgtatttttagtagagacgggttttcgccatgttggccaggctggtcttgaactcctgaccttaggtaatatgcccacttcggcctcccaaagtgctgggtttacaggcctgagcctccgcgcccggcctttattttgaaatgattataaatttacaggaagttgcaaaaatagtacagcgaggtcccatgtgctcttcacccagttcccctcaatggtcacatcttgcattatagtataatakcaaaactaggaaattggtgttggtgtaatatgtgtgcatagttctatgtcatttcagcacatgcacatatttgtgtaaccacaactgcagccaac

SEQ ID NO: 224284 - DNA, 531 bp, Homo sapiens
gaattcctcaaaactccttgatttagcaagagacaaaataagggtaatcaccccagcacctggacccatttagattaagtaaatttactgaggctccagtggaaggtcttcaggactcagaccttagttataaattaaaagaagttaatcacgtctttagatgaatgcacatttacacatagacatatagcttagaaggtatataagttctgaaaaactttgtaattttgagttggtccagcgataatttcctggccttctccctgtaaccggttacagaaataaaaactctcttcctccccagttcatctgcatctcgttattgggccaggagcaatagcagcccarccctcagtttggtccaggaacaggcctggaagctccgcgccctgacaccctgccctatgtgtctcctccgtttagctgttcctgagttgtgtcctttatataaaaaaccagtaatagtaagtaaagtcctttcctgagttctgggagccattctagcaaattagtagatctaaaaagggagtt

SEQ ID NO: 224285 - DNA, 531 bp, Homo sapiens
gaattcctcaaaactccttgatttagcaagagacaaaataagggtaatcaccccagcacctggacccatttagattaagtaaatttactgaggctccagtggaaggtcttcaggactcagaccttagttataaattaaaagaagttaatcacgtctttagatgaatgcacatttacacatagacatatagcttagaaggtatataagttctgaaaaactttgtaattttgagttggtccagcgataatttcctggccttctccctgtaaccggttacagaaataaaaactctcttcctccccagttcatctgcatctcgttattgggccaggagcaatagcagcccagccctcagtttggtccaggaacaggcctggaagctccgcgccctgacaccctgccctatgtgtctcctccgtttagctgttcctgagttgtgtcctttatawaaaaaaccagtaatagtaagtaaagtcctttcctgagttctgggagccattctagcaaattagtagatctaaaaagggagtt

SEQ ID NO: 224286 - DNA, 536 bp, Homo sapiens
tagaatttgcgggttatgtaccatctcartagaagaaggggaggaggagaaaggacacttatagaaaagtaatttttaggaaagatgaatgggcccttaggagaaaagatgggagctattatagtttcgtgacctgactgtttaggtgtggtgccaactattctcccctccagcaataagtcaattttccctggttttgagaaactcctgggagggggatttatgacaatggagctcttttgcagggctctgcatttaggcagacaaaggagttcagaaaagagcctattctcatccagcctgggcagcattgcgaaaccctgtgtctgaaaacaaacaacaacagcaacatagccggtggtggcacgcacgtgtagtcctagctacttaggaggctgaggcaggaggatcacttgagcaccaggaggttgaggctgcagtgagccatggtcgcaccactgcattccagcctgggtgacagagcaagactctgtctcaaaaaaaaaaaaaagaaagaaagaaaagaaaaaggccca

SEQ ID NO: 224287 - DNA, 536 bp, Homo sapiens
tagaatttgcgggttatgtaccatctcaatagaagaaggggaggaggagaaaggacacttatagaaaagtaatttttaggaaagatgaatgggcccttaggagaaaagatgggagctattatagtttcgtgacctgactgtttaggtgtggtgccaactattctcccctccagcaataagtcaattttccctggttttgagaaactcctgggagggggatttatgacaatggagctcttttgcagggctctgcatttaggcagacaaaggagttcagaaaagagcctattctcatccagcctgggcagcattgcgaaaccctgtgtctgaaaacaaacaacaacagcaacatagccggtggtggcacgcacrtgtagtcctagctacttaggaggctgaggcaggaggatcacttgagcaccaggaggttgaggctgcagtgagccatggtcgcaccactgcattccagcctgggtgacagagcaagactctgtctcaaaaaaaaaaaaaagaaagaaagaaaagaaaaaggccca

SEQ ID NO: 224288 - DNA, 527 bp, Homo sapiens
tttctggtctttggttctgaacttcatttttttttyttttttttttgcacagagccttttgtttgatttgtttttaatcaacagtctgatccttcttgcaaacaccagttcctgagattaaaacgtcttatctcacaacagcaattacctttcagaattaagtgaggaggaatcatgaagctcccggattgctttactctaattgagaataaactaatttctaactttacttggaaatgtaagttatattctgcataagtgtgtattaaaatgtttaaaaaataaaagcaaaaaccttttagaaggcactttattgaaaagtatcagtccagtgcaaaaatttctattcactttaagcaagcactagtgaggagataaggtaattaagtaaattagaaaaatgttggtgaataaatattttcctgattagaatgcaactattacaggaatttatgatgacatagaaaaagtcagaaatgaactttctttatttttgtggttctgaacaaaaatgtaaaaggcattag

SEQ ID NO: 224289 - DNA, 527 bp, Homo sapiens
tttctggtctttggttctgaacttcatttttttttcttttttttttgcacagagccttttgtttgatttgtttttaatcaacagtctgatccttcttgcaaacaccagttcctgagattaaaacgtcttmtctcacaacagcaattacctttcagaattaagtgaggaggaatcatgaagctcccggattgctttactctaattgagaataaactaatttctaactttacttggaaatgtaagttatattctgcataagtgtgtattaaaatgtttaaaaaataaaagcaaaaaccttttagaaggcactttattgaaaagtatcagtccagtgcaaaaatttctattcactttaagcaagcactagtgaggagataaggtaattaagtaaattagaaaaatgttggtgaataaatattttcctgattagaatgcaactattacaggaatttatgatgacatagaaaaagtcagaaatgaactttctttatttttgtggttctgaacaaaaatgtaaaaggcattag

SEQ ID NO: 224290 - DNA, 527 bp, Homo sapiens
tttctggtctttggttctgaacttcatttttttttcttttttttttgcacagagccttttgtttgatttgtttttaatcaacagtctgatccttcttgcaaacaccagttcctgagattaaaacgtcttatctcacaacagcaattacctttcagaattaagtgaggaggaatcatgaagctcccggattgctttactctaattgagaataaactaatttctaactttacttggaaatgtaagttatattctgcataagtgtgtattaaaatgtttaaaaaataaaagcaaaaaccttttagaaggcactttattgaaaartatcagtccagtgcaaaaatttctattcactttaagcaagcactagtgaggagataaggtaattaagtaaattagaaaaatgttggtgaataaatattttcctgattagaatgcaactattacaggaatttatgatgacatagaaaaagtcagaaatgaactttctttatttttgtggttctgaacaaaaatgtaaaaggcattag

SEQ ID NO: 224291 - DNA, 647 bp, Homo sapiens
aattacctttcagaattaagtgaggaggaatcatgaagctcccggattgctttactctaattgagaataaactaatttctaactttacttggaaatgtaagttatattctgcataagtgtgtattaaaatgtttaaaaaataaaagcaaaaaccttttagaaggcactttattgaaaagtatcagtccagtgcaaaaatttctattcactttaagcaagcactagtgaggagataaggtaattaagtaaattagaaaaatgttggtgaataaatattttcctgattagaatgcaactattacaggaatttatgatgacatagaaaaagtyagaaatgaactttctttatttttgtggttctgaacaaaaatgtaaaaggcattagaaagctatgtattgaatttaaaaaagtatgatgaagactaaagagatgggggagagctgtaagcgaagacatctttgaaagtctggtttaacttacaaattattatatgtgtgtttcacacagatggggcagggggcaggccgcagtaaaagcaacccagtaagttgcaagtggtagaggatggaggaaaaacaaatatctttcaagcacataccatatgccagacacttgacttaaatgggcccactgaagcctcatgata

SEQ ID NO: 224292 - DNA, 453 bp, Homo sapiens
gaattcttctaaagaagctttggcttttgtttgctttgtatgttcagcaaagcactgtaaccatcagaagatttaagggttgtcccatgcacatgatgaagccaatttccatattccttatttcctttacaacaagcagtaacagaaagcttatctgggacatgtgtcttcctttttcgtagaggagataatttcttaagacgttctctttttcttatttatttaaggctctgagcccttgaaatgaacttctgaggtgaaaacactaaaggaaaggacaggctaaattcaataagaccttccaccatgggctcacccatgtaaggtgcctgtttgctctgtaagcagccggtcatctcyggcaagttttaagcccaacttcctgaattttatattcactcatgaccccactgccatgtaaatgaacagccatgtatttcaaaggtcactgac

SEQ ID NO: 224293 - DNA, 642 bp, Homo sapiens
tggccagcctgctgccatctggatgcttgctacaaatccaaattcctgggttccatcccagatttgctgaattagaatctcatatatactaaagcttgaaaagcattccacaatacattgacagtcaacttgtgaaaacaagtcagtggatttaaaaatatcactttcaagaaacagtgcttcttacaactattctacaatatttttcccgtgcaatctctcttagattgcccaaaactaaaattttgaggaagtggcaaaataaagacatgtcagtgaaagttcaaaactgaggaaaagagcgagctagttttgtgggtctggaaactcaaaaacaaaagcatttctgggaatatgagctcataaaaagcactaatgattagagcaaatcagacacagatcaaccaatgacatgatcgtcataatcaaatgtccttatgtaactatggttatgtggaaaatgaaaatacttattccgagtagtggataaagcaagtcttaattgccatcatcttacattgtattattttttttaattgcactattaactctgctacttwcctgtcttctgctggttgactatttctattactttgtatttcagtagctagttttttttttgtttgtttgtttgtttgtttt

SEQ ID NO: 224294 - DNA, 552 bp, Homo sapiens
ttacattgtattattttttttaattgcactattaactctgctactttcctgtcttctgctggttgactatttctattactttgtatttcagtagctagttttttttttgtttgtttgtttgtttgtttttgacagagtctcactctgtcacccaggctggagtacagtggcatgatctcagctcactgcaacctcagcctcttgggttcaagtgattctcctgcctcagcctcctgagttgctgggattacaggcatatgccaccatgtctggctaattttttttttgtatttttagtagagacaggtttttgccatgttggccaggctggtctcaaacccccaacctcaggtgatctgcctgccttggcctcccaaggtgctaggattacaggtrtgagccactgtacctggccgtattttggtagctgttgttttaaccaccataactattttgtaactgtcaaagcccagcttactgaaacccaccacaaagttaaaaagcccagtttgcttactttctcaaacatctcagtgggatcgatttaatatt

SEQ ID NO: 224295 - DNA, 552 bp, Homo sapiens
ttacattgtattattttttttaattgcactattaactctgctactttcctgtcttctgctggttgactatttctattactttgtatttcagtagctagttttttttttgtttgtttgtttgtttgtttttgacagagtctcactctgtcacccaggctggagtacagtggcatgatctcagctcactgcaacctcagcctcttgggttcaagtgattctcctgcctcagcctcctgagttgctgggattacaggcatatgccaccatgtctggctaattttttttttgtatttttagtagagacaggtttttgccatgttggccaggctggtctcaaacccccaacctcaggtgatctgcctgccttggcctcccaaggtgctaggattacaggtatgagccactgtacctggccgtattttggkagctgttgttttaaccaccataactattttgtaactgtcaaagcccagcttactgaaacccaccacaaagttaaaaagcccagtttgcttactttctcaaacatctcagtgggatcgatttaatatt

SEQ ID NO: 224296 - DNA, 570 bp, Homo sapiens
ttgaaaaccttttatatacctaatattagtaggtattcatatttcttaaattttatacctttgtaaacttttttttttttgtacaaacagggacacatgtgtcaaacacaacttgactgytttacaaataggtattcatccatgtaagcatcacctaagtcaacataaaaaacattgcctcactctagaaatcctcatatgttcctttcaaaccatcattgtttctcttcaccctgtgagaatagcatcttaagtagtatagtaataattcacttttcctcttcaggtagatacgcataccaaaggatgaagtttagatttgcctggttttgaaccttaaaaaaaaatacattatacatatttttaagccttgcttctttagcccaacttacatttgtaaactacagttatgttgagtgtgtcataaactatttttattgttctatactctgatattgtaatggcaaaaaccacaattaatgtatgcagcctactgatgatgagcatttgagcttttcaaactattaatggtgcttttatgactatttacatacacgtacttgggtgggc

SEQ ID NO: 224297 - DNA, 611 bp, Homo sapiens
cacattcaacagcacattttcttatcgtggagttcctgaaaaagacttagtccatagtctaattttgctcttaaaaccagttcaggacaattcagcaaaacaaatttcaaatacaaatctatcacacatcttagaatctgtttttgagaactttatttgggtgcctgttcttagactaaggcatagttcaatagaattcccagtgaatttactgtaaagatatggctaagggtgttgtttagatatcacctaatagctttatgaagccctaagacagatgtttctcacaaacctcactgttaaaaataattctgcagcttaaaagtaactgatattaaaaactttgtatctcacagataccacccattatataactaagcttttaccctttgtgttcagtcactaataatctcagggccaaattcatttacattttaatgagcttattaatttttttcatatttaaatttatacttagattggttttaatatttttctttctctgtacctttgtatccttatcctcattcgttctrtgttactatgcatatttttacaatctcccctactacttttgggagtgggataaactattagtaacaaactaaaca

SEQ ID NO: 224298 - DNA, 611 bp, Homo sapiens
cacattcaacagcacattttcttatcgtggagttcctgaaaaagacttagtccatagtctaattttgctcttaaaaccagttcaggacaattcagcaaaacaaatttcaaatacaaatctatcacacatcttagaatctgtttttgagaactttatttgggtgcctgttcttagactaaggcatagttcaatagaattcccagtgaatttactgtaaagatatggctaagggtgttgtttagatatcacctaatagctttatgaagccctaagacagatgtttctcacaaacctcactgttaaaaataattctgcagcttaaaagtaactgatattaaaaactttgtatctcacagataccacccattatataactaagcttttaccctttgtgttcagtcactaataatctcagggccaaattcatttacattttaatgagcttattaatttttttcatatttaaatttatacttagattggttttaatatttttctttctctgtacctttgtatccttatcctcattcgttctgtgttactatgcatatttttacaatckcccctactacttttgggagtgggataaactattagtaacaaactaaaca

SEQ ID NO: 224299 - DNA, 575 bp, Homo sapiens
ttagttgcagtgaaatgaaaccatatcaaatgaggagacagaaactaaatgttagttcaataattagagatattaacactaattttaaaaacattaatttatgctaaattatgcaacatttaaacattcatttatttattctcataacttrtgaggcactgtgccaggtgaagggaaaatgttcctaaggagactctctgtgtatccactacccaactcactgcatagttagaaacaagagacaataaaatatgattagcatataattcagtttgtatggggtagggagacgccctggaaatagtgatgactaatttgaaattttagtaaggggatagactttgtttctgtaaagatgaggtaatgtgacatagatatactaagcagaacaaagagcctaggcaaaaacactgagacgaggaaaagctagagttaattaaagatggcccctataacacaactgttcactttcacacctccagctttcttatcctctgcactaataaataaacagttaatgtttcttcctacaccaacagcagtgaaaaaaaccacttagagtattagaaacactg

SEQ ID NO: 224300 - DNA, 575 bp, Homo sapiens
ttagttgcagtgaaatgaaaccatatcaaatgaggagacagaaactaaatgttagttcaataattagagatattaacactaattttaaaaacattaatttatgctaaattatgcaacatttaaacattcatttatttattctcataacttgtgaggcactgtgccaggtgaagggaaaatgttcctaaggagactctctgtgtatccactacccaactcactgcatagttagaaacaagagacaataaaatatgattagcatataattcagtttgtatggggtagggagacgccctggaaatagtgatgactaatttgaaattttagtaaggggatagactttgtttctgtaaagatgaggtaatgtgacatasatatactaagcagaacaaagagcctaggcaaaaacactgagacgaggaaaagctagagttaattaaagatggcccctataacacaactgttcactttcacacctccagctttcttatcctctgcactaataaataaacagttaatgtttcttcctacaccaacagcagtgaaaaaaaccacttagagtattagaaacactg

SEQ ID NO: 224301 - DNA, 589 bp, Homo sapiens
tttaagctaatctaaatctcatcttgttgttcttgattatttttatyttttagaggagttttacattcacagcaaaattgagaggaaagtatagagatttcaaatatacttcttgtcccacatatggataaggttgcccccattaccaacatcccccaccaaaatagtacacttgttaaaattgctgaacctatgttaacatcattaacacccagattcctttgtttaccttagggttcactctatgcatgagttcaaactcattctatgggtttagacaaatgtataacgacacacacttgccactgtagcatcatacaacatagttccactgtgctaaaaatcctctgtgctgtgcctattcatccctccctttctctaacccctgacaactactgatatttttaatgtctccacagtttcgtcttttctagaatgtcatatagtttgaatcatacaatatgtagccttttcagattggctcttttcacatagtaatatgcatttaagattcctccatgtttttaaaattctattgtttagatgtgccacactttatccattcacctattaaagaacatcttaattt

SEQ ID NO: 224302 - DNA, 623 bp, Homo sapiens
ttagtttttttcttaaggcttttttcaatatggacttaaaaatatttgttctcaaaattatttagccattgtcataacacttgytatgaaataactggagaatcattttcttcactaatttaaaatacaccaataaagcatataaaatcttaggtaaatttatggccttttgcctaaattatatcttgttccatttccatgctgtagatgagtttgtgtgaatgaggcctagataaaatctattgcgaaacaaattcaaacaaaacaaaaataatgcaaaacaaaatcaaacaaaacaaaatatagaacacactgtcgttgtgtttcttcctccatgtatgcttatatgttcatatacaatatgaaaaataattgaagagcaaactcccagtctgtccagtgtgggtggaggttgacattgaggaaaacattatttaacagtaggagaaggtaataaaaacaggaaattatttaatttgggagaggatttgagcatcgagcaaatcaatctgaaatttctcctctagccaactctgttaagttgatactcctttcgtcattccctactcctacaaggaagtgccaatttcctggtatctacagtggattttttccccatagcc

SEQ ID NO: 224303 - DNA, 623 bp, Homo sapiens
ttagtttttttcttaaggcttttttcaatatggacttaaaaatatttgttctcaaaattatttagccattgtcataacacttgctatgaaataactggagaatcattttcttcactaatttaaaatacaccaataaagcatataaaatcttaggtaaatttatggccttttgcctaaattatatcttgttccatttccatgctgtagatgagtttgtgtgaatgaggcctagataaaatctattgcraaacaaattcaaacaaaacaaaaataatgcaaaacaaaatcaaacaaaacaaaatatagaacacactgtcgttgtgtttcttcctccatgtatgcttatatgttcatatacaatatgaaaaataattgaagagcaaactcccagtctgtccagtgtgggtggaggttgacattgaggaaaacattatttaacagtaggagaaggtaataaaaacaggaaattatttaatttgggagaggatttgagcatcgagcaaatcaatctgaaatttctcctctagccaactctgttaagttgatactcctttcgtcattccctactcctacaaggaagtgccaatttcctggtatctacagtggattttttccccatagcc

SEQ ID NO: 224304 - DNA, 622 bp, Homo sapiens
atgtggttgagcctttcaagtcacaactacataaattcagattccctccctccatgcttcatctgcctcatgggaacatcattaccgcacttggaattcagtgcagaatacagtttgcctttggatgatatatgtgcttatctctctgatagctcctgctatctaggcctgytctcctgttaatgtgtgcctagtgtctcctcctccataagcatgcctgttagaagcgtagaaaagttccccgatttattgagtctccttttccaactttcagaataaaaatgatatgtgttcaacaaataacgggaatgaaaatcaaccgctacatatgtaaaaaaattgaaaccatcacacaagaaggggaacatcacacactggggcctgtcgtggggaggggggaggggggaagggggagggatagcattaggagatatacctaatgtaaatgacgagttaatgggtgcagcacaccaacatggcacatgtatacatatgtaacaaacctgcatgttgtacacaggtaccctagaacttaaagtataataaaaaaaagaaaaaaaagaataaaataaaaaaaattgaaaccatcacgtcagcttgctattttacattaaatatgttt

SEQ ID NO: 224305 - DNA, 355 bp, Homo sapiens
ccttattatggagctccaggctatgtatatatgtagtatgtacatatatgcatgtaagtgtgtattttctaaagggaaacatgattctcaaaccatctattactttaataagtttttattagatcaatttcattaaactgctgtaagactacaatttaaaaagaaaatattgctttaaaaacatttttaaatggacaaatgayaaatttaaaacagtatgtttaggaattaaacttgggaatgagttttattgcatctgaaagtcatgtgacaaacttcttttatattcattctttttaaagggcataaacacagacttcagggaaatttaagaatgttccaaaaagggagaata

SEQ ID NO: 224306 - DNA, 560 bp, Homo sapiens
taaaggtataggtttttttaagaaacagagaagcattgctccaaaatgtatacttttaatttaaaatgttatagtttttaataaagtttaaagtgttaagagttctattttaagtgaatatagttagtaaaaatgcaatctacttgtagcacttctgaaaattatattgactattatatcaggaayaaatatgcctttatattttactcgtaaggtgcacccaccataccaataaaattaatttaattaattgttcttttctcctctaaaaatattatgtagcatcattacaagttaaatagggaaatcactaggtttctttacttattttaatatactttgaatgagtttcaattaaggtaatttttaaagttaattgaaagtttaaggttaacatatttctgagaaatatcacattccatagttagtagtttaaaatcacaaaatgtgaaattgactgcatcaagaatattcctatcactattcacataaatcaatatacttgctgaacttttagtcaaaatatgcatatttaaaagaataaacacttaaaaattagt

SEQ ID NO: 224307 - DNA, 560 bp, Homo sapiens
taaaggtataggtttttttaagaaacagagaagcattgctccaaaatgtatacttttaatttaaaatgttatagtttttaataaagtttaaagtgttaagagttctattttaagtgaatatagttagtaaaaatgcaatctacttgtagcacttctgaaaattatattgactattatatcaggaataaatatgcctttatattttactcrtaaggtgcacccaccataccaataaaattaatttaattaattgttcttttctcctctaaaaatattatgtagcatcattacaagttaaatagggaaatcactaggtttctttacttattttaatatactttgaatgagtttcaattaaggtaatttttaaagttaattgaaagtttaaggttaacatatttctgagaaatatcacattccatagttagtagtttaaaatcacaaaatgtgaaattgactgcatcaagaatattcctatcactattcacataaatcaatatacttgctgaacttttagtcaaaatatgcatatttaaaagaataaacacttaaaaattagt

SEQ ID NO: 224308 - DNA, 560 bp, Homo sapiens
taaaggtataggtttttttaagaaacagagaagcattgctccaaaatgtatacttttaatttaaaatgttatagtttttaataaagtttaaagtgttaagagttctattttaagtgaatatagttagtaaaaatgcaatctacttgtagcacttctgaaaattatattgactattatatcaggaataaatatgcctttatattttactcgtaaggtgcacccaccataccaataaaattaatttaattaattgttcttttctcctctaaaaatattatgtagcatcattacaagttaaatagggaaatcactaggtttctttacytattttaatatactttgaatgagtttcaattaaggtaatttttaaagttaattgaaagtttaaggttaacatatttctgagaaatatcacattccatagttagtagtttaaaatcacaaaatgtgaaattgactgcatcaagaatattcctatcactattcacataaatcaatatacttgctgaacttttagtcaaaatatgcatatttaaaagaataaacacttaaaaattagt

SEQ ID NO: 224309 - DNA, 576 bp, Homo sapiens
aaataaaaaaaaaagaaaagaaaaaaactctgaataaccaaaacaatcttgagaaagaagaatacagctggagggcctcatactttctaatttcaaaacactttccaaaactacagtaattaatacatgatggtactggcataaagacagatgtacacaccaatggaacacaacagcgagtccagaaacaagcccacacatgaaaggacaactgatcttctaaaagggtgcatagaatgcacaatggggaatgtatagtctcctcaacaaatggcgtycaggaaattagacatccaaatgcaaaaggcaaaattatcccagctgtcttcttggaaaacataaccaaaaaaaaaaaaaagaaaggaacgttctaacatgcaacaaaatgccaataataagtccttccctatcaataacaactgtagctttgtttgtttgggggatttttttggagggggttgttttgttttttgaggcagggtctcactctgtcacccaggccggaatacagtggtgtgatgttggttcactctaacctctgtgaggattgtgcactagaatctacctgcaaacaaa

SEQ ID NO: 224310 - DNA, 576 bp, Homo sapiens
aaataaaaaaaaaagaaaagaaaaaaactctgaataaccaaaacaatcttgagaaagaagaatacagctggagggcctcatactttctaatttcaaaacactttccaaaactacagtaattaatacatgatggtactggcataaagacagatgtacacaccaatggaacacaacagcgagtccagaaacaagcccacacatgaaaggacaactgatcttctaaaagggtgcatagaatgcacaatggggaatgtatagtctcctcaacaaatggcgtccaggaaattagacatccaaatgcaaaaggcaaaattatcccagctgtcttcttggaaaacataaccaaaaaaaaaaaaaagaaaggaacgttctaacatgcaacaaaatgccaataataagtccttccctatcaataayaactgtagctttgtttgtttgggggatttttttggagggggttgttttgttttttgaggcagggtctcactctgtcacccaggccggaatacagtggtgtgatgttggttcactctaacctctgtgaggattgtgcactagaatctacctgcaaacaaa

SEQ ID NO: 224311 - DNA, 576 bp, Homo sapiens
aaataaaaaaaaaagaaaagaaaaaaactctgaataaccaaaacaatcttgagaaagaagaatacagctggagggcctcatactttctaatttcaaaacactttccaaaactacagtaattaatacatgatggtactggcataaagacagatgtacacaccaatggaacacaacagcgagtccagaaacaagcccacacatgaaaggacaactgatcttctaaaagggtgcatagaatgcacaatggggaatgtatagtctcctcaacaaatggcgtccaggaaattagacatccaaatgcaaaaggcaaaattatcccagctgtcttcttggaaaacataaccaaaaaaaaaaaaaagaaaggaacgttctaacatgcaacaaaatgccaataataagtccttccctatcaataacaactgtagctttgtttgtttgggggrtttttttggagggggttgttttgttttttgaggcagggtctcactctgtcacccaggccggaatacagtggtgtgatgttggttcactctaacctctgtgaggattgtgcactagaatctacctgcaaacaaa

SEQ ID NO: 224312 - DNA, 392 bp, Homo sapiens
tttatccaaaataattaaaaatagtatcttaaagagatatttgacactcatattcattgcagcattattcacaatggccaaaatgtggaagcaacccaactgttcactgatgcatgaatggattaaacaaaatgtgatgtatatatgtaccatggaatattattaagcctttaaaaggaaaattctgttctatgctgcatcatgaatgaacctggaagacattatgctaagtgaaataagccagtcatgaaagaactaatactgaattattctacttatatgaggtacccaaaacagtcaaattcatcatatcagagagtrgaatggtgattgccgagggctgaagcaagtgggaaatgaggagttgcttttcagtgggcattaaaatttca

SEQ ID NO: 224313 - DNA, 555 bp, Homo sapiens
ttacttttatctctctaaactgctacctatcattcaagcaagtctagaaagaatttagataaaactttcctgggatgatcatttcttatttgtatgctgtaagttgcaggatacgacaagattttggcaytgagatatatgtgtcacagctgagttttgtattccataatgataattttcactgcatgcaaatgaagctaaattttgcattttgcattagttgcacagaaagctcatccctttaaaaatataggagttgttggcttgtagttttcttcaggaatgggaataatgtgatgaaaacaaggatcagataccctaagctcatcactgaaaggtatctggtttgctctgcagtgcatcacccataggtcaagagaaaagagattttcctcatccatgtctacctttccctttcttctctgacaatatctttttcaccatctcacctaatgcaacacagcactgacagatattccaggacacccagcctgcacagggaaagtattaagatatataattaagaaatattacaaaatatgtattatactacta

SEQ ID NO: 224314 - DNA, 555 bp, Homo sapiens
ttacttttatctctctaaactgctacctatcattcaagcaagtctagaaagaatttagataaaactttcctgggatgatcatttcttatttgtatgctgtaagttgcaggatacgacaagattttggcactgagatatatgtgtcacagctgagttttgtattccataatgataattttcactgcatgcaaatgaagctaaattttgcattttgcattagttgcacagaaagctcatccctttaaaaatataggagttgttggcttgtagttttcttcaggaatgggaatawtgtgatgaaaacaaggatcagataccctaagctcatcactgaaaggtatctggtttgctctgcagtgcatcacccataggtcaagagaaaagagattttcctcatccatgtctacctttccctttcttctctgacaatatctttttcaccatctcacctaatgcaacacagcactgacagatattccaggacacccagcctgcacagggaaagtattaagatatataattaagaaatattacaaaatatgtattatactacta

SEQ ID NO: 224315 - DNA, 531 bp, Homo sapiens
ggagatctggatcaggtagataatcacatacagagcaatcaggaagcaaagccaagttgataggatctttgagatccttttcagagctcctacttcaaagccagcacaatccctaccctccraagagccaatcagtgcactttacgtctcatatctctaccattactctgttacctgagcaaagtctgaaaaccaccactggaaaattcagaaatataattctaatgacctcacagataaacctctccaattatggcaaaatcaggtacctctctgatcacagacaggaacttagaaataactaaaaactaaaaaaaaaaaaaaaaaaaaaaattaccatgatggaagtgactctgccaactataatggatgaatatttattcatttcttagtttggatgggtgacaaattattagcctttcttaggcaccaactcttagtctactcaagtttcttccataaccttatgactaacctaactgatcatgtcactctcatagttcaagattaaatttcatctatcagtgttct

SEQ ID NO: 224316 - DNA, 531 bp, Homo sapiens
ggagatctggatcaggtagataatcacatacagagcaatcaggaagcaaagccaagttgataggatctttgagatccttttcagagctcctacttcaaagccagcacaatccctaccctccgaagasccaatcagtgcactttacgtctcatatctctaccattactctgttacctgagcaaagtctgaaaaccaccactggaaaattcagaaatataattctaatgacctcacagataaacctctccaattatggcaaaatcaggtacctctctgatcacagacaggaacttagaaataactaaaaactaaaaaaaaaaaaaaaaaaaaaaattaccatgatggaagtgactctgccaactataatggatgaatatttattcatttcttagtttggatgggtgacaaattattagcctttcttaggcaccaactcttagtctactcaagtttcttccataaccttatgactaacctaactgatcatgtcactctcatagttcaagattaaatttcatctatcagtgttct

SEQ ID NO: 224317 - DNA, 531 bp, Homo sapiens
ggagatctggatcaggtagataatcacatacagagcaatcaggaagcaaagccaagttgataggatctttgagatccttttcagagctcctacttcaaagccagcacaatccctaccctccgaagagccaatcagtgcactttacgtctcatatctctaccattactctgttacctgagcaaagtctgaaaaccaccactggaaaattcagaaatataattctaatgacctcacagataaacctctccaattatggcaaaatcaggtacctctctgatcacagacaggaacttagaaataactaaaaactwaaaaaaaaaaaaaaaaaaaaaattaccatgatggaagtgactctgccaactataatggatgaatatttattcatttcttagtttggatgggtgacaaattattagcctttcttaggcaccaactcttagtctactcaagtttcttccataaccttatgactaacctaactgatcatgtcactctcatagttcaagattaaatttcatctatcagtgttct

SEQ ID NO: 224318 - DNA, 412 bp, Homo sapiens
acctcacagataaacctctccaattatggcaaaatcaggtacctctctgatcacagacaggaacttagaaataactaaaaactaaaaaaaaaaaaaaaaaaaaaaattaccatgatggaagtgactctgccaactmtaatggatgaatatttattcatttcttagtttggatgggtgacaaattattagcctttcttaggcaccaactcttagtctactcaagtttcttccataaccttatgactaacctaactgatcatgtcactctcatagttcaagattaaatttcatctatcagtgttctccagagaataaggttgggacagtgtcaactttttttgagactttattttgtactttgtcaaaacattaaataattttaattctgcttaagtaaattttttttaagaat

SEQ ID NO: 224319 - DNA, 412 bp, Homo sapiens
acctcacagataaacctctccaattatggcaaaatcaggtacctctctgatcacagacaggaacttagaaataactaaaaactaaaaaaaaaaaaaaaaaaaaaaattaccatgatggaagtgactctgccaactataatggatgaatatttattcatttcttagtttggatgggtgacaaattattagcctttcttaggcaccaactcttagtctactcaagtttcttccataaccttatgactaacctaactgatcatgtcactctcatagttcaagattaaatttcatctatcagtgttctccagagaataaggttgggacastgtcaactttttttgagactttattttgtactttgtcaaaacattaaataattttaattctgcttaagtaaattttttttaagaat

SEQ ID NO: 224320 - DNA, 601 bp, Homo sapiens
atcctggtgacctacttttagtattgtctgctaaatcctcagggaagtgtttagctctgattataaatattaattagatttcaatcagagactatttaaagggtctgtacaccttagagagagacatttcagatagattgattgttagaaatatatasagatatagtaatatatatagcattttcatgtacaagtggttcaagttggtaataagtagatgatttcacatagtaaaacagacccaagccagctacaaaattataggtaaattaaatgactctataaataagcatgataaaaccttagtaactttagcagatatataattccactgtatatggatagggtcaacattctttagctttgctataacatcttccttgttatgcatataaactgaacaaaaatatttgtagaagcagcagctctacacatttaaaaacaaacaatgaaagaacctgatacttattaaatagtgacttcctaaaattcttaggcataatttgaggctgttggctgcttgacattattctgcactgtggggagtggagtctcaggtaagagaccctgtcctagcccttgagctctgtgacagcaagag

SEQ ID NO: 224321 - DNA, 601 bp, Homo sapiens
atcctggtgacctacttttagtattgtctgctaaatcctcagggaagtgtttagctctgattataaatattaattagatttcaatcagagactatttaaagggtctgtacaccttagagagagacatttcagatagattgattgttagaaatatatacagatatagtaatatatatagcattttcatgtacaagtggttcaagttggtaataagtagatgatttcacatagtaaaacagacccaagccagctacaaaattataggtaaattaaatgactctataaataagcatgataaaaccttagtaactttagcagatatataattccactgtrtatggatagggtcaacattctttagctttgctataacatcttccttgttatgcatataaactgaacaaaaatatttgtagaagcagcagctctacacatttaaaaacaaacaatgaaagaacctgatacttattaaatagtgacttcctaaaattcttaggcataatttgaggctgttggctgcttgacattattctgcactgtggggagtggagtctcaggtaagagaccctgtcctagcccttgagctctgtgacagcaagag

SEQ ID NO: 224322 - DNA, 601 bp, Homo sapiens
atcctggtgacctacttttagtattgtctgctaaatcctcagggaagtgtttagctctgattataaatattaattagatttcaatcagagactatttaaagggtctgtacaccttagagagagacatttcagatagattgattgttagaaatatatacagatatagtaatatatatagcattttcatgtacaagtggttcaagttggtaataagtagatgatttcacatagtaaaacagacccaagccagctacaaaattataggtaaattaaatgactctataaataagcatgataaaaccttagtaactttagcagatatataattccactgtatatggatagggtcaacattctttagctttgctataacatcttccttgttatgcatataaactgaacaaaaatatttgtagaagcagcagctctacacatttaaaaacaaacaatgaaagaacctgatacttattaaatagtgacttcctaaaattcttaggcataatttgaggctgttggctgcttgayattattctgcactgtggggagtggagtctcaggtaagagaccctgtcctagcccttgagctctgtgacagcaagag

SEQ ID NO: 224323 - DNA, 572 bp, Homo sapiens
gcatcccagatgagcaaatttaagaagatttttaccataagtaaatctaagatgattttgagctatacagacttaaggcacaagggtttatatatatatatatatatatatatatatatatatgtcatatatatacatgttagccatttaatctaattttagagggttcattaatattattctcagaaaaacaatcactgaattacattaaaaatgatgtgtaattgaagttcagtccagtttgaaggcttttaattttttcatattgaagaatgcaatgttctgattaagtcagatctctgtaaacagaagctgctttagaaaagaactattaagtgtttgaataatcacttataaaaaatgaagtaattaccttttctatataattagcaastagttggggtttgtataggagaagtgacagaataagataaaatttgactagataagaatttcttaagctctgtcagtaatttgcttatattatctaacactccatagtgtctacctcataagtgggtgaggcatgagaatgaaatgacataatacttgaaaagtgtttgaaatactgt

SEQ ID NO: 224324 - DNA, 612 bp, Homo sapiens
tatgcaaggtgctgtcaaaggcagaagtaatggccmttgcagtctttaaatggaaagcaatgtaagttggaagaaatgtcagccatccttccccaaagatctcttttcacagatggtcaaactgtggcccagggagagaacatgacttgtcagaagtcactcagcaagttggtcccaacgtgttccccttttagcctcatacttatttcaaaagtcagtttgagtccttcaagagccagagctgtcctacaagcttcacctgtgttgtttcctttagccctcccctcctccagttaattgtccttacagatacggacattaggacacagaaaggctgaacagtgccctcacattgctacattcctgctgaaaccaagcttgaaggctggacttagcctgtgcttttatgcaccatacctgaagcctttgtgaaccttcaagacgtctgcttttgtctccaaactgcactgactaggcccatacaggtagattcagaagggcaggaggcttcagcaggaaaaagctcctggctctaggatgaggcctgggcatgggttatatttattacatttattaacccaatctttatttttctcatttttttctttttta

SEQ ID NO: 224325 - DNA, 612 bp, Homo sapiens
tatgcaaggtgctgtcaaaggcagaagtaatggccattgcagtctttaaatggaaagcaatgtaagttggaagaaatgtcagccatccttccccaaagatctcttttcacagatggtcaaactgtggcccagggagagaacatgacttgtcagaagtcactcagcaagttggtcccaacgtgttccccttttagcctcatacttatttcmaaagtcagtttgagtccttcaagagccagagctgtcctacaagcttcacctgtgttgtttcctttagccctcccctcctccagttaattgtccttacagatacggacattaggacacagaaaggctgaacagtgccctcacattgctacattcctgctgaaaccaagcttgaaggctggacttagcctgtgcttttatgcaccatacctgaagcctttgtgaaccttcaagacgtctgcttttgtctccaaactgcactgactaggcccatacaggtagattcagaagggcaggaggcttcagcaggaaaaagctcctggctctaggatgaggcctgggcatgggttatatttattacatttattaacccaatctttatttttctcatttttttctttttta

SEQ ID NO: 224326 - DNA, 612 bp, Homo sapiens
tatgcaaggtgctgtcaaaggcagaagtaatggccattgcagtctttaaatggaaagcaatgtaagttggaagaaatgtcagccatccttccccaaagatctcttttcacagatggtcaaactgtggcccagggagagaacatgacttgtcagaagtcactcagcaagttggtcccaacgtgttccccttttagcctcatacttatttcaaaagtcagtttgagtccttcaagagccagagctgtcctacaagcttcacctgtgttgtttcctttagccctcccctcctccagttaattgtccttacagatayggacattaggacacagaaaggctgaacagtgccctcacattgctacattcctgctgaaaccaagcttgaaggctggacttagcctgtgcttttatgcaccatacctgaagcctttgtgaaccttcaagacgtctgcttttgtctccaaactgcactgactaggcccatacaggtagattcagaagggcaggaggcttcagcaggaaaaagctcctggctctaggatgaggcctgggcatgggttatatttattacatttattaacccaatctttatttttctcatttttttctttttta

SEQ ID NO: 224327 - DNA, 510 bp, Homo sapiens
acaccctcctgggttttccagattggcgtaaatgccatcacaaatgttctcatgacagagaggcagaaagaaattacacacacagaggagaaggcgatgtgggggtggaacagagattggtgtgatgtggccacaaaccgatcgatgctgaggccaccacaacctgaaagaggtcaggcacagattctcctctagagcctccagaaggagcaccaccagaaaycaaatgccagcaccttgattttggatttctggcctccagcactaggagagaataaatttcttaataattatcttaagccactgagtgtgcagcaatttcttgcagcagacaaggtaggtaccgtcaggattcccactttgcagaggaggaagcggaggagagggtcacacagtttggtggtgacagaggcagagcttctcaggcttcccaactttgttgctattagctgcctaatgggcaagccacttcaccaccctgtcatttactgactgactgatctctagttt

SEQ ID NO: 224328 - DNA, 510 bp, Homo sapiens
acaccctcctgggttttccagattggcgtaaatgccatcacaaatgttctcatgacagagaggcagaaagaaattacacacacagaggagaaggcgatgtgggggtggaacagagattggtgtgatgtggccacaaaccgatcgatgctgaggccaccacaacctgaaagaggtcaggcacagattctcctctagagcctccagaaggagcaccaccagaaatcaaatgccagcaccttgattttggatttctggcctccagcactaggagagaataaatttcttaataattatcttaagccactgagtktgcagcaatttcttgcagcagacaaggtaggtaccgtcaggattcccactttgcagaggaggaagcggaggagagggtcacacagtttggtggtgacagaggcagagcttctcaggcttcccaactttgttgctattagctgcctaatgggcaagccacttcaccaccctgtcatttactgactgactgatctctagttt

SEQ ID NO: 224329 - DNA, 510 bp, Homo sapiens
acaccctcctgggttttccagattggcgtaaatgccatcacaaatgttctcatgacagagaggcagaaagaaattacacacacagaggagaaggcgatgtgggggtggaacagagattggtgtgatgtggccacaaaccgatcgatgctgaggccaccacaacctgaaagaggtcaggcacagattctcctctagagcctccagaaggagcaccaccagaaatcaaatgccagcaccttgattttggatttctggcctccagcactaggagagaataaatttcttaataattatcttaagccactgagtgtgcagcaatttcttgcagcagacaaggtaggtaccgtcaggattcccactttgcagaggaggaagcggaggagagggtcacacagtttggtggtgacagaggcagagcttctcaggcttcccaactttgttgctattarctgcctaatgggcaagccacttcaccaccctgtcatttactgactgactgatctctagttt

SEQ ID NO: 224330 - DNA, 631 bp, Homo sapiens
attcaacatagcactggaagttctcaccaaagaagtcaggacacagaaaaattaaaagttatccaagctggaaaagaagaagtcaaattatccctgtttgctgatagtattgtcttatatctaaaaatccctaaagactctatcaagtttcaagataaaaaataagatgcagaaatcagtagcatttctatacaccaatctagctgagaaccaaattaagaaagcaatccatttacaatagccacaaaaataaaatatctaggaatatatttaacraggaggtgaaagatctctataaaaataataacaaaacactgatgaaataaattgtagatgacataaatacacagagaaacatcccatgctcatgaattggataatcaatatgtttaaaaggattatattgcccaaagcaatctgcagattcaatccaatccctatccaattaccaacatcatttttcaaagcattagaaaaaaaatcctaaaattcatctgtaactagaacagaccccaaataaccaaagcaatctcaagcaaaatgaacgaagctagaaaatcacattatctgacttcaaattatagtacaaggcatagtaaccacaaaaccatggtattggtataaaaatagg

SEQ ID NO: 224331 - DNA, 631 bp, Homo sapiens
attcaacatagcactggaagttctcaccaaagaagtcaggacacagaaaaattaaaagttatccaagctggaaaagaagaagtcaaattatccctgtttgctgatagtattgtcttatatctaaaaatccctaaagactctatcaagtttcaagataaaaaataagatgcagaaatcagtagcatttctatacaccaatctagctgagaaccaaattaagaaagcaatccatttacaatagccacaaaaataaaatatctaggaatatatttaacaaggaggtgaaagatctctataaaaataataacaaaacactgatgaaataaattgtagatgacataaatacacagagaaacatcccatgytcatgaattggataatcaatatgtttaaaaggattatattgcccaaagcaatctgcagattcaatccaatccctatccaattaccaacatcatttttcaaagcattagaaaaaaaatcctaaaattcatctgtaactagaacagaccccaaataaccaaagcaatctcaagcaaaatgaacgaagctagaaaatcacattatctgacttcaaattatagtacaaggcatagtaaccacaaaaccatggtattggtataaaaatagg

SEQ ID NO: 224332 - DNA, 605 bp, Homo sapiens
aattatccctgtttgctgatagtattgtcttatatctaaaaatccctaaagactctatcaagtttcaagataaaaaataagatgcagaaatcagtagcatttctatacaccaatctagctgagaaccaaattaagaaagcaatccatttacaatagccacaaaaataaaatatctaggaatatatttaacaaggaggtgaaagatctctataaaaataataacaaaacactgatgaaataaattgtagatgacataaatacacagagaaacatcccatgctcatgaattggataatcaatatgkttaaaaggattatattgcccaaagcaatctgcagattcaatccaatccctatccaattaccaacatcatttttcaaagcattagaaaaaaaatcctaaaattcatctgtaactagaacagaccccaaataaccaaagcaatctcaagcaaaatgaacgaagctagaaaatcacattatctgacttcaaattatagtacaaggcatagtaaccacaaaaccatggtattggtataaaaataggcaactagatcaatggaatagaatggagaacccagaaataaagccacatacctacaacca

SEQ ID NO: 224333 - DNA, 605 bp, Homo sapiens
aattatccctgtttgctgatagtattgtcttatatctaaaaatccctaaagactctatcaagtttcaagataaaaaataagatgcagaaatcagtagcatttctatacaccaatctagctgagaaccaaattaagaaagcaatccatttacaatagccacaaaaataaaatatctaggaatatatttaacaaggaggtgaaagatctctataaaaataataacaaaacactgatgaaataaattgtagatgacataaatacacagagaaacatcccatgctcatgaattggataatcaatatgtttaaaaggattatattgcccaaagcaatctgcagattcaatccaatccctatccaattaccaacatcatttttcaaagcattagaaaaaaaatcctaaaattcatctgtaactagaacagaccccaaataaccaaagcaatctcaagcaaaatgaacgaagctagaaaatcacattatctgacttcaaattatagtacaaggcatagtaaccacaaaaccatggwattggtataaaaataggcaactagatcaatggaatagaatggagaacccagaaataaagccacatacctacaacca

SEQ ID NO: 224334 - DNA, 461 bp, Homo sapiens
acctttctctcatagaatttacattctagagaagagacaaataattaacaagtaaacaaacaaaatgattattttgtagagtaaaaaaatgaataaagataaaagtataatatgataaaaagttaacgargatggggtgaaagcagcataaatttagcttaaaaatagggtagacagacttcttccactttagccttctttttcaaaagaagttttggccattatagttcctttgccgttcgtttaaattccagaaaaatcttgtctatacttataaaaatcatgccgaggttttgataggaattatattaaacctttatatcaattcgaggcatgtggacatctttattatcttgtgctatccaattcgtgaatacgtatatctttccttgtgattagatcttctttgatttctttcacgagtattttaaagttttactaaagctaaacgtggcccatgc

SEQ ID NO: 224335 - DNA, 600 bp, Homo sapiens
aggcactaaccacccagtccagggcagggcccttcaaggttttattcccaaggcctccccagtagcctgtctgactgttctctacatgctatttactgagtactaaatattgagtgatgggtgaagtgcacatcatcccccttaactttccccacaactccatgttgagatgctgttgtacatatgagaacacagatactacattgcccaatgtcatcaactagaacagcaggaatctgtgtgctgggaagccwgaccccagaaccagtgctctcaaatccccaccaatgtcatctagtggtcactggagtccttattttggagtcatgatatccatgctaccaattcctatctgagtgacaatgaacatgtcacttccctttctgagttggcttccacactcacaggatggagactgagattccattttgctagggtgttatcaagattcagagatccaaagttacacttaaaagtcatttgagacatttgttctttttttctaccccaccccctgcctaaaaggttctcctcttacccaggatgaactcaagatgtaacattttaaaatgagccttaggaaaaaacctgcaagggttg

SEQ ID NO: 224336 - DNA, 609 bp, Homo sapiens
ttccttctttactgactattcctatgtccttttccaatacttagcctctttagcttcctctggatctcttggatgcagtggaggagaaataaatactggacattgatagagggtaaagagaagaaagtgcccctctcttcatgcttcctgacattggggacrttcgccttatccctagggaactattctcagccttgggagggtgtcttctgatgaattaagagaatgagctttggagtttgacagagtttggagtttcctctgcctttacctggctggttggatttgggcaagtttctcatactttctgactctatttcctcatggataaaatgggagtaataataatgctttccttataaggtagctgtgaggatttccagggccaggcacataattagtactgaaatgttctctctatatatccgtatcagtaatactaggcctgatattatttatagcatttattcatttattttttagtagctttaataatattaggcctagtattactgatcaaggtattcaatacatatagagaattctctgtctgtgaacctatttgactagaggatactttgatgaagacaccatgggggcgatatgtca

SEQ ID NO: 224337 - DNA, 504 bp, Homo sapiens
catatttagcaaataaaaataaaggcacccaattaaatttggattttaaacagcaaatttcttttggtatacacacttcccaaatagtgcaattattaattgcctgcctgaaattcaaattcaactgggtactcaatattttatctggcaattctatcccatggccratggcacttacaccccttctccattctccggtactcccaaactcccaacacctaaaataatttatcacacttattatttattttctgattcttcccattagaatgtaaattacacaagagcatgagtttttatctgttttactcattgaagtgttgccaaaatctactaaaggtgtatcacacacacacacacacacacacacacacacacactttagaatcttactatacatataccttcatattcttctttttccttaatcttactccaaggacatttcaggacacttttttgtttctttcaaacacattattttcatggctattttgaagttgc

SEQ ID NO: 224338 - DNA, 504 bp, Homo sapiens
catatttagcaaataaaaataaaggcacccaattaaatttggattttaaacagcaaatttcttttggtatacacacttcccaaatagtgcaattattaattgcctgcctgaaattcaaattcaactgggtactcaatattttatctggcaattctatcccatggccgatggcacttacaccccttctccattctccggtactcccaaactcccaacacctaaaataatttatcacacttattatttattttctgattcttcccattagaatgtaaattacacaagagcatgagtttttatctgttttactcattgaagtgttgccaaaatctactaaaggtgtatcacacacacacacacacacacacacacacacacactttagaatcttactatacatataccttcatattcttctttttccttaatcttactccaaggacatttcaggacacttttttgtttctttcaaacacatkattttcatggctattttgaagttgc

SEQ ID NO: 224339 - DNA, 463 bp, Homo sapiens
tctggctataccctcttactagctaggtgactttgcacaggtcactgactcttccagcctcagtcccccagttgtaaaccgagatgctagtagaacctggctctacttggtattgtttgaactcaatacgatgatgtgtcagggttcctggtaggtgcctgcatggagtgagcactcaccaagacatgcagttattattagtatcattccctacctcaacacctctccctccctctctcctctcttccctcctcaccttagtaattatttccctttatgcaacaggccaaatctatccatttccaagccaccatacttcctkcttcttaggtccataattgctttctctatcccaagcccactgccaggttaactcctgctgatttagggataccaagagagatcagcctttgaagcttttctgaacactcaacgtctgcccccaggcccacgcttggtcaga

SEQ ID NO: 224340 - DNA, 634 bp, Homo sapiens
tgattctggttgcacccaattttccatgccctgatgatggtagcagcctttgtacatgtctgtaaagtctccaggcctggcgtggtagctcacgcctgtaatcccaacactttgggaggtagaggcaggaggactgcttgagcccaggagtttgagaccagcctgggcaacatagtgagactctatctctataaaaaaatattaaaaatctgtgggcatgatggtgcacacctgtagtcccagctactcaggagtctgaggcaggaggattgcttgagcccagaagtttaaggccacagtgagccatgattgcaccactgtaccacaacctgggtaacagagcgagaccctgtctaaaaaaaaaaaaaaaaaaaaaaaaaaaagtctccaactttcaraaatcctgtcatggactagaaagtggctatactgatgtcttctttgagtctcacacccaaggaacttcccaagtgcctttttttaagggtatatgtggccctcaaatggcagaacattaagaatacagaaagtaagaaaatatagttaacatagaagccctgtgaggaatgaatggatgccaaacagccaaatacaaaatctaagaaaacataagtagaacactcaacccatcatt

SEQ ID NO: 224341 - DNA, 634 bp, Homo sapiens
tgattctggttgcacccaattttccatgccctgatgatggtagcagcctttgtacatgtctgtaaagtctccaggcctggcgtggtagctcacgcctgtaatcccaacactttgggaggtagaggcaggaggactgcttgagcccaggagtttgagaccagcctgggcaacatagtgagactctatctctataaaaaaatattaaaaatctgtgggcatgatggtgcacacctgtagtcccagctactcaggagtctgaggcaggaggattgcttgagcccagaagtttaaggccacagtgagccatgattgcaccactgtaccacaacctgggtaacagagcgagaccctgtctaaaaaaaaaaaaaaaaaaaaaaaaaaaagtctccaactttcagaaatcctgtcatggactaraaagtggctatactgatgtcttctttgagtctcacacccaaggaacttcccaagtgcctttttttaagggtatatgtggccctcaaatggcagaacattaagaatacagaaagtaagaaaatatagttaacatagaagccctgtgaggaatgaatggatgccaaacagccaaatacaaaatctaagaaaacataagtagaacactcaacccatcatt

SEQ ID NO: 224342 - DNA, 596 bp, Homo sapiens
  misc_feature (1)...(596): n = A,T,C or G
tgtacaataggtaatttatttgtggttttatttcanaaacttagaatatttgtttgaaatatataattctcatcattggtagtttggcacataaaactcttctaaaaatataggttagacatatacaatgaagactgaggaaggacaggattttagtgaaaagttgcaataatttataaattgtgctaatacaattaaacggagtataaatcttcagaaattttaacttgattttcaaaacactggaagtttaatcaagaatcacgagtacttcttgccctatgtgcactccatctctgttttgccaaaatccrcataatcaaaattttttatgattttccttaagactattttatcgagatcaaaaactaagtaagtacacttgagcttcaagtctaaaacacaaaacttgtgcgctgcatcattttaccttgactcagccaatcagaatccaatgttgcctgggaaaccctctcacgcttattacaataacaattctgttgcttgatttttaaagcaataaatacatactcagaaattatttatatatatatgtatgtgtatatatatatttttttgttttgagacggagtctc

SEQ ID NO: 224343 - DNA, 576 bp, Homo sapiens
aaaattggtccagtgaaaaccccaaaacataattgagaaaaacattttaacaatctaagtagttggagagatataccatgtcaatggattagaaaactcattattgtaattacctaaatttaccccaaatttaccccaatagattaaacacaatcttaataaaaatgttagcaggtttagtttgatgagctgattctgaaatttacagatacatgcaaagggctaaggatagcaacataatcttcaataagaataaaactggaaaacttagaccatcacccagcaaggcttattttaaagctatcctaattaaaacaatgtattattggtgcaaagatascctgaaagtttagtaaaatgggtgagagtccagaaagagacccaacatatgacaaaatgaggctgggtcaacaaatggtgctgagtcaatcagctttatctcttgaaaaaaataaaactaacccctaccttacaccatataaaaaagcaagtctagatggatttctagctgcatgtgaaagataaaacaataatgtttttagaagaaaacatgggagaatatctttgtaacctggt

SEQ ID NO: 224344 - DNA, 560 bp, Homo sapiens
caaatagttctcgaaaacactggaaagctgctgataagatttttcttctttataaaagctcagggatagtccgagcattagaggccactgaatggtacctttaggaatagcagagatgggagggaaacctggttaatgagagactaagccacccctgctgtggctctggggctggcaggttcaggaggaggcagatcacagagataaaaggtgaggcactcagaaccctaggaggaacgctgatttcgttttttaaggctgagaaataagaaagtagcagctaaaggctagcccctaaccagaactctttgtctggcagaagttcatgcatttagactcatcggggtagggactggagctaggctgtcgsgggggggccgtggtgggaaatagaggctttgacaatacatatgaactatcactctgacatccagacctgtgactgctattcccccaaacagcctttgccagaagaggctgtcttaggctgttagggctcctatcataaaatcccatggatagggtagcttggaaacaacagaattgtatttctcacagtt

SEQ ID NO: 224345 - DNA, 578 bp, Homo sapiens
aaaacactggaaagctgctgataagatttttcttctttataaaagctcagggatagtccgagcattagaggccactgaatggtacctttaggaatagcagagatgggagggaaacctggttaatgagagactaagccacccctgctgtggctctggggctggcaggttcaggaggaggcagatcacagagataaaaggtgaggcactcagaaccctaggaggaacgctgatttcgttttttaaggctgagaaataagaaagtagcagctaaaggctagcccctaaccagaactctttgtctggcagaagttcatgcatttagactcatcggggtagggactggagctaggctgtcgggggggggccgtggtgggaaatagaggctttgacaatacatatgaactatcactctgacatccagacctgtgactgctattcccccaaacagcctttgccagaagaggctgtcttaggctgttagggctcctatcataaaatcccatggatagggtagcttggaaacaacagaattgtatttctcacagttccyaaggccgggaagtccaaggtcaaggcac

SEQ ID NO: 224346 - DNA, 555 bp, Homo sapiens
ttgtcttgcattttggatacccagtcacccacagcaagatagggcaccagtcagagtcatgaggccctggttctagtccctagctccctgatgatatttctagacaactctggcccagaaaggctgtgttgaagagaaggacccagtcctagcagcatccatcacctgatgaataaatagtccttaagccctgaataatcaacggtgatactaagatactaaattgcaaactttgagtgagactctgagacttgcaggcttygggtaccaacctggccacagaggtgcaaagttcaggacgagaggggagcccacttccctaatagtgagttataggccaggcagcattaaatacaagctgcctgaggcccttaagccttaatggaccatcagtggtagtcttgtagaacttcccaggggtctgtcatggtggtggccatggagtgagactcttctgcctttggaaagggtaggaagagtgggaaggactgcatcttgtagtttgagtgccatctcagccacagtaccacaaaacaccaggtatacttctaaaga

SEQ ID NO: 224347 - DNA, 520 bp, Homo sapiens
ggattcccctattccagactgattcacccttttcagtgagttagtcgtgacatttcttacactgtgagggggagtggtaattactttacagggaggtatggggccatggtgtttgactcttctttcaaccacttctgggttttttagtgaaaacctctatctaacactgatactttcatttctgttgtctattgagtcagttaacactgatccatttatttttcagttcccaaaatcttgctttgccattgcttctattttattgtctgggggtgtttaacacctgtttcattttttacagtcatttagtttccagattttagtaagggacagaggggaatagatggactcatttcatgatgtagaaacaaatactccctgtcttgtcttacatgaaaaattattcttaaactaggccttrtctttgagaacctgatcaaagtataaaaaatactttttggctttatttctttagtgagtcactattccatattttgaaggtgttaagaggtatggtaaa

SEQ ID NO: 224348 - DNA, 549 bp, Homo sapiens
acagtcaattaggctttatctctggtatgtaagattggtttaatgtacacgartcagtaaacgtgattcatcacataaacggaattaaaaacaaaaactatgtgattatctcaatatatgcagaaaaggcctttgataaaatcctacatcccttcatgttaaaaacccctcaacaaagcaggcttttaagaaacatatgtcaaaatagtaagagctatcttatccaataaacaagaataatttaaaaagaaagagagaaagacaaaggaggaataaagaaaagaataagagtggtcagtgacaaacccacagccacatatactgaatgagcaaaagctagaagtatttcccttaaaaacgggaccaaggcaaggttgccctctcttaccactcctattaaacatggtattggaattcctagacagagcaatcaggcaagagaaagaaataaaactcacccaaattggaagacaggaagtcaatctatcactgcagatgatatgattctaggcctagaaaacccaaagtctgtacccaaaagctccttga

SEQ ID NO: 224349 - DNA, 549 bp, Homo sapiens
acagtcaattaggctttatctctggtatgtaagattggtttaatgtacacgaatcagtaaacgtgattcatcacataaacggaattaaaaacaaaaactatgtgattatctcaatatatgcagaaaaggcctttgataaaatcctacatcccttcatgttaaamacccctcaacaaagcaggcttttaagaaacatatgtcaaaatagtaagagctatcttatccaataaacaagaataatttaaaaagaaagagagaaagacaaaggaggaataaagaaaagaataagagtggtcagtgacaaacccacagccacatatactgaatgagcaaaagctagaagtatttcccttaaaaacgggaccaaggcaaggttgccctctcttaccactcctattaaacatggtattggaattcctagacagagcaatcaggcaagagaaagaaataaaactcacccaaattggaagacaggaagtcaatctatcactgcagatgatatgattctaggcctagaaaacccaaagtctgtacccaaaagctccttga

SEQ ID NO: 224350 - DNA, 549 bp, Homo sapiens
acagtcaattaggctttatctctggtatgtaagattggtttaatgtacacgaatcagtaaacgtgattcatcacataaacggaattaaaaacaaaaactatgtgattatctcaatatatgcagaaaaggcctttgataaaatcctacatcccttcatgttaaaaacccctcaacaaagcaggcttttaagaaacatatgtcaaaatagtaagagctatcttatccaataaacaagaataatttaaaaagaaagagagaaagacaaakgaggaataaagaaaagaataagagtggtcagtgacaaacccacagccacatatactgaatgagcaaaagctagaagtatttcccttaaaaacgggaccaaggcaaggttgccctctcttaccactcctattaaacatggtattggaattcctagacagagcaatcaggcaagagaaagaaataaaactcacccaaattggaagacaggaagtcaatctatcactgcagatgatatgattctaggcctagaaaacccaaagtctgtacccaaaagctccttga

SEQ ID NO: 224351 - DNA, 549 bp, Homo sapiens
acagtcaattaggctttatctctggtatgtaagattggtttaatgtacacgaatcagtaaacgtgattcatcacataaacggaattaaaaacaaaaactatgtgattatctcaatatatgcagaaaaggcctttgataaaatcctacatcccttcatgttaaaaacccctcaacaaagcaggcttttaagaaacatatgtcaaaatagtaagagctatcttatccaataaacaagaataatttaaaaagaaagagagaaagacaaaggaggaataaagaaaagaataagagtggtcagtgacaaacccacagccacatatactgaatgagcaaaagctagaagtatttcccttaaaaacgggaccaaggcaaggttgccctctcttaccactcctattaaacatggtattggaattcctagmcagagcaatcaggcaagagaaagaaataaaactcacccaaattggaagacaggaagtcaatctatcactgcagatgatatgattctaggcctagaaaacccaaagtctgtacccaaaagctccttga

SEQ ID NO: 224352 - DNA, 600 bp, Homo sapiens
atcaatcaacttttctttgcccttaatgtcttccctcacacctccatgatccacctggtccattctaaagcatttgttttctagacctggtatccagcagcctccctgacacttccatcctcctacatgagatctcctgatccctgcagcccatgatttcccctgaattggtttcagacatttggatggaaaatattctctagtatctttctaagaaaataaacacaaagggcaaaaattttttgccaaatgcagatctgaaaatattctttatctacaaatacacaagatgacagctgctcttgagaattctaatgccattctgattcctgatccttcacaggkgacctaatttatctctgaatgtttttatgactttccctttaactctgatgttctaaaattccccatggtctggtgtcttggatgaatattttccatttcattcactttgctggacatttggtaagaattttctatctaaatggtgaaaaatggaggtctttccactggtgctacttgtcctctggagtttacacctggctgctgtattttaggaacaagatagaaaaaggcgctaaaggccttagaattcaagtg

SEQ ID NO: 224353 - DNA, 447 bp, Homo sapiens
gaaaaacaattagttgacaaatggagttgtggagggaaactaggcagggagaattttctgttttctgcctcattctccctctatgttctttgggtcttggttcttttgaatactcagccttatggggactatagcaacagaaattcttatgacccttaggttgcaacttcaatctctctgccaaattggttatcatccttctatctgctctctgtgtctgagaagtttgttaaagacttgatggttatactccaactttaacaggagtaattctcatttgtaatatgtttatcatcacttcagtgtgattctgaccccagaaaaacaagtgtgtggctaatatgytatgcagagccagaatctgctcatagataaatataaaagttgaagaaaaaaaaaagttgcttgtaaaagataaaactattgaccctaagaaaaaatattgac

SEQ ID NO: 224354 - DNA, 518 bp, Homo sapiens
gaattgctttaattcccattttacagataagaacagagggtaaggaaatttgaacaacatgaaatagatcacaaagccattccctgctatttctactcctagcaggaagcctcagaaatagaatcactcttttataactgggaggggtamaaagataccataaaatgtaactcagcattttatggataagtacccatacaccagagtagttaagatacttccgtgagtagttgagataatcacacaattatcctttagacagagttcaggacatgctagctcagcacagccaaaactgtaattttttaatggttcatacaccccaaaatccaatcattttgtcatcttaaccttaattaccttgctgaagcagcaaacacccctatcctattcagaacttcctggtagcatctgttctccaaaacctcctccccttttgccaaataatgtgatgaagaggtctctaggtgtgaattagaggaaaagcctgtgagtaatgccagcttttcaacaaggga

SEQ ID NO: 224355 - DNA, 518 bp, Homo sapiens
gaattgctttaattcccattttacagataagaacagagggtaaggaaatttgaacaacatgaaatagatcacaaagccattccctgctatttctactcctagcaggaagcctcagaaatagaatcactcttttataactgggaggggtacaaagataccataaaatgtaactcagcattttatggataagtacccatacaccagagtagttaagatacttccgtgagtagttgagataatcacacaattatcctttagacagagttcaggacatgctagctcagcacagscaaaactgtaattttttaatggttcatacaccccaaaatccaatcattttgtcatcttaaccttaattaccttgctgaagcagcaaacacccctatcctattcagaacttcctggtagcatctgttctccaaaacctcctccccttttgccaaataatgtgatgaagaggtctctaggtgtgaattagaggaaaagcctgtgagtaatgccagcttttcaacaaggga

SEQ ID NO: 224356 - DNA, 590 bp, Homo sapiens
ttgcctattctctgcccttttcatgatgctcttactccagatatggatttgccaaacctctgcccttttcatgatggaagaggtctgatataatcaaccagtcaccaggtagctggctgatcaccccgaggaatggtgccatatcaagggctcagtgttggtctctggtgctggcaaattgggcactcagctaatctccatccctgccaccatggccactttgtttatgggctcatggggtgatgacaggtgtggctggggaaagaggctgagtggtatccacagaacgggtcaccctatttaattgattattaaactcctcctctgctgatgtcacccattggtgagcgytcacatggaatacaaatatcttcacagtttttcaccactaagagaggcacatccacatacctcttccccaaacttctttgtcaccaatttttcaatcatgcttcctccctgaccacccagccaaaccattggctacagcccgtgaatcagtatataattgcacatctggccatttttccttccaagtaaggtgcacaaccaggtgcactgctcaaacttctacccactgggaagatttc

SEQ ID NO: 224357 - DNA, 426 bp, Homo sapiens
cccctatgtcactcaagtaatgtggactacactcatgtgacaccatgcccatctttatgttgtgtatcttatttttgttttgttttactcttgaatcagctcagtctgaaaatctgtcttttaattcatggggattttttagaatgatttcttggagggttttgtcttttgaatgtgtggtcccttctctgcctagaatttttttktttgaatgagacatggtcttgctgttgtccaggttggagagcagtggtgcaactatagctcactacattcttgaatttctgggctcaagccatcttcccatctcagctttcagaatatcttggctacaggcatgtgacactatgcccagataatttaaaaaaaaaaaaaaaatttcttgagacagggtcttgctatgttgcccaggctcgtcttgaattc

SEQ ID NO: 224358 - DNA, 552 bp, Homo sapiens
ttgtttgtccatttttaaattgggttacttttctacttsttgctggatttcagggttttttttttaatatattgtggatacgaaactcctatcaggtaaatgatttgcaaatattttctccccttttgtagattatcttttcactttcctgatgatgtccattgatgcacaaaactttttaagtttttgaagtacattttatttactttttcttttgttacctgtgcttttggtgttatatttaagaatccattgtcaaacccaaggtgatgaagatttatccctgttttcttctaagacttttatgattttagctcttatatttagtcacagatcaattttaagttagttagtttttgtatatggtgagaagaagggggtccaacttttttcttttgcaagtgaaaatccagtggtatcaaagcaatttgttaaagggactgttctttccctcattgaatggacttgacacttgtgaaaatcaattagccatagatatttagatttatttctggtctctcaattctatttcattggtctatatttctatgc

SEQ ID NO: 224359 - DNA, 552 bp, Homo sapiens
ttgtttgtccatttttaaattgggttacttttctacttgttgctggatttcagggttttttttttaatatattgtggatacgaaactcctatcaggtaaatgatttgcaaatattttctccccttttgtagattatcttttcactttcctgatgatgtccattgatgcacaaaactttttaagtttttgaagtacattttatttactttttcttttgttacctgtgcttttggtgttatatttaagaatccattgtcaaacccaaggtgatgaagatttatccctgttttcttctaagacttttatgattttagctcttatatttagtcacagatcaattttaagttagttagtttttgtatatggtgagaagaagggggtccaacttttttcttttgcawgtgaaaatccagtggtatcaaagcaatttgttaaagggactgttctttccctcattgaatggacttgacacttgtgaaaatcaattagccatagatatttagatttatttctggtctctcaattctatttcattggtctatatttctatgc

SEQ ID NO: 224360 - DNA, 597 bp, Homo sapiens
gtccatttgttccaggatatagtttaatccattgtttctttgttgactttctgtcttgatgacctgtctagtgctgtcagtggagtattgaagtcctccattatttttgtgttgctgtctatcttatttcttaggtctattagtaattgttttagaaatttgggagctccagtgttaggtgcatatatatttaggattgtaatattttcctgttggacaaggccttttatcattttataatgaccctctttgtcttttttaactgctgttgctttaaagttttttttgtctaatgtaagaatagctccctctgctcgttttgggggtttatttgcatgaaatgtctttttccatccatttaccttatttgtgtccttatgtgttaggtgtgtctcttgaaggcagcagatagttcrttggtgaattcttacccattctgccattctatatctttttagtggagcattttggccatttacatccgattttagtattgagatgggaggtaccattccatttattgtgctattttttgcccgtatacttttttattgtatttttgtttcttaggttctgtgagatttatgttttaaagag

SEQ ID NO: 224361 - DNA, 597 bp, Homo sapiens
gtccatttgttccaggatatagtttaatccattgtttctttgttgactttctgtcttgatgacctgtctagtgctgtcagtggagtattgaagtcctccattatttttgtgttgctgtctatcttatttcttaggtctattagtaattgttttagaaatttgggagctccagtgttaggtgcatatatatttaggattgtaatattttcctgttggacaaggccttttatcattttataatgaccctctttgtcttttttaactgctgttgctttaaagttttttttgtctaatgtaagaatagctccctctgctcgttttgggggtttatttgcatgaaatgtctttttccatccatttaccttatttgtgtccttatgtgttaggtgtgtctcttgaaggcagcagatagttcattggtgaattcttacccattctgccattctatatcttttwagtggagcattttggccatttacatccgattttagtattgagatgggaggtaccattccatttattgtgctattttttgcccgtatacttttttattgtatttttgtttcttaggttctgtgagatttatgttttaaagag

SEQ ID NO: 224362 - DNA, 485 bp, Homo sapiens
agagaaatcttcactaatgaaaatgaaaacttacggagcagtaggaaggggataaacctcttgacccagatgctcctatcactagcctttctgcctgtattttcaaaagcagaatttttagtaaaatttattgaaataccatttcctctagaagctagctcaaatgtgactgataataaaagtccagtgtcctytaaacaaaaccagcatatacaaatttgaatttatttttaaaaaataaattaaaagaacagaagtgattatttacatcacagaagaattaattgttcttacaaagtgattcttttgggaatgttaatgacaactgataagtgatttgccttttgctaattttatatagaattttgcataattttcaaattatgactaaattttaagaccatatctgttgtaagaagtaagatgtagttctatatttgagacacttatgagccccactgtggatctgtacgtttccttagggc

SEQ ID NO: 224363 - DNA, 567 bp, Homo sapiens
cttatatatgaaagtgcacatataaattactattatctccaggctttagaagaaaatatttttcaatatttctagatatgaaaaatgcctctaatgccaccataggatgagagtctaggagatggactttaagttgtggctgttacactgacccagatcacatatgtttattaattcaatgaagaagatcaattatactgcagttttcagaagtattaatatatgtttatytttcttaacaaaaactgatgacctaaaaaaagggagggaaggcaaaagagagagagtgatatggttttgctgtgtccccacccaaatctcattttgaattgtaactctcccaattcccctgtgttgtgagaggaacatggaggcgagtgattgaattatggtggcggatctttccttcactgttctcgtgatagtgaatgagtctcatgaaatctgatggtttttaaaagaggagttcccctgcacaaactctttttgcctgctgccattcacataagatgggacttgctcctccttgccttctgccatgattgtgatgtttccccagccctgtgg

SEQ ID NO: 224364 - DNA, 567 bp, Homo sapiens
cttatatatgaaagtgcacatataaattactattatctccaggctttagaagaaaatatttttcaatatttctagatatgaaaaatgcctctaatgccaccataggatgagagtctaggagatggactttaagttgtggctgttacactgacccagatcacatatgtttattaattcaatgaagaagatcaattatactgcagttttcagaagtattaatatatgtttatctttcttaacaaaaactgatgacctaaaaaaagggarggaaggcaaaagagagagagtgatatggttttgctgtgtccccacccaaatctcattttgaattgtaactctcccaattcccctgtgttgtgagaggaacatggaggcgagtgattgaattatggtggcggatctttccttcactgttctcgtgatagtgaatgagtctcatgaaatctgatggtttttaaaagaggagttcccctgcacaaactctttttgcctgctgccattcacataagatgggacttgctcctccttgccttctgccatgattgtgatgtttccccagccctgtgg

SEQ ID NO: 224365 - DNA, 567 bp, Homo sapiens
cttatatatgaaagtgcacatataaattactattatctccaggctttagaagaaaatatttttcaatatttctagatatgaaaaatgcctctaatgccaccataggatgagagtctaggagatggactttaagttgtggctgttacactgacccagatcacatatgtttattaattcaatgaagaagatcaattatactgcagttttcagaagtattaatatatgtttatctttcttaacaaaaactgatgacctaaaaaaagggagggaaggcaaaagagagagagtgatatggttttgctgtgtccccacccaaatctcattttgaattgtaactctcccaattcccctgtgttgtgagaggaacatggaggcgrgtgattgaattatggtggcggatctttccttcactgttctcgtgatagtgaatgagtctcatgaaatctgatggtttttaaaagaggagttcccctgcacaaactctttttgcctgctgccattcacataagatgggacttgctcctccttgccttctgccatgattgtgatgtttccccagccctgtgg

SEQ ID NO: 224366 - DNA, 593 bp, Homo sapiens
aaataaaatggagcttgtaaagttcaattgcctataatctcaccaagacattctaacatgtacttttattgagtctcaatgtgttacagcatgactgcattaagcagcacaccctcaatgaagaaaaaaggaaacctttgaaaaacacatccagaaagatgctttatgtaaatgtaatracaatacaaagtaagttaatgatggaatttggaaaagaatattcattgaaaatagttttttcttaattatgcatttttccatattgtgtacttctgaatattgtattgggccaacattgcacaatatgagttttagtttcaactatgttcttcagtctctacaccacaatagaattatttagaaaaatgagaaaagaattttgctaactgtgattaggtttctgagaaagtgtctgcccagtgtttctcattgtgacattttgtgatatacttctggacaagatggtgaaatacaggctggttaatggttaataccgttaggcagatataactgatgaaatcaccatacatcagatttatatttattacattgttgtctcttttgagaactatttaaaaattgttgcaagtctc

SEQ ID NO: 224367 - DNA, 490 bp, Homo sapiens
cccaatatgcccatataacaaacatgcacatatacccctgaatctaaactaaaagttgaatctatgtttataaacttaaaaaataaagcttacaacttaaaacatacgtaattctttatctagcattatttctgaatttaattcagaagtgataatcttttgttcaygtctatatccaaactaaatgctgaactcttaatgtcacacagatgctccctgacttacaatggggctacattcttgaacattatgtatccttttcttagctacttttaagtttctttatttttgattttcagactgtgatatgccaataaggtctgttgctgttggttgttgaacccatagtaagttgaaaatgcattttatacagtcctactgaacatcatagcttagcctaacttaccttaaatgtactcaaaacatttgcattaaccaaaaattgggcaagttcatccaacacaaagcatattttatagtaaagtgttga

SEQ ID NO: 224368 - DNA, 428 bp, Homo sapiens
gaaactgactcatgggtcaatttcagtccattacctgtttttgcaaataaggcattaaaagaaaaactttagtcacattgaatttaacgagtttatttgagcaaagaatgctttatgaatcaggaagcatcctaaaccagtgggggtcctgagatctgcggccatccatatgagccrggggcttttgtaggctggacacagaggcaaagtagagaaatcacctgattggctacagtcaggcatctgccttatatgggcatggtgtgataaggtggctgtttgtgattggctgaaactcagctgtttgttatgctcctaaattaggcttgtttatacgctaaggtcaaagttcactacctaaggactcaaggtgcccggggagcctcaggccacatttaagttaatttaacaaaagttttattggaaca

SEQ ID NO: 224369 - DNA, 426 bp, Homo sapiens
aactgactcatgggtcaatttcagtccattacctgtttttgcaaataaggcattaaaagaaaaactttagtcacattgaatttaacgagtttatttgagcaaagaatgctttatgaatcaggaagcatcctaaaccagtgggggtcctgagatctgcggccatccatatgagccgggggcttttgtaggctggacacagaggcaaagtagagaaatcacctgattggctacagtcaggcatctgccttatatgggcatggtgtgataaggtggctgtttgtgattggctgaaactcagctgtttgttatgctcctaaattaggcttgtttatacgctaaggtcaaagttcactacctaaggactcaaggtgccckgggagcctcaggccacatttaagttaatttaacaaaagttttattggaaca

SEQ ID NO: 224370 - DNA, 379 bp, Homo sapiens
ggatgtgatggtaccaatcaattctcccaggaacctataaacagagtgtggagttcttaccactccatgttctggccctcatttggtatttctaaacttaagaaattgmatttcaacttattttttactttcctgattaccagttgggtggatcctctttttatatattttttgggaattttagattttctcttctgtgcattgtctgctgatgtccttttcctgtgttcattttctcttttgactttttcttatttgctcatgggagatatttatatattctggatactcaatttttctttgcaatttgtattcttatgtattttctcacagtgtaattttctaatagaggacagacaaacagactatgcagaaagaa

SEQ ID NO: 224371 - DNA, 379 bp, Homo sapiens
ggatgtgatggtaccaatcaattctcccaggaacctataaacagagtgtggagttcttaccactccatgttctggccctcatttggtatttctaaacttaagaaattgcatttcaacttattttttactttcctgattaccagttgggtggatcctctttttatayattttttgggaattttagattttctcttctgtgcattgtctgctgatgtccttttcctgtgttcattttctcttttgactttttcttatttgctcatgggagatatttatatattctggatactcaatttttctttgcaatttgtattcttatgtattttctcacagtgtaattttctaatagaggacagacaaacagactatgcagaaagaa

SEQ ID NO: 224372 - DNA, 434 bp, Homo sapiens
cgcccgcccaccccagtctctacaaaaaatacaaaaaaacaaaaaattggctggcacagctacttgggaggctgaggtgggaggatcacttgagcccaggaggtcaaggctgcagtaagccatgatcgcaccactgcacaccagcctgggcaacaaggcaagactctgactcaaaaaaaaaaaaaaaagtgaagatgatgtgagcccacattgtggcagcatgaagttggttgagagggtgtggcagggatttatctcagttacccagaggagctaggagatggaactgaaactccaatatacagacaagactcttgaagataactcaggagaacagtgaacccaccagcacagrtagagaaagagaaagcctttctgtctctgactgggtgggcatttttaaagttccctctggaaattcaaaactttaggtt

SEQ ID NO: 224373 - DNA, 434 bp, Homo sapiens
cgcccgcccaccccagtctctacaaaaaatacaaaaaaacaaaaaattggctggcacagctacttgggaggctgaggtgggaggatcacttgagcccaggaggtcaaggctgcagtaagccatgatcgcaccactgcacaccagcctgggcaacaaggcaagactctgactcaaaaaaaaaaaaaaaagtgaagatgatgtgagcccacattgtggcagcatgaagttggttgagagggtgtggcagggatttatctcagttacccagaggagctaggagatggaactgaaactccaatatacagacaagactcttgaagataactcaggagaacagtgaacccaccagcacagayagagaaagagaaagcctttctgtctctgactgggtgggcatttttaaagttccctctggaaattcaaaactttaggtt

SEQ ID NO: 224374 - DNA, 428 bp, Homo sapiens
cgcccgcccaccccagtctctacaaaaaatacaaaaaaacaaaaaattggctggcacagctacttgggaggctgaggtgggaggatcacttgagcccaggaggtcaaggctgcagtaagccatgatcgcaccactgcacaccagcctgggcaacaaggcaagactctgactcaaaaaaaaaaaaaaaagtgaagatgatgtgagcccacattgtggcagcatgaagttggttgagagggtgtggcagggatttatctcagttacccagaggagctaggagatggaactgaaactccaatatacagacaagactcttgaagataactcaggagaacagtgaacccaccagcacagatagagaaagagaaagcctttctgtctctgactgrgtgggcatttttaaagttccctctggaaattcaaaactt

SEQ ID NO: 224375 - DNA, 607 bp, Homo sapiens
gattgaagaagaaatggaggcaacaaaagagaaagagtagatttgaagaggagaagaacactgatttgtttttggaaataccgagtttaagataatgtccaagtggaaggaattcacaagttgttgagatactgaactaattatctgagggaaatgtcagggttaaagattgagatttggaattacttgcatagggctaatgactgaatcccaagtgtctgcaatagccctagacagaagtatgtggccatctcatagcaaaggacatcatgaatgtctgtattcaaagtgagggctaggacccagaaagggatcagaagttatcagaagtcggaggggagctggaaagtcaccattttccatgagtcaaggaagaaagtaggatccaggctctgagcattgttaccattccctgccatgtctgccaggtaagcacctttctccactaaggaccaactaaagcatcaccttctgtgatgctctccttgactccctcacakagaccgaatccctgactcccttgggctcctattacacattgtacacacctttattgtggcacttataacattattataatgtttatgtttatattataatgtaatgt

SEQ ID NO: 224376 - DNA, 540 bp, Homo sapiens
ctggtcaaaggatacaggtttcagtttcataggatgaatatgttttagagacctaatgtacagcatgatgactatagttaatactactgaactcttgaaatttgtaaagagagtgggtcttgtgttctcaccacacacacacacacacacacacacacacacacaaaggtccctgtgtgaggtgatggatattttaattagcttgactatagtaattaatcatttcacaatgtatatgtatatcaaacttccaattatattttagtaaagctgttatttaaaaataaaaaagatatttttacacattaaacttctttytccactcagactatttgaaagtattattttgaaaatattaaagaataatcaggccaggtgcggtggctcatgcctgtaatcccagccctttgggaggccaaggtgagaggattgcttgaggccaggagttcaaggccagactgggcaacatagcaagatctcatctctacaaaaaatagaaaaaaatagccaggtgtggtggcacacacttgtagtcccagc

SEQ ID NO: 224377 - DNA, 578 bp, Homo sapiens
gtcccagctcctcaggaggctgaggcaggaggattgtttgagcctgggaggctgaggctgcagtgagctgtaatcatgccactgcactctagcctgggtaacagagtgagaccctgtctcaaaaaaacaaaaaatcactttcagccttttaaataaatatcaaaattcccttaaaaaagttttttcctttaattccatttatgggtttaacttccatgtgaaccaggcttagatgattgttatcaattagcctgaaagaattcctacaattctgactgtgagattgttcccaaggagtggctgatttctgctcttcccatatttcctcaacacctccttgtccctagaatagaaagtatcaattatgccactgttcagtgggcaaaggcccgattgtttttcaggatgatctcaattttggtgactatttgggtctatgatatttcccaacttgtattttgtaggatattaaaattgygcctatgacagcctccatgacgtggagctgctttgattgtgttcatgacatgcgctccaaaggatgatttccatttggttcttcttgcatgagcaatggg

SEQ ID NO: 224378 - DNA, 563 bp, Homo sapiens
aggctgcgagctttccccccgctgctcccaagcatcaccacccagacgtgctgtacatagttagttattttaatctttcctagtaaatcaagtctcccaacctccccatcatttttattactcttctctgaactcccttcagcttttctacatctttatggtattgaagtgcccggaatttaatgtaattttccaggtggggttggagaaaggctattagaaaggcctctcacccctgttctccgctgatgaaaccgttgggaacaaagcccacaactgcattagcccttctgctgctgtatcggcttgactaactcatatctcattttcttttctccatcaccctggcagctcttccacacagccagagcggctgcttgatgcgtagtgctggctttkgtgcttctacagtggttttgctagcttttagctgttagggatcagcagcgagaatctgaggaagaaaaaatcgagaacagagacccagggagcaggtctagctgtataattaattacggtaatagtcgccgcttgtgtccagtgctgcctacttgctaggctat

SEQ ID NO: 224379 - DNA, 433 bp, Homo sapiens
gcctatagttaacaatacggcactgtgcacttaaaaatgtgctaaaatggtggatttcatgttatgcattctactgtcaaaagcaagggaggggcaacgaggaagcttttggaagtggttgataatgtttattaccttgagtccataataacacaaaataataataaaaggattacaggtgtgtgcatattaaaaaactcatcaaattatgtrcattaaacatatgcacaggtttttatgtgcatcaattatacttctataaactattaaataaaatattaggaagctatcaagcaagatcaaataaccttcccaaatcctgtgtatacctctctgatttctcccacattcaggaaaaatatggccctgaggattgacatgcccagggcccttcatttactgcatttttaatgagcttgccaataaatgactt

SEQ ID NO: 224380 - DNA, 468 bp, Homo sapiens
actgtacaacccgaattgctgatttgcatacagctgaagtccctcctcaaaacttctgtaatacatgaaacttaggcaaatggttgggtcattaccatatattactttatatttttatttatcagtatatgtgattacagttatgcttatgttaattgatatgtatatgttaacttttatacatatgtacattgtattattttgttgcatagcacagcattttgtactcaaaaagtgaccaataataataagctrcatactttgggaagcattgcaggctagtcatacagttttttgttttttttttccctgcagcctgacaacctttttagtcattcactaaacctctctcagcttcagtttcttcatctgcaacatatagcaaataataaaacttaactcagatggttctagtgtgaaataatacagagtaaatgtgccaccaaatacaaaccaatggcttgattg

SEQ ID NO: 224381 - DNA, 468 bp, Homo sapiens
actgtacaacccgaattgctgatttgcatacagctgaagtccctcctcaaaacttctgtaatacatgaaacttaggcaaatggttgggtcattaccatatattactttatatttttatttatcagtatatgtgattacagttatgcttatgttaattgatatgtatatgttaacttttatacatatgtacattgtattattttgttgcatagcacagcattttgtactcaaaaagtgaccaataataataagctgcatactttgggaagcattgcaggctagtcrtacagttttttgttttttttttccctgcagcctgacaacctttttagtcattcactaaacctctctcagcttcagtttcttcatctgcaacatatagcaaataataaaacttaactcagatggttctagtgtgaaataatacagagtaaatgtgccaccaaatacaaaccaatggcttgattg

SEQ ID NO: 224382 - DNA, 468 bp, Homo sapiens
actgtacaacccgaattgctgatttgcatacagctgaagtccctcctcaaaacttctgtaatacatgaaacttaggcaaatggttgggtcattaccatatattactttatatttttatttatcagtatatgtgattacagttatgcttatgttaattgatatgtatatgttaacttttatacatatgtacattgtattattttgttgcatagcacagcattttgtactcaaaaagtgaccaataataataagctgcatactttgggaagcattgcaggctagtcatacagttttttgttttttttttccctgcagcctgacaaccttttyagtcattcactaaacctctctcagcttcagtttcttcatctgcaacatatagcaaataataaaacttaactcagatggttctagtgtgaaataatacagagtaaatgtgccaccaaatacaaaccaatggcttgattg

SEQ ID NO: 224383 - DNA, 483 bp, Homo sapiens
atgcattttacaattcagtggtatgtcttagtttaattagccayagtgcgaattacttgcttaacgggacataaaatagtgcattatacaatctatgggctcttggactcaagaaaatacgatagaaaggagtttatgttagagtctgcacactgactaaagatcagagcagaaagcagattctaggaacagtcacatttgtggcagtcactggtctcggcatgcaacaaaattcaaagtaaatagtggtaaggtgggaaatggacaaagctatgtagctagaatcagaagtctttgaaatcaaaacatcaagattcaaactatttaggggcagtggggctgacgtggtgaccgtgggcctgatcagataaaacctttacaaagaaacagtagctctcagactcacctcctgagacagagttgttctgaggggaaaatgggtaagtttctacagtaacatacagtacttaaacatacagtaag

SEQ ID NO: 224384 - DNA, 483 bp, Homo sapiens
atgcattttacaattcagtggtatgtcttagtttaattagccacagtgcgaattacttgcttaacgggacataaaatagtgcattatacaatctatgggctcttggactcaagaaaatacgatagaaaggagtttatgttagagtctgcacactgactaaagatcagagcagaaagcagattctaggaacagtcacatttgtggcagtcactggtctcggcatgcaacaaaattcaaagtaaatagtggtaaggtgggaaatggacaaagctatgtagctagaatcagaagtctttgaaatcaaaacatcaagattcaaactatttargggcagtggggctgacgtggtgaccgtgggcctgatcagataaaacctttacaaagaaacagtagctctcagactcacctcctgagacagagttgttctgaggggaaaatgggtaagtttctacagtaacatacagtacttaaacatacagtaag

SEQ ID NO: 224385 - DNA, 483 bp, Homo sapiens
atgcattttacaattcagtggtatgtcttagtttaattagccacagtgcgaattacttgcttaacgggacataaaatagtgcattatacaatctatgggctcttggactcaagaaaatacgatagaaaggagtttatgttagagtctgcacactgactaaagatcagagcagaaagcagattctaggaacagtcacatttgtggcagtcactggtctcggcatgcaacaaaattcaaagtaaatagtggtaaggtgggaaatggacaaagctatgtagctagaatcagaagtctttgaaatcaaaacatcaagattcaaactatttaggggcagtggggctgacgtggtgaccgtgggcctgatcagataaaacctttacaaagaaacagtagctctcagactcacctcctgagacagagttgttmtgaggggaaaatgggtaagtttctacagtaacatacagtacttaaacatacagtaag

SEQ ID NO: 224386 - DNA, 553 bp, Homo sapiens
tacacttatttaactaaatgctgtaaggactcaggaaatccattctttcaacaaaagttactgaagactttccccattagtatyctaaacaatgtctgcaaaattggttttcatacctggataccttgtcttctaagagacacggcagggaaagatcataggaaaaaagtcaatatcaggcacagctaacaactagcaaacccatagtctttaaaagactgatcctttgattcctatctctcaagtaaagaggtttaggtcatcttcatattacaggaaagtatccctaccaaaaacttctaactaatgactcttaggattcttccaaaagcaaatagtctttgggagaagacagcttccatcaaatgcctttggatcaagtgaatcactatatgagatatcggtatctgcaaaccaagatccacataaaaagatccattgtttgtcatatttaatctgcatatcttgagttttcattttcctagttaactttatctttttatgcttaaggttacatttaattactttacctataaagctactattcctaatt

SEQ ID NO: 224387 - DNA, 551 bp, Homo sapiens
aggaaatccattctttcaacaaaagttactgaagactttccccattagtatcctaaacaatgtctgcaaaattggttttcatacctggataccttgtcttctaagagacacggcagggaaagatcataggaaaaaagtcamtatcaggcacagctaacaactagcaaacccatagtctttaaaagactgatcctttgattcctatctctcaagtaaagaggtttaggtcatcttcatattacaggaaagtatccctaccaaaaacttctaactaatgactcttaggattcttccaaaagcaaatagtctttgggagaagacagcttccatcaaatgcctttggatcaagtgaatcactatatgagatatcggtatctgcaaaccaagatccacataaaaagatccattgtttgtcatatttaatctgcatatcttgagttttcattttcctagttaactttatctttttatgcttaaggttacatttaattactttacctataaagctactattcctaattcctctatgccgtccttagtcactctctaga

SEQ ID NO: 224388 - DNA, 527 bp, Homo sapiens
gctgtaaggactcaggaaatccattctttcaacaaaagttactgaagactttccccattagtatcctaaacaatgtctgcaaaattggttttcatacctggataccttgtcttctaagagacacggcagggaaagatcataggaaaaaagtcaatatcaggcacagctaacaactagcaaacccatagtctttaaaagactgatcctttgattcctatctctcaagtaaagaggtttaggtcatcttcatattacaggaaagtatccctaccaaaaacttctaactaatgactcttaggattcttccaaaagcaaatagtctttgggagaagacagcttccatcaaatgcctttggatcaagtgaatcactatatgagatatcggtatctgcaaaccaagatccacawaaaaagatccattgtttgtcatatttaatctgcatatcttgagttttcattttcctagttaactttatctttttatgcttaaggttacatttaattactttacctataaagctactatt

SEQ ID NO: 224389 - DNA, 400 bp, Homo sapiens
tatccactttctttccactctaaagacaggatatttctttttctttttttttttttttttttgcctgtgtttatctatttcttggattatggaacagaacaaacaygaacacattaccttttgcctttcctcatttcccacactctttcctagaggtaatattaagcttccaattaattttagatggtagtttcaataattttttttcactgggtattacaagtcttcatttcaaccctctgagtttggtttacttgtccatttaatactaatttagtggatatgttttaggtgctgttatagcagacccaactcaagctggtgatttctatattacttggaatagtgctagttgctttgacaactacactcaacaacatataatatcttaaacagaaca

SEQ ID NO: 224390 - DNA, 400 bp, Homo sapiens
tatccactttctttccactctaaagacaggatatttctttttctttttttttttttttttttgcctgtgtttatctatttcttggattatggaacagaacaaacacgaacacattaccttttgcctttcctcatttcccacactctttcctagaggtaatattaagcttccaattaattttagatggtagtttcaataattttttttcactgggtattacaagtcttcatttcaaccctctgagtttggtttrcttgtccatttaatactaatttagtggatatgttttaggtgctgttatagcagacccaactcaagctggtgatttctatattacttggaatagtgctagttgctttgacaactacactcaacaacatataatatcttaaacagaaca

SEQ ID NO: 224391 - DNA, 631 bp, Homo sapiens
ctgctaccacaaaaacccacttaagtacatagctcacaggcactataaagtatctacacaatcaagtctacctaaaaaccagctacaaacgtgatgataggatcaaaatctcatgtatcaacattaaccataaatgtaaataggctaaacaccccacttaaatgacrtacaatggcaaactggataaaaatgcaaggctcaccatctgtagtcttcaagagactcatctcatatgtaatgacagccactggcccaaaataaggggacggagaaaatctgccatgcaaatgataacaaaaaagcaggagtaactattcttatatcagataaaacagactttaatcaaaattaaaaagaacaattgaagaatgaagagcattacgtcatgagaaagtatatgatcaaacaagaatacttaagtaccctaaatataaatgcacccaacatggagcacccagattcataaaacaagttctttttggactacaaaaagacagacgaccacccaataattgtaggagacttcaacacccccgctggcagcattggatcatcaaagcagataactaagaaagaaactgtgtacttaaacttcacacttgaccatttggacctaataagacatctacag

SEQ ID NO: 224392 - DNA, 631 bp, Homo sapiens
ctgctaccacaaaaacccacttaagtacatagctcacaggcactataaagtatctacacaatcaagtctacctaaaaaccagctacaaacgtgatgataggatcaaaatctcatgtatcaacattaaccataaatgtaaataggctaaacaccccacttaaatgacgtacaatggcaaactggataaaaatgcaaggctcaccatctgtagtcttcaagagactcatctcatatgtaatgacagccactggcccaaaataaggggayggagaaaatctgccatgcaaatgataacaaaaaagcaggagtaactattcttatatcagataaaacagactttaatcaaaattaaaaagaacaattgaagaatgaagagcattacgtcatgagaaagtatatgatcaaacaagaatacttaagtaccctaaatataaatgcacccaacatggagcacccagattcataaaacaagttctttttggactacaaaaagacagacgaccacccaataattgtaggagacttcaacacccccgctggcagcattggatcatcaaagcagataactaagaaagaaactgtgtacttaaacttcacacttgaccatttggacctaataagacatctacag

SEQ ID NO: 224393 - DNA, 631 bp, Homo sapiens
ctgctaccacaaaaacccacttaagtacatagctcacaggcactataaagtatctacacaatcaagtctacctaaaaaccagctacaaacgtgatgataggatcaaaatctcatgtatcaacattaaccataaatgtaaataggctaaacaccccacttaaatgacgtacaatggcaaactggataaaaatgcaaggctcaccatctgtagtcttcaagagactcatctcatatgtaatgacagccactggcccaaaataaggggacggagaaaatctgccatgcaaatgataacaaaaaagcaggagtaactattcttatatcagataaaacagactttaatcaaaattaaaaagaacaattgaagaatgaagagcattacgtcatgagaaagtatatgatcaaacaagaatacttaagtaccctaaatataaatgcacccaacatggagcacccagattcataaaacaagttctttttggactacaaaaagacagacgaccacccaataaytgtaggagacttcaacacccccgctggcagcattggatcatcaaagcagataactaagaaagaaactgtgtacttaaacttcacacttgaccatttggacctaataagacatctacag

SEQ ID NO: 224394 - DNA, 631 bp, Homo sapiens
ctgctaccacaaaaacccacttaagtacatagctcacaggcactataaagtatctacacaatcaagtctacctaaaaaccagctacaaacgtgatgataggatcaaaatctcatgtatcaacattaaccataaatgtaaataggctaaacaccccacttaaatgacgtacaatggcaaactggataaaaatgcaaggctcaccatctgtagtcttcaagagactcatctcatatgtaatgacagccactggcccaaaataaggggacggagaaaatctgccatgcaaatgataacaaaaaagcaggagtaactattcttatatcagataaaacagactttaatcaaaattaaaaagaacaattgaagaatgaagagcattacgtcatgagaaagtatatgatcaaacaagaatacttaagtaccctaaatataaatgcacccaacatggagcacccagattcataaaacaagttctttttggactacaaaaagacagacgaccacccaataattgtaggagacttcaacacccccgctggcagcaytggatcatcaaagcagataactaagaaagaaactgtgtacttaaacttcacacttgaccatttggacctaataagacatctacag

SEQ ID NO: 224395 - DNA, 585 bp, Homo sapiens
aaaatgggaacacaaattaccaaaatctctgggatgcagctaaatcagtgttaagaggaacgtttaaatgcctttatcataaagttagaaatayttcaaattaacaatctaacactacacctaaaggaactagggaaaaaaaaaaagaacaaccctacatcaacgctaggaatgaaaagaaacaactaaaatagagaagatctgaatgaaattgagatgcaaaaatcctacaaaagattaatgaaacccagagttgatttaaaaaaagagattgatagacctttagctagataaacaaagaaaaaaaagagaagatctaaatatataaatcagaatgacaaaaacgacattaaaaatggtcccacagacatacaaaataatcctcagagaatactaggaataactctagacacaaaaattagaaaatctagaggaaatggataaatttctgaaaacaggcaatcttccaagattgaatcaggaagatactgaaatactgaagagaccaatatgaagctctgaaattgaataagtaataaaaaatctaccaagccaaaaagccctggactatatggattcacagca

SEQ ID NO: 224396 - DNA, 585 bp, Homo sapiens
aaaatgggaacacaaattaccaaaatctctgggatgcagctaaatcagtgttaagaggaacgtttaaatgcctttatcataaagttagaaatatttcaaattaacaatctaacactacacctaaaggaactagggaaaaaaaaaaagaacaaccctacatcaacgctaggaatgaaaagaaacaactaaaatagagaagatctgaatgaaattgagatgcaaaaatcctacaaaagattaatgaaaccmagagttgatttaaaaaaagagattgatagacctttagctagataaacaaagaaaaaaaagagaagatctaaatatataaatcagaatgacaaaaacgacattaaaaatggtcccacagacatacaaaataatcctcagagaatactaggaataactctagacacaaaaattagaaaatctagaggaaatggataaatttctgaaaacaggcaatcttccaagattgaatcaggaagatactgaaatactgaagagaccaatatgaagctctgaaattgaataagtaataaaaaatctaccaagccaaaaagccctggactatatggattcacagca

SEQ ID NO: 224397 - DNA, 449 bp, Homo sapiens
aaaaccacagtaagatgccatctcacatcagtcacaatagctataattaaaaagtaaaaaaattagatgttggccaggctgcagagtaaagggaatgcttatacactactgttggtggaaatgtaaactggttcaggtactgtggaaagtattttggagatttctctaagaacttaaaacagagatacccttcsacccagcattcccattactgggtatatattcaaaggaaaataaattattctaccagaaaaatatatatgcactcgtatgttcatcagcatgttattcacaatagcacagacacggaatgaacctaggtgcccatcaacggtggactggataaagaaaatgtggtacatatacactatggaatactatgcctccataaaaaagaatgaaattatgtcctttgcagcaacatggatggagctaaggacataatccta

SEQ ID NO: 224398 - DNA, 449 bp, Homo sapiens
aaaaccacagtaagatgccatctcacatcagtcacaatagctataattaaaaagtaaaaaaattagatgttggccaggctgcagagtaaagggaatgcttatacactactgttggtggaaatgtaaactggttcaggtactgtggaaagtattttggagatttctctaagaacttaaaacagagatacccttcgacccagcattcccattactgggtatatattcaaaggaaaataaattattctaccagaaaaatatatatgcactcgtatgttcatcagcatgttattcacaatagcasagacacggaatgaacctaggtgcccatcaacggtggactggataaagaaaatgtggtacatatacactatggaatactatgcctccataaaaaagaatgaaattatgtcctttgcagcaacatggatggagctaaggacataatccta

SEQ ID NO: 224399 - DNA, 449 bp, Homo sapiens
aaaaccacagtaagatgccatctcacatcagtcacaatagctataattaaaaagtaaaaaaattagatgttggccaggctgcagagtaaagggaatgcttatacactactgttggtggaaatgtaaactggttcaggtactgtggaaagtattttggagatttctctaagaacttaaaacagagatacccttcgacccagcattcccattactgggtatatattcaaaggaaaataaattattctaccagaaaaatatatatgcactcgtatgttcatcagcatgttattcacaatagcacagacayggaatgaacctaggtgcccatcaacggtggactggataaagaaaatgtggtacatatacactatggaatactatgcctccataaaaaagaatgaaattatgtcctttgcagcaacatggatggagctaaggacataatccta

SEQ ID NO: 224400 - DNA, 449 bp, Homo sapiens
aaaaccacagtaagatgccatctcacatcagtcacaatagctataattaaaaagtaaaaaaattagatgttggccaggctgcagagtaaagggaatgcttatacactactgttggtggaaatgtaaactggttcaggtactgtggaaagtattttggagatttctctaagaacttaaaacagagatacccttcgacccagcattcccattactgggtatatattcaaaggaaaataaattattctaccagaaaaatatatatgcactcgtatgttcatcagcatgttattcacaatagcacagacacggaatgaacctaggtgcccatcaacggtggaytggataaagaaaatgtggtacatatacactatggaatactatgcctccataaaaaagaatgaaattatgtcctttgcagcaacatggatggagctaaggacataatccta

SEQ ID NO: 224401 - DNA, 583 bp, Homo sapiens
acttgaaagagaaaaattaaaattctagagtttcataattacaaattgggatataaaaatagaataattatttgaattttgtatttctctccaggggatcaaaagtaatatataaacttttaataaatattgatatagcttcacgttgactccatatgtgagcaatttgctttctgttaaattcacaattgcataatttttttcaggctggaatgcacttggatgccagagattttgatttcttmatgtgaaataaggtgataatacattccaaagtatatattttttcaactttgaatatatctggtgtatttggagtaatatctgagtaaatacacttatatgtaagagaatcaaaggaacaagatattattttatatccaaggaaattaaaacacttagaacataaatacgtattgcattacttcatattaaagaaatgttttacaaaagaaaataaaagagcttattttatagccccatttccacaaataatagcaaaggtacatatatctgatgttttacacactcattattgtttctcttaaaatttgttgcttatactattttaaaaagcaagcct

SEQ ID NO: 224402 - DNA, 583 bp, Homo sapiens
acttgaaagagaaaaattaaaattctagagtttcataattacaaattgggatataaaaatagaataattatttgaattttgtatttctctccaggggatcaaaagtaatatataaacttttaataaatattgatatagcttcacgttgactccatatgtgagcaatttgctttctgttaaattcacaattgcataatttttttcaggctggaatgcacttggatgccagagattttgatttcttaatgtgamataaggtgataatacattccaaagtatatattttttcaactttgaatatatctggtgtatttggagtaatatctgagtaaatacacttatatgtaagagaatcaaaggaacaagatattattttatatccaaggaaattaaaacacttagaacataaatacgtattgcattacttcatattaaagaaatgttttacaaaagaaaataaaagagcttattttatagccccatttccacaaataatagcaaaggtacatatatctgatgttttacacactcattattgtttctcttaaaatttgttgcttatactattttaaaaagcaagcct

SEQ ID NO: 224403 - DNA, 583 bp, Homo sapiens
acttgaaagagaaaaattaaaattctagagtttcataattacaaattgggatataaaaatagaataattatttgaattttgtatttctctccaggggatcaaaagtaatatataaacttttaataaatattgatatagcttcacgttgactccatatgtgagcaatttgctttctgttaaattcacaattgcataatttttttcaggctggaatgcacttggatgccagagattttgatttcttaatgtgaaataagrtgataatacattccaaagtatatattttttcaactttgaatatatctggtgtatttggagtaatatctgagtaaatacacttatatgtaagagaatcaaaggaacaagatattattttatatccaaggaaattaaaacacttagaacataaatacgtattgcattacttcatattaaagaaatgttttacaaaagaaaataaaagagcttattttatagccccatttccacaaataatagcaaaggtacatatatctgatgttttacacactcattattgtttctcttaaaatttgttgcttatactattttaaaaagcaagcct

SEQ ID NO: 224404 - DNA, 583 bp, Homo sapiens
acttgaaagagaaaaattaaaattctagagtttcataattacaaattgggatataaaaatagaataattatttgaattttgtatttctctccaggggatcaaaagtaatatataaacttttaataaatattgatatagcttcacgttgactccatatgtgagcaatttgctttctgttaaattcacaattgcataatttttttcaggctggaatgcacttggatgccagagattttgatttcttaatgtgaaataaggtgataatacattccaaagtatatattttttcaactttgaatatatctggtgtatttggagtaatatctgagtaaatacacttatatgtaagagaatcaaaggaacaagatattattttatatccaaggaaattaaaacacttagaacataaatacgtattgcattacttcatattaaagaaatgttttacaaaagaaaataaargagcttattttatagccccatttccacaaataatagcaaaggtacatatatctgatgttttacacactcattattgtttctcttaaaatttgttgcttatactattttaaaaagcaagcct

SEQ ID NO: 224405 - DNA, 485 bp, Homo sapiens
tttgaacttgagagagagaagttagggcatctggcagaagaaatttgtaagcagaaaggcattcaagatttgacctggtggtttctttttcttttcctytttttttttttttttgagacggagtctcgctctgtcacccagactggagtgcagtggtgtgattttggctcactgcaacctctagctcccaggttcaagcgattctcctgcctcagcctctcaagtagctgggattacaggcatgcaccaccacgccctgacctggcagtttctaaaagtgtacagtcacatgcattcacaaagagatggtttgaaattggaatttatgtttaaaaggaaagaagacattaaaagtttggaaaatttgcaacttgaccatgtggttaaaaaaataaaaacccattttctggggagaaattcaggctggctgcataaatttgcataaatcaagaggatcctgatgttaatctccaagaaaatgagga

SEQ ID NO: 224406 - DNA, 485 bp, Homo sapiens
tttgaacttgagagagagaagttagggcatctggcagaagaaatttgtaagcagaaaggcattcaagatttgacctggtggtttctttttcttttccttyttttttttttttttgagacggagtctcgctctgtcacccagactggagtgcagtggtgtgattttggctcactgcaacctctagctcccaggttcaagcgattctcctgcctcagcctctcaagtagctgggattacaggcatgcaccaccacgccctgacctggcagtttctaaaagtgtacagtcacatgcattcacaaagagatggtttgaaattggaatttatgtttaaaaggaaagaagacattaaaagtttggaaaatttgcaacttgaccatgtggttaaaaaaataaaaacccattttctggggagaaattcaggctggctgcataaatttgcataaatcaagaggatcctgatgttaatctccaagaaaatgagga

SEQ ID NO: 224407 - DNA, 607 bp, Homo sapiens
agagatctgtggaactttgaacttgagagagatgatttaaggtatctgacagaagaaatttctaagcagcaaagcattcgagaagaagcagagcataaaagttcagaaaatttgtagcctgatgatgcaacagaaaagaaaaatctattttctcaggagactgggttgtagaaatttgcataagtaatgaggagccaaatgttaatcaccaagacaatggggcaaatgtctccagggcatgttagagaccctcacagcagaccctcccatcacaggccaggaggcttagaaggaaaaatgctcttgtgagtccagaaccccctgctgtgtgcagcctaggaacctggtgccctgcatcccagytgctcctgccacaggtaaaaggggccaaggtacacctcaggccatggcttcagagggtgcaagttccaagcctttcaggttctaggtggtgttaagcctgcagatgcaccgaagaattaacgttcatgaacctccgcctagatttcagaagatgtatgaaaatgcctggaaatccaggcaagtttgctgtgcacgggagcggggggccctcatggataacctctgctagggcagtgtcaaaggg

SEQ ID NO: 224408 - DNA, 297 bp, Homo sapiens
gatgttcccctgcacatgctctctcctgcccaccatgtctgactaaattttgtatttttactagagacggggtttcactatgttggccaggctggyctccaactcctgatctcgtgatccgtccaccccgacctcccaaagtgctaggattataggcataagccaccacacccggcctcttttttttctttttctttttttttatctggagactgagttttgcactcgttgcccaggctggagtgcaatggtgcgatctcagctcactgcagtctccacctcagcaggagagcagga

SEQ ID NO: 224409 - DNA, 297 bp, Homo sapiens
gatgttcccctgcacatgctctctcctgcccaccatgtctgactaaattttgtatttttactagagacggggtttcactatgttggccaggctggcctccaactcctgatctcgtgatccgtccaccccgacctcccaaagtgctaggattataggcataagccaccacacccggcctcttttttttctttttctttttttttatctggagactgagttttgcactygttgcccaggctggagtgcaatggtgcgatctcagctcactgcagtctccacctcagcaggagagcagga

SEQ ID NO: 224410 - DNA, 532 bp, Homo sapiens
acccttgcccattcccattacagctggcagaaattccccagctgcaaatgggttgcatttatctgttacccattcctgatttgcagcacgattgactgtttccttttctgcgtggtctatgtgtcactccatgagaatctgggagaggagaactcgatatggtgctcattccatcattttaaccatagtgttctttattgtgaagaggtatcccggttagagtggagtcaaagctttatagcaagtgtatttcaggtaactattcttttacttgtttcagatctatttcagtagcacagccaccaagatagaacacttataagcccttattttggtatagatcaccagagaaaccactcaccactcgcacwtggccttcagtactgagtcattacatattggaaggtcagaaactacatcaacaggaaagacccataggtgtgggggtctgatatatttgccagtacatttcttatcattacaaacaaagatttatgtgtgtctagatgtttaccttgccttctaagaggtc

SEQ ID NO: 224411 - DNA, 596 bp, Homo sapiens
gtctctttttctgaagcatttttctgtcaactggaaatcaaacttaccaatgcttacattatacttttctgagtgatgaatacaatgctttggatgcatagttcaagtaaggtcgataagcaatttatcttttgaaattatttctaatgagagagcattggcaatttttttcaactgttgtgatttttatgcactaattaaaatcattataatacttatatatactagacacagcagaaatagcaaattttcattgtttaaaaagacatcagagaataacaatcttcttttcctttttttcttcccttcctcttttgtttttaccttttgaaatactaaaggcaacaaaatagcaagtaatgagcaccagcattgaaactacaagtcctaggttagggtatggggtctagcaaatacttaatttccttcagtaattcacgtcatctctctgaatctgttttaycatctctaaaatgggtaaaacactatctgcactatcatacctacaatttcataaaaatcatcacagataatatgtctacaaagatattgtagtatatataaaccaaatgtggccaggcacagtggcccatgcc

SEQ ID NO: 224412 - DNA, 635 bp, Homo sapiens
tgcctaagattcaaagttagaaggactcatcagaatggactgagatggtctcgtgcaagttcccctagcaagaaagcaagcaaagtcccccagaagcactcaccagaagggaaaggaagtttgggatggtactggagctcaacacaaggtatgaaaattrggaagcagcatgaagctaaagtaggaagccccttgccaaagcccttgcctaagcccttgccaaagcacaggcatgagattggactagataagagatcactgcacagtgaataagcatccaccagtctgcatagaccaggtctccagcagcaagagtgttgtgggcaataactacagcagtagagctgatggactgatttctccttctagttccttgtctcctctgggatgttgaagcacagctagtcttttttgcctggggtccttggacaattgaggatacagaaggagagaacataagaggaggaattggtgggtgtttgaagtagtaattgaaaaaattagacatgtgaacatgcttgtgtcccaagctggaaaaacaggtcaataaatacacatactatcagagtcacagtaaatgcatgtactgtcagagtcacagatttgtttacaaccagagaaaatacagaaaaatg

SEQ ID NO: 224413 - DNA, 635 bp, Homo sapiens
tgcctaagattcaaagttagaaggactcatcagaatggactgagatggtctcgtgcaagttcccctagcaagaaagcaagcaaagtcccccagaagcactcaccagaagggaaaggaagtttgggatggtactggagctcaacacaaggtatgaaaattgggaagcagcatgaagctaaagtaggaagccccttgccaaagcccttgcctaagcccttgccaaagcacaggcatgagattggactagataagagatcactgcacagtgaataagcatccaccagtctgcatagaccaggtctccagcagcaagagtgttgtgggcaataactacagcagtagagctgatggactgatttctccttctagttccttgtctcctctgggatgttgaagcacagctagtcttttttgcctggggtccttggacaattgaggatacagaaggagagaacataagaggaggaattggtgggtgtttgaagtagtaattgaaaaaattagacatgtgaacatgcttgtgtcccaagctggaaaaacaggtcaataaatacacatactatcagagtcacagtaaatrcatgtactgtcagagtcacagatttgtttacaaccagagaaaatacagaaaaatg

SEQ ID NO: 224414 - DNA, 614 bp, Homo sapiens
gctaaacaaaatccaagataacatggagaaggaattcagaatcctatcagataaatttaatgaagagattgaaataattaaaaagaatcaagcagaaattctggagctgaaaaaygcaattgacatgttgaagaatgcatcagagaatctcaccagcagaactgatcaagcaagagaaataattagtaagcttgaagacaggctatttgaaaacacaaagtcagaggagacaaatggaaaaagaataaaatgcaatgaagcacacctacaagaactagaaaatagcttcaaaatgggaaatctaaaagttattggccttaaataggaggtagagaaagagataggtgtaaaaagtttattcaaagagatagtaacagagaacttcccaaacctagagaaagatatcaatattcaagtacaagaaagttataagcaccaagcaattttaacacaaagaagactacttcaagacatttaataatcaaactcccaaagatcaaggataaagaaaggaccctaaaagcagcaagataaaaaataataataataacatataaaggagctttacatgttaataataacatataaaggaacttcagtacatctggcagcaa

SEQ ID NO: 224415 - DNA, 622 bp, Homo sapiens
ttttttttgcagtaattttactttttctctccttctctttccccttcttattctgtcaatgctgaagtccctagagatttttagataacatgcctgatcacaatacaatcttcttagatgaataaacaaattatattactcttatagtgtctccaaaccctcaaactttgcagtaaattgaggaatacaraactctaatttaatgaccatactgttgttattgaatgctaaatagagagtgtcctcaaattattgcaatatttaaatagtttctggttttatcaaaatagaagtggaaatgtgctgtgttggttgttgtcatggggtttcctcaacagaaaatttaggaataacaatgtctatctagtttctgacatattccatgagtgtgatttttcctttaatcctctcaattctaccgtgcagatgaggaaactgaagtttagccaagaccacacacatcgagaaagcagaactaacagtatttgaactttgttctatttagctcaaaaactagattcttttttttctacataagaagtaattaaagatgaagataattctattgaacataaatttatcaatttcaatatttaaaaagtatgggagtttaacaaaatat

SEQ ID NO: 224416 - DNA, 493 bp, Homo sapiens
agaactacttatttagagtggcagagcatgctatagaaacaaaatatgagtaattctaactgtagttatgttatattagcrtagtgagatagtaacattaatagaattccttagtggaatttcttaatgcttcagttcaatctaaattagtattaatactttaaggcaggaaatctgtccgaaagcatttgtaaatttaaaaagcattgaaatgagaagcagaaacaaaaaatattcatttctatgtattgctctatctatattatataactgatttactaccattaaattataaaatattacatgttcagtgtattgtccttctgcagttactgatttataactttaatagtaacagatgtagctttattactaggaagcttattgagatcatgggacatttagacccattgttttgattaaactttgaggacatttttgtactatctttataaatatggatatttaaatcagaattacagtaacattgatt

SEQ ID NO: 224417 - DNA, 398 bp, Homo sapiens
ttctattttttcatttgtttctaaataatttacagttactcattacaccattttgaggatggctgctttaaaatctttgtcaataagttcttcttctgtttcatctctgggttagtgtcagttgtcatttcacagtcaagttgtgattttcctgayttttggtttgttgggtaatttttcattctatcctggaatttggctatgctgttaggagactcagagtctgatttaaatcttttgttttagtaggcagtcatcccatttaggtttagcaagaaaatcctggcctaattttgtgggccgtgcatccaatgacaattgcattttcagagactttgtggtgctattttggtcttcttggtttatctggggctgctagggttcctcctggcgtctgc

SEQ ID NO: 224418 - DNA, 398 bp, Homo sapiens
ttctattttttcatttgtttctaaataatttacagttactcattacaccattttgaggatggctgctttaaaatctttgtcaataagttcttcttctgtttcatctctgggttagtgtcagttgtcatttcacagtcaagttgtgattttcctgacttttggtttgttgggtaatttttcattctatcctggaatttggctatgctgttaggagactcagagtctgatttaaatcttttgttttagtaggcagtcatcccatttargtttagcaagaaaatcctggcctaattttgtgggccgtgcatccaatgacaattgcattttcagagactttgtggtgctattttggtcttcttggtttatctggggctgctagggttcctcctggcgtctgc

SEQ ID NO: 224419 - DNA, 398 bp, Homo sapiens
ttctattttttcatttgtttctaaataatttacagttactcattacaccattttgaggatggctgctttaaaatctttgtcaataagttcttcttctgtttcatctctgggttagtgtcagttgtcatttcacagtcaagttgtgattttcctgacttttggtttgttgggtaatttttcattctatcctggaatttggctatgctgttaggagactcagagtctgatttaaatcttttgttttagtaggcagtcatcccatttaggtttagcaagaaaatcctggcctaattttgtgggccgtgcatccaatgacaattrcattttcagagactttgtggtgctattttggtcttcttggtttatctggggctgctagggttcctcctggcgtctgc

SEQ ID NO: 224420 - DNA, 489 bp, Homo sapiens
ttgctcttgttgctccggctggagtgcaatggtgcaatcttggctcactgcaacctctacctctcaggttcaagcaattctcctgccgtagactccggagtggctgagattacaggcacccgccatcacacccgactaatttttgtggttttagtagagacagggtaataccatgttggtcaggctggtcttgaactcctgacctcaggcaatccacccgcctcagcctcccaaagtgctggrattacaggcatgagccaccacgcccagcctaattttgtatttttagtagagatggggttttatcatattggtcaggctggtctcgaactcctcacctcaggtgatccatccgcctcagcctcccaaagtgttgggattataggcatgatccaccacgcccggcctggtaagtcagtcttaaccttagttacttcaccctaagacagagctgggtagaaatcagaagacaagaattaggaaaaaggg

SEQ ID NO: 224421 - DNA, 489 bp, Homo sapiens
ttgctcttgttgctccggctggagtgcaatggtgcaatcttggctcactgcaacctctacctctcaggttcaagcaattctcctgccgtagactccggagtggctgagattacaggcacccgccatcacacccgactaatttttgtggttttagtagagacagggtaataccatgttggtcaggctggtcttgaactcctgacctcaggcaatccacccgcctcagcctcccaaagtgctggaattacaggcatgagccaccacgcccagcctaattttgtatttttagtagagatggggttttatcatrttggtcaggctggtctcgaactcctcacctcaggtgatccatccgcctcagcctcccaaagtgttgggattataggcatgatccaccacgcccggcctggtaagtcagtcttaaccttagttacttcaccctaagacagagctgggtagaaatcagaagacaagaattaggaaaaaggg

SEQ ID NO: 224422 - DNA, 489 bp, Homo sapiens
ttgctcttgttgctccggctggagtgcaatggtgcaatcttggctcactgcaacctctacctctcaggttcaagcaattctcctgccgtagactccggagtggctgagattacaggcacccgccatcacacccgactaatttttgtggttttagtagagacagggtaataccatgttggtcaggctggtcttgaactcctgacctcaggcaatccacccgcctcagcctcccaaagtgctggaattacaggcatgagccaccacgcccagcctaattttgtatttttagtagagatggggttttatcatattggtcaggctggtctcgaacycctcacctcaggtgatccatccgcctcagcctcccaaagtgttgggattataggcatgatccaccacgcccggcctggtaagtcagtcttaaccttagttacttcaccctaagacagagctgggtagaaatcagaagacaagaattaggaaaaaggg

SEQ ID NO: 224423 - DNA, 515 bp, Homo sapiens
gtaattgtgagaccagatggtaagcattattcagctgatgaggttggrtagatttgagggaaggtgtggtaatatgatctcgatctgcagctgtgacctgttgttccaaaacagcctcattcctccctgccttttgcgtctgcattccagcacctctccctccatctttgtgggcattggggttctcacagattgctttgacagatgcatcagggaggaataaagcttgttcaaggaagaacaacccacggatctgttttgaatatcctccaccccatgttacttgtaatattggcaaatcaggggacaatataaccacttttgttcagcgtgctgtgagacagtttcccatgacacaaattgccatgagcctatttagatgtaattaaggcatttccattagatgtcttgcaggtacctcaaactaaacacatactgaacccagctcatcagctgtcttcttctccttacctcccttacaaaacaccagtaaacattttctcctgtgtttcctc

SEQ ID NO: 224424 - DNA, 516 bp, Homo sapiens
tgtaattgtgagaccagatggtaagcattattcagctgatgaggttggatagatttgagggaaggtgtggtaatatgatctcgatctgcagctgtgacctgttgttccaaaacagcctcattcctccctgccttttgcgtctgcattccagcacctctccctccatctttgtgggcattggggttctcacagattgctttgacagatgcatcagggaggaataaagcttgttcaaggaagaacaacccacggatctgttttgaatatcctccaccccatgttacttgtaatattggcaaatcaggggacaatataaccacttttgttcagcrtgctgtgagacagtttcccatgacacaaattgccatgagcctatttagatgtaattaaggcatttccattagatgtcttgcaggtacctcaaactaaacacatactgaacccagctcatcagctgtcttcttctccttacctcccttacaaaacaccagtaaacattttctcctgtgtttcctc

SEQ ID NO: 224425 - DNA, 406 bp, Homo sapiens
cagcgccatttaaatctgaagatgcaaatgcccttctgggrttgctcctacttccgctctgcctgattacacatatgtagcctgcctgattacacatatggggcccattaggtgaggtgtaatgggacacagtggtgcccaccgctgttggctcatgttctttcagtagaagatccccagcagagtctggagtaacacagtggtaggatttaatgctattttacaacctccattttcctgggatccaaatgatgagtgatttcagaaactaaatgaaatagaattaagcatctcatctatattttcattcctcttacagttatagtaaaattgtaatgattcagaataattgggggaagaaagagaacaaagttgatctaaattagtagaacatctgaaatagtaa

SEQ ID NO: 224426 - DNA, 423 bp, Homo sapiens
gaattcaactctgccatgaaccccatcatttactcctaccgcgacaaagaaatgagcgccacctttaggcagatcctctgctgccagcgcagtgagaaccccaccggccccacagaaggctcagaccgctcggcttcctccctcaaccacaccatcttggctggagttcacagcaatgaccactctgtggtttagaacggaaactgagatgaggaaccagccgtcctctcttgkaggataaacagcctccccctacccaattgccagggcaaggtggggtgtgagagaggagaaaagtcaactcatgtacttaaacactaaccaatgacagtatttgttcctggaccccacaagacttgatatatattgaaaattagcttatgtgacaaccctcatcttgatccccatcccttctgaaagtag

SEQ ID NO: 224427 - DNA, 568 bp, Homo sapiens
tatagcatagtggctaagaacaaaggcctctggaggcatccagatttagagtaagatcccagctccgtcattcctagctgtattgcccagagaagtttcttgacctctttgaacctcagtttcctcatttgtaaaatacaggcagtcccatctcgtaaggttattgccagggactacatgagaagtatattcaatgaggttattagcacagtgccaattatatgacagacctcagtagatactggctattgcatgctacatgtgtgtatacatgcatttaaatgtatatagtagtattatataattgatatcatactcaagkttcccttatcctttaaatttaacatctaacattttaaccataaggttatatcactgtatacttacctgtttgtttgattttagtcattcatgttattaccatgattttcatattgataatttgataacttatattgacagaagtgagaagtaagacactcagaagtaagcaagagaggaaaagaaggcacactcgttcaatttttcttctttctcagggtagtcagtgtttcgtttttgatgataa

SEQ ID NO: 224428 - DNA, 551 bp, Homo sapiens
tcaagaaaacatgatctaaaaatgaagctaagtttgtgactgtaaaacattttgttcagatttggaaaaggtctaagttgatgcctccaagaatcattcaaacagtagggcttctaagaaactaaaagattctgtttctcagcagcttcagcaaaagccaaagataaaaaggtcttatttcaaagggatctgttatttagtggttgacacttttgtttaatggagtaaacctcaataaaactcatagaaaacccacaatgttttaaggtaaatatattatcgaatcattgtcaggtttaactgaagtagacacagcaaaatgcaaagmacgtttgaatgcccagacttctacagtctgaaagcaggctaagaaaacaacttagtagcaaacacaagctaactttcatagagaagatagaaaaactaaaatgacaaaacaagaactcagaatgtggcactaataaccatggaaaatcattaccaagttttaagttataatcaaggaactgccaatagctctcttgttggatagcataatggattccctacgt

SEQ ID NO: 224429 - DNA, 570 bp, Homo sapiens
attgattctaaacatcaaaaaacaaaaataaaatatctgcaattatgtgatcatgtatttatgcattgccaaataatggtattccattattttaatttgataagataaatttaatatacattaattcttatttcctctattttatggaagaaatatttttaaaaatcacaaaacttttacattcgcttctcttcctgatatttatttttcctttttcttctgcctctcttctttcgtgcccttttttccgaaaattattttgatgattttttttattcaccatacataattacaaatgaagagttgctctggttmgtattggtagtagaagtggggtccctttgctgttttgttggtatattcacccagtgtgacctcttttccgtgggatggctacctctgggctctgattatgtggctcatagggaagtataggcagcctgagtcagaatccccacagttccaaagtgatggaagactgtactctgagatacaatattttgacgtatttcactcccagggagagctacttgctattctttcactgcttccattacccaaaagagtatg

SEQ ID NO: 224430 - DNA, 550 bp, Homo sapiens
aacaaaataggaatgtgggccctggacactataaacctcttggattgcttatgtgatcgctgctacataagagggaagtaaactcctggctggtttgagtctttgatacaatatcagtatcataacacatgcagatttcaactctagaagtggaactgtaggaacagaatcttgatggcatgccctgggaaggtgcactgtaggctctgagaatgcagacacagcaggctggaatctgcaggcctgcagcaaatcatctggtaaatctatctcctgagatattttggcaggtttcccacatgctgacacagccctccctctcaattcctttatcttgaataacttcaaggtaactgccaataggctgaagtagagtgggactggcaaaacacagagatcattaataaaactccagaattggaaaactctgtttagattagtactttccaactctgtccacatcatgcycctataacatactataacctttgtgtcaccataggcatgcatgaatgaggctactcatggccagtggtgaccagcctgcatg

SEQ ID NO: 224431 - DNA, 619 bp, Homo sapiens
aagatatttttaaagagctggtgttatagttacagaaatatttcttgcactaaatagtattttgttatgcaagcctgatttgtagatttagcaattggttttaacacatttagtagggagggcctgggttactctgtgctaaccagttcccacgagtttgaagactgaggaagtcagaaggatctggctctagctggaagggatattacttctgttcaggctgccagtggaagactgggtcccctggggttggctgtggcaggtggagactgatctaccgcctgcattgaaagactcagcattcttatacttgggaatccttttttctacagaagttgctaagagcatttttgaaattgtatcctaaaactgaattggagttttgaaacattaatggaagaatcataatctcaaactttcaagtgttatgagaagttgggaactttgacttrctctttggagcaaatagtccttttttataaaacccattgctatagacttttggtagtgaaaaggaaaaaaaaaagcaaggagtctaagtaatgttattaaaatatcaaatttatattccttgtggtgaagtctaatctctagatatgacttcctttagaattttttt

SEQ ID NO: 224432 - DNA, 529 bp, Homo sapiens
aggccaaatctagcccattttctgtttttctatggcctgtgagctaagaatagtttctccattttaaatgtaaaattgcaaaatattaagggattttatgtctggagtcatggcaygagaatctctatggatctgttcctcagcaaaacaactataactggtgaaaaacattaacaccaaaatcaaacaaaaacatttaaagctgctggaaagtgtcttaattgtatacaccaaaatgaaggaacatttaacgaagaacatttactaaatcttggtaaaaatgagtcagagtttgtggaacttgagcacatgccaccacccccggctaatttttgtattttcagtagagacggagtttcaccatcttggccaggctggtctcgaactcctgacctcaagtgatctgcctgccgtggcctcccaaagtgctaggattacaggtgtgagccaccatgcccagccacagaggctaaattcttgtcaaatgtggcaaagaggtcaaggctctctttttccagataacccctac

SEQ ID NO: 224433 - DNA, 541 bp, Homo sapiens
gtttctagttttctaccatgtgaatattagcaaatggtaaaatcagcatgctcagatggtttttttcctttaatctgtcaatgtggtgaagtaaataaattttataacattaaaccaaacatatatttcttatgtaaaaccagctcagtccttatttattatcacttgttgatgtttctggattttatttattagtattttgattgcatctacattcatagatatgattggcctatgattttatttcttgtattgtccttgtatctgggtattatattacagttatatcaacttcataaaatgagttagagaattccctatattttctgttctctggaagcatttatgaatatttggaattacaatgtttgttagaacttgccagtataacttgctaggaagcctttaaawttttgattctgttcttttaatgatcagaacatatttgcattttatatttaattttgatactttcttgaagatatattttcccaaaatttgttcattaggccaaaattttaaaactttatttatataaaat

SEQ ID NO: 224434 - DNA, 572 bp, Homo sapiens
cttaacagactatctttagtattagaatacactcagtttcttggatttccctgcaagcacccacttgtccacacatgccaatctcctgataactggatagtagctcagtctctaatattccaactgcccctttccagatctttgcttccccagctcctcccacatttgtacaaggtmaagatatacatgcactgtgtctagtttggggtgcgtgtgtgtgtgtgtatgtgtgtgtgtgtgtatgtatgtagtgcctggcatagaggagatccccaataaatgtttgttaaatgaatgaatgtgaatgtacttactgatttaattcccttatgtgatattttctgtttcattttatttttagaactcactacataatatactgcatgctacataatatgctgcatgaccttctggcaggagtagataaccataactgacttattcctctgtaagactgttggacctctaagatgagagactgcaagcgcacagggaggcgaggctatgtgtttgaggccaacctggtcaacactgaccaaaaaaaaaaaaaaaaaaatgagccaaaattgcac

SEQ ID NO: 224435 - DNA, 580 bp, Homo sapiens
caagcttattaaccaaaggagttccaagaatattcaaccaaatggctgcttatggccctaaagacatttgtcagcagggtgcaatggctcacacctgtaaccccaactctttgggaggacgaaggaggaggatcacttgagcccaagagttgaagtttatagtgagctataattgtgccactgcctgggtgacagagagagaccttatctcttaggaaaaaaaaaagacagttttcaccctttctcctgagatcaaactattaaataaatgctaagtcttaaacataatgtgattagcyggtcacggtggctcatgcctgtaatgccagcactttgggaggctgaggcaggcagatcacctgaggtcaggagttcaagaccagcctcaccaatatgatgaaaccccgtctctactaaaaatacaaaaattagctgggtatggtagcatgcgcctgtaatcccagctactcgagaggctgagacaggagaatcgcttgaacatgggaggtggaggttgcagtgagccgagagagtgaaactctgtctcaaaaaaaaaaaaaaagtgattaatttacaactt

SEQ ID NO: 224436 - DNA, 482 bp, Homo sapiens
ccttgtaacttctaaaatttaacagactgggctcttgtcatcaggccagcagaaagaactgtagaaatgtaaggatttccattgtcaatttgatgtatatagacctctcttcatttttgttgcttgtgaattttgtccctggagatttgctgacttgacatgagataattatgatatttacataaccctgtttttatcatgcagttcaagttttataattgcccttttaaatattatgcctactgaatctgtttctttctgacagagcgtaccaagtgttytaatgtaaatttgttaattacttcttatgttccttcagatttaatgcattaaatttcttggctgtattgtacttccaaaaaaaaaaaaaagaaagaaaagaaaaaaaggaagacaggacatcagtacagatcccatggacattgaaacaataataaaggaatattatgaacaactctatgcccacaaatttaataacctag

SEQ ID NO: 224437 - DNA, 590 bp, Homo sapiens
cacattgggaaggaagaaatacaactgtctttgtgcacatgacttagacattattgtctacatagacattctgaaataattgatttttaaaactccttcaactaataaacaattatagcaagattgcaagatacaargctaacatacaaaagccaatcacttttctatataccagcaataaacaagtagaatttgaagttaaaaatataatatcttttgtattagcaccacctccaaaatgaaatactttatgtataaacctaacaaaatttatacaagatctacatgaggaaaactacaaaactctggtgaaagaaatcaaagaactaaataaatgtagagatattccatgtttacggacagggagtctcaatattgtaagacgtcagttctttccaatttaatctatagattcagcacaattccagtcaacatcttgtgaggttattttatagataccaacaaactgattctaaacttcctttggagggacaagagaactagaatagccaacacattattgaaaaaaaagaacaaagtttgacgattgacactacccaacttcaagacttactataaagctacggtaa

SEQ ID NO: 224438 - DNA, 597 bp, Homo sapiens
aacaaggtcccataggaagaaggcaagatcagaagcaattctttatctaatattaactccccaaatcctcagtgaatgcctgtgtgccaggctcggcttggcactggggaatcaatggtgaacttgattcccaaaggggccctgacctcaggaagcgtcgaggctagcagtggggcgacaggtgagaaacaagggaagagacaaacataggccatggtatgtgtggtgaaggaaacaaaccaagtgctggataaaacattatcttccataaatggtgacactaaaactgaaacctgaagtttgggaaacagccttatagagactggaggggagaggtcaaggtggggagtcacggggagaaggggacaaggtgctgcaagaggaaagcagaatccgccgggatgtcttaaaaatactcctgggaggatgagggataaaaaactacatattgggtacaatggacactactcagatgatgggtgcactaaaatttcagacttcactatacarttcatccacgttaccaaaaaccacttgtaaccctgaaactattgaaataaaaataaataaataaaattaaataaacaaaaaatactg

SEQ ID NO: 224439 - DNA, 534 bp, Homo sapiens
  misc_feature (1)...(534): n = A,T,C or G
gcatgcttactttagcttatgtaaaatgtagatttcctgagcgctaatcagagcctcacaagaatgtaacactgggcctcatgctnngctgtctcttttttttccttccccttcctgctgcttttttctcctttacatattaatgtttccaaaaccatctttggaaaaggtgcaagtcacaggtcctaccatgattttgtttcttcttcctgggtgcattctcaaccttggcaaaatgaacctctaattaattgagatctgcttcagtcactttttggtttgcaccgattaaagcagagtgcctggtggaggcacctgggcatggttatgcttttgagcttcccagtgcaatctgggaagagaactaccattttagggcaagcatttcttgaagaccgcagtaaggagtttgctttttagtgaggatgtaattggaagtatctgggaggtttcaagcagaaaaatgacatcctcaccttcactggtttaaactatcaaaagaactcrttggtggaaagaaaccagctttatgaa

SEQ ID NO: 224440 - DNA, 617 bp, Homo sapiens
tggttatgcatttgagtttcatccaaataattgttcaccaagccattgttactgaataaaaatgcattggcccayacacataggttaacaatcttaattaatgatcttgtggcccactaccaaaaggcttgaatgcccctgctgactttaagtgcttagaaaatagatagctgatggctgtacaaccatgtaaatgtgcttaacaccactgaactgtggacttaaaaacggctaaaatggtaaatgttatgtcatgtatattttaccacaaaaaaaaaaaatgttcaggccaagaacaatagttcatatctgaatcccagcactttgggaggtcggggccggaggactgcttgaggtcaggagctcgagaccagcctgggcaatagagtgacaccttgtctctaacttagaaaaataaacaaagtttttaaaaatagcacagtgcagtggtatgagtacaagcttttgggtcaagcagagaggtactcaaattatgactgggctacttatcggctctgtgacctcaagcaagttgctgaatctctctgaatccatttctttatctgcagaatgggagtaataatgcctaccagtctaattaggtgggtagccagaag

SEQ ID NO: 224441 - DNA, 617 bp, Homo sapiens
tggttatgcatttgagtttcatccaaataattgttcaccaagccattgttactgaataaaaatgcattggcccacacacataggttaacaatcttaattaatgatcttgtggcccactaccaaaaggcttgaatgcccctgctgactttaagtgcttagaaaatagatagctgatggctgtacaaccatgtaaatgtgcttaacaccactgaactgtggacttaaaaacggctaaaatggtaaatgttaygtcatgtatattttaccacaaaaaaaaaaaatgttcaggccaagaacaatagttcatatctgaatcccagcactttgggaggtcggggccggaggactgcttgaggtcaggagctcgagaccagcctgggcaatagagtgacaccttgtctctaacttagaaaaataaacaaagtttttaaaaatagcacagtgcagtggtatgagtacaagcttttgggtcaagcagagaggtactcaaattatgactgggctacttatcggctctgtgacctcaagcaagttgctgaatctctctgaatccatttctttatctgcagaatgggagtaataatgcctaccagtctaattaggtgggtagccagaag

SEQ ID NO: 224442 - DNA, 366 bp, Homo sapiens
tttttattttttaggagagacagcaagaatgctttgatctgcttataattattatttactggtctattatgtattaaatgggactctgtgctkgactggaccatgagtgattatccttatctgtatgacataagtgtccacaaagtttcaagttaccagcttcgttggtagtcactgatatggttgtgtgtctgggtattttgttcttttagcataggctgcacccctcttccctattagtcattaaggtctttgacatcagatactccgccttttgtaaaataagattaaaaagtacagaggtctatacatagtgtggcaggaaattctcactggagtttactgcttggggcagagataagattg

SEQ ID NO: 224443 - DNA, 366 bp, Homo sapiens
tttttattttttaggagagacagcaagaatgctttgatctgcttataattattatttactggtctattatgtattaaatgggactctgtgctggaytggaccatgagtgattatccttatctgtatgacataagtgtccacaaagtttcaagttaccagcttcgttggtagtcactgatatggttgtgtgtctgggtattttgttcttttagcataggctgcacccctcttccctattagtcattaaggtctttgacatcagatactccgccttttgtaaaataagattaaaaagtacagaggtctatacatagtgtggcaggaaattctcactggagtttactgcttggggcagagataagattg

SEQ ID NO: 224444 - DNA, 366 bp, Homo sapiens
tttttattttttaggagagacagcaagaatgctttgatctgcttataattattatttactggtctattatgtattaaatgggactctgtgctggactggaccatgagtgattatccttatctgtatgacataagtgtccacaaagtttcaagttaccagcttcgttggtagtcactgatatggttgtgtgtctgggtattttgttcttttagcataggctgcacccctcttccctattagtcattaaggtctttgacatcagatactcygccttttgtaaaataagattaaaaagtacagaggtctatacatagtgtggcaggaaattctcactggagtttactgcttggggcagagataagattg

SEQ ID NO: 224445 - DNA, 557 bp, Homo sapiens
gcttataattattatttactggtctattatgtattaaatgggactctgtgctggactggaccatgagtgattatccttatctgtatgacataagtgtccacaaagtttcaagttaccagcttcgttggtagtcactgatatggttgtgtgtctgggtattttgttcttttagcataggctgcacccctcttccctattagtcattaaggtctttgacatcagatactccgccttttgtaaaataagattaaaaagtacagaggtctatacatagtgtggcaggaaattctcactggagtttactgcttggggcagagataagattgaggccatttagctacaaatagaatgcactgcaygccccattcccttcactgaggctctggtagaggcaaagaagtcccagctgtcaattctgaaattcccaggtgcaccaatccagattactttaactattattaattactggcacctcacaactcattgccccacaccagtgcatcttaatagcatggctgagaaccatggatttaacgtatgtgttgaaggtcgaccaa

SEQ ID NO: 224446 - DNA, 587 bp, Homo sapiens
atttctgggccaccagaactatagctgttcagcaatctttttatctatccctaattgccatgatggccattactaatctttacttcttccttacatccctttttaatctcatctctcctcattcccaacgaatcaactggctttaccaccatgtcttcccaattacaggttctaaagtatgaaactgactgacttccaactatcatgaaacttaccaaattaaggcccatctctaccgcgtttcttattctgcaaacagaagagctgtgccttccactttctgaggtcaacctcttcacttgggttctgaaacccatccttctgcttccttttatttagacattgaacaaatgcttactaattatctgctgtgtgttagatattgtaataggcagacaatacarcagttcaccagggcttatagtctagtggaggaagacagaaaaggcactgactagtaaataaatatgtgatacatcaggtgatgataaatgcaagaaggagagtaaaaccatgtaaggagtgagagagtgactggggctgctgttttctatggtgtggtcagatccctaaatgaactgagtgac

SEQ ID NO: 224447 - DNA, 603 bp, Homo sapiens
gtatttatctctgatgggcaaagctccaccttcaagcccttaagtgaccttgtagactctactatagtgacatcctgttgatgacaagaagtcaggggatctgagttctggccccacattttgccttccaaggccagatgctgttggccaggtcacctctcttgagactcagggattcagtatctaccctcctgttcacagaacacagacaggatcatggggatgaatgaccatgtacacttgagttgtgaaatcctctgcagacccaagaatggcwgttcatacagggctacccatagtctcatctagagcatctcaggccaacccagttgccctcatgctcaggagctccctccctttttaggccctgtctgttctgctcatggccaacttaaattcctctggctcttgggttgggggtggggagtagatgaccacccttgcccttaatctggagtgggctaagcctagtccctcccactattcatgtgatgtaggaattagcccttggctaagaacagactccatgccattccaggactcgctgccttagaatgagcaaagagtgggagggcaggaagagaaaggaaatgtttaccatct

SEQ ID NO: 224448 - DNA, 603 bp, Homo sapiens
gtatttatctctgatgggcaaagctccaccttcaagcccttaagtgaccttgtagactctactatagtgacatcctgttgatgacaagaagtcaggggatctgagttctggccccacattttgccttccaaggccagatgctgttggccaggtcacctctcttgagactcagggattcagtatctaccctcctgttcacagaacacagacaggatcatggggatgaatgaccatgtacacttgagttgtgaaatcctctgcagacccaagaatggcagttcatacagggctacccatagtctcatctagagcatctcaggccaacccagttgccctcatgctcaggagctccctccctttttaggccctgtctgttctgctcatggccaacttaaattcctctggctcttgggttgggggtggggagtagatgaccacccttgcccttaatctggagtgggctaagcctagtccctcccactattcatgtgatgtaggaattagyccttggctaagaacagactccatgccattccaggactcgctgccttagaatgagcaaagagtgggagggcaggaagagaaaggaaatgtttaccatct

SEQ ID NO: 224449 - DNA, 603 bp, Homo sapiens
gtatttatctctgatgggcaaagctccaccttcaagcccttaagtgaccttgtagactctactatagtgacatcctgttgatgacaagaagtcaggggatctgagttctggccccacattttgccttccaaggccagatgctgttggccaggtcacctctcttgagactcagggattcagtatctaccctcctgttcacagaacacagacaggatcatggggatgaatgaccatgtacacttgagttgtgaaatcctctgcagacccaagaatggcagttcatacagggctacccatagtctcatctagagcatctcaggccaacccagttgccctcatgctcaggagctccctccctttttaggccctgtctgttctgctcatggccaacttaaattcctctggctcttgggttgggggtggggagtagatgaccacccttgcccttaatctggagtgggctaagcctagtccctcccactattcatgtgatgtaggaattagcccttggctaagaacagactccatgccattccaggactcgctgccttagaatgagcaragagtgggagggcaggaagagaaaggaaatgtttaccatct

SEQ ID NO: 224450 - DNA, 228 bp, Homo sapiens
aatatttagaaatcaagtaatatacatccaaatattccatgagtcgaagtttcaatagaaacttgaaaatattataaattgaatgataatgaaaatatgacatacaaaatatatgaatgatgctaaaacagtgcatagaggaaaatttttgtccttaaatgtatrtattaaaaaaggacttagagcacattatctaaacttttatctcaaagagttaaaaaggaacaa

SEQ ID NO: 224451 - DNA, 570 bp, Homo sapiens
tataatgtcctccagctttattcatgttactrtaaatgacaacatctccttcttgttaaaggctgaatagtactccattgtgtatatataccacatttctttatccattcatctgttgattgacatgtatgctgcttctatatcttagccactgtgaataatgctgcagtgaacatgagagtgcagatagctttttgacatactgatttcagttcctttggctatgtaccctgaagtgggattgctagatcatgtggtaattctgttttcaatttttgaatgataaattttaatgaccatgactgaattggccaatttagacaaacacaagagtttctggttgaatgtatctaaacaaactctaagaataactagaacttgctagtttcttcatttctgatatttcagtattcccaatatttcagcttttgtgtttcaagttggttataaggtttgggtctaatcacctttggtggttttaagaactctctttaagactctcaaattattatgttggagtttaacagcaaatacatctgcatccacgttggatgtctgctgaattttgtc

SEQ ID NO: 224452 - DNA, 570 bp, Homo sapiens
tataatgtcctccagctttattcatgttactgtaaatgacarcatctccttcttgttaaaggctgaatagtactccattgtgtatatataccacatttctttatccattcatctgttgattgacatgtatgctgcttctatatcttagccactgtgaataatgctgcagtgaacatgagagtgcagatagctttttgacatactgatttcagttcctttggctatgtaccctgaagtgggattgctagatcatgtggtaattctgttttcaatttttgaatgataaattttaatgaccatgactgaattggccaatttagacaaacacaagagtttctggttgaatgtatctaaacaaactctaagaataactagaacttgctagtttcttcatttctgatatttcagtattcccaatatttcagcttttgtgtttcaagttggttataaggtttgggtctaatcacctttggtggttttaagaactctctttaagactctcaaattattatgttggagtttaacagcaaatacatctgcatccacgttggatgtctgctgaattttgtc

SEQ ID NO: 224453 - DNA, 606 bp, Homo sapiens
ggtgggattgagatcagtgaagaacagcctgtgttatttaatggcaatttggaacaacaaaaatagataacaaactgttagcataaatagcaaaattgaaaacagtattatggttgtgttagcttttgtgctaagcatttaacrtgtaataaatgctgactttgtcctagattttttggcatagtagtgatgcaattttgactgtattatttctcatacatcaaggggaaatattcattctatgagaattattctgatagtaaggagcgtgagtttattcttttgcccatcttcttgttaacagtgacagcttatccagaggcagtcaagaaactttactgatagtgtagaaaggcatggtcagataaatggatggatggaaaaggtaatcagaaagaaaactttgtctacaaaagggaagtttgtccccatacagaaaactctatcctgcatcttggcttggacaaaaggtttctttcaagatgcacattcataaatagaataatagttaaagaacttagcttattaactgtttacataaaatattaaataaagctgttggtatgctttggctgagaatgacccccaagatttggaaatatcatt

SEQ ID NO: 224454 - DNA, 606 bp, Homo sapiens
ggtgggattgagatcagtgaagaacagcctgtgttatttaatggcaatttggaacaacaaaaatagataacaaactgttagcataaatagcaaaattgaaaacagtattatggttgtgttagcttttgtgctaagcatttaacgtgtaataaatgctgactttstcctagattttttggcatagtagtgatgcaattttgactgtattatttctcatacatcaaggggaaatattcattctatgagaattattctgatagtaaggagcgtgagtttattcttttgcccatcttcttgttaacagtgacagcttatccagaggcagtcaagaaactttactgatagtgtagaaaggcatggtcagataaatggatggatggaaaaggtaatcagaaagaaaactttgtctacaaaagggaagtttgtccccatacagaaaactctatcctgcatcttggcttggacaaaaggtttctttcaagatgcacattcataaatagaataatagttaaagaacttagcttattaactgtttacataaaatattaaataaagctgttggtatgctttggctgagaatgacccccaagatttggaaatatcatt

SEQ ID NO: 224455 - DNA, 606 bp, Homo sapiens
ggtgggattgagatcagtgaagaacagcctgtgttatttaatggcaatttggaacaacaaaaatagataacaaactgttagcataaatagcaaaattgaaaacagtattatggttgtgttagcttttgtgctaagcatttaacgtgtaataaatgctgactttgtcctagattttttggcatagtagtgatgcaattttgactgtattatttctcatacatcaaggggaaatattcattctatgagaattattctgatagtaaggagcgtgagtttattcttttgcccatcttcttgttaacagtgacagcttatccagaggcagtcaagaaactttactgatagtgtagraaggcatggtcagataaatggatggatggaaaaggtaatcagaaagaaaactttgtctacaaaagggaagtttgtccccatacagaaaactctatcctgcatcttggcttggacaaaaggtttctttcaagatgcacattcataaatagaataatagttaaagaacttagcttattaactgtttacataaaatattaaataaagctgttggtatgctttggctgagaatgacccccaagatttggaaatatcatt

SEQ ID NO: 224456 - DNA, 415 bp, Homo sapiens
aattctccagccttggccccccagagtgctgggattacaggtgtgagcccttgcgcccagcctgtacagtatgttttgttatggaactggaattatctcccatagagaagttgtcacttacagagagagtccaagggagcacgtgtatagaagctggcacttggagaggatagatgcccctttatcaactaagatggaccctaagtttatggaaacaaagttacctattgctcaagggcacggggcctggctggcatggcaaatttctaaattcctacagctctaaactccctaacaacaggagctttcagatccctcctaactctgatttacaatygagaccactacagttctgattggacgaagaacaggccttacaaatattttctgataagctactgcagaccttaagcca

SEQ ID NO: 224457 - DNA, 503 bp, Homo sapiens
tgactgcaaggaattttttaaaaactgtgaattcggtcaggtgcagtggctcatgcctgtaatcctakcactttgggaggccgaggtgggtagactgactgagctcaggagtttcagaccagcctgggcaacatggtgaaaccccgtctctactaaaatacaaaaaattagctgttcatggaggcgtgtacttgtaaatcccagccactcgggaggctgagacaggagaatcacttaaaccttggaggcagaggttgcagtgagctgagatcgtgccactgcactccagcctgggcgacagagcaagactccatctcaaataaataaataaataaataaataaataaataaataaataaataaaagcacggaattcataacacaaataggattagtattgtcaacgtatctctgactatggagcagctagagcctagatacttctactcaattacaccagggtgctgctgtctctcacctttggcaggagattagagagttgt

SEQ ID NO: 224458 - DNA, 503 bp, Homo sapiens
tgactgcaaggaattttttaaaaactgtgaattcggtcaggtgcagtggctcatgcctgtaatcctagcactttgggaggccgaggtgggtagactgactgagctcaggagtttcagaccagcctgggcaacatggtgaaaccccgtctctactaaaatacaaaaaattagctgttcatggaggcgtgtacytgtaaatcccagccactcgggaggctgagacaggagaatcacttaaaccttggaggcagaggttgcagtgagctgagatcgtgccactgcactccagcctgggcgacagagcaagactccatctcaaataaataaataaataaataaataaataaataaataaataaataaaagcacggaattcataacacaaataggattagtattgtcaacgtatctctgactatggagcagctagagcctagatacttctactcaattacaccagggtgctgctgtctctcacctttggcaggagattagagagttgt

SEQ ID NO: 224459 - DNA, 503 bp, Homo sapiens
tgactgcaaggaattttttaaaaactgtgaattcggtcaggtgcagtggctcatgcctgtaatcctagcactttgggaggccgaggtgggtagactgactgagctcaggagtttcagaccagcctgggcaacatggtgaaaccccgtctctactaaaatacaaaaaattagctgttcatggaggcgtgtacttgtaaatcccagccactcgggaggctgagacaggagaatcacttaaaccttggaggcagaggttgcagtgagctgagatygtgccactgcactccagcctgggcgacagagcaagactccatctcaaataaataaataaataaataaataaataaataaataaataaataaaagcacggaattcataacacaaataggattagtattgtcaacgtatctctgactatggagcagctagagcctagatacttctactcaattacaccagggtgctgctgtctctcacctttggcaggagattagagagttgt

SEQ ID NO: 224460 - DNA, 503 bp, Homo sapiens
tgactgcaaggaattttttaaaaactgtgaattcggtcaggtgcagtggctcatgcctgtaatcctagcactttgggaggccgaggtgggtagactgactgagctcaggagtttcagaccagcctgggcaacatggtgaaaccccgtctctactaaaatacaaaaaattagctgttcatggaggcgtgtacttgtaaatcccagccactcgggaggctgagacaggagaatcacttaaaccttggaggcagaggttgcagtgagctgagatcgtgccactgcactccagcctgggcgacagagcaagactccatctcaaataaataaataaataaataaataaataaataaataaataaataaaagcacggaattcataacacaaataggattagtattgtcaacgtatctctgactatggagcagctagagcctagatacttctacycaattacaccagggtgctgctgtctctcacctttggcaggagattagagagttgt

SEQ ID NO: 224461 - DNA, 485 bp, Homo sapiens
aaaagttattaccaggaaaggtaatggctggtagtgcagaatgctaattttctaatacagagttctgccaacatagttgtgtttgttgtatcatttgtccttgttctgtttgagcttcacagggtgaacaaaagtttacctggaaagatgcttttgacaaattcactgcattcagaagatttggcagctgtcaaaagttattcctgggctttcaaacatcttgctatatttttgacaagaaaatgttcactaagccacttaaatcatgtaccaggagtaagccaaaagttttgagcagaatattctatactasaccaagatggatctttctttaaaaggagaaaaataatatacttaagggttgaaaaagaggttttcttgtactcactcccaagaagtaaattttgaatgaaaattaaatgtttattcaatttttgtttcacatagcatgttaaaaaaagttttctggatattaatttttcaaa

SEQ ID NO: 224462 - DNA, 442 bp, Homo sapiens
cagtcttttccaaagattcaacttataacttaaaacatgatgaaataattcactaaatatcgagacatacatacacatgagctatatatttgcctaaatgtaaatatttaagtattgtaagattctaaattaactatgaatggagcggcagcggttggggttgggaggggagtcagaccatttgtttaaaattatcaccactgacaatacattttatgcctctaaaggggtttgaacccatgagtacagtggcctgaaaaaccatcttccttattctccaggatgttacacaaaagtaacaagggaatgatgaaggacaggaggacaaatgtgacatctgaataaatcaaggagaccgatrtaacccacagacccaacaactgtggtatggcttctgaaagctactgagatggttcagaaacaggcagagataagaatagct

SEQ ID NO: 224463 - DNA, 607 bp, Homo sapiens
ggggtttaggaaagtgaataccagtgagttccaccaggccattttagaggctgggcagaagcttctcttaacttctaattgctcaggaagtaggcacaatgttttttttggttttttgggggttttttttaatcagtcataacctcaagttagaaaaatgcctgtccgggatccctgaactttagaatgggtctatsctggaagagccactttggagcctttttagagaccatgtgtgggtgtcacttggatttttaatctcttttgtaaccatctcctcctttcagaagtcactacagctcctccagctaaggcctgaagtgcctagaccaggagacatctcatctcctgcccctagactccagcaggcactgtggacactgaccttcctaagaccagcttgaccatggcccactgtgaaaccttcaggggtgccatatggccttgaggattgcaagaccatgtaatttatcatccaagcagggacacttaagaggaaaagggggcactagtaatagtcacattgggacgaagcaccctgggaaactggaccacaaggtcatcctactatatagaataaatccaatccctctaacggcttgaattc

SEQ ID NO: 224464 - DNA, 628 bp, Homo sapiens
gcttttgccttggctcaagttataagtggtgtctgccttatcctcatgattcccgaggccctgccattgtttcttatctgggatctcacttcttctgtgttccttggggactggaaccccatccctgtgcaagtcatccttctagctttactttctgccatccaaaagtgctgtatgaagtacacacagtgactcattttgatttggaatttcaaggccatcctcattttaatgactgaggataccacttgtgtgttcaaattaggtctggggagggatttagtcctggctaaaggagagctttcctcctgtctaatccagttcactgtggtgcttggcaaacacaggtgcccaatcracaggcttccttaccaaagtaaagtaaggtccccgaacatgaatgaccatgtgatctaacttccttgtaatccatggagtacagtttcatttttaaaacaattctttccagttctcactgggaccatgccacatttataagctaactggagccttcctttccagtcaaaggatggaagggaagagacatatgttcagagtcaaagcaaccaaggccaacaagcaccttctctactgccatgctggtttatataactctgaaagtgtacta

SEQ ID NO: 224465 - DNA, 628 bp, Homo sapiens
gcttttgccttggctcaagttataagtggtgtctgccttatcctcatgattcccgaggccctgccattgtttcttatctgggatctcacttcttctgtgttccttggggactggaaccccatccctgtgcaagtcatccttctagctttactttctgccatccaaaagtgctgtatgaagtacacacagtgactcattttgatttggaatttcaaggccatcctcattttaatgactgaggataccacttgtgtgttcaaattaggtctggggagggatttagtcctggctaaaggagagctttcctcctgtctaatccagttcactgtggtgcttggcaaacacaggtgcccaatcaacaggcttccttaccaaagtaaagtaaggtccccgaacatgaatgaccatgtgatctaacttccttgtaatccatggagtacagtttcatttttaaaacaattctttccmgttctcactgggaccatgccacatttataagctaactggagccttcctttccagtcaaaggatggaagggaagagacatatgttcagagtcaaagcaaccaaggccaacaagcaccttctctactgccatgctggtttatataactctgaaagtgtacta

SEQ ID NO: 224466 - DNA, 630 bp, Homo sapiens
caggatctgctgcctattattatgtctatctcagaataagcgacggatttatttttgcaacactgtatgtttgggtgtcttgaaatctgatgactaaatgtacgcatatcatcctaggaacgggctttcaatcatttaacaaacacttcttgagaatatacyctatatcaggcacaaatttaagtgtgtgaatgaagaaatgaaacaaacttttggtcaaatcagagagctgaacacccatgtttatctctgctctcttctggactcccactaaaaggacagtagacggatgcatttcttaatgaaaaaagagaccccagcagatgagatatgtcaacagcagtggagagctgaccaccatgcagtagctgatttaggtttccgcattgtctgctctgctaagtgcaagcagagcaggagccactaaacaagtgcccaactcatggcacagaacacaaagacagttcaggaagtggaggcaccaaggactctaaagggaaaagcagggtaaagctaaaaagaagggtgcctgcctgcaagttggtacaaagagcagtcagacccagggtccctcttgcagtctgctcagcctggtgatttccctgcctcagctagcagaaggtggagatc

SEQ ID NO: 224467 - DNA, 363 bp, Homo sapiens
ttatttatatcactcccacaaagaatttattgattcattcacttaacaaatatttattgagccctattacactccaggaagtatgcaaggtgatggagatacaaaagtgaacaagaccctcaagttgatctgaataaaagatagatccagacactcaaaatgaattataaaataatgggtaattgtagtgatctgcagtcaaatgctctacccctgagctaaaccctctayggtaagtgtagtgatctgagtatgcacctgtgttatgggagcactgagcaggggcacctgatgcagtggaggtgaaaagatacttcctagcatggacagaggcctcaggaaatcctaaaggttggatgggag

SEQ ID NO: 224468 - DNA, 481 bp, Homo sapiens
gaggttgaaaattggaggtcaacgggccacaccaggcctatggcatgttctttagacctaaacaaagttttcaatgttatatttgcacaaacaattcaaaagccaaagattttctttttaattatttttttttatagcratgaggtctcattatgttgcccaggctggtttcaagctcctaggctcaagcgatcctcctgcctcagcctcccaaagtgctgagattacaggcatgagccatagcgcccagcctcaaaggttttcttgattatggtggtcattatacaaatctgcacaggactacatacacatgtgcacacacacaaatgagtacatataacacaaatgatatctgaataagactgtagcattgtcaatttcctggttttgatgtcatactatacctacataaaatattaacactggggaagtggggtgaagggcacacaggatccctctgtaccatttgttgccacttcct

SEQ ID NO: 224469 - DNA, 481 bp, Homo sapiens
gaggttgaaaattggaggtcaacgggccacaccaggcctatggcatgttctttagacctaaacaaagttttcaatgttatatttgcacaaacaattcaaaagccaaagattttctttttaattatttttttttatagcgatgaggtctcattatgttgcccaggctggtttcaagctcctaggctcaagcgatcctcctgcctcagcctcccaaagtgctgagattacaggcatgagccatagcgcccagcctcaaaggttttcttgattatggtggtcattatacaaatctgcacaggactacatacacatgtgcacacacacaaatgagtacmtataacacaaatgatatctgaataagactgtagcattgtcaatttcctggttttgatgtcatactatacctacataaaatattaacactggggaagtggggtgaagggcacacaggatccctctgtaccatttgttgccacttcct

SEQ ID NO: 224470 - DNA, 550 bp, Homo sapiens
gcaactccaaaaactgcaggtgtcaagtgtggtcagcagtcacaggccagtttctgggacccctaatcttaataacagaaagacrtgcacactatagcaggccattcacttatgggccacagaaagacaaattaagggcagtgacttcctctcactgtagcaagaccctcccaatcctagtgaagtccagagttcattctccctggtctgcagatgagcgcacagggtctgaatgactccccaagtcacagtttggtggtagcaaaaccaagagagaagcccagattgtctgtcttcccagctcacattaaatgccaattagataactgtgtgggatcactgcaaagcatagacacttagaaacccacacacagactcacctaattggtgcaagaggacgggggaggactctgcaaaaggggagccaagagcagcctttcccttcctttaccaccctgacaagcaggttggtcaccagccctgggggttagtatccacccgctaccctgttacatgtgcagacatctgtcttcaagtgattgcagttggt

SEQ ID NO: 224471 - DNA, 603 bp, Homo sapiens
gactcatctaagccataaaagcctatcaataacatttcttgcatttgtatagtgccattactttttycaaaatgcatctattacctcattttataccacttatgtcagaacaaaaggaagagtaatgtgttgactggttggacaaactgtaccgtcaagaatgctcctatcctctgaaatggatgaaagttccagacacgaatgtcagatcagcgggaaagagctttccaatgagaagagctatccaacaatggaaagagtggctcctagagagtgagttcctcattgccagaggtacacaagtagaactgttaaaaccgtgtggcttccaactgctctaataactttaagattcacagtcttcaactttcttacagtggaagccatgggggcattgtcctgttgccttctctctcattcctcattaatgagaaagatgttaagctcactgacgtaagtcccagtgaagtcttctccagaactcagaagggccataaatagagagacaaagggcaggaggtgggagttattcaccagcgtggaggaagcaggataagcccagaggaatggcctctggaattatacaaagaatttggaggtgac

SEQ ID NO: 224472 - DNA, 527 bp, Homo sapiens
gggcccagggtcccaaatggtgcctcttttcaatgcttatttaccatagtttcatagaaacatgaccaagtgtcagttagttctttacccttcgggttttttccatcattaatcctcttggcacagggtggggctgagctgggaacaatatcatataactctagttgcagctgtccttatgcaaaccagcatatcygcaagttaccatgaccttttgggggaaaccaacataacagtgctggtggacacagcttcaggctgctagaggtcactgatatgtaccattgcaacttggaaggaattccatatattgatactttctttgattctatcaaccaaacggctttgtggggcacatgctatagtactgaatgaaatacctttctttcccttgagccaaaagcacataataagctatagattctttgctgctatgccattgatttacctactgtactttgtaacccaggagggctatgaatcatccttcctaatttcagcttcacaaaacaggttgcttttaatac

SEQ ID NO: 224473 - DNA, 515 bp, Homo sapiens
tgggccaatttaactaataaataataacagaattttctaagtgcatggtacttttgctttatctgatttcatggctttcctgttccatgacaacccactgtcttttccctcacatgtatgttttatgatggttttttcaggcatttgaaaaagctttaacactttcactcaagctaagacacctcaattttcattagtgactttattgtccaggaggtgttacagagactaccaaatagtttcaaaattacttgctcagtcacgatgcccacagttgactctcagcctagcaaaagagaagaaaagaagttcttgtgtttactgtcctgaacatacccttatgctagtatgcaayctcctcaggtcccctcaattagggtcacatttccgttttacagtgataatgcaagagactctgggtactgttcaatgaatataggtttaatgtaatatatgtatttctgcaaatatatatatatatataaatgaggattttgtaagcaccatttaaaatt

SEQ ID NO: 224474 - DNA, 515 bp, Homo sapiens
tgggccaatttaactaataaataataacagaattttctaagtgcatggtacttttgctttatctgatttcatggctttcctgttccatgacaacccactgtcttttccctcacatgtatgttttatgatggttttttcaggcatttgaaaaagctttaacactttcactcaagctaagacacctcaattttcattagtgactttattgtccaggaggtgttacagagactaccaaatagtttcaaaattacttgctcagtcacgatgcccacagttgactctcagcctagcaaaagagaagaaaagaagttcttgtgtttactgtcctgaacatacccttatgctagtatgcaatctcctcaggtcccctcaattagggtcacatttccgttttacagtgataatgcaagagactctgggtactgttcaatgaatataggtttaatgtaatatatgtatttctgcaaatatatatayatatataaatgaggattttgtaagcaccatttaaaatt

SEQ ID NO: 224475 - DNA, 555 bp, Homo sapiens
atttggcactatttagaaaaattacatttatgtttaccctttggcccagcagctctacttcgagggatttgtctcagtgttacaccagcaaaaataagaatagacacaaacacacactaggctgtttatcacagcactgtttgaaatagcaaaaggtagaaacaatccaaatgttggttagtacaggatttgttgaataacttttactgtatctacacctgtaaaaaggaatgaggaatatctctttatactgctatggrgtgatcttcattgaaaaaaagcaaggtacagacaagtgagtatagtatatatcatttatcaaagaaagaggtggcagtgctaatatttaagaaattagaaaggataaaataaaactttaaaaacaacaatagttggttatctacagagtaatggagggaaccgtgtgggggagaaactggaagctggacttctgaatatatcttgttttgtctctttgactttgggacaatatacatatcttgcacaattttaaaacaaaattaaagtgtaaaagagccctaaagattgaaacga

SEQ ID NO: 224476 - DNA, 553 bp, Homo sapiens
ctcatacaaatgttggtattgagtggtccagtctagtgcttgtaaaatagtatcaaaagagtttaggsagtgggcaggacaccagagtctggaagagctgtgttgtgattctagaaggtctagcctttcatagcatcacttttgccactaatgacagatgtggggatcaggaagagggctaacaagtatttacttgagaacactagccaaatgagctggggagtttgggacaagcaaggcctcacttctttgagggagtctggggtgtaaggaaaggcaagaaaaattgctgtgggttgagccactatggaggttaggaggtatggtgcagtgaggttatccaaatgaacattactggtccttgatagacccaaccaagtctgtttgggcatattacttaattctgttcctcagtggggaatatgtctgagtttgttcatgtttgtgcttcccataatgactaacatcgtaattggaatagaactgcagtgctgtaagtggtcagttagtaaaggtaatggcagaggggaaagtaagccaaaagcagggtaca

SEQ ID NO: 224477 - DNA, 571 bp, Homo sapiens
tatgctttaaaatctgataacaatagctttgctctttttttaaatcagttttcttagttcattcttattttattattcttccaaatgaattttaagcagttcgtctagctccatgggtaggagtgaggggtatttttatgggattgtatcacattttaaattaactttgtgagaactgacatctttatcatgatgggtctttctgttctgcaacactggtttaaatgtttgtgtctttccattagtttaaatgtttgtgtctttcaaaacagatggcccctgttctgttgaaacttagtctagtagggtagacaaagattaatcaaataggcttakgaactaatgtaagatttcagtagtgttatgtgctacatttttattggcagtaatagtaaatgtttcaaattgagtttatgttttaaagcaatgtactcattccatatttatctaatattgataggaaataaaaaataatattggccagaatttttgtaagtcgagagagagcaatggttgttaaattataagtggcagtgttgggccaggcaatgttttcttttttccactgggt

SEQ ID NO: 224478 - DNA, 608 bp, Homo sapiens
ggaattcaaagagaaacctactttacacatgttagatttgagatgcttgtaagcgatgcaagtagaaatttcatgtgagaagttggatatacaagtctgaagcctcagtatctcagaattagaggtagaatttggaagagtcatcattatataaatggtatcaaaaccttggaattggaactggaacttcyagcctggggagatgccaacattgagaggaaaggaataaaaatgagtgagtgggcagaaagtggaagaaaaccaggagagtatagtgacataggagccagtaaaagaatatatttcattcaactcaagaatgttcctaaatgtgggagtatgctgaatacagaattttaagtgaggactgtggacttaggtggtaggtttgggggtcattagctggcagatggttttagaagtcttcactgtgaatacctgtgggtaagtagataaagtgaagagaaagctgagagagccatgaaaggtaagcagagtaagttcatgaactgttacatttgaatttgtacaaaccaaatctttctatgtggttatcattaaaagcttgtaagcactgtaagtccatttatatttctattcctaaaggg

SEQ ID NO: 224479 - DNA, 576 bp, Homo sapiens
ccacagagagatggacatttttagacttcctctcttcagaaagtccatttctcagcactgccaaggctctccactgcttgtcccatataacccaactgccacagctcacccttgaacctccacaaataccccttccctttccactacagtcatttctctttagtcccttggaaaccctctgcttcagtcaaacctatgtgctcactggtccccaaacattgcttgctacagccaagttttggtcctcattcracccaagtgactttcacagcttctctctgcccttcactttctaaacacagagaataattcaacccctcaggaagcccaattcacctaatcacaacacaccattgtccctcactggggactatgatggcacctaccacattaaagtgtgttatttacagacaccccatacccctttgtcctcttagacaggaccagaaactgtgcacaaatctgagcttccgagatgtcagtgtgcctgtccctgtgtgtgaaaatacatctgccttctgggtatcttttgcaatatattcaaggacaaatactgaccacttttcaattagccat

SEQ ID NO: 224480 - DNA, 549 bp, Homo sapiens
gcagaagaaatgattaccgacaacattgtcttcacagagcttccctccctccatgagccagccaggacccctgaaggtgatcagtagcaggtctctcactgccatttgaatagtgcgtccctcatcaccaatcagaatgctttgccaggactgagtatctgaaactgaagaagatccttttacatttgagatttcrataaagttattaagatgtgggcaaagaacgaggtggaggacgagagagactagagagttctaaggcagtgcttcttatgggaatcacctggggatttgttaaagtgtgaattccaattcaggagggcggaggcggggctggaggccacgtttctaaccagctcccaggcgtgggcctggtctgactaaccaagtttcaatgagcagaggaagaaagcacaaggaagtgacaggtggcaaaacgactctatgtccgcatgatgggggagaccctgtgaagtcaatgactgcacctgccctgcctcaggaagaatgtttcctaagattcgtgaaagctcatcttgtgcagccctg

SEQ ID NO: 224481 - DNA, 549 bp, Homo sapiens
gcagaagaaatgattaccgacaacattgtcttcacagagcttccctccctccatgagccagccaggacccctgaaggtgatcagtagcaggtctctcactgccatttgaatagtgcgtccctcatcaccaatcagaatgctttgccaggactgagtatctgaaactgaagaagatccttttacatttgagatttcgataaagttattaagatgtgggcaaagaacgaggtggaggacgagagagactagagagttctaaggcagtgcttcttatgggaatcacctggggatttgttaaagtgtgaattccaattcaggagggcggaggcggggctggaggccacrtttctaaccagctcccaggcgtgggcctggtctgactaaccaagtttcaatgagcagaggaagaaagcacaaggaagtgacaggtggcaaaacgactctatgtccgcatgatgggggagaccctgtgaagtcaatgactgcacctgccctgcctcaggaagaatgtttcctaagattcgtgaaagctcatcttgtgcagccctg

SEQ ID NO: 224482 - DNA, 569 bp, Homo sapiens
agtgcatcatttgcatgatcttcaatatccacttcttcactgtggttcccacccagcttttagacctgattatcctccagtattctctaccgcaaagaagacataaccccacaattcatccattggctcaaggcagaaataaggaggaagccatgacaccgctctttccctcaccctcctcctctactccattgccagctttcctgcctatctccaactccactgtctgcacttgaacttcggcaccctgaggctcgaatccactctgactttttcccaaactatggaccttaccactgccaaaaggacctttttttttgcccttgttataaaattaactttatttactgaggtagtacactgttaatgtgcggtgactgtgtaatgcagggtacaaagataattatttggaaaactraaacaaagaaacaagtatgcacacactttctgatattccaggctcactgctactatggaagataaatcaacaaattatgagaatttggaagagatcaatttgagaaagcaggaaaaattcatgagggacacaacagctgagtcagatgaca

SEQ ID NO: 224483 - DNA, 473 bp, Homo sapiens
aatgcaatcgagttcaattttaaataggacaattatttgtatgggaaattgtccccattgatgtattagattaacttataaatgataaagatagactaacaataggaaccatcaacactagagcatgtggtctgtgaattctttagtcctggaacctctgagggatagtgtttaaggcatcagatgctgagtcaagggggcttctggaaccaggagcatgyctctcccaaagaaaggaaaataagcttgtatctagcttatcaagagccccaccccttactattctagtgtcttagggaaatataatatagccagagtccctgccaccagaaagggtgtacacacatcatcattaaactaggaaacaatgttaaggttaaatgctatacgtgtagtcaagacagcagctactataattgagaaaggagacattttggggctagagttaaagggaaagatgacttcaaaacctg

SEQ ID NO: 224484 - DNA, 456 bp, Homo sapiens
gaactggtattgtattggatttctctcagttccttacattgcgaaccaaaagcccatgatcgattgcagccatgattatgagaactttggaaataattatgaggtaaagccaaggggtcaatgtgtctcaatgaatcctttctttttattgctgtgtctaatgttttcatttagcaacctgggatgacgycttcttgatataaaagtcagaagtatatagacatagtaggtttcttagagattattcctattcaaaatgcatactatttttcctaacaaaaaggagctggcatctgaagaggttcagtgactcttacgcagaagaagctactgctaaccagcaacaccattgtaagcctagtgccagactccagtcccagacccttccagctgcaccaggttattttcttatacacccagcaatctcttaaaggtagaaccaccctccctctagat

SEQ ID NO: 224485 - DNA, 360 bp, Homo sapiens
ttcaaaaagctgtgggacaggagggaatggggatggtattcaatggtaccacatccaagcaagtcttgtatggttaaaacaaatcaatataataacatgaaattttacacagaaacctatctgattataaactgtatgcttaccataatcaacactgatgtacattgttttaaaaatacttaatagtgttctttgtttaaccaaayaatagaggtattaactagtttcctagtgctgccaaaagaaattgctacaaaatttgtggcttaaaatagtaaaaaaagaaaaaaaattctcaattatagaggccagaagaccaaaatcaaggtggaggcagagccatacaccctctgacggctc

SEQ ID NO: 224486 - DNA, 574 bp, Homo sapiens
gaaaaaattaataactatttttttaactatattatatgacatactttttctttatgatcttcaggggaatttctacttatcttaaaaacatatayagatattgatctgcggagaaatatatctctgttatttcaaggtctgtggattacataatgatcaactctgattgatttactgtttgattaaacaaaattttaaagcaaaactaaaaatattgcagctatgttggttttaaccattctaaactctgatgaaatttgctttctgtttggtttgtgactaggaagctaaacattatttattagtaataaaaatttctggtgtctaaagaaattcaagaggaaaaccattagattctattacaattaaatctgttaagatttaattgcaaatatgtagatagtgcaaatatatctttgggtacaatttttgttctcattaagttacccattttacattttgagaacactaatagatgaaatacttgtcaaagagaagatctaagatggtttaaagaaaatattaaatgaaatcaaacttacttgtcaagctccatagcacaacttacaagtca

SEQ ID NO: 224487 - DNA, 513 bp, Homo sapiens
tcattttccaagtgtttgttaatgtatcaaaaggatttatacatttcacaaagggggactcaagctaagctaaagatttataaacacaaccaattcactagagaaataattttaaccgtgtttttcttgtttttccaaaccttactctttcatggaaaaaaataaaggcaatattataaaatagatgaaagtgcagggtaattaccttgcattgagaagcctagagctcacctgatccacaatatttgataatccatgtcacccctggtttacttccacagttcccttgaagattgaagagctgtctgaataccacagtcttagtatactatgttttgtaaggaaamctgcccactcaagaataccttctatgagagccaacccattcagcatgttaggaagtttgcttccatgtatgattcaagcccacctggtccagtggattggacaatgaatgaacgcttgatttaggtggaagttatccatttattggttggaaatcaataagcctct

SEQ ID NO: 224488 - DNA, 451 bp, Homo sapiens
aggatttatacatttcacaaagggggactcaagctaagctaaagatttataaacacaaccaattcactagagaaataattttaaccgtgtttttcttgtttttccaaaccttactctttcatggaaaaaaataaaggcaatattataaaatagatgaaagtgcagggtaattaccttgcattgagaagcctagagctcacctgatccacaatatttgataatccatgtcacccctggtttacttccacagttcccttgaagattgaagagctgtctgaataccacagtcttagtatactatgttttgtaaggaaacctgcccactcaagaataccttctatgagagccaacccattcagcatgttaggaagtttrcttccatgtatgattcaagcccacctggtccagtggattggacaatgaatgaacgcttgatttaggtggaagttat

SEQ ID NO: 224489 - DNA, 488 bp, Homo sapiens
aataatatctgtgcctaatatacartgtggcaatgttcattatgaagttttaatacagagaactttttttcagaatttttaagagaataaatttttcttttaagaatacctaagccttatgaacatctgatgttcaaatacccagcaatggctggtcgtcttttgcttgcctaaactccatctgaacaatggcaaagctctgctgaaccaaccaacataaggaattgcacatccccacatttctttccatctttttcttttctgtcagactttcactcttttgctgatagtaagtacccttaatctattaaaagaaatacaaaaatcacttctgacttgcctattctgtttcattatatgcatatttacatcaccactgtatgacaaattatttcacctcatagaccctgttttctgatctgtaaaagtggttaatggtacttacctaaaaggttgtaaaattttttaaaataaagtctgtaaagctt

SEQ ID NO: 224490 - DNA, 472 bp, Homo sapiens
tccataatcaatagaaaactttctattttctcaacactagtgaaacctgcttttctttggtgacaccagttgataaaactatttytgattcaatatgttgctttcccctttggttatcagtagtttaattgaattattgactacagttttatggcaaatgtgaattctgggttgaacaaactaaattgagatgcaaataccaatttgtaacattgatcctgtgggtgaataatttcatagtcccaacaaatgtacttatgtttaccaacttgcaatacaaggtctttttaaaagtaattaatttatttttatttttatttttttaaagacagggtctcattctgtcttgcaggctgttgtacagtggcctgattatagctcactgtagcctcgaaattctgggccgaaatgatccgcctgcctcagcctccaaagtagctgagactacaggtatgtgtcaccacacccagct

SEQ ID NO: 224491 - DNA, 472 bp, Homo sapiens
tccataatcaatagaaaactttctattttctcaacactagtgaaacctgcttttctttggtgacaccagttgataaaactatttttrattcaatatgttgctttcccctttggttatcagtagtttaattgaattattgactacagttttatggcaaatgtgaattctgggttgaacaaactaaattgagatgcaaataccaatttgtaacattgatcctgtgggtgaataatttcatagtcccaacaaatgtacttatgtttaccaacttgcaatacaaggtctttttaaaagtaattaatttatttttatttttatttttttaaagacagggtctcattctgtcttgcaggctgttgtacagtggcctgattatagctcactgtagcctcgaaattctgggccgaaatgatccgcctgcctcagcctccaaagtagctgagactacaggtatgtgtcaccacacccagct

SEQ ID NO: 224492 - DNA, 477 bp, Homo sapiens
tccataatcaatagaaaactttctattttctcaacactagtgaaacctgcttttctttggtgacaccagttgataaaactatttttgattcaatatgttgctttcccctttggttatcagtagtttaattgaattattgactacagttttatggcaaatgtgaattctgggttgaacaaactaaattgagatgcaaataccaatttgtaacattgatcctgtgggtgaataatttcatagtcccaacaaatgtacttatgtttaccaacttgcaatacaaggtctttttaaaagtaattaatttatttttatttttatttttttaaagacagggtctcattctgtcttgcaggctgttgtacagtggcctgattatagctcactgtagcctcgaaattctgggcygaaatgatccgcctgcctcagcctccaaagtagctgagactacaggtatgtgtcaccacacccagctaaatt

SEQ ID NO: 224493 - DNA, 487 bp, Homo sapiens
tccataatcaatagaaaactttctattttctcaacactagtgaaacctgcttttctttggtgacaccagttgataaaactatttttgattcaatatgttgctttcccctttggttatcagtagtttaattgaattattgactacagttttatggcaaatgtgaattctgggttgaacaaactaaattgagatgcaaataccaatttgtaacattgatcctgtgggtgaataatttcatagtcccaacaaatgtacttatgtttaccaacttgcaatacaaggtctttttaaaagtaattaatttatttttatttttatttttttaaagacagggtctcattctgtcttgcaggctgttgtacagtggcctgattatagctcactgtagcctcgaaattctgggccgaaatgatcckcctgcctcagcctccaaagtagctgagactacaggtatgtgtcaccacacccagctaaattttatatattt

SEQ ID NO: 224494 - DNA, 274 bp, Homo sapiens
ttagcccagagatttacaaagaagrccaaaggatttatcagtaattaccctatctatgtaatacatgtagataaagatagataggcatgtatatgcatatatacagatacctatgtatatatctatctatatacatatatacatgtagatatatacatacctatatacatgtagaaatacagatgtagatataaatatatatatgtgtatagagatatgtgtagacatatatagatgtatacatatatagatagataggtctatatagaaaacc

SEQ ID NO: 224495 - DNA, 274 bp, Homo sapiens
ttagcccagagatttacaaagaagaccaaaggatttatcagtaattaccctatctatgtaatacatgtagataaagatagataggcatgtatatgcatatatacagatacctatgtatatatctatctatatacatatatacatgtagatatatacatacctatatacatgtagaaatayagatgtagatataaatatatatatgtgtatagagatatgtgtagacatatatagatgtatacatatatagatagataggtctatatagaaaacc

SEQ ID NO: 224496 - DNA, 585 bp, Homo sapiens
cttgacaatgctgcattggggattgagtctcaatatgaattttgaaggggacatatacattcaaaccatttcacatggtatttaaagccttgggctggattgagatagaagaccaagggtaaagaagagggccctatagcactacaaatttggaagactagtagggaaggaggatcagccaagcagggagayccacattgtctgttccaagaggtatatacatttaaccctttgagtgttgaatctgtgaattagtcagtttggctgccataacaaaacaccatagactgggtggcttaaacaatagatattaattttttcacagctctgaagagggaagaggaagatcagggtgccagcgtggttggcttctagtgagtgcactctgtgccttgcagacagctgccttctcactgcacgctcatgtggcctttcctcggtgtttgccatagagagagctctctctctctctccgtctttttatgaggctacagtcctatagaattagggtgccacccttatgactcctgtagccttagttatctgccaagaaccctatcttcagatacaatcacactgaggatt

SEQ ID NO: 224497 - DNA, 585 bp, Homo sapiens
cttgacaatgctgcattggggattgagtctcaatatgaattttgaaggggacatatacattcaaaccatttcacatggtatttaaagccttgggctggattgagatagaagaccaagggtaaagaagagggccctatagcactacaaatttggaagactagtagggaaggaggatcagccaagcagggagacccacattgtctgttccaagaggtatatayatttaaccctttgagtgttgaatctgtgaattagtcagtttggctgccataacaaaacaccatagactgggtggcttaaacaatagatattaattttttcacagctctgaagagggaagaggaagatcagggtgccagcgtggttggcttctagtgagtgcactctgtgccttgcagacagctgccttctcactgcacgctcatgtggcctttcctcggtgtttgccatagagagagctctctctctctctccgtctttttatgaggctacagtcctatagaattagggtgccacccttatgactcctgtagccttagttatctgccaagaaccctatcttcagatacaatcacactgaggatt

SEQ ID NO: 224498 - DNA, 585 bp, Homo sapiens
cttgacaatgctgcattggggattgagtctcaatatgaattttgaaggggacatatacattcaaaccatttcacatggtatttaaagccttgggctggattgagatagaagaccaagggtaaagaagagggccctatagcactacaaatttggaagactagtagggaaggaggatcagccaagcagggagacccacattgtctgttccaagaggtatatacatttaaccctttgagtgttgaatctgtgaattagtcagtttggctgccataacaaaacaccatagactgggtggcttaaacaatagatattaattttttcacagctctgaagagggaagaggaagatcagggtgccagcgtggttggcttctagtgagtgcactctgtgccttgcagacagctgccttctcactgcacgctcatgtggcctttcctcggtgyttgccatagagagagctctctctctctctccgtctttttatgaggctacagtcctatagaattagggtgccacccttatgactcctgtagccttagttatctgccaagaaccctatcttcagatacaatcacactgaggatt

SEQ ID NO: 224499 - DNA, 592 bp, Homo sapiens
gaattcatggagtcattgggctttatttaataagtatctcatcatattctagttatatcatctcctataagtgttcaaaatttgayaaaattcagatcaaaggtgttttgggggcattttggtgtcagaagccatgaggccattaaaactcatgagggctgctttagtttcctagggctgccataataaaggagcacaaactagaaagctgtacatctgaaatcaaggtgtaagcagagcccgtgtttcctctgaaacctgtaggggaatccttcctctcttcttagcttctggtggttttatagcaagctttgacacgtagtgaaatctgacacaaattaagtacataagaagctgttccttggttttcagctgcataactccagtctctgtcttcatcattgcatggtcttctccttgtgtgtttctgtcttcacatggccatcttctaataaggccaccagtcatattggatcagaggcctaccctactccagtatgacctcatttttatttaactaattatatctgcaatgatcctatttccaaataaggtcacattctgagatactgggggttaggaagatatgttg

SEQ ID NO: 224500 - DNA, 592 bp, Homo sapiens
gaattcatggagtcattgggctttatttaataagtatctcatcatattctagttatatcatctcctataagtgttcaaaatttgacaaaattcagatcaaaggtgttttgggggcattttggtgtcagaagccatgaggccattaaaactcatgagggctgctttagtttcctagggctgccataataaagkagcacaaactagaaagctgtacatctgaaatcaaggtgtaagcagagcccgtgtttcctctgaaacctgtaggggaatccttcctctcttcttagcttctggtggttttatagcaagctttgacacgtagtgaaatctgacacaaattaagtacataagaagctgttccttggttttcagctgcataactccagtctctgtcttcatcattgcatggtcttctccttgtgtgtttctgtcttcacatggccatcttctaataaggccaccagtcatattggatcagaggcctaccctactccagtatgacctcatttttatttaactaattatatctgcaatgatcctatttccaaataaggtcacattctgagatactgggggttaggaagatatgttg

SEQ ID NO: 224501 - DNA, 512 bp, Homo sapiens
tcacaacatcttcaccaccttccccttgccaaaggcttacaacccaagccagacaatcagaatgttcctagggttggattaattgttgttaggagaaaggcacttttwgccatggagcaggcaaactcaggatgagaagctgggctactggtggccaaagaaagtgatttctcacaggagaagttgaggaaagaaacagggaggcagggccagagatgatgagggagacagagaactccgtaaacaggagtaccgaagtttgttgtagccccggacttcccagatgtgtaagacaataaattctctttttgcttactagcttgaattgggtttctgtcatttaaaacctaatggctccaacttgtgggcacttctgacttacagggcagctcccacagacctcagtagctttaccagtcttccttgtcttgtgagctaccatcttctactcttttgggagtgtgcgtgcatgcttcggattatcaaatgatttcaatgacaacaaagaactg

SEQ ID NO: 224502 - DNA, 586 bp, Homo sapiens
ttttcaactgctataaaatatctctgatacatgagagaagctggaaagtgagatcataaccaccagaaaaatactacttgttagtgcctcagaagaactaccactggtgtgagtagaattacaacactggcaacccaaaagagatacgcatgtcatgttgtctgattttggagacattcttaattttcagtggcaggtgccatacatttattcattgagcaaatgttttactgagtacctttaatgtgacaaaaagcctggccactgcagaarcaggtgagcaaaagcaaacacagcccttgcattcatacaacatatatttcttcttgaaatcaagttcctggcactaggtatcaatagacttgaaaatatgcataaccagctaggtgcagtggctcacgcttgtaatcccagcactttgggaggccaaggcaggcagatctcttgaggtcaggagtttgagagaccagcctggccaacatggtgaaactgtgtctctactaaaagtacaaaaattagccaggcgaggtggcgtgtgcgtgtaattccagttacctgggaggctgaaacatgagaattgcttgaa

SEQ ID NO: 224503 - DNA, 586 bp, Homo sapiens
ttttcaactgctataaaatatctctgatacatgagagaagctggaaagtgagatcataaccaccagaaaaatactacttgttagtgcctcagaagaactaccactggtgtgagtagaattacaacactggcaacccaaaagagatacgcatgtcatgttgtctgattttggagacattcttaattttcagtggcaggtgccatacatttattcattgagcaaatgttttactgagtacctttaatgtgacaaaaagcctggccactgcagaaacaggtgagcaaaagcaaacacagcccttgcattcatacaacatatatttcttcttgaaatcaagttcctggcactaggtatcaatagacttgaaaatatgyataaccagctaggtgcagtggctcacgcttgtaatcccagcactttgggaggccaaggcaggcagatctcttgaggtcaggagtttgagagaccagcctggccaacatggtgaaactgtgtctctactaaaagtacaaaaattagccaggcgaggtggcgtgtgcgtgtaattccagttacctgggaggctgaaacatgagaattgcttgaa

SEQ ID NO: 224504 - DNA, 586 bp, Homo sapiens
ttttcaactgctataaaatatctctgatacatgagagaagctggaaagtgagatcataaccaccagaaaaatactacttgttagtgcctcagaagaactaccactggtgtgagtagaattacaacactggcaacccaaaagagatacgcatgtcatgttgtctgattttggagacattcttaattttcagtggcaggtgccatacatttattcattgagcaaatgttttactgagtacctttaatgtgacaaaaagcctggccactgcagaaacaggtgagcaaaagcaaacacagcccttgcattcatacaacatatatttcttcttgaaatcaagttcctggcactaggtatcaatagacttgaaaatatgcataaccagctaggtgcagtggctcacgcttgtaatcccagcactttgggaggccaaggcaggcagatctcttgaggtcaggagtttgagagaccagcctggccaacatggtgaaactgtgtctctactaaaartacaaaaattagccaggcgaggtggcgtgtgcgtgtaattccagttacctgggaggctgaaacatgagaattgcttgaa

SEQ ID NO: 224505 - DNA, 586 bp, Homo sapiens
ttttcaactgctataaaatatctctgatacatgagagaagctggaaagtgagatcataaccaccagaaaaatactacttgttagtgcctcagaagaactaccactggtgtgagtagaattacaacactggcaacccaaaagagatacgcatgtcatgttgtctgattttggagacattcttaattttcagtggcaggtgccatacatttattcattgagcaaatgttttactgagtacctttaatgtgacaaaaagcctggccactgcagaaacaggtgagcaaaagcaaacacagcccttgcattcatacaacatatatttcttcttgaaatcaagttcctggcactaggtatcaatagacttgaaaatatgcataaccagctaggtgcagtggctcacgcttgtaatcccagcactttgggaggccaaggcaggcagatctcttgaggtcaggagtttgagagaccagcctggccaacatggtgaaactgtgtctctactaaaagtacaaaaattagccaggcgaggtggcgtgtgygtgtaattccagttacctgggaggctgaaacatgagaattgcttgaa

SEQ ID NO: 224506 - DNA, 614 bp, Homo sapiens
catcaatcacagtgacaaatttataggttctgcaagttccactgtggcttgctgcctacattcacagttgaagaaaagactgaatttcggttagagattagtggaaatgaaaatgtaattttaaaatcctatccaaattcacaaaccccacatggaccccaggttaagaatacttgtgagtgagaakggggccccatattcagagaggctggtcaggctctgttgtttgctggaacacagtaagctgtcttctgctgtagggaaaaatgagcagattgaacctaagcattaaaataaaaaaatgagcagggaaagtgtgttttccagagcaagaatgatgcccaggaacaaagcaagtcagacaggatagagtccacagtaccagagaaaagacacagattgatgtgcagctgcctgagtctacttttgaattacagattttaatccttcatgaaaccaaacaatacctccagttcttggtgtagaaacactcctatgtctttataatgttattttctcatgtaagctagtttaagtaggtttctgctgcttacaagctgacgtatcttgttgaatacagagatactttaaaactcctcccttaacacacacat

SEQ ID NO: 224507 - DNA, 614 bp, Homo sapiens
catcaatcacagtgacaaatttataggttctgcaagttccactgtggcttgctgcctacattcacagttgaagaaaagactgaatttcggttagagattagtggaaatgaaaatgtaattttaaaatcctatccaaattcacaaaccccacatggaccccaggttaagaatacttgtgagtgagaatggggccccatattcagagaggctggtcaggctctgttgtttgctggaacacagtaagctgtcttctgctgtagggaaaaatgagcagattgaacctaagcattaaaataaaaaaatgagcagggaaagtgtgttttccagagcaagaatgatgcccaggaacaaagcaagtcagacaggatagagtccacagtaccagagaaaagacacagattgatgtgcagctgcctgagtctacttttgaattacagattttaatccttcatgaaaccaaacaatacctccagytcttggtgtagaaacactcctatgtctttataatgttattttctcatgtaagctagtttaagtaggtttctgctgcttacaagctgacgtatcttgttgaatacagagatactttaaaactcctcccttaacacacacat

SEQ ID NO: 224508 - DNA, 614 bp, Homo sapiens
catcaatcacagtgacaaatttataggttctgcaagttccactgtggcttgctgcctacattcacagttgaagaaaagactgaatttcggttagagattagtggaaatgaaaatgtaattttaaaatcctatccaaattcacaaaccccacatggaccccaggttaagaatacttgtgagtgagaatggggccccatattcagagaggctggtcaggctctgttgtttgctggaacacagtaagctgtcttctgctgtagggaaaaatgagcagattgaacctaagcattaaaataaaaaaatgagcagggaaagtgtgttttccagagcaagaatgatgcccaggaacaaagcaagtcagacaggatagagtccacagtaccagagaaaagacacagattgatgtgcagctgcctgagtctacttttgaattacagattttaatccttcatgaaaccaaacaatacctccagttcttggtgtagaaacactcctatgtctttataatgttattttctcatgtaagmtagtttaagtaggtttctgctgcttacaagctgacgtatcttgttgaatacagagatactttaaaactcctcccttaacacacacat

SEQ ID NO: 224509 - DNA, 431 bp, Homo sapiens
aaagcagaagcttggtaataaagaaaagaaaaaaaaagtaaaagaggctgagcacagtggctcatgcctgtaatccaacactttgggaggctgaggtgggcagatcacttgagcctaggagttcaagaccagcctggacaagatggtgaaaccccgtctctacaacaaatacaaaaattagccaggtgtggcagctcgcgtctgtagtcccagctacttgggaggctggggtgggaggattgcttgagcctaggaagtaaaggctgcagtgagctgagattgtgccactgcacttcagcctgggcaacagagcaagaccctgtctcaaagaaaggaaggawggaaggaaggaaggaagggaggaagggagggaggaaggaagaaaaaggaagggaagagggacggaaggacagaagagagagagagagaga

SEQ ID NO: 224510 - DNA, 553 bp, Homo sapiens
atgaataaagacaatgaagttacaaccttttcaaagtaaattatttaaatgacccaagaataaatgtccccatgtatggttcttatacagatattgccagttctttcataaattatttttttcttcaagtataattatgagttagaacaaataatttattttacttatcataggtaattgacacaattaaytctgaaaatggcccattaaaatatattttaaagttggacgtaaaaaaaatagtgtttttaagaatatgtatctccattgactgaaaacgctgactctgaaaaatttaggcagtactctttattgagcaattcttcctaaggtgctagaatatcaattcacaaaaaaaatattgagcttccaccacatgtaacacagtgtcttagaactgagaatgtagagttcaggggagaaatttaaaaatgaatgaccagaatcatacatggtgatgacaagagaacaacaatacaggagtgataaacagctgaaaataataacaaaagaaattccataaggtcaaacttagtaggcaaagcattgttgt

SEQ ID NO: 224511 - DNA, 552 bp, Homo sapiens
aattccttgcacatgaataaagacaatgaagttacaaccttttcaaagtaaattatttaaatgacccaagaataaatgtccccatgtatggttcttatacagatattgccagttctttcataaattatttttttcttcaagtataattatgagttagaacaaataatttattttacttatcataggtaattgacacaattaactctgaaaatggcccattaaaatatattttaaagttggacgtaaaaaaaatagtgtttttaagaatatgtatctccattgactgaaaacgctgactctgaaaaatttaggcagtactctttattgagcaattcttcctaaggtgctagaatatcaattcacaaaaaaaatattgagcttccaccacatgtaacacagtgtcttaraactgagaatgtagagttcaggggagaaatttaaaaatgaatgaccagaatcatacatggtgatgacaagagaacaacaatacaggagtgataaacagctgaaaataataacaaaagaaattccataaggtcaaacttagtaggc

SEQ ID NO: 224512 - DNA, 538 bp, Homo sapiens
gccaatagtaaaaatattgatgataaggttggatctacaagtcttaggaatgtggaccattctaaaccaccagaagtggcatgcacttcacaggacacatccaccgctactggaaaggaggtaagctacccacttcttcccattgtttttcacagttgttctgtcactgatggatagtttccatgtacttctcctgatctattctccaccttctctccccayctgggccctggaaggctggatgataaggatacattaataagccttttagtcttctggtgtacgattggatttggtcaatgggtatcaccaccagcagattaatacagagcgaagagactctttgagatcagcatggactaaccgcttgccttaactaaatgtcatgcctcttaccaagtactcccttctcactctaggctcaggcaactgaacctcctctcacactctttggtctacaggtgataaaaccccccactcttactatcccttatggctttgctatgcatactatttctctaataaacaatccccttat

SEQ ID NO: 224513 - DNA, 418 bp, Homo sapiens
gtggccttatttcccttttggaacagaacttygcaggactaggcaaactccaattttccaatgaatgcttagcattataaggacacagtaccttcctaagcttctctttaaatagcagtcttatttgaagccaaatatcatatggctatattgaacttaatatgatttctatcagccaaattacattagagctctgatgggaacagggataagtaatttggcaggctttctcttttctattcacctccatttgcttaccttgtttctaagaaaagattagaagacctgacaggttggctttatctcagagagaatatataggtaggaaataacagggagttggaaaaccaatttgtcagcccgaaccaggaaaagagtttcactgatttaaggctaaagcctttaaacatcccaaggt

SEQ ID NO: 224514 - DNA, 382 bp, Homo sapiens
gtggccttatttcccttttggaacagaacttcgcaggactaggcaaactccaattttccaatgaatgcttagcattataaggacacagtaccttcctaagcttctctttaaatagcagtcttatttgaagccaaatatcatatggctatattgaacttaatatgatttctatcagccaaattacattagagctctgatgggaacagggataagtaatttggcaggctttctcttttctattcacctccatttgcttaccttgtttytaagaaaagattagaagacctgacaggttggctttatctcagagagaatatataggtaggaaataacagggagttggaaaaccaatttgtcagcccgaaccaggaaaagagtttca

SEQ ID NO: 224515 - DNA, 443 bp, Homo sapiens
gtggccttatttcccttttggaacagaacttcgcaggactaggcaaactccaattttccaatgaatgcttagcattataaggacacagtaccttcctaagcttctctttaaatagcagtcttatttgaagccaaatatcatatggctatattgaacttaatatgatttctatcagccaaattacattagagctctgatgggaacagggataagtaatttggcaggctttctcttttctattcacctccatttgcttaccttgtttctaagaaaagattagaagacctgacaggttggctttatctcagagagaatatataggtaggaaataacagggagttggaaaaccaatttgtyagcccgaaccaggaaaagagtttcactgatttaaggctaaagcctttaaacatcccaaggtcatctctcttttctttcattcatct

SEQ ID NO: 224516 - DNA, 418 bp, Homo sapiens
cgtggccttatttcccttttggaacagaacttcgcaggactaggcaaactccaattttccaatgaatgcttagcattataaggacacagtaccttcctaagcttctctttaaatagcagtcttatttgaagccaaatatcatatggctatattgaacttaatatgatttctatcagccaaattacattagagctctgatgggaacagggataagtaatttggcaggctttctcttttctattcacctccatttgcttaccttgtttctaagaaaagattagaagacctgacaggttggctttatctcagagagaatatataggtaggaaataacagggagttggaaaaccaatttgtcagccsgaaccaggaaaagagtttcactgatttaaggctaaagcctttaaacatcccaagg

SEQ ID NO: 224517 - DNA, 405 bp, Homo sapiens
tgaccctatgaccaaagccatgtatctgagatatatgtggctgtgcttagggagcctatgtttgtagaaataagtatatttaagtaggagagagataaatgtatgacttggagacatcgctatcatgttttaatctaactgcctgagatcacagcagcatataaaattgcaatgttccaatgtacaaattataaattcaaaccttgaaagcaaattggatttaaatctttatacttttatatgtagctcttctggtactggaccatggtcaaataaatagtttctctgyaatctttccattagattaatctcacacttaaagtacagaaattctttttttttttttttaagtattttatgcataaaactttcatctttatgagctcaccaaaggttgaaaagatt

SEQ ID NO: 224518 - DNA, 673 bp, Homo sapiens
ctaacgcatgccaggcttaatacgcaggtgatgggttgataggtgcagcaaaccactatagcacatgtttacctatgtaacaaacctgcatatcctgcacatgtaccccggaactaaaataaaataatacaataaaacagtgacatttgtatgttccagtttagaagacattataaatgtaaacaagataacaggatccaatacttttccctgattcaagataatggggagaacacatttggctgcattattcaaacttaaaggaatcattaagtcaatttcaaatcatgwcattccaggcatcagaaagataagaattttatattaaaaaacttgtaggttaaaaaatatgtccaaattctcatattcactccatcgctttatcttagtcatgactgtcccatcaatttcgcctaaatatctctaggctactttgtcctgcccatcctgaatctgccatgtggcaaaggccctcatcactctagtactgtaccaggctctgaactgcatttcctgactccagactgatgtcacgtggtataagttgcctgactcaaaacctttactactttcccacagcttttagaatcttgtccctatgaggtggttttacatacaggcatcttgttatctggcttctcgctggcacagctagtttcatctcaattcctcc

SEQ ID NO: 224519 - DNA, 569 bp, Homo sapiens
ctttggtctcatggaacccagcaaactcttatgacagtgcttaataacatagtactgcccttgccagtttctttatcaatctttgcaagctatatgcttttagaagataggatctatacctgtttactcttgtacactgcaattagcacaagcttgtccatcaatatttactgaaaatatgcattaccatcacagtaacagtagttaacatttggacaacatgttacggttaacaaagcacttttttggagtacatatattatctcatttaataattaaaataatcacttacaattttagcatgcatcagaatcatctggaaagtttgttaaaacacagattatttattctyctccccagagtttctgattcattaagtctggggtggcccaataatttcatttctaacactctcaagtaatgctgcctccgctggtctggggtacacactttgagaaccactgccttagaacatccctgtgaaaggttaaatgttattcccaatttacagaggaaattgaagctcagagagcaatggctttgtaagtagtaaattcacggcctctgaa

SEQ ID NO: 224520 - DNA, 426 bp, Homo sapiens
ctaattaaggagaggtcagagaattgaaaggaccaagagcatttggaagataaactcatggatggttaggtgactaagaatgattacaggaatggaaataaatacaggtaaaagatacaaatcaataaatgtgaggaggctgatgccaggaactatgaggagtagcaaacagggtagccagatggcacatgcctcaaagaagcttgtggctttgaaagaggagggaggacgaaagttttgggggaagcaaggagggatgaagaggacacctatctccctcctgcgtttgaattccraccatttgacttgtgaacatataaccagcttgcactgagagggccacagcgaaagcactgtcctccagggacagcctgttttctgttacggcaaggaattaaaaaaaaaaaaaaatcattagaaaagatc

SEQ ID NO: 224521 - DNA, 441 bp, Homo sapiens
gaaacagtccataaatatgtaagcgtccagccccagcacacacagatgtgtctatcttttacattcctttcttgtgtctaattctcttggtagccacttcctgatttcccttctgtgcctggatattttcagcttcaattttcgttctgtctcatttgtattttactgtactcaacaacaaaggtagtttctttyaggaactttgtttcctaagctctttttactttaagaacattggattttagattcaactgaaagttatttgttagcaattgagagtaagcgaaagcaaagaaaagacagtcatttactaccagcaaaggtttcctttctcaaatatagtcagaacaagcaacttcactatttaatatgactctccttttggattcatctatgtagagatattgataatggtcatttgtcccagctgaagtcagcctt

SEQ ID NO: 224522 - DNA, 441 bp, Homo sapiens
gaaacagtccataaatatgtaagcgtccagccccagcacacacagatgtgtctatcttttacattcctttcttgtgtctaattctcttggtagccacttcctgatttcccttctgtgcctggatattttcagcttcaattttcgttctgtctcatttgtattttactgtactcaacaacaaaggtagtttctttcrggaactttgtttcctaagctctttttactttaagaacattggattttagattcaactgaaagttatttgttagcaattgagagtaagcgaaagcaaagaaaagacagtcatttactaccagcaaaggtttcctttctcaaatatagtcagaacaagcaacttcactatttaatatgactctccttttggattcatctatgtagagatattgataatggtcatttgtcccagctgaagtcagcctt

SEQ ID NO: 224523 - DNA, 512 bp, Homo sapiens
cagcacattttaaaaacccatctcggcctagtaaaattactggagtcagtctttaggtaataattagagagaaagacaaaaatatatatagaaaaaggttcatcacaaattagaaaaattagatgcaagctcaatgtctaataataggagaatggttaaatgacgatgcatgtacttgacacagcattattcaaccttttcaagtcatgctttaaagaatgtttagtggtacagggctgtgatatggtttggatgtctgtccccttcaaatctcatgatgaaatgygatccctaatattggaggtagagcctggtgggacctgactggatcatgggggcagatccccaggaaaggcttagcgccacatcgcctaggtgatgagtgagttcttgcgttgagttcatgtgatttggttgtttaaaagtgtgtgggacctccttccggtctcttttgctcttgctcttgctacgtgatgtgcttgctcctgctttgccttctgccattagtaaaa

SEQ ID NO: 224524 - DNA, 622 bp, Homo sapiens
gttttcaaaaatctttttaatgcttttttaagttataaaaagcagtacctggtaaaataaaaatgcaaaaattcaagtatgaaatctctctttcccccaagccaatcttctacagagctcactaactattcttaacagtttgatgtgtaactcaccagtttcctttttttctttttcatacacagttacacattttctccctctccaaataggatcttaatatacatattattctggcatttgcattttcacctaacaatatggatacttttctatgtcaggatttatatcttctattttaaaaaartgttacatactattccatgacactatttggaacatttaactgtgttttcaatatggtgctattgcaaaatgctgaggccaatatgtttgtgtttatatttcttgttaatatgttagtaggctacattcctaggattgggattgttgaattaaggaacgtgtatattaaaacattgaatgaatattgccactttatttttccaaaagttgtatttttctccatgttgtatatttagaaaagctatagtcccacaagctatatataaaagggacagtgtttctatagtctcataaataatggatattaccaaaaaat

SEQ ID NO: 224525 - DNA, 622 bp, Homo sapiens
gttttcaaaaatctttttaatgcttttttaagttataaaaagcagtacctggtaaaataaaaatgcaaaaattcaagtatgaaatctctctttcccccaagccaatcttctacagagctcactaactattcttaacagtttgatgtgtaactcaccagtttcctttttttctttttcatacacagttacacattttctccctctccaaataggatcttaatatacatattattctggcatttgcattttcacctaacaatatggatacttttctatgtcaggatttatatcttctattttaaaaaagtgttacatactattccatgacactatttggaacatttaactgtgttttcaatatggtgctattgcaaaatgctgagrccaatatgtttgtgtttatatttcttgttaatatgttagtaggctacattcctaggattgggattgttgaattaaggaacgtgtatattaaaacattgaatgaatattgccactttatttttccaaaagttgtatttttctccatgttgtatatttagaaaagctatagtcccacaagctatatataaaagggacagtgtttctatagtctcataaataatggatattaccaaaaaat

SEQ ID NO: 224526 - DNA, 622 bp, Homo sapiens
attcagattcctgggcctcagctccagagattagagtttagtaggtgtttggtcaaactcatatggaggtttggagtttaaattctttggcaatttcacagtcttttaaaatatcaccatgtggcagggtctgcgctgactgcttgggtaattttggcatccaggcctcaccccatcctctaaacagggccacacttccrtagccaggaaaagacaatggtcctaggcttccaggtgaccctaaatgtgtccccatgaggcacgagggtactttctagggacagataaacacctctctgcaagtataggtgcccatattgcccatgttgaaattgtgctgcaattcagttcttcttggaggacctacactcacaaggactcctttctgctcacccagaagaaggcaaaagtccatcaaaaggcacggcctgaaaggcacctagcacgtgacaggtacacaagaaatattgactgaatgaatgaacgtagccagctcttcaaactctacttccattctccttccaccctccttccaccttctctctcccacaggtgaccagcctatcttgcttctagtgaccttcagccttcacctagcaatgctgccatttggttggggcct

SEQ ID NO: 224527 - DNA, 622 bp, Homo sapiens
attcagattcctgggcctcagctccagagattagagtttagtaggtgtttggtcaaactcatatggaggtttggagtttaaattctttggcaatttcacagtcttttaaaatatcaccatgtggcagggtctgcgctgactgcttgggtaattttggcatccaggcctcaccccatcctctaaacagggccacacttccgtagccaggaaaagacaatggtcctaggcttccaggtgaccctaaatgtgtccccatgaggcacgagggtactttctagggacagataaacacctctctgcaagtataggtgcccatattgcccatgttgaaattgtgctgcaattcagttcttcttggaggacctacactcacaaggactcctttctgctcacccagaagaaggcaaaagtccatcaaaaggcacggcctgaaaggcacctagcacgtgacaggtacwcaagaaatattgactgaatgaatgaacgtagccagctcttcaaactctacttccattctccttccaccctccttccaccttctctctcccacaggtgaccagcctatcttgcttctagtgaccttcagccttcacctagcaatgctgccatttggttggggcct

SEQ ID NO: 224528 - DNA, 612 bp, Homo sapiens
agctaactccaggaaaggacatctctcctccagtctgtaagacctgagatgtcaaagcatcacataacatagaaaatttaaaatatacttagtacaggagggyatatattaattaaaaaccccagccgggtgcagtggctcacgcctgtaatcccagcactttggggggccaaggcaggcggatcacttgaggtcaggagttcaagaccagcctgaccaacatggtgaaaccccgtctctactaaaaatacaaaaattagccaggcatggtggcgcatgcctgtaatcccagctactcaggaggctgagggaagagaatcacttgaacccaggaggcggaggttgcagtgagccaagatcatgccactgcactccagcccgggcaacagatcaagactctgtctagaggaaaagttaaaaaagccctctgtgcatgggcctttttactttcccccatgatgccacaagcagcagtcagggctgtgagtgctttactggatgatttcaccatttttggagcacattacatgtggaccatttacaagtctaaaagggctaaaacacgtgcccgtttactattttcctcttggtataacctcccataaatgagtc

SEQ ID NO: 224529 - DNA, 612 bp, Homo sapiens
agctaactccaggaaaggacatctctcctccagtctgtaagacctgagatgtcaaagcatcacataacatagaaaatttaaaatatacttagtacaggagggtatatattaattaaaaaccccagccgggtgcagtggctcacgcctgtaatcccagcactttggggggccaaggcaggcggatcacttgaggtcaggagttcaagaccagcctgaccaacatggtgaaaccccgtctctactaaaaatacaaaaattagccaggcatggtggcgcatgcctgtaatcccagctactcaggaggctgagggaagagaatcacttgaacccaggaggcggaggttgcagtgagccaagatcatgccactgcactccagccygggcaacagatcaagactctgtctagaggaaaagttaaaaaagccctctgtgcatgggcctttttactttcccccatgatgccacaagcagcagtcagggctgtgagtgctttactggatgatttcaccatttttggagcacattacatgtggaccatttacaagtctaaaagggctaaaacacgtgcccgtttactattttcctcttggtataacctcccataaatgagtc

SEQ ID NO: 224530 - DNA, 612 bp, Homo sapiens
agctaactccaggaaaggacatctctcctccagtctgtaagacctgagatgtcaaagcatcacataacatagaaaatttaaaatatacttagtacaggagggtatatattaattaaaaaccccagccgggtgcagtggctcacgcctgtaatcccagcactttggggggccaaggcaggcggatcacttgaggtcaggagttcaagaccagcctgaccaacatggtgaaaccccgtctctactaaaaatacaaaaattagccaggcatggtggcgcatgcctgtaatcccagctactcaggaggctgagggaagagaatcacttgaacccaggaggcggaggttgcagtgagccaagatcatgccactgcactccagcccgggcaacagatcaagactctgtctagaggaaaagttaaaaaagccctctgtgcatgggcctttttactttcccccrtgatgccacaagcagcagtcagggctgtgagtgctttactggatgatttcaccatttttggagcacattacatgtggaccatttacaagtctaaaagggctaaaacacgtgcccgtttactattttcctcttggtataacctcccataaatgagtc

SEQ ID NO: 224531 - DNA, 602 bp, Homo sapiens
attggatgagaaagagtctgaggtgctgggggggttctcattatggcaggtgggggctcccttcctacattaaccccttgttcaggagccagttccaatgtcataggaggcaaaacaacatgggagaagaagcggggatatagaacatcataaagaccttcaggtggcacataacacaaaaatgaagaggggcagggaatgggctgtttggaaatacttctccagagacactccagctgcagggtagggggcaggctagagtgggggcctttgtgggtgacaagcccagtagctggggcatctttgtggcttcatgtgctgccaggggctggcccactagccrttgctgcaggcacctctccttttgcagacccaggcagggctggcccagacagcattttacattcaattcctgcttaaagcagggaggtccaggcaggaggtccaaggggaggttttggccttttcctcctaactgcagctgctcatgttatgcttggtgttgggcgcaatggacacagggagtgatttcattgtatagactcaccctccccaccccttgccaagtggatagaaactccacatccttgaccacagaccct

SEQ ID NO: 224532 - DNA, 589 bp, Homo sapiens
tgagttgcgtgtgtgtgtgtgtgtgtgtgtgtgtgtttgtgtgtgtgtgtgtgtgtgtgtgtgtttactgggggctcccagagctcagaggcaggtggtatcagggaccaggaactctactgtattgattggactgaagagcagaaccctaccatattggctggattgaggagsaggaacctgactatttaggctggactgaggggcaggaaccctaccataatagtctggattgaggagcaggaaccctgctgtattggctggattgaggagcagagagattgaggaaagacttcctgaataaacatggagaacatgcagcgaatggtggcaagacttgggaagaggagaatcaaggtgcaaactcaggttcctccttgatggggcaaagcagaagcaagatgatctgatgctgcagggggctgccctactgccctgaggccccttaacttttcttacctggatcagcacagttgtgagagcttagctggaggctggctgtccataggtcagggataactgctccatctgtggagggtagagaggctttggggaagggagccaaggggagagcattggtggagatgtg

SEQ ID NO: 224533 - DNA, 573 bp, Homo sapiens
tttgttttatgtgttatacgccaatattattattcatattgtctccttttgcccttaaaagttatcacgtggttcccctcgtcataacacaataaatggggtcccgatttgcctgtataaaattgtataaaatgtggggttcccttattgtgaggttaatgaattgaacaactgaggtaccagaccagggagtttctgggttgagctgcttgtcccagccttattgtcgcgccccctggtggcagctttctgagctggcttaaatatccatcsggatgtttctgggtcttcaggctggcaggggttttgagaacagtgatagcaattctaggattcacccaattcgttggtttccaattcatggagactggcctcagactattgacattgcatggaccctagacagggttgcctgccttcccctgcctggccttgacctcccttctctgtcattcctccccagggtaagaagtttagcccaaaccatttagagaactacgactggacataaagatgggaatgaattgtctagcgctttatatttggattcaagcaatcacagttaacactggt

SEQ ID NO: 224534 - DNA, 587 bp, Homo sapiens
gtgcatcagttaaatgtgatcatccccattctaaaacgaagactcaaaaagtgaaattgcttgccgaaggctcaacagccactaagggatatttggctgccaatcccactccgcttccactctaccaaatacctcctaaattcgtgccgtggttggtggtattcagagtatgatatgsaggcgatgatgacctgattcctcaggaagaaagagtatgggaggagccagagagctgtaggtcatggggtccactagggtgcagagacagagaaagagaggtggggagcagatatgaagactgtgtaggttcaggtcccacagccttagggcaaccagcctgtgacctcttagtaaattggtctgatgtatgggctattcccctaaggagcacaggaagagtcattttgtaacttagttttagattcaggctagacttttgctgcagctttcagacctgaacccccaggctctgtggggtggggagttgaaaacatgttcctctgctccaaggagcttttcctttatcaaacaagggaaccagcaatacaataaaagcgactgctttaaacaagggtgtatcagcttaa

SEQ ID NO: 224535 - DNA, 546 bp, Homo sapiens
ttatggccacacctcttcacacatctgtccagagtgagaactcacmgtgcgactgcaagagacaccagacagcaaagtccttattcctcagagaaagaggcaagttaccaccctcaggttttgtgggctttcagcatgtattgtggctactatctgtctgctggttgtcttcagagaaaaaaaaattaagaaacaaaaattccctgtagccaagaataggaaaatggggccatttcctggtgcagccctgataggggacggcttggggatggtgtggggatcgctcgccaaacacagtccagctgacacggtgcagcagcacatgacttttctctcctccccaaacacaccatctctttgacagacaactgacttcccattcgctgcccgggaagcccagctgctcccctctgcctgaggagctcttcctccatgctccaaggccacaggtggcaagccacttacctgtgttccgcaaacacgtgttgatcatctgcgctgttccagctctgttctaaatgtcagtgggaaggggagggatgacaa

SEQ ID NO: 224536 - DNA, 546 bp, Homo sapiens
ttatggccacacctcttcacacatctgtccagagtgagaactcaccgtgcgactgcaagagacaccagacagcaaagtccttattcctcagagaaagaggcaagttaccaccctcaggttttgtgggctttcagcatgtattgtggctactatctgtctgctggttgtcttcagagaaaaaaaaattaagaaacaaaaattccctgtagccaagaataggaaaatggggccatttcctggtgcagccctgataggggacggcttggggatggtgtggggatcgctygccaaacacagtccagctgacacggtgcagcagcacatgacttttctctcctccccaaacacaccatctctttgacagacaactgacttcccattcgctgcccgggaagcccagctgctcccctctgcctgaggagctcttcctccatgctccaaggccacaggtggcaagccacttacctgtgttccgcaaacacgtgttgatcatctgcgctgttccagctctgttctaaatgtcagtgggaaggggagggatgacaa

SEQ ID NO: 224537 - DNA, 578 bp, Homo sapiens
tggctctgccacctggagcccaggagcacctctctctcctccagtctgagttcagtcctccttcacaccactgctaccmcagagatgttccaaaaatgctcagacttcatgccactccctatttaacttcatcagtgtttccagggctttctgaggggaagcccaaactttgcagtgtcacctgcaaggccgaccttactggcccctgctctttgcccaatctcatctgcaaccctcccccaacacaccagcggactggccacactgcacttatacacaccccaaaagtctactgctgctctcaactgggtcctttgcaatgaccattctctctgaatgcccagcctctggtccaccatgataactcttggcctttgttcaagtagaaattagtgtgtagagttgtggctaagagggcagactcagtgtaagcctggaggtgactcctgctctaaaactcactggctgtgaccttggatgtgtcacataggaggacacaacctccctaagaccctgtctcttccacatcatggcaaggaaggcatgcctacctacacagttgacacaaagttgaaatg

SEQ ID NO: 224538 - DNA, 578 bp, Homo sapiens
tggctctgccacctggagcccaggagcacctctctctcctccagtctgagttcagtcctccttcacaccactgctaccccagagatgttccaaaaatgctcagacttcatgccactccctatttaacttcatcagtgtttccagggctttctgaggggaagcccaaactttgcagtgtcacctgcaaggccgaccttactggcccctgctctttgcccaatctcatctgcaaccctcccccaacacrccagcggactggccacactgcacttatacacaccccaaaagtctactgctgctctcaactgggtcctttgcaatgaccattctctctgaatgcccagcctctggtccaccatgataactcttggcctttgttcaagtagaaattagtgtgtagagttgtggctaagagggcagactcagtgtaagcctggaggtgactcctgctctaaaactcactggctgtgaccttggatgtgtcacataggaggacacaacctccctaagaccctgtctcttccacatcatggcaaggaaggcatgcctacctacacagttgacacaaagttgaaatg

SEQ ID NO: 224539 - DNA, 578 bp, Homo sapiens
tggctctgccacctggagcccaggagcacctctctctcctccagtctgagttcagtcctccttcacaccactgctaccccagagatgttccaaaaatgctcagacttcatgccactccctatttaacttcatcagtgtttccagggctttctgaggggaagcccaaactttgcagtgtcacctgcaaggccgaccttactggcccctgctctttgcccaatctcatctgcaaccctcccccaacacaccagcggactggccacactgcacttatacacaccccaaaagtctactgctgctctcaactgggtcctttgcaatgaccattctctctgaatgcccagcctctggtccaccatgataactcttggcctttgttcaagtagaaattagtgtgtagagytgtggctaagagggcagactcagtgtaagcctggaggtgactcctgctctaaaactcactggctgtgaccttggatgtgtcacataggaggacacaacctccctaagaccctgtctcttccacatcatggcaaggaaggcatgcctacctacacagttgacacaaagttgaaatg

SEQ ID NO: 224540 - DNA, 577 bp, Homo sapiens
ggcctctgctcttgggagtcctgagtattaggctcttcatgatattcctttaatgaaaggcccccctgccccctctcactcattaaacagcagtgcctgcaagattctcatctcctggacatgcagggctcagggtcagctgccccagaagtactcaagaactttagagacagctgaagctcaccagcctgagacccatcttgcctcttcagaacactgagggagtccagagatcagtgtctaaatccagctcacccaggccgacctgaaactttcccagatgcagggatgctgcacatcttggcattggtccccaacatgtctggactcctgtgccaagctctgctcagggggcagccaacgttggtggtgaggcaggagggagggagagagggagtcaggatctcaatactctgaaccaaccrggggcagaactggaggtctgggccagctcccctcagacagaaaccccctctcatagggattgccccaggaatgcatatggaaggctcaattcttctggcccaggtatagccccagctgacatctcatcccaatcatccccatcctccacctc

SEQ ID NO: 224541 - DNA, 537 bp, Homo sapiens
accctgttttccataatggctgtactaattcacatttccaccaacagtgttcaggggttcccttttcttcatatcttcaccaatgcttattttttgtctttttggtaatggccattctaacagatatgagatgatattgcattgtggttttaattagcattttcctgatgataaatsaagttgagcactttttcataaacggtacctgtttgccgtgtatgtgtctctctttaagaaatgtctattcaagcccttttccccattttttaacagagttattacttggtttttgagatgtttgggttcgttagaaattttggatattagacttttctcagatacgtgggtttgcaaatattttctcaggttcctagcattagtatttttgctcccccatatagtattttataggatggttgtaccatactatatttaattactttacaatagatgagaattcaagctggttccagtttttagctattgcaaacaatgctgccatactgagtactttcagtggtatgtaactgtgttagt

SEQ ID NO: 224542 - DNA, 537 bp, Homo sapiens
accctgttttccataatggctgtactaattcacatttccaccaacagtgttcaggggttcccttttcttcatatcttcaccaatgcttattttttgtctttttggtaatggccattctaacagatatgagatgatattgcattgtggttttaattagcattttcctgatgataaatcaagttgagcaytttttcataaacggtacctgtttgccgtgtatgtgtctctctttaagaaatgtctattcaagcccttttccccattttttaacagagttattacttggtttttgagatgtttgggttcgttagaaattttggatattagacttttctcagatacgtgggtttgcaaatattttctcaggttcctagcattagtatttttgctcccccatatagtattttataggatggttgtaccatactatatttaattactttacaatagatgagaattcaagctggttccagtttttagctattgcaaacaatgctgccatactgagtactttcagtggtatgtaactgtgttagt

SEQ ID NO: 224543 - DNA, 304 bp, Homo sapiens
acttaacgtgtgatagaggcatctttttaaatccatgagcaatagataggtggattatttaattaattgtgtcaggataaatagtgctagctaaatagaaaaaactattgaacctaaatacttctctcatatcatgtaggacawcaacaaacactagatgaaataataagttcattataaaaatcaagtaatcagcaaaattattttacctttgggtgtatgggtaaaggagggaattccaagtaaaaacaaaacaaaaccttagtgagagcgtcaataaatcaaaattaccatttatgatttt

SEQ ID NO: 224544 - DNA, 545 bp, Homo sapiens
aaataataagttcattataaaaatcaagtaatcagcaaaattattttacctttgggtgtatgggtaaaggagggaattccaagtaaaaacaaaacaaaaccttagtgagagcgtcaataaatcaaaattaccatttatgattttaaaacttctgatgtctaaaacttccaatttaaaaattaaaaagcatgtatcaaactgggaaattatattttaaacctttatgacacacagggattaatacccttaatgmacaagcatgtatatatgttgattttttagaagatgccaagactcaaggagagagccagagtattttacaaaaaagtaaatattacacaaatggatattggtgatgaaaagttccatcttacaagtactgaaatagttaaaggttagaacaagatgatcccatttgtcacctatcaaattgtcagggatttttaagtactggcaaggactcagttgggtagaattctcatcctgctgacggcctgtccatcagggaaaagcgactggtcaatgggtatcaagaaccatcagtc

SEQ ID NO: 224545 - DNA, 570 bp, Homo sapiens
caacatatttgtacctaggtttcaggatgcaccaaataagtgaatgggaggcacacagattctgggatgaggacttggcagttaattctcccatgctcaacactggtccttgcctgacccacatgcagacatgtttgctgtcacaaaataattcacttaaattagttaaatctgcaacaacaacaaatctgtttawgatcagtacagacattttagtacctagaccttaataaatttagtatattgaccttttggtaaagctactgagtgatttctatacgtttacatattcataagtttaagtctttgtaatatcagtacattaaaactaaagagtatttaaatatgcattgaatatctgcatacgacacaaaaatgggccatctctccataaggcaagcacattattaatttctttgcaaaatatctggacaagatttttcaattaatttttttcctgttgtgtttgcctccacctgacaccacagatgtgatgttgtctttttcacagctggagaccaactaaaatggcctctgggataatatgaatgtgtcaagcaacaaagaata

SEQ ID NO: 224546 - DNA, 570 bp, Homo sapiens
caacatatttgtacctaggtttcaggatgcaccaaataagtgaatgggaggcacacagattctgggatgaggacttggcagttaattctcccatgctcaacactggtccttgcctgacccacatgcagacatgtttgctgtcacaaaataattcacttaaattagttaaatctgcaacaacaacaaatctgtttaagatcagtacagacattttagtacctagaccttaataaatttagtatattgaccttttggtaaagctactgagtgatttctatacgtttacatattcataagtttaagtctttgtaatatcagyacattaaaactaaagagtatttaaatatgcattgaatatctgcatacgacacaaaaatgggccatctctccataaggcaagcacattattaatttctttgcaaaatatctggacaagatttttcaattaatttttttcctgttgtgtttgcctccacctgacaccacagatgtgatgttgtctttttcacagctggagaccaactaaaatggcctctgggataatatgaatgtgtcaagcaacaaagaata

SEQ ID NO: 224547 - DNA, 533 bp, Homo sapiens
tttctcttcctgctttcaagattgtttctttgtctttaactcgcagatgcttaatttgtgmtttctttaggtctatcttgtttggcatttgctcagattcttgaatctgtgggtttatgtctcttgccaactttgcaaagttttcaactattttttcttggagtactttttcagcaccatcctctttcttttctcttaccagaacttcaataacacgaaagttagatcttttgttatagtcccacaggcccctaagaatctgctctgctttttgttttggtctattttctttctgttgttcatattggttaatttctattgttctatcttccagttctctgattgttctccttaattctactgttgatcccatccactgagatcaacacttcagttactgtatttttcagtttaaaattttccatttggttcttctttatagcttctgttctttgttcttcattacccctgggctaggggtaggagttccagctccctgcttggtttccaggggaactgagctgagggtggct

SEQ ID NO: 224548 - DNA, 439 bp, Homo sapiens
actctgattatttccacaggctaaattctttgaaggagaattactgggtccaagaggagaatcttataaagattcttggttacaaattgcagattgcttgtcaaaaagattaaccgagttgtttgtcctccaatagtgtctaagggtatttgactcattacatctgttttagcaattagtatcttgcatctaaatggccttgctcagcagtgggaatgtagcctttgctgggggccttgaacagtcaggccaagtaggggagcaaagctggagaaaatgtgtgtgtggggtggccccatagccagcagatcttgttctgttcttccccaaygaacacagataataacaagtgaactgctctacttcagggatttaagttagaggttacaaagaactttctgtccatgaagaggacagaaatacagaataccaggactgc

SEQ ID NO: 224549 - DNA, 409 bp, Homo sapiens
tgtaaaaccattgctctttttcatgayaccatgtttttagggactgcccatctaatggttccttacaagacagagctgcatatagagggggaaatgtaacctactctatatgcagctataaaaacaaagaatctggattctaaccacttagattctccagagtcataatgtgttaggaaggagtgaatgagaaataatttttttgcccctctggtctccatgtgactgagattgcctgagatgtgtgtgcagactctcaaagaaaaagtgtataattgtcaggcattggatcttgttttcatcttggtaaaccaaatcctggagatggaatacagctgctatctcagcagctggttccagcttgtgatgtgcctgtgtccagcagagcccacggcagccttatgaaagc

SEQ ID NO: 224550 - DNA, 409 bp, Homo sapiens
tgtaaaaccattgctctttttcatgataccatgtttttagggactgcccatctaatggttccttacaagacagagctgcatatagagggggaaatgtaacctactctatatgcagctataaaaacaaagaatctggattctaaccacttagattctccagagtcataatgtgttaggaaggagtgaatgagaaakaatttttttgcccctctggtctccatgtgactgagattgcctgagatgtgtgtgcagactctcaaagaaaaagtgtataattgtcaggcattggatcttgttttcatcttggtaaaccaaatcctggagatggaatacagctgctatctcagcagctggttccagcttgtgatgtgcctgtgtccagcagagcccacggcagccttatgaaagc

SEQ ID NO: 224551 - DNA, 450 bp, Homo sapiens
ggtggcatgtgcctgtggtgccagctactcggcaggctgaagtgtgggaggattgcttgagcccaggaggctgaggatgcagtgagcagtgataacgccactgcactccagcctgggtgacagagctgygactctgtctctaaaaatataagaattaaaatgaaacgtcagaaatttattgctcacggttctggaggatggaagtccaagatcaaggtgccagcagatttggtgtctggtgaaggcctgttccccatagatggtgacatctgtgtgtcctcacgtggtggaagaaaggggcaaacaggttccttcaagtctcttttatgaagggacttaacccattcacaaaggtgtagccctcatgacctaatctcctcccaaaggcccacctcttaatactattgcattggagaagttttcaacatagaaattttggagaggacacaa

SEQ ID NO: 224552 - DNA, 450 bp, Homo sapiens
ggtggcatgtgcctgtggtgccagctactcggcaggctgaagtgtgggaggattgcttgagcccaggaggctgaggatgcagtgagcagtgataacgccactgcactccagcctgggtgacagagctgcgactctgtctctaaaaatataagaattaaaatgaaacrtcagaaatttattgctcacggttctggaggatggaagtccaagatcaaggtgccagcagatttggtgtctggtgaaggcctgttccccatagatggtgacatctgtgtgtcctcacgtggtggaagaaaggggcaaacaggttccttcaagtctcttttatgaagggacttaacccattcacaaaggtgtagccctcatgacctaatctcctcccaaaggcccacctcttaatactattgcattggagaagttttcaacatagaaattttggagaggacacaa

SEQ ID NO: 224553 - DNA, 368 bp, Homo sapiens
agtagtttttgcatttataggattactgtcaaatatgtgcatttatataacattactttttcatgttattttaaatcttgtcccctctccccagtttccactttgttatcctgcatatttrtctctaaaaaaattatttacatgacttttctgacctagctataaaacagtttgatgtttataataggcagagctatatttaatttgctacttttcagctgggcaaaggcaggagagtagcttttctaagttccatttttctgttagcattgttttgtcagtaaggtaccctagtcatttattgtctctgcttgaagtgggataatgttgcatgagaagactatacaagggactagtagtgaggttaa

SEQ ID NO: 224554 - DNA, 429 bp, Homo sapiens
agactgaaaactgaggaaccatttgcatttaagtgataattaagtctggcaaatctgccgagagagagaatagagtgaaaaggaaaagagcccaagggaacatcctcccgtgagcctgataaagaagatgggtcaaggagggaggctgagatgtagtcagggtgggcagcaagactatcaggagagagtagtgtcaaggaagccataaaaagatgaaaatttcataaaggaggcagtgatcaacaatgtcaaatgtcatagagaagttcagtagggtgacttctaagccattgggtttagcaagtagagagtcatyagtaacctcagaaaaatggcttcaatagcacaaagggctacaaacggctgaacagtgaacagcattttgtttttgtatatcataaactgtgtttattccatgtacatgtttta

SEQ ID NO: 224555 - DNA, 543 bp, Homo sapiens
gatactcattatagattaatatttgactttcctgccagctatgtttctgccagccatactgactgtgaacgcctttattcatcaccacagaaacagtgtcccattcagcattgcttctaccaaagaagtgagagaaagagatgtctatggatttcactggtctcaccatgtgtcccatcacctacaagcacatgcccttgcagaatggtagaataacctactggagactcagttatggtaccaactagtcaacagcagcctgataaattgggatgctgtgctatagaatgagataatgctctaaccaatagccaatacatagtgctgcttctcccagtataayggcaggagtctagaaacgaagaactggtagtatcaccttccattatttcatataaggacccagccacaaaggttttgtacctgtttcttgtggctcttggctctctgctgacttagaaggcttaataatgaaaaaaagacggcttccacctagagactcaacaggcaggatcaggaagggttcaaaccccttaaaatgaa

SEQ ID NO: 224556 - DNA, 543 bp, Homo sapiens
gatactcattatagattaatatttgactttcctgccagctatgtttctgccagccatactgactgtgaacgcctttattcatcaccacagaaacagtgtcccattcagcattgcttctaccaaagaagtgagagaaagagatgtctatggatttcactggtctcaccatgtgtcccatcacctacaagcacatgcccttgcagaatggtagaataacctactggagactcagttatggtaccaactagtcaacagcagcctgataaattgggatgctgtgctatagaatgagataatgctctaaccaatagccaatacatagtgctgcttctcccagtataacggcaggagtctagaaacgaagaactggtagtatcaccttccattatttcatataaggacccagccacaaaggttttgtacctgtttcttgtggctcttggctctctgctgacttagaaggcttaataatgaraaaaagacggcttccacctagagactcaacaggcaggatcaggaagggttcaaaccccttaaaatgaa

SEQ ID NO: 224557 - DNA, 389 bp, Homo sapiens
tctccactctttaaagaaagacaataaartaacatgtttttaagagtggaggattaaatgccccttagttgcttagtaaataaacaatagatattgttagttttagaccagaaaaaacacacattctttaaaaggccaccagataatcctacataggttgtttagggtaaatccttgtatgtctttaataaggtaagtttggggaaactaacaaaacatatttgtcttgctgttttgtattaatagagtcgtataagaagaatgtggaatgatactgtgagaaaacaatcagaatcttcttttatctcaggtgacatcaatagcacttcaacacttaatcaaggtcagttatcaggaaaatttgagttactaccatttattaaagtaca

SEQ ID NO: 224558 - DNA, 389 bp, Homo sapiens
tctccactctttaaagaaagacaataaagtaacatgtttttaagagtggaggattaaatgccccttagttgcttagtaaataaacaatagatattgttagttttagaccagaaaaaacacacattctttaaaaggccaccagataatsctacataggttgtttagggtaaatccttgtatgtctttaataaggtaagtttggggaaactaacaaaacatatttgtcttgctgttttgtattaatagagtcgtataagaagaatgtggaatgatactgtgagaaaacaatcagaatcttcttttatctcaggtgacatcaatagcacttcaacacttaatcaaggtcagttatcaggaaaatttgagttactaccatttattaaagtaca

SEQ ID NO: 224559 - DNA, 542 bp, Homo sapiens
attgtgtctaccaagttaaaggaagccttacaaataactatcacaatttcattttgttgcacatggaacatgatacaaatttgtcagtttttcagatgtagaagttgggacagtctttaagacaatacaaatcactaacaaatataatmtctcattttctcatttttttgctaatgataatttgcccaacaatgatcacatatttattggtcatgaagtttgtgtcaggtgatacagatattttttttttctgaaggaaactgcattttctaggatatctgcagctttaagagtggagtgagcactaaaacgggaaatttcgtatttttttccaagaattaaattttttcctaaactcctccaagccttgcatacaatgcagcagcctcacagtggtcagcttcatttcaataacatcatttcattctttttttttacagacctatctgtagactgtgatttttttttttctctaggattttgagaatgaataacctaactttccatggtgcagaccatttaattttctcttgacttttttt

SEQ ID NO: 224560 - DNA, 589 bp, Homo sapiens
caggtaccatttgtttcttttatagaaaatttatttttggaaaaacagttcatccatctacctttcagcatgtcaaggttaactcaacagccaagtgccagccgtgggagatactgggaagaaacttggactaagttgggggtcggggagaatttggaacaaacagcaaraaggtaattaagagttgggagaggtggggattaggaaaaatgtatgcaatatataggaatattttgcttgagcaaaatatctcttattgaatcaatgtgttggggcacacatcacgcaggggaaatgtatcttagctgtgataagggaactgtggtgtagggtgcagagatacacggcagtctttgaaaaaactggcccatctccatgttcacctaggtctacagtctggtagctctgaaccagtaagattatagaaatcttgatatcttctctttggttctcagggtgagaaattgtatatttttagattgttcccacaaaggggacagaatttctgttattctcctgggccgagtgcctttttgttcatctactcaccttaacccaagtcccgtttcttggtacctcagggttggca

SEQ ID NO: 224561 - DNA, 434 bp, Homo sapiens
aaatgccttgttactccagcagaaaagcatgtctattattaccaatagaattagtgtgttcagaaaaagaaaaggcttaatttacagccttttgaagttttagggaaaattccttttttaaagcatgcaggaggaaagacatgacatcacagccttaagtgggtaaaaggttacatggctgatactttttaagtgattgaattattagcatgggtaataatttgtggaaggtsaagaggtgccactagtttcagtgtgttaatcttccccacttaaagtgagaaataaatacctcataagaatatatatggggatatagtgtctttcctttctaagacacttgcttgagtcagcagtggttgcgtgtggtcacctttggattagtcttcggattcagagaaatgagtgggtggtttcagtgcagtttcaatgtt

SEQ ID NO: 224562 - DNA, 441 bp, Homo sapiens
tgttttagggtttgattgataaaggcatttctaaagtggatctaattaagtaattaaaacaaaaggatcttctacaaatttacacgaaataggtttttaacattctgccttgtggtataaaaaagccttattacgcatccttgattttaaaaattgtgcttagttggctccatgaatatgcagagatgagtgaaaaagttggactatcagtgacaacttatcttttaggtttacttttaacactrttttcatctaagttaagatgaaattgaaataagctttctggatgcttctaaatttcacttcagcctggttgaaatcatgtcccctcctccttaagtatttttctcatttccattttaggaagaaattttgctaacatatataaacaggagtaataaagagatttcatatgccagcactggtaatagactatggctt

SEQ ID NO: 224563 - DNA, 565 bp, Homo sapiens
tgaactgttgcctagtgacctcttagccatcatcaagtcgtagtgtgacgcattatcttttctattttaaatgtgtttagatgtacagacacttaacattgtattataattgcctgtggaattcagtacaataatatgctattcaggttgtcgcctaggagcaatagactgtaccttatagtctaagtgtgtagtaggctatactatctcagtttgtttaaatactctcattgctgttcctgtaatgataaaataggctgacaatgcatatcccagaaagtatccctttgttaatgatgcataactagtttcactgccctaaaaatcctctgtccttggcctgttcatccctcttatcctcctaactactggtagccacagatattttccagattggcttatttcacttagtaatatgcttttacatttcctccataycttttgttggcttgatagttcatttctttttagaatggaataatattcattgtctggatagacacagttgatccatgcacctacagaaggacatataggtagtttttaggttttgtcaattatggat

SEQ ID NO: 224564 - DNA, 475 bp, Homo sapiens
caacatttgttgagtgtcttccacgtgcaaaggctgtccctgcattttttcacagtcatactaatgctacggtcaggctccatcatcaccatctgacaactgaggaaactgaggctttgaaaacagagagatgtggacagccttgcactgcaggagggcccaaggctctggcattaaataaaactggacattactggtcttagacactgtgtggccttcttcgagtccttgaccacctgtgagtctgtttcctcacctctgaaacaagagcaagagtgcacgccctgggctggggtaagaacaaaatggtacggytggcttcccagaaaaatccaccttctccctcttcctcttctggttacttctgatcttttagctttacttatgtttatgattatttcatcttctaaaataagaagataccagatcccataacaagattgctgcaacttattcacagcaaagcaggtggagg

SEQ ID NO: 224565 - DNA, 525 bp, Homo sapiens
tactacatcttatttttcgaagcctacagttcagaattagtatttcagtgagtaaatcttcccaccttaacaatttctaattctaattcagctggtaatttaatggttaattcctctttccattttctcttattacagagtgaatgcaggtaaacggatcttagttacagacctggcctctctttgcatttcaatgggttcccaagtggaactgccagattccaatgtgctatgaaaatgggcagcagaccaacaaaatctgtcctcatcaaaaattcagaaaaataaaattaaaaatgtaargctgcacattcaaaggaatccagcctgacccccttgtatttttatgtatgcaaaatgtatttttttgcacctgcaagcacagtccctataagccaactatagcctctcaattgccaaggctttttaaaaaaatctgcctttcaaattcatcccagaaactcagtaatgaaacaaggatgaggtagagggctgcctacaactatttataggaatattggggga

SEQ ID NO: 224566 - DNA, 519 bp, Homo sapiens
tttgcattttcttcatgccttttaattaagatttgttagagcaaatctccacttgccagacttcatattcattgaggagggacttcagcaataatcaagatcttggcccttatccccatctttgactagggtccgcttgggatggaaggtatggctctatctaattggagagtttgaagcagcagctgaacatacaaagatcagtctcttctggggctttctgtgcaatttgcctgctgaaagacagactgcattctcatctgatctcatgcacgagtcatgggtcctactctgggcaagggcaggggttgggagaacagggggatctgcagttgtccaacacccctgcaagccaagtggaatagctcatctcattcaagaaagctcactgtggctgtgtatccaagtcacatcctccaggccagcatttatyagtcagaaagctagagtttggaattcttcctgtccaactcttgtctattaatcactcagatttgaacttgggagaagaaagctcat

SEQ ID NO: 224567 - DNA, 433 bp, Homo sapiens
agttttgtcatctgtgagtgggcatagctatagtgcctgtagcatagggttattctaaggtgaaaatgaaataacrcccatgaagtactgagtttatagcaaggagtcaatagatgtaaatgattgctgtaataatggttactgtgtgcctcacgaaagattgtttactctccttcattaggctgagggtttgagagcaggaactgtgtatcatcaacatttatatctggattatctggcccagttcctggaatataagtaatgttcactaaatacgttgagtgaatcaacgaattgtttttaatagatgtaaccactgcaacattatagaatttcagagctgaaaggaaccttgttgtcactgaatgaatttaccttcttaatgtaaacaaaaggaaactgaggccaacagatgttaaagagttgagccaaa

SEQ ID NO: 224568 - DNA, 461 bp, Homo sapiens
aggattaaataaataatgtcttcatcrgtttatttcttctgaggaactacagctatattacctagcttacactattagtgtttcattcatttactgttcaacaaacatttattgagtacccgtgatgttctaggaactgcgctacttactgctacccctacagctactattactactaataacagcagctgacatttatcaaacatttatttttgctcagacatcatgctaaacacaatgcatatgcagcctttctttaaattcctacaatcaaccctattatcctcagtttactgattttgaaactgaggcttggagagatcaagtattttgtcttataaacaccataagcacaaggattgtgtttgcttttccttgtctgtgtaccctcagcactcaacagtttctagctcttatgaggtccccagtagatatgtattgattgagtaaatggtggaacc

SEQ ID NO: 224569 - DNA, 241 bp, Homo sapiens
gacccattcaacactgacacacgtgctcactcatcaatttcaccgtcaggtgttataaagccttatgctattagttaggaaaacacatccagttgtctccaaaaactgccagtgcagctaattaaacaaagaggcwcattgccatcaccactgtcaccaccccctgaccccctcccccagccattcaggtttttttcatgtgtgtgtgtgtgtgtgtgtgtgtgtgtgtgtgtgtgtgtgt

SEQ ID NO: 224570 - DNA, 241 bp, Homo sapiens
gacccattcaacactgacacacgtgctcactcatcaatttcaccgtcaggtgttataaagccttatgctattagttaggaaaacacatccagttgtctccaaaaactgccagtgcagctaattaaacaaagaggctcattgccatcaccactgtcaccaccccctgaccccctcccccmgccattcaggtttttttcatgtgtgtgtgtgtgtgtgtgtgtgtgtgtgtgtgtgtgtgtgt

SEQ ID NO: 224571 - DNA, 536 bp, Homo sapiens
ttcctctctcattagcttgtatttaccatcactcatgattcacagtactttttattgttatgtcagcaaacaactcaccagatatatacgtgtgcaccatttcactttatgctgtcatgaatcctgtgaggcagtatagctgacattaatagctgggtttttcaggtaaagagactaaaattcaggtaagttatgggactttacctctggcaaataagtacttatctatggacttgaaatctcatctttagatcagaagtcctttgtaccaaaaccacttgtaagtctgaagtattcctaaatctgcactttagaggattaaattactggagcccctcrgtcaacagtgtagctcatcacctgtcgagaaccccagcagagtccaactctgagtgcatggagttgcctcttggtactgcctttgggatgatctctgagtggtggtggtggtgcgggggatgctgcattcctctgtgcatttcatcttagatgcatttgatgtgggcaataaagacgtgtggaagtggttgactttt

SEQ ID NO: 224572 - DNA, 560 bp, Homo sapiens
acatgtgggtttttgtgagttggtttttcccatactaatcctggacttgagagctggggctgtttttggagaaacacggatacatattggagagaatttacattctaatgtaattggtcagtaaagaggtttgatttagttagtaattctaaccacttggttataccctaaacttacatagaacacgtaataaaccattacctgggcccaacctgcagggacattgattcacctggtctgagtggtcccaggtggtattgatatacaggcaagactgaggatccctaatctctgctctcaggaaaccaaacagttaatggacagtgatttcgtggctgtgagctgtgagtcccaactccacaggaggctttctgagtttaaaaattgtccacggttctgcttctggaatctcgtactcggggagggagtttgttccggcattgtggcacacaggaaaggtctcaacttggagtctttgagatacagtgtcckggtacttcctagctgtcagacactggaaaacttacctcactctctggaaaaaaagaccaaaaacaaaa

SEQ ID NO: 224573 - DNA, 551 bp, Homo sapiens
actgaactagatgttagtatatgtattttcttatttgaaatccagctattgctagggttacaagagacttcctcacaagaggtagcctgaactttcaaatgcacattattttctttgataatcaccacttctattgccaaaagagtaacattatgcaatgctaaaaaacttctgagtttgtttaaaaaaatgagaaaacatacccttttttcaaaattgacttttccaacctagtatatattttttggagaaggagggctttcacatttaggattttatttagagtgacttaaaatgtgtgttttgmttgataaatgaaaaccagaagcataatttttccgaatgctgcacataaaattttagtggaaaagctatgccaatattaaatacaaacctgattaaaacttgtgtatcactgatttccacgcaaaagtattgattgattgagaaattaccatgtgaaagtcctcatgtagagagctgaaataaaatttattttctaatccatatttatttatatattttgtcctgaagaagacaaagtttatatg

SEQ ID NO: 224574 - DNA, 551 bp, Homo sapiens
actgaactagatgttagtatatgtattttcttatttgaaatccagctattgctagggttacaagagacttcctcacaagaggtagcctgaactttcaaatgcacattattttctttgataatcaccacttctattgccaaaagagtaacattatgcaatgctaaaaaacttctgagtttgtttaaaaaaatgagaaaacatacccttttttcaaaattgacttttccaacctagtatatattttttggagaaggagggctttcacatttaggattttatttagagtgacttaaaatgtgtgttttgattgataaatgaaaaccagaagcataatttttccgaatgctgcacataaaattttagtggaaaagctatgccaatattaaatacaaacctgattaaaacttgtgtatcactgatttccacgcaaaagtattgattgattgagaaattaccrtgtgaaagtcctcatgtagagagctgaaataaaatttattttctaatccatatttatttatatattttgtcctgaagaagacaaagtttatatg

SEQ ID NO: 224575 - DNA, 427 bp, Homo sapiens
gcccagcttcctataaagcctgtggaaccatcagccaaataaacctcttttctttataaattatccagtctctggtcctatctgcttacatggtatacatgaaagtaaacatggctgcctacaattccccgattatgtaccctacaattagaggtgacatttaaagtatttaaccaccaatcagaatagatgggtttctttcataacactgatagacatttgacctgggcaaccacattrattctagtccaggatttcagagaaagggtggcctgaatatcagtctcaaacccaaaaaccttaggacacaaatttattggccaagtgccaatatgaatcaagtgcccatgtctggacagattaactgtggtacaaagaagagtcatacaatagcacaacttcaacatgcagatggaaaaggagggtc

SEQ ID NO: 224576 - DNA, 427 bp, Homo sapiens
gcccagcttcctataaagcctgtggaaccatcagccaaataaacctcttttctttataaattatccagtctctggtcctatctgcttacatggtatacatgaaagtaaacatggctgcctacaattccccgattatgtaccctacaattagaggtgacatttaaagtatttaaccaccaatcagaatagatgggtttctttcataacactgatagacatttgacctgggcaaccacattaattctagtccaggatttcagagaaagggtggcctgaatmtcagtctcaaacccaaaaaccttaggacacaaatttattggccaagtgccaatatgaatcaagtgcccatgtctggacagattaactgtggtacaaagaagagtcatacaatagcacaacttcaacatgcagatggaaaaggagggtc

SEQ ID NO: 224577 - DNA, 560 bp, Homo sapiens
gctgccttacagggtaaatgagatgctacaggtaacttctgtaattatatttggcatatcttaattacactaaaaatgttaattctgttactgataatagtagctgtagttgttttaatattaataatggcattagaggacataacccacaaagctgctgatattcaggggcccaattgggcaactagtcatagtgttaatatatctcttttagcacaacagtgtataacatgctccatatccacatcatcactattcaatcagcacagataaaaagaataaagtcattgaaaaatatgccaccagaatgagcaaaagctacagtgtctatcagtgaaggaagatgagcgaagtgttctggccattttctcactgcatagtgtagacccttccaaaagtacctgtagactgaatttaacatttttcacttttctgattccattaatgttcaaagtagagttcttatctcttacagtttytgtgaagtatttataaaaatatacatgaaaattgctgccagagggcctgtcatatagcaagtactccataaatattaacta

SEQ ID NO: 224578 - DNA, 576 bp, Homo sapiens
tatatttcacatacagtacaacatacatatttaaattgtacacttaatggattttagcatattcacagttttcaaactatcatcacaaaataattttagaatatttttaatactaaaaagagatattttttacccattgtgatggttggttttatatgtcaacttgactggaagtgccccagtagctaggaaaacattatttttgggtgtgtctgttaggttgcttctggaaaagcttaacatttgaattataaacatagcgaagattgccgtaaccaatttgagtaggcaatatccaattagttgaaaattcagatataataacatgacagagawagggcaaatttgctctctttgcttgagctgggaaatccatgtactccggcccttggatatcaacacttctggttcttgaacctttggcctcagccaaggacttgaaccattggctcccttggtcctcaggccttcagactttcactgtcactatactactggctttccacagcctcaagcttaaagttgaataatgtgctatttctcagtcttcataatttcataagcgaatgtttcaca

SEQ ID NO: 224579 - DNA, 475 bp, Homo sapiens
ggtaccaggtcttctttgtacatctggtagattcagctgtgaatccattaaatctcaggctttctttggtaggtagactatttattcctggtaaatttcagagctcattatcagtcttttcagggaatcagtgacattctagctcagtcgtgggagggtgtatgtgtccaggaattatccttctcttctagggctyctagtttgtatgcatagaattgtttgtaatagtctctgatttttttttgtttttatttctttggggtctttaacattttcttcatcatttctaattgtgtttatttggatcttatctcttttcttatgtattagtctagctagtggtatatctattttaacaaattctccataaaaccaactcctggattgttttatcttttcaatggtttttcacgtgttgtctttcaattcaggtctgattgttgttatatctcatcttccattagctttggggtta

SEQ ID NO: 224580 - DNA, 458 bp, Homo sapiens
aaacccagattcttgacttctgtgcactggcaggctcaataccacatggaagctaccaaggcttgaggcttgcatcctctgaagccacaggctgagctttatstttactcctttcaggcatggctggagcagctggaatgcagggcactaagtttctaggcttcacacagcactgcaattctgggcccagcccattaaaccactttttcctcctaggcctcctggcctgtgttgggaggggctgccatgaagacctctgatatgccctggagacatattccccattgtcttgggtattaacattaggctcttcattaacaatgtaaatttctgcaggtggcttgaatttcccctcagaaaatggaatttttattttctattgcattctcaggctgcaaattttctgaactgttatgctctgcttttcttgtaaaactgaatgctttaaacaccaccca

SEQ ID NO: 224581 - DNA, 458 bp, Homo sapiens
aaacccagattcttgacttctgtgcactggcaggctcaataccacatggaagctaccaaggcttgaggcttgcatcctctgaagccacaggctgagctttatctttacycctttcaggcatggctggagcagctggaatgcagggcactaagtttctaggcttcacacagcactgcaattctgggcccagcccattaaaccactttttcctcctaggcctcctggcctgtgttgggaggggctgccatgaagacctctgatatgccctggagacatattccccattgtcttgggtattaacattaggctcttcattaacaatgtaaatttctgcaggtggcttgaatttcccctcagaaaatggaatttttattttctattgcattctcaggctgcaaattttctgaactgttatgctctgcttttcttgtaaaactgaatgctttaaacaccaccca

SEQ ID NO: 224582 - DNA, 591 bp, Homo sapiens
gtatagcactcactgtaaccctactcaaacatttatccatcctcaagtaccggtatctaaagacaaagcccaaatcacctcatcaaaagtcacttatctgagccttttagtctccccaatatccaaagaaattccatctgaatggaagcaagtaattgcttccctccccatgcttaccactaagtgggatttgtggtcttttctagggctcacagggtatttcaggctatggattcctaactttggaattatagcaaaaccattttatgcagcatcagagggggacctcaatgagcctttagatatttcacaggatataatttgctccttcraacaattaaaaaaggcccttctacaggccccagctttggccataactaaccctaacgcaaattttaccctatatgttcataatgccgaaggtttagccctaggcctcctaggtcagcatgcaggagaccaactccttcccatcacttatttctcaaagcaacttgattcagtttcccaaggttggccctcttgccttcgggttttagcaatggctgcactactcttacttgaaacccaaaagctaacttccatcagcca

SEQ ID NO: 224583 - DNA, 452 bp, Homo sapiens
agccaccaaggcttgtgacttgcactctgaagcaatggccctagttgtacattggcctttatcagacatggctgaaaatggagctggagtggctgcgatgcaggatgccatgtcatgacactgaacagagcagtggggccctgggcatggtccacaaaaccatttttcttatcataggcctcctatgatgagaggggctgttgagaaggtctctgaaatgcmctggaagcattttccacattgtcctggctattaatatttggctcttctttacttatgcaagtttatgcagccttgaattcctccccaggaattgtgtttttcttttctgccacattgttgtgctacaaattttccaaacatttatgctctgcttcccttttaaatataagttccagtttcagataatctgtttgctcatgcatataagcacataatgttacaagcagcca

SEQ ID NO: 224584 - DNA, 599 bp, Homo sapiens
ttgccactggggctgataccatcatggctgctttcatgggaagttggcagaggcacaacaaaagatggattttcttgggctgttagggtctactgtgaccccactgtcagtgtagccattaggccaaggatggcatgaaagctggagccgctgtacacacacagagtgacagcatttctgtactagacagcaggagaaacagtggactggagaagcatgaaagctactcagacaccacctggggttgataacagagtggtggcatcacttctcctgtaagcccaagctgcacagctcacaactccaaaacagtccttctgcttgaggagaggagagaagtaggaagaactttgctcttacatgcaaacaccacckactaacttggggatcaaactgcacaactcaatacaaaatctgcttacactagtgcacagtgcttgggaatgaaataagcttctaagacttctgccatcccaacactgtgtgcccaatgcaccattactactaacagaaagctaagtatatctatgaccaagaaatttatacagattttttaccacaaaacagaaaaaacagaactaatggcaaataaaaaagaa

SEQ ID NO: 224585 - DNA, 599 bp, Homo sapiens
aagatcaaaacataaacagaccaataacaagtaataagattgaagtcataataaatgtctctcagtaaagaaaaacccaggacacaatggttttgctattaaattctagcaaacttttaaagaactaatacctatsttacttaaactattatttcaaaaaataaaagaggaagaaatactttcaaactcattctaggaggccagtattaacctgacataaaaaccagaaaaaaacaaatccaaaatcaaagtacaggacaatgtctttgatgaataatgatgcagaagtcttccacaaaatattagcaaaccgaattcatcagtacattagaaagataatttattatgaccaaatgggatttattcctacaatgcaaggatggttccgcatatgcaaattaatcaatgtaatccattatttaaacagaatgaaagataaaaaccctatgataatttcaattgatgctgaaaaagcatttaataaatttcaacatcctttatgatgaatctctcaaaaatctgaggataagaagaatgtgcctcaacgtaataaaagccacgtatgacaaacccacaacaagtaccacaatgagtgggga

SEQ ID NO: 224586 - DNA, 540 bp, Homo sapiens
ataattgcaaaccaaatccaacagcacatcaaaaaagatgtaatctcaccatgattgacctgcatagtccaacatacgcagatcaacaaatgtgatacatcacaatattagaataaaggatgaaaccatatgataatttcaatagatgtagaaaaattatttawtaaaattcaagatctctttattataaaatccctcaaaaaactaggcatagaagaaacatacctcaaataataaaggccatgtagaacaaacccacagctaacataatagtgaatagggataacttaaaagcaatcttttcaagaactaaacaagaccaggctgcccattttcatcactttaattcaacacagaactggaagtcctagccagagcagtcaggcaagaaagaaatataaaaagcattcacgctaacaagaagaaatttaaattgaccctttttgcagattacataatcttatatttaagaaaaccaaaagattttacctaaaaacctttaaaactgataaataaatacagtaaacttgcaaaatacaa

SEQ ID NO: 224587 - DNA, 519 bp, Homo sapiens
tttctacttggttttctacactgtcatgcccatctttgagtggtgttttcactttaaccttttttgcatactcacaaatgaatcagcatgcactctccatcctatgcctataaagaccycagactcagtaagtggagggaaagatgacctgactttggggaagagacaacctgactttgggaaatacgacctgtctttcctgtcccctctctatctccctttttcactgagagctgtttttattgctcaaaatttctccaccttaagcatccttcaacaatccatgtgatctcattcttcttggattccagataagagctcaggacccactgagtgtgggtacccagaaatgctgtcacaccagccctttgcccttgtgggtgaaggtaagctgcccaatgcaatgaggcaaggggccaactgagctgctaacacaatcttgtctgtggataaaggaactaaagaagcaatgtcacacactctctggggattcagggtcatgggcatcctcacattggc

SEQ ID NO: 224588 - DNA, 519 bp, Homo sapiens
tttctacttggttttctacactgtcatgcccatctttgagtggtgttttcactttaaccttttttgcatactcacaaatgaatcagcatgcactctccatcctatgcctataaagaccccagactcagtaagtggagggaaagatgacctgactttggggaagagacaacctgactttgggaaatacgacctgtctttcctgtcccctctctatctccctttttcactgagagctgtttttattgctcaaaatttctccaccttaagcrtccttcaacaatccatgtgatctcattcttcttggattccagataagagctcaggacccactgagtgtgggtacccagaaatgctgtcacaccagccctttgcccttgtgggtgaaggtaagctgcccaatgcaatgaggcaaggggccaactgagctgctaacacaatcttgtctgtggataaaggaactaaagaagcaatgtcacacactctctggggattcagggtcatgggcatcctcacattggc

SEQ ID NO: 224589 - DNA, 478 bp, Homo sapiens
ctattatcacgcaacctttttattgtgtgataagtcagtgataagggctgatgtcccctaacttcattattgacattaaagaaacttactaattgatgtttttattaatttgctaattaaaaaatgaatgccttcattgctagtgaacaatcttttcttcttagaaggcaatatttacaaaacccatatgaccatgtttaaagaagatgaaaaagaatattggaatgaattttggaaggtcgttaacaattttgtttgaggacagaaaagggagcgtttccttcttactttctagttttagawgtctttccctgtacattgtggagtcatggtgataaatataccatggttggtgataaatataccatggttggtgataaatataccaaacaacagagaaacctaatatatatacagccccaagcttattaaatatcacctaagattgacaagaaaaaaactagtttcttagaaaaaa

SEQ ID NO: 224590 - DNA, 540 bp, Homo sapiens
tctctttgtcaatggggttctctgcatttcctgaatttgaatgttggcctctctagcaaggttggagaaattatgtataatgtcctgaaatattctttccatgattcgttcctgatatagtttggttgtgtccccacccaaatctcaccttgaattgtaataattcccatgtgtcaagggtggggccaggtggaggaaattgcattaggggggcagtttccctcctattgttctcatggtagtaaataagtctcataagatctgatggttttrtaaaagggaattcccctgtacaccctctgttgcctgccaccatttaagacaagctttcgcttctcctttgccttctgccatgactgtgaggcctccccagccatgtggaactgtgagtctatttagcctctttttctctataaattcctctgtctgaagtatgtcttatacagcatgagaactgactaatacagtaaatcggtactggtagagtggggtgctgctgtaaagatacccaaaaatgtggaaatgactttggaactgaga

SEQ ID NO: 224591 - DNA, 422 bp, Homo sapiens
tggtcccatctgatggacaagaccaccctacagaattcagaactgacagttcccctatggctaaagtctcctatgggtgcaaatcgagcctagggggatggccaggcttgcccggggctcctttgcctctgctttagagttgaatgccccaacccactcagcagagaggtgtggtggtgawtcccctccaaaactctttcttctcccttcctggcttctttgaagtgttgaaagagagtattcaacaagtatttttgtttcattacttgcttaaataacacctttgtctcatactggaagtccacagtatctggttcttagttcccaataaataaaaccaagaggctgaatagatgagtggttttcaaattgtgattaaagtccttaggaataaagaggcactttggggggcactgttgtaa

SEQ ID NO: 224592 - DNA, 514 bp, Homo sapiens
gggatttcgaggctagtcatagacagggagatttcgcaatagggtaatagagactgcaaaataagctgagtcagcagagccacggaatcckcatgaaataaacatttcattgacagcctgggatccacagggttagatgtagacatcagagctcggttattgtgcccaaatctgagaactggagatgaaaggaggcccaaacatttcaagaataaacagggagggactcaggatgatcttccagctagaacaagcacgcttttcacagcttcttttgaagttctgcttgggtgtggtgggtcagctgagtttaacagatctaagacacaaacacgtagaaatccaaggcctggaatagaatggcatagaaaaggtccagagaaggagttaaagtgagtaaaatataagcatgaagggaacatatttgaatttgacttctatattttggaaagagatctaggatgagatgtaatgaaggagccttattaaacaaatcctagaatacccaaactca

SEQ ID NO: 224593 - DNA, 415 bp, Homo sapiens
gcctaattgttttatgggtagtttttaatgagctcgttgtttattgacacaaatagatctccttttaaagactacagaatggccacaatcatgtcatttcatcaactaattaacagatattgatagcctgctttgggtggatattttgagggtcatactaagataagacaaaggtttacrtgaaagggaacttttgacctctttattctgtttgggcttgaattttattgggtagcatcttcatcggtggaaagagggcaggtctttttcaaatgctggtggtgaaagacttcagttctgtcctcagagacgagggcctaataatctgagttttcctttcctcatttgtaaatgaaggtgattatacttagttcataaggtggttgtgatgatgatatgaaacctgaagacaact

SEQ ID NO: 224594 - DNA, 601 bp, Homo sapiens
ccccactgcagcttcttctgggcccatggcaactccacatcactttgctcgcacatgtctgcgtgggtgacttttgctttccttgctctgccagcatgtgactgtttgtgcaccctgccttgccactgctacaataggatgaagcccatcccctcacccctgccaacagccatagcaagcagagcccctttgtctaccaccataattggatgcttcttgaggcctctgagaagtagaggttgctatgcttactgtacagcctggagaaccatgagccaattaaacctcttttcttataaattacccagtctcaggtactttttgtagcagtgcaagaatagcctagcataaarttgatactaacagtggggaatcactacaaagatgcttgaaaatgtggaagcaggtttggaactgggtaacaggcagaagttgtaagagtttggagggctcaaaagaagacacaaagatcagggaacgtttaaaacttcttagagactggttaaatggttatgaccaaaatgctgatagtgatgtgaacagtgaattccaggttgccgaggtctcagatggaaatgaggaacttattgggaactgaagc

SEQ ID NO: 224595 - DNA, 601 bp, Homo sapiens
ccccactgcagcttcttctgggcccatggcaactccacatcactttgctcgcacatgtctgcgtgggtgacttttgctttccttgctctgccagcatgtgactgtttgtgcaccctgccttgccactgctacaataggatgaagcccatcccctcacccctgccaacagccatagcaagcagagcccctttgtctaccaccataattggatgcttcttgaggcctctgagaagtagaggttgctatgcttactgtacagcctggagaaccatgagccaattaaacctcttttcttataaattacccagtctcaggtactttttgtagcagtgcaagaatagcctagcataaaattgatactaacagtggggaatcactacaaagatgcttgaaaatgtggaagcaggtttggaactgggtaacaggcagaagttgtaagagtttggagggctcaaaagaagacacaaagatcagggaacgtttaaaacttcttagagactggttaaatggttatgaccaaaatgctgatagtgatrtgaacagtgaattccaggttgccgaggtctcagatggaaatgaggaacttattgggaactgaagc

SEQ ID NO: 224596 - DNA, 633 bp, Homo sapiens
gctcctaacagcctgtacacagacacatgagcaaaggaatgacttacatttggaagttatattttaaaaagaagcagagcaaaaatatttggaaaatttacagcctgtccrtggggcagagaaagaaaaagcttttaattcaagcaggctgtggagcaatttcttgctagagaatttgcccaactaaatgggagccaagtgctaatatccaagacagtgggagaagaccttgaagatattttagaggtcttcgcagcagcccctcccatcacaggtccagaggcctagaagagaagaatggcttcatgcgcctggctcaggaccctgcttccctttacagcatcaagacacagctcaccacatcttagctactcagtctccagcctcatctcaaaggggcccaggtacagctctggacacagttccagaaggtgcaagctataagccttggcagcttccacatggtgttaagcctgtgagtgcacaatgtgcaagagttgaggcttgggagcctctgcctagatttcagaggatgtatggaaaagcctgggtgaccaggcagaaggctattgcaagattggagcccccacagagaacctctactaaggcattgccaagggaaactttgggttt

SEQ ID NO: 224597 - DNA, 597 bp, Homo sapiens
tatttattaaatttcctcacataatactcatttgttcagattttcaattttttaaaataattcaattttaataggttgtgtgtctctaggaatttatccatttcttctatgctttcaaatttattggtatatagtttatattagtctgctatgatcatttgtatttctgtgatgccagttttaatgttttctatttcatctctgattttatttatttgggtcttctcttccttttatttaaagttactgtatctaaagttctatcgtgttcatctyttcaaaaagaccactctttgttgagtttcttttttggttcctattttatgtatttccttttgtgctgtattgttttctttcttcaaacaattttgcatttaatttgttcttgacttcttagtttcttgatttgcaaagttaggttgtttattagaaatctttcttctttttgcatcaatattgctatgaatttcccttttaaaactgcttttgttatgtcccataggttttggcataatgtcttttcatccttgtctcaaaaacttttttaaacttatttttaatttatttattgatgtactgttcattcagaattatgtt

SEQ ID NO: 224598 - DNA, 608 bp, Homo sapiens
gtgcctgctacttggctgtaagaatttatgaagctgctgtctgctatgaggtgattaatcctaaaatgaaattttgtctcaaaagagagycagaaaataccagcatctacagttgaggctttagaaaggcagaaaaatttaactagtagaaatttataaaataacttttgcattttcaaagattttagcctgtgatatgtactgataatgagttaccttcatgcctgctgtctttactaaagaaaaaaacacaaaatttgaccaagttggatatgcctcataatatatataggtacatatatgacattataaaaaatagcaagaacatcaacaaaaatgaatacagccattatatggattaaatgtccaaaagttataaaatgatcagaagtgtaatcacaatggtgaaatagagttttatttaagagaatcctgagatgttttagaatagcatgtatgtgtgtgacagggtgtgggggaggcactgagactttggaggatgagtggctaaagacttttttgggcatactgaaaaaaatggaaaaaaatggagctttgaccctgattaatatagtacgataggaatgctctttaccacttataaatca

SEQ ID NO: 224599 - DNA, 527 bp, Homo sapiens
caaaccacaaaatgccaagtcatagggttgaagtttgaattaaatgaaatgcaatgagttcaagtttgttaccaggagagggcaactggctacctcccaaagtgtctacacaaaggagtattcactattgcctgtgaaatcagaacctgggttcatcaaccctttcaaaatgaattaatctttcagggaataatcaatatattaattaaayacaatgagaaatataccttgaattttgaaatcaatatgaccagtgaattgtttcataatatgaaaacctcccaggtatgttatgtttaatcaaattgttttatatatctgtacaatcagaataaaagggctgatttggttagctaaaagggtttttgcttttttccccccagctaagtgatttgaaagactgttttctactgcagggatagcttttcccatgggatagaaatgtttaatacctgggagccaacatcctcttccttggatgctgcttggatggccttggggtgtggtagagagtaggcacgactctt

SEQ ID NO: 224600 - DNA, 527 bp, Homo sapiens
caaaccacaaaatgccaagtcatagggttgaagtttgaattaaatgaaatgcaatgagttcaagtttgttaccaggagagggcaactggctacctcccaaagtgtctacacaaaggagtattcactattgcctgtgaaatcagaacctgggttcatcaaccctttcaaaatgaattaatctttcagggaataatcaatatattaattaaacacaatgagaaatataccttgaattttgaaatcaatatgaccagtgaattgtttcataatakgaaaacctcccaggtatgttatgtttaatcaaattgttttatatatctgtacaatcagaataaaagggctgatttggttagctaaaagggtttttgcttttttccccccagctaagtgatttgaaagactgttttctactgcagggatagcttttcccatgggatagaaatgtttaatacctgggagccaacatcctcttccttggatgctgcttggatggccttggggtgtggtagagagtaggcacgactctt

SEQ ID NO: 224601 - DNA, 575 bp, Homo sapiens
ctaatacccagtacctcaaaatatgattgtatttggagatattagctttaaaggggtgaggcagataggagggtgggcactaattcaatctgattttcttttttctgcttcttgctgctgctgctctgctrcttctgcttcttcttcttctttcttctttcttctttcttctttcttcttcttcttcttgtttttaaaaagggtccaggctggagtgcagtggcatgaccacagctcactgcagcatcaaccctccagactcaagtgattctcctgcctcagcctcttgagtagctgggacccaagcacatgccaccatgcacagccaatttatttttatattttgtagagatggggatctctctatattgcccaggctagtctcaaaatcctgggctaaagtgattttcctgcctcgacctcccaaagtgttgggattacaggtgcgaaccaatgcatccagatggttttcttataagaggaaatttagacagacagattgacaccagatatgcatacacacagagaaaaggccatatgaggaggcagaaataaggtggccatccacaaaccaa

SEQ ID NO: 224602 - DNA, 456 bp, Homo sapiens
ttgtaacatttaattgcattatctatgttctcgtatgtkttgtagttgttatatactgtctccattgtatttattaatttaacaactgagtttttagcttccatgctaatctcacctattttcatgactgcctactttgatatcagaaagtacaatattttcttgattattgagaacatgaattgaaacttttcttgcattagcctcctgcttcttgctgttcattgattttattaaaagcatttcctttgattttttttacaccattttccttttctgctgtttgtctatcttgatgaatggagatagctgccattccaacactcctttggccttctcctggtcattgaccctgaaggaagctccaccctactggccttggcctgacattttgtaagccctctcagtcctggtttcagttagtttcctctacttattgatttctatatagaattc

SEQ ID NO: 224603 - DNA, 549 bp, Homo sapiens
atttcatggtaaattggaagttggaggtgcttaaataaaccattgctgcacatcaaacacctataaaatctcaatggcatataaccataaacatttatttagttatcacatctgtgagctggctgtctacgctgggctcagctagcagctgtgacacatgcctttcttattctgaattgttacacagttttacttatcacatggtaggtttttgttattgttgctgctgttgttgttcatagtgctatcctttatcttttcattgactagattgtagtttattgaaaatataaatcagtatttatcaaccccccactccattttttttagatacaggttctctgttgtccaggctggagggcagtggggtgatggcaccatcacagctcactgcagcctcaaactcctgggttcaagagatcttcctacctcagccttctgagtagctgagaatacaracactcaccatcatacccggctaattaaaaatatttttttagtagaaatggggtctcattatgttgcccaggctggtcttgaactccattg

SEQ ID NO: 224604 - DNA, 557 bp, Homo sapiens
acaaaatagagtaattaaccttgcctcaacagattggggaaggctttgcactctgaagtaagatggcatttgaactgtatctttaagaacaagaaaaaattaatcaggcagagaaagatggaaaagtattcattcagtgctatttcaggtatctattgctgcaatatcaaaccccccaaacatagtatcttaccacaacagttatttattttgctcataaatcttcgatttgagcaggacttgacagtcacagcttgtttctactcagtgtggcttcagytggagtggctggcttagtaagttgttggccagttgttggttggcagatcaactagggctgccatctggggtcctttctatgaaactacctgggctttctcacagcatggcagagggtttcaagaccatgtattccaggagacaggaagcagaagctgtgagcctcttaaggctagcacttagaaagacagtatcatttctgtgtgtttgcccaaaattaagaaaatgggaaaaagactcccagaatattggtggccttccttaatataccacatgtt

SEQ ID NO: 224605 - DNA, 610 bp, Homo sapiens
gctgttgtgttggaagataaacatataaatattctcaaaaatagtttgctttatctacgtgattgtgatattcagtttgtctataactgatgatgataattgacatcttaataataaacaaacggaatagtggggatagaatattaatatagccaccgaaacaaatgatccaaaatacttgaaaacattatgaaatgcttttaaatcccaatgagctgttttaaatatcaaaatatatatgttagattaaagttgccaacataatttttcatgcagacagctgaaagtttgtatagcaagttgatctgaagagttgggtaaggtttcaaacctgttgtttcttttagggagtaggtgtgcaataaatacttgggaaagtagaattggccccatcttttagatatggtccattcatgataaagctggattctactctgtgtgttggtgttcctagaaaactgcataaggaacrgatgtagtcacatgtgttttgtcattaaataattcaacatgctgtttatggccaatactccaaatccaaatgataagaatcagttagatattcatcaagatgaaaataacagcttgagttgacatctgaaataaaata

SEQ ID NO: 224606 - DNA, 442 bp, Homo sapiens
aagaaactttttgcaaactcttaagcagcacctttcagggaagttttcctaccaaaagaaaaaagttcttttctaaaccttgattacctggcaagtgaaaacagaagtgaacacctcgtaacaaaagagaggatttcatgatcagcaatgaatggtgaatctcggaaatttcttgcaagtcacactacttgcccagacatgcataaagcaaagttccttaggtttctttgattctaactccaagagtgacaaaaacctctccaatgaagtccttgaaaaaagagtatatgatctttcaaaacctttttgtaaaatactcaagtctttgacagttctactatataattttccttttaacataaagctttaggcccyggtcgagaagtgctagatacctccttctcatgtgaggcgtacatgataccaactgtggttccatatc

SEQ ID NO: 224607 - DNA, 623 bp, Homo sapiens
gacgactgcaataaggcaaaaaaaaaaaaaattccaggttgaaaaagaagaagtaaaactatctttgcatagatgatattttgatattttagattatcttaaaaactctaaaaaagagcctacttggatctaataattcaatttatcaaggtctcagagcacaaagtcaatataaaaaagtcaattatatttttatataacaatgaatatttaaaaatgaaatttaaaacccataccacttacgataacatcaaaaacatcaaattcctaagagcaaatataacaaaaatttttaagacctctaccgtggaaactataaaatattattaaggaaattaaagactttaataaatgatagtatattaccatgtttgrggattaaaagactcaaaattgtttagatggtagttctcctcaatttgctctacttatttaaggcagtccatgctaaagtcacagagttttgttgtttatttttgttcttttttttttatggaaatccacaagctagttataaaatctatatggaaaggcacagaacctggaacagcaaaagaaacatcaagtaagaagataaaaagctaaaaaatttacattaccagagattaagacttactctacat

SEQ ID NO: 224608 - DNA, 553 bp, Homo sapiens
aaaagctaaaaaatttacattaccagagattaagacttactctacatctacagtaattaaaaccacatgtatttcacaagtatagaccaactgaccagtgggacagaatgaagatgtgagaaacagagccacatatgtacaatcaactgatttctaagaaactatttattaatatgtatttcagggaaaatatttataataaattgtgccaagtcaatagtgtattcatatggaaaacaataaaccttgaccccctacttcaccccataaacaaacacacatgcacacacacacgatttatagacctgtatcagacagcttctaaataaaacatagaaaatatttgtattaccttaaaattkgaaaagatgtttttcacaggggtttttgaaaagccctaataataaaagaaatagtacattggacttcattaaaattaagaatttctatttatcaaaagtcactattaagcaaataatgggtatgtttttgtcctccaaagatggcagattagatgcttttagcatacctcagccacttggaaatagcaaaa

SEQ ID NO: 224609 - DNA, 553 bp, Homo sapiens
aaaagctaaaaaatttacattaccagagattaagacttactctacatctacagtaattaaaaccacatgtatttcacaagtatagaccaactgaccagtgggacagaatgaagatgtgagaaacagagccacatatgtacaatcaactgatttctaagaaactatttattaatatgtatttcagggaaaatatttataataaattgtgccaagtcaatagtgtattcatatggaaaacaataaaccttgaccccctacttcaccccataaacaaacacacatgcacacacacacgatttatagacctgtatcagacagcttctaaataaaacatagaaaatatttgtattaccttaaaatttgaaaagatgtttttcacaggggtttttgaaaagcmctaataataaaagaaatagtacattggacttcattaaaattaagaatttctatttatcaaaagtcactattaagcaaataatgggtatgtttttgtcctccaaagatggcagattagatgcttttagcatacctcagccacttggaaatagcaaaa

SEQ ID NO: 224610 - DNA, 636 bp, Homo sapiens
aatcttcaatttttcaacttgtctatgttattaataatgatttttactaagaaaagatacagtttttcattcagtattcacaggtaagtattttccccattgggaaaatgggaaaactttggcttcaggaggtaatttaagttgatcagcaatgcactccmtgtgtcttaggtctgcctaagtgtaaagctcatattctcaatcaccacaaaatatgccttccatctttagtttcttccctagttatcctagattacacaattaatcagttcaccaacatagtctgtaacatcttcaaatttctctcttgactttttgaagaccccattctccactactctcaaattctagatcaaaccatttcttttctcttcttctgttctttgcttctgagacatgttagaggaaattaagtttctctggtcaaaggctatattataaaaatattatttcaaaacagagctttacatgtgcaaagcaacataaacttgttttcttcctcaaaacctcaaatagaagctatcaacaattcttaactcagctttacggagttcctgaactttgcttttgtaagcaaaacctatgtttatgttcctattttttgataataggacaataatattgattagattctcc

SEQ ID NO: 224611 - DNA, 604 bp, Homo sapiens
gtacagcctatgaaactgtgagccaattaaacctcttttctttataaatttcaggtatttctctatagcaatgtgagaacagactaatacagaaccattgtaaaaaaaaaaaaaaagaaaagaaaagattcaaaaaagggaaatttgtgaaggctttgctgtagcaatgccagcagacacaaaaccttgcactatttgcaaagtaaatttttatctcatattgaaaaggcagcctgtatgtgggtacaggattgctgtaagaaaggcatacctacaaaccctggacccatacttatagatcctaatatgatttgagaaaaagtgaagtcattacatgacaacttaaagcaaaggagggtaaaggatctaaacctggagaagtttatgccagcaaaggatggtttgataattttagagagacgtttggcttaaaaaatatcaggatgacagggaagcagtttctgcagaccaacaggtagcagatgagtttccacatatcatwaagaaaatcatggaggagaaagtatatctgcctgaacaggtttttattgcagatgaaagtgccatactctggagaaagaaaatccacaaaggacatttatta

SEQ ID NO: 224612 - DNA, 621 bp, Homo sapiens
ttgttaatagtctaggtaatatctataacctatctttcccctcattcccaattatgctgttagcttctcatgtccagctcaaacacatatatatctctgtgtgtgtgtgtatgtgtgcgtgtacacatacgctcacactctatatatgagatgaaatcatagttaactacctattgttcttggaaaaaactgaaatcatcttaaatttttatgaagacacagagactgaggtgctaagagatctgttgggggtgaaatgggcatgcctttctttagactgtacccctaaagaaggggaggaatgcttgtcctaaaatatagacatttaaagtggaatgttggtatcctccaagtggaagtttaaggctgaatgagatttagggaaacaygctgtgaactatttaatggccttgtatgccatgctttatttgtattatgcttttttctttttactgtatttaagagaattataaataataagcaaataaggtatattcaaaagaaaaccattaaagattcaagatttgtattgtggtaaatgatacaatttatgaaatgtgataagatctagctttctgcattggttttattttataccatattaataatgctatatgattt

SEQ ID NO: 224613 - DNA, 492 bp, Homo sapiens
tgtatctattaagtttattaatactcttgcactcattgtctctcctgccaccctgtgaagaggtgccttctgccatgattgcaagtttcctgaggcctccgcagctatgtggaactgtgagtcaattaaacctcttttctttataaattactcagtcttggatacttcttcatagcagtgtgagaatgagctaatacagggttcaatctaattggtgaccattgacctttttatacctgaatatctatagatttatctaggtttggaaagttatctggtattaattctttgatttagctttttacacctttacttttccagctttctcttcctgactatatgctcttctaatgttgtctcatggatcccataaaccttctttattactttttattctcttttcttctctatgtattttcaaatagcctgacttcaagctcattgattcttttgtctgctrttgatgctctctattgtacttttcatttcatt

SEQ ID NO: 224614 - DNA, 402 bp, Homo sapiens
aattttggctttagtttgttttttgtctaggtttttgaggcataaagctagattatatatttgagatgattcttctttttgaatgtaggcatttattgctgtaaactttcctcttagtattgcttttgctgcatctcatacgttttagtaggttgtgctttcatttttgtctctagatattttttaaattcccttttgatttcctctttgatgcagtggtttttcaagcgtatattatttagtttccacatatctgtgaattttcccgttttgttgctgttgttgatttttagtttcatttaactgtggccagaaaaaartacttggtactgttccgatcttcttcaatttgttaagacttgttttgtgacctaacatattctggagaaggttttatgtgtg

SEQ ID NO: 224615 - DNA, 467 bp, Homo sapiens
actaaggatgggggatagaataagagtgattgctaatgggtatgcagtttcatctgggggtgataaaaaatgttctaaattagattgtggtaatggttccacaactctgtgcatatactaagaaaacattaaattgtacattttcaatgggtaaattgtatggcctttgaattatatctcaataaagatttttaaaagatgrcattgcaatatttcaactaatttgatttggaaaaatttctagtagattgccagaccaaactacaataaatactgaaaagttatgcgcgaatggaggaagcggcattggaaagttcatatttggttcatggctctgaaaataaaattctgctttcaaatttattacaagttaacatctgtctctgcctataaatgtcaatgaaaagtcgtggtcagttttaaaatcaaatttactcactggtcttactccaaaagtggctagcgtg

SEQ ID NO: 224616 - DNA, 535 bp, Homo sapiens
tgctattgaattttccgtatttattatctctcaaaaatmaccatataaaactcaaaacaaaaagtagatacaatgttttccttttttgtatttgtttttgcataattcaacaggctggcatgtattagagagggaagcatacaacagaggaaactttatggcagtagcaagacactaaatcaggtattttctaggttgatagattaatttttttttaaatcagagccaacaagatgcatatattcaatgaacaggaactttgaccaacaagtgtgctagtcatcctttgcagaaagtgactatgaaagtgccacaggtatctgagattacacataaatttgagtgagcaaattcacaaatacagaatgaagtgcaaagtgaaaaacacatacatttagatggttacacatcaggaaatagtttctttcactaccttcacttccatcaaaatgcattatataaagctttatttatgaagaaagggacatttaattatttttctaaaaacaacacgtgaatgctcatgaatagggca

SEQ ID NO: 224617 - DNA, 535 bp, Homo sapiens
tgctattgaattttccgtatttattatctctcaaaaataaccatataaaactcaaaacaaaaagtagatacaatgttttccttttttgtatttgtttttgcataattcaacaggctggcatgtattagagagggaagcatacaacagaggaaactttatggcagtagcaagacactaaatcaggtattttctaggttgatagattaatttttttttaaatcagagccaacaagatkcatatattcaatgaacaggaactttgaccaacaagtgtgctagtcatcctttgcagaaagtgactatgaaagtgccacaggtatctgagattacacataaatttgagtgagcaaattcacaaatacagaatgaagtgcaaagtgaaaaacacatacatttagatggttacacatcaggaaatagtttctttcactaccttcacttccatcaaaatgcattatataaagctttatttatgaagaaagggacatttaattatttttctaaaaacaacacgtgaatgctcatgaatagggca

SEQ ID NO: 224618 - DNA, 553 bp, Homo sapiens
gtgaagggggaagccccttaataaaaccatcaaatcttgtgagaactaactcactatcactgacaacaggatgggggaaaccacctctatgattcaactatctccacctgatccctcccacgacacatggggattatgggaaccacaattcaagatgatatttgggtggcaacacagcaaaaccatattgatctctttgtgtattcatattttaagtagaatcttgtaggcagcatatagttgagtcttaccttttgatatatctgacaacctctgccttttaataggagtatttagatattttatatttaatgtgattatctctatgattgtgtttgagtctataatttgttactttctcttrtacatcccatatttctttgttccttgtgcccactttgccttctgctgaattagctgtattttaaagttaatttttgtctacattattaatttattagctataacattttgagtttttagtagttgtcttaaagtctatagtgtacctctttaatttatcacagtctagcttcatatagtattggattat

SEQ ID NO: 224619 - DNA, 550 bp, Homo sapiens
atttaggacataactcaaggcatctggcctcagggttctgtgctattttttcccaaataatcaagaactggagagtacaactaaatgtatttcatttgtggaaaactggttcagtagacataggcttagattactctagaaggtaacttgtcatttgtaccatcatgttctttttacacctgagagcactagctgttctatcagtcatggccctggtatttaaaaattcatcttaaatggtckaaataaaaagggtgggggcaaaagcagaagagagaacatcacacacttacaagtctagacaattgaagcctctatcactcaataaatccatctattcaacagacttttcttagcagttcaatcactgcattgcagagtaatactttgaggtgaagcccagagagaaggttgatgaagcagggtcactaacatgattataaactagactttattctgaaggagtttataatttgaaaaacgtaagtaggcatagggattagtaattccatgatcagtaatgattagaaagtggttataatagctagga

SEQ ID NO: 224620 - DNA, 550 bp, Homo sapiens
atttaggacataactcaaggcatctggcctcagggttctgtgctattttttcccaaataatcaagaactggagagtacaactaaatgtatttcatttgtggaaaactggttcagtagacataggcttagattactctagaaggtaacttgtcatttgtaccatcatgttctttttacacctgagagcactagctgttctatcagtcatggccctggtatttaaaaattcatcttaaatggtctaaataaaaagggtgggggcaaaagcagaagagagaacatcacacacttacaagtcyagacaattgaagcctctatcactcaataaatccatctattcaacagacttttcttagcagttcaatcactgcattgcagagtaatactttgaggtgaagcccagagagaaggttgatgaagcagggtcactaacatgattataaactagactttattctgaaggagtttataatttgaaaaacgtaagtaggcatagggattagtaattccatgatcagtaatgattagaaagtggttataatagctagga

SEQ ID NO: 224621 - DNA, 565 bp, Homo sapiens
gcatttctatttcatttagtgtgggctatcagtttttccaagctttcaacagccattctagaacatactagtgttgtctcctagggtccctgccagggcattaaatcctgtgtcctgggaaaacactcttatattgataaactctcttttccccaattttatattctatccctttgattcagcaccatcagaatccagtcccacataaactctcctggcttgtrgattggtgctatcacctagcagaggatagccttgggcaagccagctcccttcatgaaaggacaattttcacatccactgattattcttatctaaaataattattattattgtggctgctcaatagcaattctctaattcctttattactttagtttatgtatctctaagaccccaaaataacaaaacagagaaaatgtagtgacaggtaatatttgaaaaaaaatataaattatcctcaaatgaaaaacattacctctccaggaatcaaattgacacaaattaagacaatacatatttcattggaaaaaaattactgtttttgaaaataacatactcagtt

SEQ ID NO: 224622 - DNA, 334 bp, Homo sapiens
agcactggaatccctccagactcagtcctatgctgctttatcatataactctatattcactgcctagatgattacttttcttgaccatgattcagttacctattacattccagtgatactgaaatctatatctccagagacacgtatacaactgtcagcttgacagcacattatggctgtctaaaaatcattttaaactttaaatatccagtatgaaattcawgatcttcctccaaatcttgtccatttccattcaaaagtgccaccacccttctagctctgcaagccagaagaaactggtgtaatctctgacacctgaatatttcttacactc

SEQ ID NO: 224623 - DNA, 600 bp, Homo sapiens
cctattaaggatagtcaagtttcaccagaaataaaattaggttagttgagagtaagaaattgtctcaataaatgtaaagtaactaaagcagtgcctagtagtttttayaaacgaaaatggaaaaggcatagcccccacacaataagctatgctctggaaagaaaagaatgccaaatagaaaggggaaaagactgttgatgtctttcaagaacaaatgaaaccattaacagaataacacctgtggtttggatcaacaagacttattctaaaataaggtgaatattctttgatttcttaactgactgttatatcaactgagcaactttatacacagcaaggaaataaaccacttttccctcatcatgaaagttctgcaacaagggaaatagttctaattcatcaaaatctcagtagaagcagggcttatcagcccattttatagccagaatattaacagtatattattaacagaatattaacagaatattaatccaggtgtcatttttttttggcccccacataccatgcaagacatcaagtccctgaaaagtccccagtacattttccgggagtctccagaagataccatgtataaactaa

SEQ ID NO: 224624 - DNA, 600 bp, Homo sapiens
cctattaaggatagtcaagtttcaccagaaataaaattaggttagttgagagtaagaaattgtctcaataaatgtaaagtaactaaagcagtgcctagtagtttttataaacgaaaatggaaaaggcatagcccccacacaataagctatgctctggaaagaaaagaatgccaaatagaaaggggaaaagactgttgatgtctttcaagaacaaatgaaaccattaacagaataacacctgtggtttggatcaayaagacttattctaaaataaggtgaatattctttgatttcttaactgactgttatatcaactgagcaactttatacacagcaaggaaataaaccacttttccctcatcatgaaagttctgcaacaagggaaatagttctaattcatcaaaatctcagtagaagcagggcttatcagcccattttatagccagaatattaacagtatattattaacagaatattaacagaatattaatccaggtgtcatttttttttggcccccacataccatgcaagacatcaagtccctgaaaagtccccagtacattttccgggagtctccagaagataccatgtataaactaa

SEQ ID NO: 224625 - DNA, 600 bp, Homo sapiens
cctattaaggatagtcaagtttcaccagaaataaaattaggttagttgagagtaagaaattgtctcaataaatgtaaagtaactaaagcagtgcctagtagtttttataaacgaaaatggaaaaggcatagcccccacacaataagctatgctctggaaagaaaagaatgccaaatagaaaggggaaaagactgttgatgtctttcaagaacaaatgaaaccattaacagaataacacctgtggtttggatcaacaagacttattctaaaataaggtgaatattctttgatttcttaactgactgttatatcaactgagcaactttatacacagcaaggaaataaaccacttttccctcatcatgaaagttctgcaacaagggaaatagttctaattcatcaaaatctcagtagaagcagggcttatcagcccattttatagccagaatattaacagtatattattaacagaatattaacagaatattaatccaggtgtcatttttttttggcccccacataccatgcaagacatcaagtccctgaaaagtccccartacattttccgggagtctccagaagataccatgtataaactaa

SEQ ID NO: 224626 - DNA, 557 bp, Homo sapiens
gctgcaggccgcatgcaagttctaaacatatcaygacaatcactaaatcttaaagttccaaaataatctcctttgactccatgtcccacatccagggggcacaatgaaggggtgggctcccaaggccttgggcagctgcatctccatgtctttgcagggttcagcccttgaggctgctctcacaggttgttgagttcctgtggcttttccaggtgcagggtgaaagctaccagtggtctaccattctggggtctggaggacagtggctcccttctcagagctctactaggcagtgcaccagtagggactttgtgtggggtctccaaccccacatttcctcttggcactgccctagtagaggttctgtgcaagggccccacacttgcagtaggcttctgcctggacactcaggctttttcatacatcctctgaaatctaggcagaggctgccacacctctttcactcttgcattctgtgcacttgcaggcttaacaccacatgaaagccaccaaggcttatggcttgcactttctgaagtggtggcttgagctgtatc

SEQ ID NO: 224627 - DNA, 568 bp, Homo sapiens
atgaaagacaagattcaggatagtgctagtggggatgggtaatgggacagagatgtgttggggtaggaggaaacagaaagtagaaagatgaatgttaaaggaatcggaaaaraagaaaaaaatcattattcacagatagtataattgtgtatgtctataatcaaaacaatattaaaaattgttagagtctttaaggtttgtggatataaaaatctataaacaaaaccaattaggtctctatatactagcaacaaagttagaaaatgacatgtttcaaaaatatgtcatttaagacagtaaaaaaaatggcatacatagcaagatgtgcaagacccttatagaaaaattataaactttactgaaagacaataaatggaaagatacattgtgtgcataggttggaaaaaaaatcattattttaaagatgtcaattttctcctgatggatctatagacttaaagcaatcccagacaaaatcttaaacagatgctgtgagtgtatgtatgtgtatgtgtgtgtccatatgcaggacttccacagcatagtcaatagtacttgaaaattcaca

SEQ ID NO: 224628 - DNA, 564 bp, Homo sapiens
gaaaggaaataaatacactgtgaatacactaaaagccactctgagctgtatattttcagttggtgaatttaatggaatgaaaattatatctcaataaagctcttttttaaaagtagggtggttaggatagaagaattgagaagcagcattgtctcaggtgggttagtatctttcagatgaaggcattgaagcttgcacaagttctgatggcgtcaatgtaaatgacatcatcctgattgctcttaatgaacacacatatgcaaagatgagaaagaaccaatgcaagagcactggtaactcaaatggccagagtgacatatgtcctccaaattactgcaccagtttttcaacaagagtttttaacccagctgagctggctaaaatgacagaaatagaattcagagtgtggataggagcraagatcattgagattcaggaaaatagcaaaacccaatccaaggaaatgaagaaccacagtaaaatgacagatataggagctgaaggatgaaatagctgatataaaaaagaacctaatggtgaataacacaatgcaagaatttcaca

SEQ ID NO: 224629 - DNA, 564 bp, Homo sapiens
gaaaggaaataaatacactgtgaatacactaaaagccactctgagctgtatattttcagttggtgaatttaatggaatgaaaattatatctcaataaagctcttttttaaaagtagggtggttaggatagaagaattgagaagcagcattgtctcaggtgggttagtatctttcagatgaaggcattgaagcttgcacaagttctgatggcgtcaatgtaaatgacatcatcctgattgctcttaatgaacacacatatgcaaagatgagaaagaaccaatgcaagagcactggtaactcaaatggccagagtgacatatgtcctccaaattactgcaccagtttttcaacaagagtttttaacccagctgagctggctaaaatgacagaaatagaattcagagtgtggataggagcaaagatcattgagattcaggaaaatagcaaaacccaatccaaggaaatgaagaaccacagtaaaatgacagatataggagctgaaggatgaaatagctgatataaaaaagaacytaatggtgaataacacaatgcaagaatttcaca

SEQ ID NO: 224630 - DNA, 543 bp, Homo sapiens
tgaacacaacagatctgatggatgtatcaacattgacatttgtgaaaatgtgcatgaagaaatatgcattgattttaaatggcatgccacaaaagcctgaaaaataatgcatgattttccatcttctaacttagatggaaaaacatgtgttttgctcacaattttgtcaaagggaaatgtgaactcccagccaattgcattcacatgcaggccctttttctgagattgctttcaaatgtaagcataacatatgttgttctgttaggaaaacaaatkaataaagttaactttcacaatgtgaattcttaatatataggattatgggagtcatgttgtttaaaacaatgtttagttttccctctaggtagattcacaggggtggggatgaggggtgaccaattttaacccttgcatagtttacattaccccatggtgcctgcatatgtgtcagaacaacttttctctgacacagcatagagagtcaagctcaataaccactggaggaagaataataggccaatagcacatgtgttgacagatgtg

SEQ ID NO: 224631 - DNA, 602 bp, Homo sapiens
tatgaaatagataactagaagatactttcaaaatcatttcatccccaaaatttccctgagagggcaaacttatattcttgtttcacagataacgaaactgagacagaaaaattaactaggtgcgctagactagtccaagttcctctttttaccagtgtggaaaatgaggaccagagaggtaagatgacttgcaaaagccataaagcctgtcaatggaaaagctgagcctttttccaaccctcttttcagtaattagctatatatatgtcccgtactccattatgatgacactcacttttcattaaaataagtggaagtgtctaggatcattttcatatttgggtcaaattgtccttgcatcagtagaaagagtggaaaaagcattggtcttttcaaatcaatttgctggctggtcacagttaaataatttaacccatctgaaccacatttctakcatctgtaaaacatggataaaagtgctaactttggagtcgtgttaggaaaacaagatataaggactctaaattgcctggcacaatataagtcctcaagagatgtatctttagaaagtctcttgtaaagtaacattttagtaccatcgt

SEQ ID NO: 224632 - DNA, 636 bp, Homo sapiens
taaaacacattgttagagacctataaagagacttaaataacyaaacaataagagtgggagacattcacaccccactgacagcattagaatgagggtcaaaaaactacctatctggtactgtgctcactagcggggtgacaaaatcatttgcacaccaaaccctagtgacacacaacttacccatgtaacaaacctgcacatgtacccctgaacctaaaataaaagttgaataggggaaaaaaagtgggagagacaatctgtcttatctggagccttagtcacagttacaaagaccctcttactaaagctttaaatggcctcctcttctctgaggtaaggtaaggccattgaggagcataataagtatgaatatccatgaacaaagtatgatttattactatgggttcatatcataggttgatataatacaaatcatttacatattcttttgatacataattattgagcacctaatgtgtcaagtcctgtttgttgattgagggaatacagatgattggtggtaaaaagataagtcaggcacagattttattaaggaacttacagtcataaataaaaataactaaaaagtaaaacagaagcaaaaaaattaatgtttattttctgtgtttattcatt

SEQ ID NO: 224633 - DNA, 515 bp, Homo sapiens
aattccttctattcttttttttttttgaatgtgaacataaaaatctcctaaagaagacattaaaatgcacttgtctgccctctcctttctgattatgtaggtttagagtggaactggggacttctcatttttaccaaatatccataggtgattcagatatgggtgctctccaagatcacacttagtgaaactttgcattttcttatctttaattgttctctacactctctcccatgttaccaattttaaaatctcttcttctatttttgtttgtttktttttttttttttgagatgaagtcttgctctgtggccaggctggagtgcagaatacattgtgcaggatcttgtctcactgcagacttcacctcccaggtccaagcaattctcctgtctcagcctcccaagtagctgggattacaggaatatgccaccacacatgtttcactatgttgaccaggttggtattgaactcctccctgcctcagcctcccaaagtgcagacctgaaccacca

SEQ ID NO: 224634 - DNA, 572 bp, Homo sapiens
gcaatatttatatgtaggaaaccacactgattgggatatgcaaggaaccttgaataaatggaaagtcatatttattcttctgggagccgaaggctaaaaactataaaaatgtcaattctttgtaaagaattcttccaacattacttatacttttgcaagccactaagaaactcaaggtgtgtatattcagggcaacttgaatctatgctccagagaaaaaaaataaaataaaaataaaagaaacccaacccagaatatgataatacttttgattttctatcatggccaatggagggggcagtttcagaggcttctgtgtggtgtttgcctctgtgctagtccttatcccacagatcaaggaacccatgggagggctctgccaattactaagcgtggacatttcaattatacacttgaggcctgggaaaatggcyactgggtttgtgaacacaactgacccactgcgggagatcaaggttaggactccatttactacctggatcccactgactgctgcactaatagagaagaatccattgtgacacttccttcagtgtcaacttgtacaattg

SEQ ID NO: 224635 - DNA, 657 bp, Homo sapiens
gtcctgattttccctctgccatcatctctcttctctactgtcctcacttgccttattctagtcaagtgacatcctatacttccagttccgtgaatgcccctaggtctttgcatgtgatactttctgtacccaacaactggttacctacttgttaatgtttaggtctcagcttaaatgtaaatcttccttgatctttcaaattaggactaggtactcttctctgtcaacccataacactgcacaattcccacatcttagctcttattaaacagttttataattttccatatacatgttcattttcccctctagaacagaggttaacaaaccttctttctaatgggccagacagtaaacattttaggctttgcaggtcatacaatctctgtcacaactactcagctctgtcattatagcatgaaagcagctggagataaaatacataacsaaatgattgtgtttcaatgaaactttatttacaaaaaacaagcaatgacctggacttggcctataaggataagaagtatattcttcttgtttgctatatccccagtacctagcacattccctgaaacaaaataagaattccacaaacatttgtttaagggataaaagacattcaggtggggctgggtgaggtggctcacgcctgtaatc

SEQ ID NO: 224636 - DNA, 438 bp, Homo sapiens
tacatggtaaaatgagcaaatgtgtctatagcaaccacatatgaagtctaaagttattatcagacctggacttcattgtttccccactgaggtgtaaaaagaagtaagatgaagaagaggattacaaaaaccaaactgatctttagcaatagcaggaaaaggaatatgtgaatatcaatcaggccagtgaggggtggggggtgtttaggccccttagccccttcaaaaacagaagttatcttctggtacaatgtaatatgagaaggactayattttccacaccagaaaccttcatgcatagcgtaatgaggatgagtgcagttatggcacaagcactgcctactttgccctaattcatccattaattcactcattcaatacatatttattgagtcatgttgctaggccagccgctggtcatacaacacaaggctgatg

SEQ ID NO: 224637 - DNA, 427 bp, Homo sapiens
ttcacaataaaggcatgtttgaaacctaggcatccccacatccattgataattaattagcctttytaaaaatttgaagttgatgtaaattttcaaatcagcacatgccacatgaaatacccttgcagcagaatgaaaaaaaaatgccattaatttgaattcatttgaattggaacaaaaataatttaaattatgttattaggttaattaagtattttattttctattacatttacttattacacattgggaaatcagtgacctttgtcacaatgtgtcttttgtaattacaaaacagaatacagtttagtgtcattaatttattcaaataaaactagattgatagttaagccatcttaatccaaattcaatgtatttataaatagaaaatagtatattatgcacataaacttatatgcttttattga

SEQ ID NO: 224638 - DNA, 480 bp, Homo sapiens
ctagaaaaaagtaatgtttcgggtgataccaccaaatatgttattttgcaagaacaaagattttatcttgcaaaaagcaaagaaacttcacaatgctttacttatttctccaggtagtaacaataataaactatatatagcatgagattaaaaaatgaagcatggatttgaggtaattacttagatgagtcaagcaaaacacaatttaaattatagtaattgttcacagaaacaacagatattttggtgtctgaaatatcaggtgtttatcctcacttcttttggacttcctaaagtgaccgccatgtaagatatttgtgtactrtaaagattcagtgggtgcctatttctcccagacacccctctttgttttggttgatactctcaaagacagcagaacaagcagctcatttcaatgtttcaatcaatcctacctgctgaagaattgtatgtagcagaatttcagctttgccgagatct

SEQ ID NO: 224639 - DNA, 611 bp, Homo sapiens
cctgcttcattgactctgagtcctaagtaaaaaatcaaatagcttcccctgtatctttggatcttacttctgaagtctcccatatcatgtaaaactaaaattaaatttgttatgtttttctcttcttaaattgtctttttgttatgaggtactgaccatgacccttatgatggatgagaaaaggtatcactcctttcctcccctacaccaaaaaacctaaaatttttaggaatataaaggagataagacattcttattcttctagctgagctggaaggggagaaggaagggaaarcatgtcacagagcagggatcattttactcttaatggtgtaaatggtgaattatagagattataatttgtgtgcatatttttttcctgattaagaatattcttcctctaagaatgttagcaggtggaggaagagggggcattgtgtagggatggcaagtagtatgagctgtaggtcaggactattctgtaagcttgactgttctgcaagaaagagaaaatggaaatatataggcagtgagaatttcctgactatggcagtgggtagatggttgggtcctgacatgacttctctgtcagcctagcagtaagaagggca

SEQ ID NO: 224640 - DNA, 611 bp, Homo sapiens
cctgcttcattgactctgagtcctaagtaaaaaatcaaatagcttcccctgtatctttggatcttacttctgaagtctcccatatcatgtaaaactaaaattaaatttgttatgtttttctcttcttaaattgtctttttgttatgaggtactgaccatgacccttatgatggatgagaaaaggtatcactcctttcctcccctacaccaaaaaacctaaaatttttaggaatataaaggagataagacattcttattcttctagctgagctggaaggggagaaggaagggaaagcatgtcacagagcagggatcattttactcttaatggtgtaaatggtgaattatagagattataatttgtgtgcatatttttttcctgattaagaatattctwcctctaagaatgttagcaggtggaggaagagggggcattgtgtagggatggcaagtagtatgagctgtaggtcaggactattctgtaagcttgactgttctgcaagaaagagaaaatggaaatatataggcagtgagaatttcctgactatggcagtgggtagatggttgggtcctgacatgacttctctgtcagcctagcagtaagaagggca

SEQ ID NO: 224641 - DNA, 455 bp, Homo sapiens
tgcgatttgatgatttagttcaatataggatatctagtctaaaattattagtcctcataattttaaaggtatttctctgttaytttctagcatttaatattgctgataatgtccgatgccagtctgattttgctctttttgtaagataaagaaatattttatctccttccttcttccttccttccttccttcatttcttcctttcttcccttctcctttccttttttctttatctccttcccttctttctttctctttctggaaatgtttgaggtttctctttatttttagtgtcttaaaattttacaatgatttatttgttttttaaaattcgtatttcacgatttgtttattattatatttttcctgtgatcagcattctctgggaccctgtgacctttccattctgggataatttcattgactatttatatgataattgaattccatctatt

SEQ ID NO: 224642 - DNA, 424 bp, Homo sapiens
tatcaagtacactgctacccagctgaggttgttacatcacacacactgctacccagctgaggtcgttacaccacatgcaccctacccagctggggtcattacaccaccacaygcattgctgttccagctgaggtcataacgccacatatactgcttcccagctgaggttgttacagcacatgcactgctattccaactgaaccaccatcatctccagcctggattactgcaatgacccctacgtggtctcactgcctttaccttcactaccctcaacctaatctcaactcagcagccaaaagaatcctccccttaaaacatgactcagatcatgtcactccttttgttaagacccgcacatgggttttcatttcacttagagcaaaaaaccaaagccatggcctgtctgatttcatctcctact

SEQ ID NO: 224643 - DNA, 546 bp, Homo sapiens
aatacttctctctttctaaggtggagatgttgaatgcttttttcgtagtttgcttttattgttattttttagtatttaacacattttgcacagcaactaaattgattttatatggacttcagaaattttaaacctgaggcctaatgatgtagaagtcttatttgaattaaataaggatattatctctgccagagacaaacaaagaatgtcagattagacactaaattaatcacaagaccacaaatatcatctctgttcttcatatagtgtccctatggatgctgacatgtgttaaccayatagaagagatcacgtaattattataacaatagatagcaagaaacttggctttcatttgattcctctgcccagcttcttataaagtgacatccatcttatttctgtattacaccaaagtaaaaacaatatttatatacattaagattatgtaaagactaggatgctgtaatggtgtctggtatatatatccacgatacaatcatatagtacctccactctgaagacacagaatatgaattcgcttta

SEQ ID NO: 224644 - DNA, 590 bp, Homo sapiens
cccactgccacaggataattctctgtaacaaagctcagtctcaatctccacccaaatgaaaaaagggcaaatccccaaagagaaaagtaacggtcacagccatttctacgggtcccaatctcacagaccaaggagggaccgatgacagttcatcgctaccataaaccggcgagtatgccccaaggggactggaggttctgtaaggggattttgcaggaagaatatctttctgagccctccaacagagagaagcgttttttacaagtaaggaagctgtgttggcacaacggacaacaatttcaagctgcgagragatgcaaatggccaccagtgtgagaattttgttgtctgacagacacagggcttcctaaccattcttcttccctccgtcttttgtataacaatgtttggagggagaatgaactcaacattgtgcaaacacttttgctataaatcaccacagcatccaaattatcaagggccccccaaaccttcaacctgtcttcctttcctggtcagggttagaatgtaattagacagccaagcgagaaaaaaagggaagaaaaaaggggtggttggccaagatgtgt

SEQ ID NO: 224645 - DNA, 590 bp, Homo sapiens
cccactgccacaggataattctctgtaacaaagctcagtctcaatctccacccaaatgaaaaaagggcaaatccccaaagagaaaagtaacggtcacagccatttctacgggtcccaatctcacagaccaaggagggaccgatgacagttcatcgctaccataaaccggcgagtatgccccaaggggactggaggttctgtaaggggattttgcaggaagaatatctttctgagccctccaacagagagaagcgttttttacaagtaaggaagctgtgttggcacaacggacaacaatttcaagctgcgagaagatgcaaatggccaccagtgtgagaattttgttgtcwgacagacacagggcttcctaaccattcttcttccctccgtcttttgtataacaatgtttggagggagaatgaactcaacattgtgcaaacacttttgctataaatcaccacagcatccaaattatcaagggccccccaaaccttcaacctgtcttcctttcctggtcagggttagaatgtaattagacagccaagcgagaaaaaaagggaagaaaaaaggggtggttggccaagatgtgt

SEQ ID NO: 224646 - DNA, 543 bp, Homo sapiens
agtcagaaattagttttcattttttcaggtgtcaaaaaatatcacttacactttgtcaaattactctaatctgtctttctttaaaaagaaacatttaataaattctgaagaggtgctcttttctctggttgtgggtgaaattttatatttaaactaaatggattttttagaacagcagtttgagcagatcagtgtgctrtgtcaactgccaatgtgatgaacatcccaactctccttcatttttctttgggatcccccacagcctccccccaatttacacacacacacacacacacacagagacacacacacacacacacacatacacacaacttatttatttatttagccaggttattcttaataaggggaatgggagtaaaaagtacaaactctcctctgtcattgattattttacatgatctcctttgttcacacatttgctcaaaatactaattgtttagttcattcaaatgttttatttctactggctttgaatgaaggggatggcaagttaacttttaagaattaaaaaaaaaagct

SEQ ID NO: 224647 - DNA, 648 bp, Homo sapiens
acttaacagttttaaaaaggaagatcaaggcagaaaattaaaaagtaaacagttgaattagtatggaaaaagtaatcatgcagtcatttcttttagaaatggcccaaacaataggccagacatatttctagatttttacaaatttgtttttagtaattctagcgcagtggttcacagagtgtggtccacagtgttcctccaggtggtcagtaacctggtctcttgtggggctgacatttctcgtgtgaatatgtggtccttctgtttctggcaactattaaaaatgtacttattttatgtaatcaaaaccagccataattttaggagcatctcattcaaaacttcattgttcctctcatcaattccacaaaatgattctgggcattgcaagcagaatgggggraataactgatctaaattgttttttatttttacctgatgggaatcagtcattttagagtaatactaacatattggcatgagtttttatccctttatctgcatttcataatctcaagaggcatcaggaaaagtgaagggattcaaattttgtagataataagacttgaaagagcaaaaaccaaattgttcccttcagacacaaaacattgatggctagattttctcttcaagggcagacacaccaca

SEQ ID NO: 224648 - DNA, 492 bp, Homo sapiens
actaacatattggcatgagtttttatccctttatctgcatttcataatctcaagaggcatcaggaaaagtgaagggattcaaattttgtagataataagacttgaaagagcaaaaaccaaattgttcccttcagacacaaaacattgatggctagattttctcttcaagggcagacacaccacacagagtccaattctagggcctaactcacctttaggtatttccatccttctggaaagtgagtgactcttttatgcctctgttcagttcttaamccaaaaaaaaaaaaaaagaaaaaaaaaggcagtggagtctttcatcatctataactggaggacaaattggtgggtcacttccacctgataaatgtccactgaccaaggagcactgtcattggcaaattatgctcttctctgaggaaaatacaatcagaatacttgccaggctcaaatatgaacatgagaggggaaaatattgtgtagtgaaaagac

SEQ ID NO: 224649 - DNA, 579 bp, Homo sapiens
aatttatttagcatgagaacagcaatagcatgttctcacataagaagctgactaacagaatgcacagcatataaaaaatgtgctatttgtatagaaataatttgtcaacttcagcaatcagtttgagacccacatatcacctggatgaatggttctcctgcagaatctgattcagaggaaagagtcatgtggtgcggtgacttgaaagagctgtggtgaataattgaattctaagaatggccacagtagactccctgttaatatttctgaaaagtagggttatggagcacatattattaaactgttatttttaatagacatcttatacttgtatctggtctgtaagaccagtcatattagtgtacatttttcaattagtttactttggaagtgggcacaggggtctacactgctcaaatctgtaattataattaccttatgataatttattatggcaatratgggaatttgcttatttttctttgaaaaatgttttcaagctatacttgtttctgccatgatagagaacttttgcaacattcatttttgttgtgagagtagagccacaatgattttcta

SEQ ID NO: 224650 - DNA, 614 bp, Homo sapiens
ccataataaccgagcagtctcaaatctctcattaaattttagtgtttcgagtaatctcccatggtttttagatggtaatagtaatgtccttttacctctaccagtttgttccagacttctttgatattacaaatgggatacggtgtataaagctggtcaaagtcaagaaaactttggtaaatactcctgtaactatagatactggtggttcctgcagggtattggtattccagacctgaaagaytcatacacaatcaatctgaaagtcagagcagagcaaatgcaccataagctgtgaagttacttagtggttctttgactgcttaactgagctggtgaaagtcagggcctgtgtatatatgtttaagtgataatctgcatcagttaattttcctgtttcagatttgccagttcaccctgaccatcttgaaaataagttatctctgatctctgtctgtatgttacttctctcccctcaccaacggagaacaaatgtgggcaaagtaagtaaagcaatcaccacctttggagggaagaattggtcatgttctatggatggtggatcaactctattgcggatactcagtaacatttttactctctaactcatcatt

SEQ ID NO: 224651 - DNA, 614 bp, Homo sapiens
ccataataaccgagcagtctcaaatctctcattaaattttagtgtttcgagtaatctcccatggtttttagatggtaatagtaatgtccttttacctctaccagtttgttccagacttctttgatattacaaatgggatacggtgtataaagctggtcaaagtcaagaaaactttggtaaatactcctgtaactatagatactggtggttcctgcagggtattggtattccagacctgaaagattcatacacaatcaatctgaaagtcagagcagagcaaatgcaccataagctgtgaagttacttagtggttctttgactgcttaactgagctggtgaaagtcagggcctgtgtatatatgtttaagtgataatctgcatcagttaattttcctgtttcagatttgccagttcaccctgaccatcttgaaaataagttatctctgatctctgtctgtatgttacttctctcccctcaccaayggagaacaaatgtgggcaaagtaagtaaagcaatcaccacctttggagggaagaattggtcatgttctatggatggtggatcaactctattgcggatactcagtaacatttttactctctaactcatcatt

SEQ ID NO: 224652 - DNA, 614 bp, Homo sapiens
ccataataaccgagcagtctcaaatctctcattaaattttagtgtttcgagtaatctcccatggtttttagatggtaatagtaatgtccttttacctctaccagtttgttccagacttctttgatattacaaatgggatacggtgtataaagctggtcaaagtcaagaaaactttggtaaatactcctgtaactatagatactggtggttcctgcagggtattggtattccagacctgaaagattcatacacaatcaatctgaaagtcagagcagagcaaatgcaccataagctgtgaagttacttagtggttctttgactgcttaactgagctggtgaaagtcagggcctgtgtatatatgtttaagtgataatctgcatcagttaattttcctgtttcagatttgccagttcaccctgaccatcttgaaaataagttatctctgatctctgtctgtatgttacttctctcccctcaccaacggagaacaaatgtgggcaaagtaagtaaagcaatcaccacctttggagggaagaattggtcatgttctatggatggtggatcaactctattgcggatastcagtaacatttttactctctaactcatcatt

SEQ ID NO: 224653 - DNA, 402 bp, Homo sapiens
gagtgaggtaatatgttatcatggttttgatttgcatttccctgatgattagagatattagcatttttcttccatctgttggccatctgtacatcttcttttcagaaatgtctatttaggtcttttgggttattggctttttttgctattgagttgtttcagctccttgtatattttggatattgaccccttatcggatgtataggttgcaaacattttctcctattctgtagattgtctcttcactgtgttgattgtttcctttgctgtacagaaactttttcacttgatataaccctccaatttgtctgtttttgcttttaytacttgtttttttaaggtcttattgataaaatctttgcccagaccaacatcctaaagcatttcccttatgttttcttc

SEQ ID NO: 224654 - DNA, 438 bp, Homo sapiens
cataggcatgatctgttgccatttcctatttccacctcatttaaaaactattaatagtctttatacaagtcataagtgattattccagaagtactcataatgggcttatgaaaagtttgcttttcacagtaattttggaaaaaggataagtttgggaggcttcttgcattgttaagatctgaccttgccttactggttacctagcctctacatccctggacataaaccttaaaggacttagaaagttagtttacaaggccaacatttaacattctaagtttagaggagaaaggaastttatatggctttttaatgatgaaggtgaacgattgtgacagtctcagccattgtaaatgtagataccaaaatagaacttgtcttaagggacctatgacttcaacgtatgaaatatgcttttccttaaaattctgaaaagtc

SEQ ID NO: 224655 - DNA, 586 bp, Homo sapiens
ttttaggagccaatataactactaataatgaaaatacctgtgagaaaattattcccaactagatgactacctattacaaataaatatttttctctaacctatttctttgtgttcagaagtcaagcctaatatgtaaagtcatactttctacagtacaagctatattctttttctatatcaacattctctgtacttttctccagttattgtctgcattaagttgtgttgaataacccactcagctggttttatactatttactttcagaaaataaacaatgtgaaaaaaatactttccatgtcttatttgtaattttgcttagaatgggttaatattttcagtaattttgtcttatgacgtaacttgtaaattgcttacaaattataaatgtctgattacagtatttttcctgaattctgtctcgggtttcctaaacactatttttggattctcctaaactaytgttaataaataaaggccagtttccatacatacctaggaaaatatgaggtaaaaagaataagttagacaaaactcaaagacaagttataactttttaaaaagtcaagcaatagtatcaataaat

SEQ ID NO: 224656 - DNA, 591 bp, Homo sapiens
tgtaaattgcttacaaattataaatgtctgattacagtatttttcctgaattctgtctcgggtttcctaaacactatttttggattctcctaaactactgttaataaataaaggccagtttccatacatacctaggaaaatatgaggtaaaaagaataagttagacaaaactcaaagacaagttataactttttaaaaagtcaagcaatagtatcaataaatacctgagatctaaaaaagtcaatttctgaagcacacataactccaaggatataaaggaaagtttattaaaactgagatcgacatcagaaaccatttccttcagttctaccatcctgaaacaaaaataattttaaaatgttagcacttgaattcactgccagaacttcaaaactgtaagcagatcaaagggggaaattcctatatttaacttctgctaattatgactttttgtaccttttactttttcacaggaacattaatgagtttggatatgtaactaataaaaataatttttyaaaaaaggctcactcttatctgtccaaaagtttctatttggctttatatatacattaaagtttcacttaaaaa

SEQ ID NO: 224657 - DNA, 596 bp, Homo sapiens
gaattctgtatccagataaattatctctcaaaagtcagggagaggccaggcacagtggctyatacttgtaatcccagcactttgggaggccaaggtgggcagatcatttgagaccaggagttcaagatcagcctggccaacatggcaaaaccccatctctactaaaaatacaaaaaattagccaaatgtggtgacacacacctgtaatcccacctactagggaggctgaggcatgagacacatctgtaatcccacctactagggaggctgaggcatgagaattgcttgaacccaagaggcagacgttgcagtgagctgaggtcctgccactgcactctgtctcgaaaaaaggaaaaaaagaggcagggagaaataaagactttctcagacaaacaaaaattgagaaaatttgtcaccatagacctgccttgcaaaaaatgctaaacaaagttcttcagagagaaggaaaatgataagtcataaactcaaatctgtatttaaaaaggaaaaagcattagagaaggaataaagtagaataaaagctttcattttttattcttaattgatttaacagataatcctttgttcaacagaac

SEQ ID NO: 224658 - DNA, 438 bp, Homo sapiens
gctctggggtctagattttttcacctaaaaatctacagggaccagccagtcatgcargtgaataatgtggttgagagactacatactccgactcaaggtatggccattattctgccatttagaaattcaggcccagtaataccaaagtttccaattcttaaagagaaggcagaaatccagatttttataggaaatccttaaatattggcaatttaaaaagagcaggttcaatctggcccacaggcacctagtttaggatctctgctacaggttttaccaactgtgtctacaggtatttaccaactgtgtctcctcactaaagagtctggcagcctgggagagcttcgctatggaatcatcaaatgtctccaaatcttgaaaggcacagaggggcaaggagctaactgaactccaaagacatcatggtgatttagaggc

SEQ ID NO: 224659 - DNA, 378 bp, Homo sapiens
agtcatgcaggtgaataatgtggttgagagactacatactccgactcaaggtatggccattattctgccatttagaaattcaggcccagtaataccaaagtttccaattcttaaagagaaggcagaaatccagatttttataggaaatccttaaatattggcaatttaaaaagagcaggttcaatctggcccacaggcacctagtttaggatctctgctacaggttttaccaactgtgtctacaggtatttaccaactgtgtctcctcactaaagagtctggcagcctgggagagcttcgctatggaatcatcaaatgtctccaaatcttgaaaggcmcagaggggcaaggagctaactgaactccaaagacatcatg

SEQ ID NO: 224660 - DNA, 548 bp, Homo sapiens
tagtgaagttgcctacactaaactacagtttttcagtgtagatgaaatagccttatactgcaagaagatgccatctagggctttagctagagaggagaagtcaactcctggcttcaaaggacaggagaactgtcttgttaggggcagcagcagtgactttaagttgaagccaatgcttatttaccattccaaaagtcctgggtcccttaagaattatgctaaatatgctctgcctgtgctctaraaatggaagaacaaagcctggatgatagcacatctgtttacagcatggtttaatgaatattttaatcccactgttgagacctactgctcagaaaaaaggatcttttcaaaatatgactgctcattgtcaatgcacctggtcacccaagagctctgatggagatgtacaagccaattcatgttgttttcatgcctgttaagacagaattcattctgtagcccatggatcaagaaataaatatggacttcaagacttattatttaataaataaattttgtaaggctatagcttccatagatagtaa

SEQ ID NO: 224661 - DNA, 498 bp, Homo sapiens
gccctgcctgatgctctgcacgtaacagctgagagatttctataactgtgtttcaaaagcctgactccccttccacccctggcccaattttcttctgamtcttttcttttggaagagaacaaggaaggacattttccacctccctatacctttacagggaggtgggtggggctgccctgggcctgtggtcacccacccccatcatcctacccccagcctaacaatttttccctggggaccctgggggcagggaaaggagggctttggaaacaaaagtcaggtgtgtgttcaggctcagactcttacttatgacccaaggtttgccgctcaacttccctgagactcaatatcctcattggaaaatgggaatgttggattgttgggagtgtgattgaagatgagacatgagaaaagatcccgtgaaatctggagcattttacaggcttagcaaccatgactactaaaaaaccttcccgcttacttaccttcaggtcttct

SEQ ID NO: 224662 - DNA, 498 bp, Homo sapiens
gccctgcctgatgctctgcacgtaacagctgagagatttctataactgtgtttcaaaagcctgactccccttccacccctggcccaattttcttctgaatcttttcttttggaagagaacaaggaaggacattttccacctccctatacctttacagggaggtgggtggggctgccctgggcctgtggtcacccacccccatcatcctacccccagcctaacaatttttccctggggaccctgggggcagggaaaggagggctttggaaacaaaagtcagstgtgtgttcaggctcagactcttacttatgacccaaggtttgccgctcaacttccctgagactcaatatcctcattggaaaatgggaatgttggattgttgggagtgtgattgaagatgagacatgagaaaagatcccgtgaaatctggagcattttacaggcttagcaaccatgactactaaaaaaccttcccgcttacttaccttcaggtcttct

SEQ ID NO: 224663 - DNA, 498 bp, Homo sapiens
gccctgcctgatgctctgcacgtaacagctgagagatttctataactgtgtttcaaaagcctgactccccttccacccctggcccaattttcttctgaatcttttcttttggaagagaacaaggaaggacattttccacctccctatacctttacagggaggtgggtggggctgccctgggcctgtggtcacccacccccatcatcctacccccagcctaacaatttttccctggggaccctgggggcagggaaaggagggctttggaaacaaaagtcaggtgtgtgttcaggctcagactcttacttatgacccaaggtttgccgctcaacttccctgagactcaatatcctcattggaaaatgggaatgttggattgttgggagtgtgattgaagatgagacatgagaaaagawcccgtgaaatctggagcattttacaggcttagcaaccatgactactaaaaaaccttcccgcttacttaccttcaggtcttct

SEQ ID NO: 224664 - DNA, 496 bp, Homo sapiens
tcctccccttcttagaccatataggttaacttcctgacattgccatcgcagcactgtggaagtgttttttaacatgctaatgcattacagttaacatataatgagcagggaggacgaccagaggtcactttccttgtcctcttgatttggtgggttttggctgtcttctttaccacaacctattttatcagcaaggtctttgtgacttgtatctggtgctgacctcctatcatcctataacttacaatgcttcgcctcctgggaatgcagcccagcaggtctcagcctcattttacctagcaactagtcaagatggagttgctctggttcaaacgcctctgayatttacaaaagggcagcttttcagagctaccactgtgtctgcagtttctcaaaataacctgctcaaaatatacaaaagaaatattttttgaggtggtatactctgatctcttatagtcatattttgatgtgtgttctgagccccagcagctcc

SEQ ID NO: 224665 - DNA, 604 bp, Homo sapiens
agggccactggcgagctggccagagctgctctgagaaccaccagtgaagggcagagggcactttagmcccaaaagtagtagcagtttagggcaggtggaagagacgggtggttcaattgccccatgtggcgtttcaggtgggccacatgggtcaattgagtcttatcaacttgtgtcttatctagcaattgaatgccattgctagataagagtggtgacctccagctggtaagttattttatcagccttgtcccatcccaaggatccccaaaaaggccacagaactctgccagcaggaagtagacaccggtgtgcatcagagaatatcaaactctacctattttaaatttataaactggattctaattagcctgcagggagtttccatggaaattggagatatcactttgcaacagtataagatcacagcatcaagtagacgggaaaagtggaaaatctctattcttttaggaatcagctggagtcacctcgctatgaaattgtccctgacccaggcagattccaggtgttcccacttccattacagtatttgtagtatgtaattgtcagtgtacatatctacatcccgcagacgggggagaca

SEQ ID NO: 224666 - DNA, 604 bp, Homo sapiens
agggccactggcgagctggccagagctgctctgagaaccaccagtgaagggcagagggcactttagccccaaaagtagtagcagtttagggcaggtggaagagacgggtggttcaattgccccatgtggcgtttcaggtgggccacatgggkcaattgagtcttatcaacttgtgtcttatctagcaattgaatgccattgctagataagagtggtgacctccagctggtaagttattttatcagccttgtcccatcccaaggatccccaaaaaggccacagaactctgccagcaggaagtagacaccggtgtgcatcagagaatatcaaactctacctattttaaatttataaactggattctaattagcctgcagggagtttccatggaaattggagatatcactttgcaacagtataagatcacagcatcaagtagacgggaaaagtggaaaatctctattcttttaggaatcagctggagtcacctcgctatgaaattgtccctgacccaggcagattccaggtgttcccacttccattacagtatttgtagtatgtaattgtcagtgtacatatctacatcccgcagacgggggagaca

SEQ ID NO: 224667 - DNA, 604 bp, Homo sapiens
agggccactggcgagctggccagagctgctctgagaaccaccagtgaagggcagagggcactttagccccaaaagtagtagcagtttagggcaggtggaagagacgggtggttcaattgccccatgtggcgtttcaggtgggccacatgggtcaattgagtcttatcaacttgtgtcttatctagcaattgaatgccattgctagataagagtggtgacctccagctggtaagttattttatcagccttgtcccatcccaaggatccccaaaaaggccacagaactctgccagcaggaagtagacaccggtgtgcatcagagaatatcaaactctacctattttaaatttataarctggattctaattagcctgcagggagtttccatggaaattggagatatcactttgcaacagtataagatcacagcatcaagtagacgggaaaagtggaaaatctctattcttttaggaatcagctggagtcacctcgctatgaaattgtccctgacccaggcagattccaggtgttcccacttccattacagtatttgtagtatgtaattgtcagtgtacatatctacatcccgcagacgggggagaca

SEQ ID NO: 224668 - DNA, 604 bp, Homo sapiens
agggccactggcgagctggccagagctgctctgagaaccaccagtgaagggcagagggcactttagccccaaaagtagtagcagtttagggcaggtggaagagacgggtggttcaattgccccatgtggcgtttcaggtgggccacatgggtcaattgagtcttatcaacttgtgtcttatctagcaattgaatgccattgctagataagagtggtgacctccagctggtaagttattttatcagccttgtcccatcccaaggatccccaaaaaggccacagaactctgccagcaggaagtagacaccggtgtgcatcagagaatatcaaactctacctattttaaatttataaactggattctaattagcctgcagggagtttccatggaaattggagatatcactttgcaacagtataagatcacagcatcaagtagacrggaaaagtggaaaatctctattcttttaggaatcagctggagtcacctcgctatgaaattgtccctgacccaggcagattccaggtgttcccacttccattacagtatttgtagtatgtaattgtcagtgtacatatctacatcccgcagacgggggagaca

SEQ ID NO: 224669 - DNA, 359 bp, Homo sapiens
aaaaagggttttttaaaacagcaaataaatcagaatattccacacttgtagtctgcattttgtgttgccatttgattgggtttctagactaggccagcattttatattctgtaarcatggtagaggttatattatctccagccccaaatcttggacattaaaccttttcctcattgctcactcggctagatatacattattaataaatgagatttctgagatgtttagacttgattctaaacattcatgaaataaacttggagaatgagtaactatcatcagtgatgataaaaatgagcttgggaagataccctgtgtgttgattctgatgagaattttacctttattggacaccagaa

SEQ ID NO: 224670 - DNA, 528 bp, Homo sapiens
ttcaaaatcatttaaacattataatagcacacccacctactagacatttgatttttccatccactttccttagtgagtacaagcagttcttatccaaagatcattaagaggattagggggtggtaaggaacggttattggccagaaagaagggaaattgtactattaattgctcagaggatagcacattattctgcacatgtaaacactcaaggtaaaatatggcagatgaataaagagcttctgtatagaagaactayaaactttggcaggaaccactgtgctgcagcagtgaagaggccttctgctaggggctgcaatggaaaaagtgacctcagagaggaattcagaacagaaatactcagaaagagatgaaacaccatgaagttttggttaagtcatttggttccaggcttataaaagggaaaagctgttttagtaaaaaataaaaaataaaaataaaaatgctgactacgtgaactttgcagattactcttctattctaattgtaaatttgaattccaaagta

SEQ ID NO: 224671 - DNA, 599 bp, Homo sapiens
tgacttcatttgcaatcttagcactgaaaaagataggtcactagttttagttagtattcctcttgttgtckcatctttaaatccatcagatctctttcatctctgtgtatctatgaatatgattttataccattgctttgtctgagcaaactgtacctctacagtcatttaccaaagttgcttcatgtattccttagattcaatttagcaaagaaacaatctagagtactgtccatatggataccatgcaaatatacaacttaatatggcattataatgcaaactaaaaattattttacattagctttaggaagtatttttagatgagagaaacaagaaacactagcaattaattacttcatactccatcagcaaaattttcccactagataatcagaaatgggcactttatcaattttattcccccattacagatcaggaaataacattaaatcaatattttcataaggactattacacacaagaccttctgaaacttgaaaaatatgacaaagtgttttaactgtgatcacatatcatatataactgctttacagaaaatgctaaacacaaaacgtacttgtgctcaaagtaatgca

SEQ ID NO: 224672 - DNA, 636 bp, Homo sapiens
cacatgtcatgtttaattgtgtttttctacttacatttcctattgtaaccttcagtgctcatctgggttgttttctgtttgtttgtttgcttgcttgtttttattctctaagaaacagtataatggctaagaccctatttgttgactaatcctatttctggaaggttagcagacctatgtgagatattgagacccttccctcttttacgcacctaaagtgaagtgtgtctgcccactgcctcttccttaatagggtgatgccttaatgcaagggttgcaaactaaagtgcctgccacagccaggtagataatacactggagtgatgtgagtgtacacagcaaatgagcttggccaaagggagcagctgttgtgaagctccagcagattcttgtgaagtggcaacatgggcgtacttgccagatattcttacttttgtgtgtgaaattttttggtgaagtttccccacttttaacttcacaaaatatcaattttatttaaacactgcagattaaacaaaatatgttggtgggttcttatcaacccacagtccaccagtctttgayatcaatctaaatctttatatatgtatgcatgtcatgtttcattgtgtttttctattacatttcctactgtaa

SEQ ID NO: 224673 - DNA, 582 bp, Homo sapiens
tgagaaggggagagtatcctggattatccaggtgggcccaatctaaacacataagtccttaaaagctgaaaatctttcctggttgtggtcagagggagataagacagaaggaggagagattcaaaatatgagagggatttgacccgctattgctagctttgctgatggaggaaggggctgtgagccaaggaatgtgggcagcctccagaagctggagagggccctcagctgacagccagcagggaatggagccctcagtcctgtaatggcaaggaactgaattctcccaacaacctgaactacaaaggaagccgatccttctctttgagcctcaagaaaggaacacagccctgtgaataccttgattttagcctagtgagacccgyatcaaacttctgacctccagaactgtaagataaatttgtgtaatttagctgttatgtttgcagtaatttgttgcagcagcaatagaaaactgatacggggctctgctcagatgtgtctgggaaacgacgctatagaacatattgatcatcttgttatggaacagtcataataaaaacaaaaccaataataaaacat

SEQ ID NO: 224674 - DNA, 520 bp, Homo sapiens
caaactcacctctgcagctataacaacctgtcataaggctgcttggttgttcctacccaccagttcttcctcaagagttggggcaaacctagaagccactctccctcactgggctattgctggggccaatctaggagggcttcttagggagttagcatcattgctgactgggrgctggatagcaaacctatggtcagagctcttcaaatgcagttaaccatcaagtctggagaataagttggaaattgaaatatatgcaaaaaatatagtgtgtgcctatacctgggggaagaaaacagggatactggatgggaggatgtatagaattggtcagtacacagtgtttaagatcataagacctggtcttagctggggctgggtttgaattctgactccaccacttacaagcaatgtgcccttgggcaagttcctgaccctcactaagactcaattgccttatctgtgagtagaactagtaatagagcctcccccataaagaggttgtatgccagaaacaaat

SEQ ID NO: 224675 - DNA, 582 bp, Homo sapiens
ggtgacattgacaagtgagcaaacacaactccatttgaattgttcctctaaaaaccctccattgaaattcattttagaatatactgcctacattcctttaaaaagccaaggaaaactgatgagatggaacataataaaactcctttttaacttctattcttaaagcccaatagcaggatgagctccagtataaattgtgaagtgacttctaaaacactactccatccattattttttttttttcaatgctctctacttccaagtttttctctgccttgtcatctattggtttcaagttattcctttattccccakggccccactgaaacgacctcacccaggtccaagtatactctatttctgacttctttcaaccccatattcctattgaaaccaccgttcctgtatagtagccacagaaaacggacatagttgctccttgaaaattggtaattgaacccacattgacatataatgggagtgaagtgttgcactgcctttgctatacaatgaaaaaataactaatagggatcttctggagataatcctataactgaaaagaatgattgtattggcggcaat

SEQ ID NO: 224676 - DNA, 600 bp, Homo sapiens
cacagagtctagggacaagacaccctttgcaaaagtgtgttaggctccatcaaaacggcttggctttttttccattgtgtcacagaagcaattgtcaggaccaatgacttgtccgtgtttgagtcacagaactaaagccaaagccttgactcacctctaggttcatttttccccttgtctgctttgtcaccaaggtgtagtgtgatgaaatgcatatgacctggcaaactgaacaatgagcctcactgttcgaagaaggtaaaacagacgattaatttgtcagcacaaagtgaagattcagaaggctgaaatatcaatctccttttcagtctattattctttctttgaataaaaggttgcttataattcacattaggttagaaatgcagaagttcaaaagcgagcaaaccttgtgctatacgttccctacacctcacaggaaatatctccaaagaagaagaggtctgcggaaaggatttactaargcccaatgtttccactcaaagtagaccttcttttggtcttgcacatatcagatacatagccacttggtgacttgatcagaactgatacgaagtaatcaagatcaatttcatgaaa

SEQ ID NO: 224677 - DNA, 632 bp, Homo sapiens
attagtatatagaaactattactatattggtatatatcttccacactttgatgggaatatgtgtgtacacttttctttaaaaaataaaaccattctatacatactgtaaagatttctgcttaatatttctgcttaataatatgggtattattttccatatcaataaatatataccaatgtcatcattttaacaattatatactattgcattgtataaataatccatacattactgaatcaatcccctcttgctggacattcagataatctcagattattttgcaatgttatgtgtatatgtgtgtatatatatatataaatactaatacagagtacatgaacatgtactttctatatatgagtatgtattatacacacacactatataatttgattattatattygaataaattatcttaggataaattattagagctggcactcccaagtctaagtatctgcatttttaaaaaagatttcatatgcagtcagcactctacatccttgagttccacatgtgcacaaaaccaaccctcagattagaaatattttttaaaaatacaacgataaaaataatacaaataaaaaatacagtataacaactatttacattacattaggtattataaat

SEQ ID NO: 224678 - DNA, 633 bp, Homo sapiens
gaagccataattcctagaattagaagaaactagagtgaaaatcaaagtgaaggacattgattgagggtctcttggccaagaaacaacattctcttgcrcttgttatatttcctgcacatggagcttgatgtggttggctgtgtccccacccaaatctcatcttgaattataactcccataactccaatgtgtcaggagaggaacatggtgagaggtgactgaattatggggtgggtctttcctgtgctgttctcttgatagtgaatgagtctcacaagatctgatggttttaaaaaggggagtttccctgcaaaagctctctcttcactgctgccatccatgtaagacatgacttgctcttccttgccttctgccatgattgtgaggtctccccagccatgtggaactgtaagtccattaaacctcttctgtaaattgcccagtctctgatatgtctttatcagcagcatgagaacaggctcatacagtaaattggtaccagcagaggggggcactactgtagatacttaaaaatgtggaagcggctctgagactgggtaacaggcagggattggaacagtttggagggctcagaagaagacaaaaaaatgtgagaaattttgaaacttccta

SEQ ID NO: 224679 - DNA, 527 bp, Homo sapiens
aacacttgaaagctgtcacaatgtgaatgawgaaaccaggaaatattactaccacgaagttcattttcaaagatgacatgtgacaaccaaggcctgctgtacaatgtggaaagagccgagggcaaactgcttttttgcatcattcttcatcattccattaatcatcaccaaaaagccaccatttcataaaagcaaggggagggaatgttacattaacataatattagaatcattccggaggaagggagatgctagcaaacatcctatcaatcaactggcaattactgataccaacaggtcttaagttgcacacggcaatggcgcatgttttcttcaccaaagatcgacctgcacctggcacagtccttggctcatgatggaaagaaaaccagtagcattgatcagtgaatgaggaacaaactcacctcatgcatccctaacctttctggcaatttaatctgtggcatgcgaaagaagttcccattaagtaggagtttacaatattctggctctgtagggtgaacaga

SEQ ID NO: 224680 - DNA, 588 bp, Homo sapiens
ggctttaacatgctggctctcacctagcttcgtgtggcttcatgtcccatgatggaggtcacacagagccaagacattcctgtaatctttgtttattctcattcatgtctcatgctgtacttctggccacaaacctccctcatmtggagtccccttttctctggactctacgtatctacaataaattctgcatattctccaaggtccaattcaatgtcacttgtcccttgaagttttcccagcctttccattccaaagtaattttattctttttcatattgaaaagcaatttctcttcatcttgctgttagcactcgtgattttctacattttgtaatagctatttagaaattatatcaatatgtgtgcacatcataaaagacaaaaagggctttataaacaacccttgagtgtttgatcatgcaacctaaaacagtccttcttttcacatgaaaggtactctataaatgtttagggaatgtgtgaacaagtaaatgaatgaatgacaaatgagccaatggctgctgagtatttattaatccatgcttaacctttggggtaggccccaaagacaaatgaaatcacgtc

SEQ ID NO: 224681 - DNA, 474 bp, Homo sapiens
attcaagggccttcctgcctaaccctctagaaatagttaattctacttaactttctattaggatagagaggcttgcccagaggagagttacagagttaatggaaacattttggattttttgtttggatgatgatgatgttggttggttgtttttgagcctaaaggggcctttggtatttagtacatactrtgttcacaagattattaaatttataaacaggccgggcgcggtggctcacacctgtaatcccagcactttggtaggcagggtgggtgggtggatcatttgagatcaggagttcaagactagcctggccaacatggtgaaaccctatctctactaaaactgcaaaaaattagctgggcatggtggtgcatgcctatagtcccagctactcaggaggctgaggtgagagaaccgcttgaacccaggaggccgaggcctcagtgagccaagatcacaccacttgggca

SEQ ID NO: 224682 - DNA, 365 bp, Homo sapiens
ctctccatcaggaattaccaacccaacccttacataattgccttcgctcaacattcaagtgataatgccttctattaaatttctctgtaagtttatctcccaaatattaaaaatgtagacagccatctcagtaaagcattgcatattctaaaggagcttataratgttttactgtttatagttcatagtcaaaacccacaattccactctttatattctcagacctttagttttggcttagttttaagctggcctgagactgactcagtttttgactgaatgtttaaagcactgtttggaagacatctgagcaaaaggcctgatggagaaactgatgacggcagatttcctctgcagaactggca

SEQ ID NO: 224683 - DNA, 430 bp, Homo sapiens
gtacctaaattatgtgtggaaatttatacttagtagattctcaaatattattggctaaactgcatttcacaggaaatgtatttctcaggagtgttttctcattgttttccttaaaaaamaatgctggcacccagcaaaataataaaattaaaaaataaaataaaatgcaaatactgcctaagggaatacagtgaaaagaattggttctcactctcctatccttcaaggctcctagttcttcgcctcagaggaatttggtgttacctgtttcttttggaatggcctgtccatctagaagcatactaccattttacacacaaaagatagcatgctctatgtgatttggtaccttgcctttttcatagtttaggtttttatagtttcacacattgcaacattgaaaacagacgaagataggctgtggcagata

SEQ ID NO: 224684 - DNA, 430 bp, Homo sapiens
gtacctaaattatgtgtggaaatttatacttagtagattctcaaatattattggctaaactgcatttcacaggaaatgtatttctcaggagtgttttctcattgttttccttaaaaaacaatgctggcacccagcaaaataataaaattaaaaaataaaataaaatgcaaatactgcctaagggaatacagtgaaaagaattggttctcactctcctatccttcaaggctcctagttcttcgcctcagaggaatttggtgttacctgtttcttttggaatggcctgtccatytagaagcatactaccattttacacacaaaagatagcatgctctatgtgatttggtaccttgcctttttcatagtttaggtttttatagtttcacacattgcaacattgaaaacagacgaagataggctgtggcagata

SEQ ID NO: 224685 - DNA, 410 bp, Homo sapiens
atggttgaactaatttacactcctaccaacagtgtaaaagcattcccttttctctgcaacctcaccagcatctgttgtttcttggctttttaataattgccattctgactagaatgagatggtgtcttattgtggtttcgatttgcatttctctaatgatcagtgtttgtaggccacacgaatgtcttcttttgagatgtgtctgtgggtttttttttcttgtaaatttgtttaagtttcttatagactggatattagacctttgtcagatggatagattgcacaaattttctcccattttataggtgtctgttcactctgatggtagttttcttttgctgtgcataagctttttagttgatttaragcccactcatcaatttttgcttttgttgcaattgcttttggtg

SEQ ID NO: 224686 - DNA, 571 bp, Homo sapiens
agaatctggcaccaccctcctctctctctcgcttcctcttgccatgtgatgcctgccctccttcaccttccgtcgtaaattgaggcactctgaagccctcaccagaagcagatgcttctggtacagtctacagaactgtgagctaaataaacctcttttctttataagttgccctgcctcaggtattcctttatagcaacagactaaggtattcctatatagcaaatggactaagacatgtatacataatatgtattactttatgtacttttatgtactatttgaaattatatgtttatatccatgtgaatatatcctgtatatatatgtgtatatatatgtgtgtgtgtgtgtrtatatatatatatatatatgtatatgtctaaaagaaaatgcatgtcaaattctaaatagctgacttactaatgaacttttcagaacacatcccatttgtaaggtggggataaggcaaaaattgtaaacattactaatatttatttgtcttactaacatactagttactttcatgagctttatgtgtttatctcatttaataggtacaatagaagag

SEQ ID NO: 224687 - DNA, 621 bp, Homo sapiens
cacctgtagtcccaggttttcatgaggattatgtgaaaagtgcccagcatccgtcacataataaatgttagtaactttcacatcaagttgagaaatgtgtatgtatttaaaactccaggctcctaccattcagtaacctctccataatttaagggtcttcatatggcttcaaagaaaaaagtatggggccgggcacagtggctcgcgcctgtaatcccaacactttgggaggccgaggcaggaggatcacctgagtccaggagttggagaccagactggccaacatggtgaaaccctgtctctactaaaaacacaaaaattagctgggggtgttggcagacacttgtaattccagctaatccggaggctgaggcatgaggattgcttgagctcgggaggtggagkttgcagtgagccaagatggcaccactgcactccagccgtggtgaaagaacgagactctgcctcaaaaaaaaagaaaaaagtatgaaagaaaaaacccaacttcaatacatttttcaattattaaacctcatggtaggaccataattcctgaaagccttctcagagtaataaatgcttcacgcaaatatcttaatgcctagatatgccccagaattc

SEQ ID NO: 224688 - DNA, 562 bp, Homo sapiens
gcgggcctgcgctgcctgcccgtaccgaaaccaggcgagaccccggggcctggctacaggggttcatccccagccaggcccacagccaagcggaggcgtcttctgttttygtattccctattagaagtttgacaacaggaggcattcaataaatgcacatcaacgagggaaagcatgtaacaatagaaaacacacaagcattagcagcacgcggctaaagagcgaggaggaagggaggaatgtacaggtgctgctgtgtcccgaattaagcagggcggtttggagaagacttcacaaatggagccagttaatgaagcaagcggaaggaatatcgtttggcgaggataagatgaatggagaccctctcggggaaggaggagtctcccccaaacatccttgagctcagtctgtcttgaaaaaccagttgatatcctgaacagaatgggtctggagaatgaggcccccacttccggggccagttcgaggactatctagctgtgtgatcttggggaagtctcttggtctcagatggtggttgaactaatgaccttttatgacaccc

SEQ ID NO: 224689 - DNA, 350 bp, Homo sapiens
gtcttgttttaagacagcatataagggctggcattttaagacatagcttgggattcactttttaaaatatcctgtcattcccccaaaccctctcaacactttcttggttctyggtggtagaaaagctaagatctcttttagtctgtctggattaataaaaattccttccttggatattagataacctaagtagtttacttgtttttttgacaaaattgaagtttacctttagaagccttgtgtctctttaaggctaattgttgtaacaagtgaatctcattttcaatagagacttgcttatcctcttagcagaggagtaaattatctatctattgtattaacatacattt

SEQ ID NO: 224690 - DNA, 522 bp, Homo sapiens
ttgacaagataatttctagacctattttgtacatctttcatattctatgtacatatattcatttgtactatgrtaggtgggtgagagagaaaaaacagaggtagagagaccatcttgtgcctctcctatcattccgcatgaatagcaactttcccttcctataaatatgtacagccacataatggaaacatatcgtgtactgctttctgaatatgggtacaatctgttgtacaaggtagtggttttcaaaattttcaagtggtacagatctttatgcaaataagttaagtgaaaaattaatttaccaaatacacaaaattctgctcttttttgaaagtataggagtagaaagcagtggaaagtacctatcctcaatcacttggctttcaccttacccttcctctgaaatccaatggccaactctgggaaactttaggatttcataatattttgtttaattagtggaaggtgaaaaatctgagggcttggaagataattcaacttctaccagggacatactag

SEQ ID NO: 224691 - DNA, 522 bp, Homo sapiens
ttgacaagataatttctagacctattttgtacatctttcatattctatgtacatatattcatttgtactatggtaggtgggtgagagagaaaaaacagaggtagagagaccatcttgtgcctctcctatcattccgcatgaatagcaactttcccttcctataaatatgtacagccacatamtggaaacatatcgtgtactgctttctgaatatgggtacaatctgttgtacaaggtagtggttttcaaaattttcaagtggtacagatctttatgcaaataagttaagtgaaaaattaatttaccaaatacacaaaattctgctcttttttgaaagtataggagtagaaagcagtggaaagtacctatcctcaatcacttggctttcaccttacccttcctctgaaatccaatggccaactctgggaaactttaggatttcataatattttgtttaattagtggaaggtgaaaaatctgagggcttggaagataattcaacttctaccagggacatactag

SEQ ID NO: 224692 - DNA, 522 bp, Homo sapiens
ttgacaagataatttctagacctattttgtacatctttcatattctatgtacatatattcatttgtactatggtaggtgggtgagagagaaaaaacagaggtagagagaccatcttgtgcctctcctatcattccgcatgaatagcaactttcccttcctataaatatgtacagccacataatggaaacatatcgtgtactgctttctgaatatgggtacaatctgttgtacaaggtagtggttttcaaaattttcaagtggtacagatctttatgcaaataagttaagtgaaaaattaatttaccaaatacacaaaattctgctcttttttgaaagtataggagtagaaagcagtggaaagtacctatcctcaatcacttggctttcaccttacccttcctctgaaatccaatggccaactctgggaaactttaggatttcataatattttgtttaattartggaaggtgaaaaatctgagggcttggaagataattcaacttctaccagggacatactag

SEQ ID NO: 224693 - DNA, 443 bp, Homo sapiens
cacatgtatttacttaaatagaaagtagtcaaaataaaataagattaaaaatttactttctcagtcacactggctgcatttcagttgcttaacaaccacatgtaagtagtagctactctattgtcagtaccaataaagaacagtrccatcattgcaggatgttccactggacagcattgctctcagcattgtgtctctggaaaaactctaaaatctccttgtctttttcaaataagttatcacataaatcctaggacagggacaatcaatattaaatatgttacacaaatacaagaacacttacagaattctctttctctttttatgtgtgtgtgtgtgtgtgtgtgtattacttctttcactctctttgtttcttttattaatttatttagatttactgaagatgtactacatgtcagtcactgaagtaggtaattgggtag

SEQ ID NO: 224694 - DNA, 443 bp, Homo sapiens
cacatgtatttacttaaatagaaagtagtcaaaataaaataagattaaaaatttactttctcagtcacactggctgcatttcagttgcttaacaaccacatgtaagtagtagctactctattgtcagtaccaataaagaacagtaccatcattgcaggatgttccactggacagcattgctctcagcattgtgtctctggaaaaactctaaaatctccttgtctttttcaaataagttatcacataaatcctaggacagggacaatcaatattaaatatgttacacaaatacaagaacacktacagaattctctttctctttttatgtgtgtgtgtgtgtgtgtgtgtattacttctttcactctctttgtttcttttattaatttatttagatttactgaagatgtactacatgtcagtcactgaagtaggtaattgggtag

SEQ ID NO: 224695 - DNA, 415 bp, Homo sapiens
gtttgtgataaaggattaattaattactacattttgcaagaatcaatattattatctttaaagcaaaattaggaatgcccttgttctccagatatggggatatctggacatgcccaagtctgggtctgtttcagtaaacttcattaatttgttcccttaatggtaagcatctagagtctaggaatttctaattttctgggaatgcagccaagcaagtctcggcgtcattttcctggtcctcactcaaaayggagtcactctggtttgaacgcctctaacataatgattgtgcaggagcatgctatttaatttctatgtatttgtttaattcacaaagtttctcttggtattcatttctagctttattccactctggtgtgagaagatacttgatgaggttttaatttttaaaata

SEQ ID NO: 224696 - DNA, 486 bp, Homo sapiens
atttgcatctgtagagaatctgtactaatgcagccacatttttttctgaggtttccctttatctaggaaagatcaactgagtttgaaacatttaaatgtctgaagaagcatttgccatctattctgagggctgctacctctgtgctttcatctacataagaatcattttgctaggcaaacctcctcttcttttcatctcataatgtgtcttaccactataacyggatttactgtcttaaccagtatttggtcatactctcagaccccattctttctgtaacttcaagattgtacataagctgctgaaccccactggaaagttggagtgtcaggacccagaaactgataccccaaaatatggcactataacatgctaaactgatgatgaagcctgaaagtcttgctgaccctgacatacccactggtctctcccacagcacaggatgaaattgttttctgaaattcctttatctgtctgaagtctgg

SEQ ID NO: 224697 - DNA, 564 bp, Homo sapiens
aatctctttgttcagtttatccaacaaaattatgaaatctttctttgtctaatcttgtatgtattttagtttcttcaaaacagctattttgaattctctgtctgaargtttacatgtctctatctctccaggattagttcgtggtgccttatttggttcatttagtaaggtcatcttttcctgaatggcattgatgctagtagatgttcttcagtgtctgagcattgggtagttaggtgtttattattatcttccctttctgtgtttatttgtactcgttcttcttgggaaggccttccaggtttttgaaagaatttcggtggtatgatctaagctgtatctgcattagggagcaccctaagtccagtaatgctgtggtttttacaggctcatagacttaacactttgacggtcttggcaaagatccaggataatgctctggattaccaggcagagactcttattctctttccagactttctcctgaaccatagagtctctctctatgttctgagctacctaaatctgggatgacagaagctcctctgtgtccatcaccactat

SEQ ID NO: 224698 - DNA, 564 bp, Homo sapiens
aatctctttgttcagtttatccaacaaaattatgaaatctttctttgtctaatcttgtatgtattttagtttcttcaaaacagctattttgaattctctgtctgaaggtttacatgtctstatctctccaggattagttcgtggtgccttatttggttcatttagtaaggtcatcttttcctgaatggcattgatgctagtagatgttcttcagtgtctgagcattgggtagttaggtgtttattattatcttccctttctgtgtttatttgtactcgttcttcttgggaaggccttccaggtttttgaaagaatttcggtggtatgatctaagctgtatctgcattagggagcaccctaagtccagtaatgctgtggtttttacaggctcatagacttaacactttgacggtcttggcaaagatccaggataatgctctggattaccaggcagagactcttattctctttccagactttctcctgaaccatagagtctctctctatgttctgagctacctaaatctgggatgacagaagctcctctgtgtccatcaccactat

SEQ ID NO: 224699 - DNA, 564 bp, Homo sapiens
aatctctttgttcagtttatccaacaaaattatgaaatctttctttgtctaatcttgtatgtattttagtttcttcaaaacagctattttgaattctctgtctgaaggtttacatgtctctatctctccaggattagttcgtggtgccttatttggttcatttagtaaggtcatcttttcctgaatggcattgatgctagtagatgttcttcagtgtctgagyattgggtagttaggtgtttattattatcttccctttctgtgtttatttgtactcgttcttcttgggaaggccttccaggtttttgaaagaatttcggtggtatgatctaagctgtatctgcattagggagcaccctaagtccagtaatgctgtggtttttacaggctcatagacttaacactttgacggtcttggcaaagatccaggataatgctctggattaccaggcagagactcttattctctttccagactttctcctgaaccatagagtctctctctatgttctgagctacctaaatctgggatgacagaagctcctctgtgtccatcaccactat

SEQ ID NO: 224700 - DNA, 564 bp, Homo sapiens
aatctctttgttcagtttatccaacaaaattatgaaatctttctttgtctaatcttgtatgtattttagtttcttcaaaacagctattttgaattctctgtctgaaggtttacatgtctctatctctccaggattagttcgtggtgccttatttggttcatttagtaaggtcatcttttcctgaatggcattgatgctagtagatgttcttcagtgtctgagcattgggtagttaggtgtttattattatcttccctttctgtgtttatttgtactcgttcttcttgggaaggccttccaggtttttgaaagaatttcggtggtatgatctaagctgtatctgcattagggagcaccctaagtccagtaatgctgtggtttttacaggctcatagacttaacactttgayggtcttggcaaagatccaggataatgctctggattaccaggcagagactcttattctctttccagactttctcctgaaccatagagtctctctctatgttctgagctacctaaatctgggatgacagaagctcctctgtgtccatcaccactat

SEQ ID NO: 224701 - DNA, 430 bp, Homo sapiens
tcaatttatacagagaatataggcacaatgtgatgtgattgtgaytctttgactttacttcctaccttggagggttttaaaaatttaacctgtaaagctttgctttaaagttccaggaaaaccaactttaaagagcttatatggccagtcacaattttatgctaaaaattaggccaagtatattagaactgaaatttatttttcaaataaattggtcctcttatgttttattcttggtagaattggggaactagcgagagaaaaattatatttcaggaaaactctatagtacacctgtttgtagacttttccattgtttttcagtttttattatttttctacaatttagactgaatcatgcattcttctctggctacaagtctccaactaatgttttcaaattttccttcaatttttttgacatgtgatc

SEQ ID NO: 224702 - DNA, 430 bp, Homo sapiens
tcaatttatacagagaatataggcacaatgtgatgtgattgtgactctttgactttacttcctaccttggagggttttaaaaatttaacctgtaaagctttgctttaaarttccaggaaaaccaactttaaagagcttatatggccagtcacaattttatgctaaaaattaggccaagtatattagaactgaaatttatttttcaaataaattggtcctcttatgttttattcttggtagaattggggaactagcgagagaaaaattatatttcaggaaaactctatagtacacctgtttgtagacttttccattgtttttcagtttttattatttttctacaatttagactgaatcatgcattcttctctggctacaagtctccaactaatgttttcaaattttccttcaatttttttgacatgtgatc

SEQ ID NO: 224703 - DNA, 430 bp, Homo sapiens
tcaatttatacagagaatataggcacaatgtgatgtgattgtgactctttgactttacttcctaccttggagggttttaaaaatttaacctgtaaagctttgctttaaagttccaggaaaaccaactttaaagagcttatatggccagtcacaattttatgctaaaaattaggccaagtatattagaactgaaatttayttttcaaataaattggtcctcttatgttttattcttggtagaattggggaactagcgagagaaaaattatatttcaggaaaactctatagtacacctgtttgtagacttttccattgtttttcagtttttattatttttctacaatttagactgaatcatgcattcttctctggctacaagtctccaactaatgttttcaaattttccttcaatttttttgacatgtgatc

SEQ ID NO: 224704 - DNA, 613 bp, Homo sapiens
caggcctagtccatctgcaatagcatctcctggagtgggacacagctgctgaaataaactgatctattctcaggactaagagactgattaagaatgatatacatatatatataaatgtgctgttttctgcgtatcctaatttggttactttctattcctttgccttttttaatctaataaactctaaccaaaatatcttcaatgctataagccttactttaacatataaaasttcttaaagttttaaagtggaagctgaaagaaaatcaaaatattttaccccaaaacatatttctttgatgtattttgagacacctgtttagaaatccagcaaagagaagtagagaagtaaccctacaaagttgtcttttgtgggggcagatttgcatctgtagagaatctgcattgttgcagccagattttctctgaggcctccttttatccagatctaggaaagatttactgaaagtctgacacttttataggtctgaaaaaaacagttatcatgtattctttctgaggtctgctacctgtgaagtttcatctgcataacaagaccacttttgctagctaagcctcctcttctctacctcccataacctgttttgccacc

SEQ ID NO: 224705 - DNA, 613 bp, Homo sapiens
caggcctagtccatctgcaatagcatctcctggagtgggacacagctgctgaaataaactgatctattctcaggactaagagactgattaagaatgatatacatatatatataaatgtgctgttttctgcgtatcctaatttggttactttctattcctttgccttttttaatctaataaactctaaccaaaatatcttcaatgctataagccttactttaacatataaaacttcttaaagttttaaagtggaagctgaaagaaaatcaaaatattttaccccaaaayatatttctttgatgtattttgagacacctgtttagaaatccagcaaagagaagtagagaagtaaccctacaaagttgtcttttgtgggggcagatttgcatctgtagagaatctgcattgttgcagccagattttctctgaggcctccttttatccagatctaggaaagatttactgaaagtctgacacttttataggtctgaaaaaaacagttatcatgtattctttctgaggtctgctacctgtgaagtttcatctgcataacaagaccacttttgctagctaagcctcctcttctctacctcccataacctgttttgccacc

SEQ ID NO: 224706 - DNA, 586 bp, Homo sapiens
aggtctgaaaaaaacagttatcatgtattctttctgaggtctgctacctgtgaagtttcatctgcataacaagaccacttttgctagctaagcctcctcttctctacctcccataacctgttttgccaccataacctgttttttcaaattccaatcccaattctttccgtaacatcaagatggtatttaagcttctgaactccaggaggggattaggaggtaatcaccctgtgtttctctcccacatgcatattaataatttttatgccctttctctaattaatcagacttttgcaagttgatttttttcgtggatcctcggaaggcaaaggagaactttttctttgacttttgtccattgtcaaactgctataaagaaatacctgagactcagtaatttctaagagaagaattttaattggctcatggttctgcaggctgtacagaaagcataacagcttctgattctcaggaagcctcagaaagctcccaatcacatggcaaaaggtaaagcrggagtgagctctcttacatggctggagcaagagatagagagagaggagggaggtgctacacactttaaaaa

SEQ ID NO: 224707 - DNA, 372 bp, Homo sapiens
tcctgaaaaactgccccccatgatctaatcacctcacaccaggccccccacgcctaacattggaaattacaactcaacatgagatttgggcgggggcacagatccaaaccatatcaacccctatgttagattttactayacccttgaacattgctacccacagttatcagaataaacatatgatctttagagtctgcttgagaatcattcattgcttatgtgtacttactaaaagctcctacgaaaaattaagaattgactgttttagttgtggggtaatgaaaaaaaaaaactgaagaaggaaaatatcagactagctattttatggtagatcccagttcatctttagaagataatttcttagcatggact

SEQ ID NO: 224708 - DNA, 372 bp, Homo sapiens
tcctgaaaaactgccccccatgatctaatcacctcacaccaggccccccacgcctaacattggaaattacaactcaacatgagatttgggcgggggcacagatccaaaccatatcaacccctatgttagattttactacacccttgaacattgctacccacagttatcagaataaacatatgatctttagagtctgcttgagaatcattcattgcttatgtgtacttactaaaagctcctacgaaaaattragaattgactgttttagttgtggggtaatgaaaaaaaaaaactgaagaaggaaaatatcagactagctattttatggtagatcccagttcatctttagaagataatttcttagcatggact

SEQ ID NO: 224709 - DNA, 557 bp, Homo sapiens
tagcctttcatttctagaatgcttccaagttgaaagttctcaagcccctaggaattctctttagtactatctaagttaatgagtgttcattctagctgattgcaagttctgtcttctatggccttctctttccctagtatttctgattatccctggaaaattcttacatattccacaaattsatgctggcttcacttatcacctttcctacagacacaagctctggtcttctctttttgatgttgttttgtcttttccagtgccacttcactccagtgtgaactaacatttctttcttaatgtcctaaatattttctaactctaatctgtagaagctatcagatctcttctgtgaagtaatatagcattctggttaaatgtgtggacactgatactatgtcttaggttctaatccatttggccacttactagcagtaagaccctagggaagttactaacttgatgcctgaattgtatttttttttgtaaaacaaagataatactagtactgataccatagaccttcattaaagattaaatggactacttccaagtga

SEQ ID NO: 224710 - DNA, 557 bp, Homo sapiens
tagcctttcatttctagaatgcttccaagttgaaagttctcaagcccctaggaattctctttagtactatctaagttaatgagtgttcattctagctgattgcaagttctgtcttctatggccttctctttccctagtatttctgattatccctggaaaattcttacatattccacaaattcatgctggcttcacttatcacctttcctacagacacaagctctggtcttctctttttgatgttgttttstcttttccagtgccacttcactccagtgtgaactaacatttctttcttaatgtcctaaatattttctaactctaatctgtagaagctatcagatctcttctgtgaagtaatatagcattctggttaaatgtgtggacactgatactatgtcttaggttctaatccatttggccacttactagcagtaagaccctagggaagttactaacttgatgcctgaattgtatttttttttgtaaaacaaagataatactagtactgataccatagaccttcattaaagattaaatggactacttccaagtga

SEQ ID NO: 224711 - DNA, 566 bp, Homo sapiens
cacagccaacactgctgcatcctgtcctgggaaccacagcccccatatccacacatactgggaagcacaattggtatgccaaagtgtccatccagaggactatagtggcacagcactggctggactgaaaagtgctgtggggtacccagtactccagaccacaaggagtactatttcttgggaaaaggttsatacagcacaccaaaaatgtggctctgggataaagaaaaccaaagcacaagcttaccagatcccaagagcctcctgtccggaattgtgaaaaattactctgctcccagcggtggcacatacactgttcttggccttgcaaatggggagtaagatcccctcccacaggcaaagaggccactgttcttggactcatgaatagtgagcaagacccctactctactttccctccaaacaccactgcaggtgctgctgctgttgctgccaccagcagctagggtggttaggctgaagggctgtctgtttggggttgttaatggctaccactggcagtgtggcctccatgcttgggttcatgcacaaagggaatagtccct

SEQ ID NO: 224712 - DNA, 419 bp, Homo sapiens
tgaattgtaactcccataattcccacatgttgtgggaggaacccggtcagaggtgattgaattatgggggcagatcttttctgcactgttstcatgatggtgaatggtctcacaagaattgatggttttaaaaatgggagtttccccacacaagctctctctttgcctgctgccatccatgtgagacatgatttacttctccttgctttccaccatttgtgaggcctcctgagccacatggaactgcaagtccattaaacctctttcttttgtaaattgcctggtattgggtatgtctttatcagcagcacaaaaatggactaatacagtaaattgataccagtagagtggggcattgctgaaaatatacccaaaaatgtggaagtgactttggaactgggtaatgggcacagatcggg

SEQ ID NO: 224713 - DNA, 559 bp, Homo sapiens
cccagcaccatttactgaatgaagagtcctttccctactgcttgttttttgtcggttttgtcaaaaatyatacggttgtaagtatgtggccttatttctgggctatctattctgttctattggtccatgtgtccttttttttttttgcaccagtaccgtgttgattttgattactgtaaccctgtagtatagttttgatatggacaggagggagggaaatgctgagaagagggcagttccctgacaaaggccccaccctcaagcacagaaactgcattcctaaatgagaacagttatacctgttttcccacgtgaatgttgctttttccaaaaccaccctggcacatcatgccccccatcgtgtacccataaaaaacccgaattccactggtagaagagtggagcaatgtggcagaggagtagagaagagaagaagcaactgagagtcagagactacagacggacgtggcttaacttcagacagcatgtcttcggagaggagctcagccagagccagccgggcttcaggaaataatcaccttcttccgcatctttccac

SEQ ID NO: 224714 - DNA, 547 bp, Homo sapiens
cttatttctgggctatctattctgttctattggtccatgtgtccttttttttttttgcaccagtaccgtgttgattttgattactgtaaccctgtagtatagttttgatatggacaggagggagggaaatgctgagaagagggcagttccctgacaaaggccccaccctcaagcmcagaaactgcattcctaaatgagaacagttatacctgttttcccacgtgaatgttgctttttccaaaaccaccctggcacatcatgccccccatcgtgtacccataaaaaacccgaattccactggtagaagagtggagcaatgtggcagaggagtagagaagagaagaagcaactgagagtcagagactacagacggacgtggcttaacttcagacagcatgtcttcggagaggagctcagccagagccagccgggcttcaggaaataatcaccttcttccgcatctttccacttccagctccccttccactgacagccactttcactacttaataaaatctccacattcaccatccttcaagtccatgtg

SEQ ID NO: 224715 - DNA, 521 bp, Homo sapiens
ctggttattctgtagacttgtttgtgtgattgttttatagtgtctgtgatctttgtacttaggtatgtttttgtgctagcctttttttccccctttggttccatgtgtagcactctctcaagaacctcttttaaggctggtctggttggaataaattcccttagtatttgcctgtctgagaagaatttattcctcctttacttatgaatcttagttttgaagaatatgaattcttgcttggaatttcttttctttaaggatcctgaaaataggtctgcaatcacttatgtttataatgtttctgctgagatgtctgctgctagctgatggagtttgctttgtatatgactttatccttctctctagcttcctttaaggcttttttattttgcattgagcttgytgaatctgatgactatgtgccttagtggttggtcatcttgtaaaatatctagctgaaattctttctatttcttggatttgaatgtccatctctctagtgagagtagagaaatgttcat

SEQ ID NO: 224716 - DNA, 571 bp, Homo sapiens
ttatctttttcatgtcttaatcttgttaagttcagctctgcttttgcttatttcttgtcttctgcaaactttgggattggtttgctcttgcttatctagttcttttgtagcaggacgagacgcagacaaaatccctcagacaccgagttaaagaaggaagggctttattcggccaggagcgttggcaagactcacatctcaaaaaccgagctccccgagtgaacaattcctgtcccttttaagggcttacaactctaagggggtccgcatgagagggtcgtgatcaattgagcaagcagtgggtacgtgactgggggctgcatgcactggtaattagaatgaaacagaacagaacaggacagggattttcacartgcttttccatccaatgtctgaaatctatagataacacaagcagttaggtcaggggttgatttttaactatcaggcccagggtgtggtgctgggctatctgcttgtggattccatttctgcattttagtttttacttcttcttcctttagaggcagaaattgggcataagaccatatgaagggtggtctcctccctt

SEQ ID NO: 224717 - DNA, 447 bp, Homo sapiens
gctatattgtatttcagctcttggatcatcttactggattccttggattgagtttcaactttctcttgcaactcaatgcacttccttgccataaagattctgaattctatatctattatttycaacttaagattcattgttggagactagtggactcccttggaggtacatagacactttggtttttgaattgccagggttcttgtgctaattatttctcatctggaagggttgatgttcttttaattgtggttataagttgaatatagtcagttagctttgtttgtagatggttccagaaagccaatgctctgtgtagagtctttctttttttgcgactgaattactgcccttggttccataggggggtatattagctaagtagttttggtgttttacattgggccgagatgcagtagatagttcttaagagtactggcagtaggt

SEQ ID NO: 224718 - DNA, 447 bp, Homo sapiens
gctatattgtatttcagctcttggatcatcttactggattccttggattgagtttcaactttctcttgcaactcaatgcacttccttgccataaagattctgaattctatatctattattttcaacttaagattcattgttggagactagtggactcccttggaggtacatagacacttyggtttttgaattgccagggttcttgtgctaattatttctcatctggaagggttgatgttcttttaattgtggttataagttgaatatagtcagttagctttgtttgtagatggttccagaaagccaatgctctgtgtagagtctttctttttttgcgactgaattactgcccttggttccataggggggtatattagctaagtagttttggtgttttacattgggccgagatgcagtagatagttcttaagagtactggcagtaggt

SEQ ID NO: 224719 - DNA, 447 bp, Homo sapiens
gctatattgtatttcagctcttggatcatcttactggattccttggattgagtttcaactttctcttgcaactcaatgcacttccttgccataaagattctgaattctatatctattattttcaacttaagattcattgttggagactagtggactcccttggaggtacatagacactttggtttttgaattgccagggttcttgtgctaattatttctcatctggaagggttgatgttcttttaattgtggttataagttgaatatagtcagttagctttgtttgtagatggttccagaaagccaatgctctgtgtagagtctttctttttttgygactgaattactgcccttggttccataggggggtatattagctaagtagttttggtgttttacattgggccgagatgcagtagatagttcttaagagtactggcagtaggt

SEQ ID NO: 224720 - DNA, 498 bp, Homo sapiens
gtgacttagaaactgccaggggacaaagaattggttaaacagctagtgtacataagcctgcacttcctgcagatctgaactgagatgtcaggtgccatactggttatgcatctgttgtgagacactgcccagtccagagaatttcttcctttaagtcatmaaactactagatcccctgaaaacatactcccaaacctgctctgactttggcaagcacagggaaccagtggatgcccagggagctgtggaacccctggtgatctaacctttggcatgagatactcataaagaagtgaggagcacagcctgccaaagcccccatgagacaaaagaaatgtaggtatggtgccaatcattgaagcctgcagcactgacagctgaggattgttgtggagaaggggttatctcccaccccccaccaatcaactgttgtggatgcagcagtgtttctccccagtggggccagaggttgagcacctggagaaagtgcttgttgtg

SEQ ID NO: 224721 - DNA, 655 bp, Homo sapiens
actgaaacttttctgaagttgtttattagttctagtagccttttggtagagtttttaggtattttttcaggtatagaattacatagtggagaaagacaatttgacttatttttttctcttgtctaattgctatgaagaggattttcagtactatgttaaataggagtagtgaaagtgggcatctttctcttgatccagttctcaaaaggaatagttccagctgttgcctattcagtatgatgctgtctgtggctttgtcatagatggctttcttattttgatgtatgtttcttcaatgtctagtttactgaggatttttatcatgaaggaatgttggatttcattgaaagcattttctctctattaaaatgatcataaggtttttaattctgttatgtagtgaatgatattgaatgatatgtgtatgtttaaccaacttgcatccaaggaataaagcctacttcattatagtgaattaatttttgaygtgctactggaattggtgtgcttgtactttgttgagaatttttgcttttgtgttcattagggattttggcctgaaatgttctttttttttcattgcatctctacctgattttggtattaggatgactctggattcatggaatgagttaggaaggattcttccctactc

SEQ ID NO: 224722 - DNA, 571 bp, Homo sapiens
cttgtactttgttgagaatttttgcttttgtgttcattagggattttggcctgaaatgttctttttttttcattgcatctctacctgattttggtattaggatgactctggattcatggaatgagttaggaaggattcttccctactcaatttwttggaatagtttcagtaggattggtaccacttcttctatatctaatagaatttagctgtcaatccatctggtccagaaatttttattggtaagtttttattactgatttaatttcagaactcattattggtctgttcagggtttcaattttttcctagttcaatctggagaggtgaatctagcaatttattcattccctctagatttcctagtttgtgagcatagatgtatttataatagtctccaaggatcttttatatttctgtgaaattggttgtaatgtcaccttgtaatttctgactatgtttatttggatctcccctcttttttttttctttgttaatctagcagtctatccattctgtttattctttcaaaaatttatttttggttttgttaatcttttctatggaattt

SEQ ID NO: 224723 - DNA, 571 bp, Homo sapiens
cttgtactttgttgagaatttttgcttttgtgttcattagggattttggcctgaaatgttctttttttttcattgcatctctacctgattttggtattaggatgactctggattcatggaatgagttaggaaggattcttccctactcaattttttggaatagtttcagtaggattggtaccacttcttctatatctaatagaatttagctgtcaatccatctggtccagaaatttttattggtaagtttttattactgatttaatttcagaactcattattggtctgttcagggtttcaattttttcctagttcaatctggrgaggtgaatctagcaatttattcattccctctagatttcctagtttgtgagcatagatgtatttataatagtctccaaggatcttttatatttctgtgaaattggttgtaatgtcaccttgtaatttctgactatgtttatttggatctcccctcttttttttttctttgttaatctagcagtctatccattctgtttattctttcaaaaatttatttttggttttgttaatcttttctatggaattt

SEQ ID NO: 224724 - DNA, 545 bp, Homo sapiens
aaacaattaacacaacattttataccaggtgattttttttttactataaaatagcctaaaagaaaataaattgtcaatgcagcatacacttatagctccttgccagcccaagttgtttgttgacagtgatcaaagactgaattacagttttactactcattaaatatgatgcattgtcagatgaaagctatcattcagaaaagtattgtagaatcacctcttaataaccacaaagcatagcttttaaaaatatggtaagaaatgatagcctattgtaaaataatcaatatggccacaggtgaaatattttagctggaactttctcctggctgttaaaaaaaatcaaacagtataataaagattgcctattaaaaagtcgatttatcctgttttctctaaaaattggcctctattaatgtttttacttctttacccccatgccttccaatacttctcactataacccccattgcccccattatgatcctaccctttgytctgattccctggagtcttggcctcccatgacttatctgattaaaaaa

SEQ ID NO: 224725 - DNA, 566 bp, Homo sapiens
gaattcattttcacttcaagaaagaggaacwctgcagccagataagaaactccatctgtcttcaagaaaaagggtcgtggatttgggtgtcacgaatcctgtaatatcttaaattaaggtgccacttctgaatgctttcttcatatttatcaaatgattattctacagaggtgaatttaatattgttaaaataatgatcatgcatgtttaatacatcaatttaagttattatctcccatgctataaaatgcaggataatttcataaataattataaagcatttacaaatggcgacttaatgcaaagcgttcttgctaatcctttatctttcacaaacacagaaataacgattagattcatggaatgaaaaagggaggttatgttctacaatgtgtcacctcctcactgaatgcaaataagaaggccaaaaaaaaaaaaaaaagaaagaaagaaagacagacctggattgaaacagtgcttctttcctctttcttgatagatggaagatgcctgtccacagtgtcattattccaggctcagggaccctttctctgcagagactgggg

SEQ ID NO: 224726 - DNA, 551 bp, Homo sapiens
gaaactccatctgtcttcaagaaaaagggtcgtggatttgggtgtcacgaatcctgtaatatcttaaattaaggtgccacttctgaatgctttcttcatatttatcaaatgattattctacagaggtgaatttaatattgttaaaataatgatcatgcatgtttaatacatcaatttaagttattatctcccatgctataaaatgcaggataatttcataaataattataaagcatttacaaatggcgacttaatgcaaagcgttcttgctaatcctttatctttcacaaacacagaaataacrattagattcatggaatgaaaaagggaggttatgttctacaatgtgtcacctcctcactgaatgcaaataagaaggccaaaaaaaaaaaaaaaagaaagaaagaaagacagacctggattgaaacagtgcttctttcctctttcttgatagatggaagatgcctgtccacagtgtcattattccaggctcagggaccctttctctgcagagactggggatggggcattgactcagataagaagaattc

SEQ ID NO: 224727 - DNA, 562 bp, Homo sapiens
tgcagccagataagaaactccatctgtcttcaagaaaaagggtcgtggatttgggtgtcacgaatcctgtaatatcttaaattaaggtgccacttctgaatgctttcttcatatttatcaaatgattattctacagaggtgaatttaatattgttaaaataatgatcatgcatgtttaatacatcaatttaagttattatctcccatgctataaaatgcaggataatttcataaataattataaagcatttacaaatggcgacttaatgcaaagcgttcttgctaatcctttatctttcacaaacacagaaataacgattagattcatggaatgaaaaagggaggttatgttytacaatgtgtcacctcctcactgaatgcaaataagaaggccaaaaaaaaaaaaaaaagaaagaaagaaagacagacctggattgaaacagtgcttctttcctctttcttgatagatggaagatgcctgtccacagtgtcattattccaggctcagggaccctttctctgcagagactggggatggggcattgactcagataagaagaat

SEQ ID NO: 224728 - DNA, 551 bp, Homo sapiens
gaaactccatctgtcttcaagaaaaagggtcgtggatttgggtgtcacgaatcctgtaatatcttaaattaaggtgccacttctgaatgctttcttcatatttatcaaatgattattctacagaggtgaatttaatattgttaaaataatgatcatgcatgtttaatacatcaatttaagttattatctcccatgctataaaatgcaggataatttcataaataattataaagcatttacaaatggcgacttaatgcaaagcgttcttgctaatcctttatctttcacaaacacagaaataacgattagattcatggaatgaaaaagggaggttatgttctacaatgtgtcacctcctcactgaatgcaaataagaaggccaaaaaaaaraaaaaaagaaagaaagaaagacagacctggattgaaacagtgcttctttcctctttcttgatagatggaagatgcctgtccacagtgtcattattccaggctcagggaccctttctctgcagagactggggatggggcattgactcagataagaagaattc

SEQ ID NO: 224729 - DNA, 570 bp, Homo sapiens
ttactgagttttactgagtgcaagtcacttcccacatgctagccctgagtgacaggggacagcagggagtattcttccctttgggagactgtgatgatgatgatgatgatgctcataatagcaacgctaataccaacacttactgcgtgctcactggatcccaggcactgctcgcagcctttccgtgttttaacttctttaattctcaccacaaactacatgcaattattatccccactgacckgtaaggctcagagaggttaagtcctggagcgggtaagcagcagagtcaaggtcagacccagccaggcatcttgaccatggacttgcaccacctgttggttaagacagagaaaaaccaaggacaggagcggtttagtgactagacctgcaatcaagttgaactgtggtcatttgagtcaccttgtgaatctttcattaggtgacaagaaactataaatgataatgtaatctgttctccctgggagtgtgaactcctgcccctgccaagctttccaggtatcatttctgggctgtcagttgtaaggagaattcctgaaagacggaggt

SEQ ID NO: 224730 - DNA, 547 bp, Homo sapiens
ttgtacaatatttctagaacacaagatggcagtaagtctcaagggcctttaaaatattcattctctttgtggtaataatttcacttccattctgagcaggtaaaaacaaggacaaacatatatgtacatgtcttttatttaaaataataagtagaaacaaattaaatacctgccaatatgggagagttaaataaattatagtatgtccacaagatgaaatattatattctgatttaaaattatgtccacagagaatttttaatgatttggaaaactgttcacagcatgttacagtgtggtctaaataggggagtaggattatgtgagaattttacttgttactttattctgtttcccaatcaccctcccaaatatctacaagtgtaatgacaattgtaataaaaaaaatactgtactccaaaactcctcatcagccacaattacwttcatagaatagcagaaggtcctctcccattcccttatctcagggaaactccactccacctcccaggtcctaaactaaaatagtgacgtcttttcctcctct

SEQ ID NO: 224731 - DNA, 547 bp, Homo sapiens
ttgtacaatatttctagaacacaagatggcagtaagtctcaagggcctttaaaatattcattctctttgtggtaataatttcacttccattctgagcaggtaaaaacaaggacaaacatatatgtacatgtcttttatttaaaataataagtagaaacaaattaaatacctgccaatatgggagagttaaataaattatagtatgtccacaagatgaaatattatattctgatttaaaattatgtccacagagaatttttaatgatttggaaaactgttcacagcatgttacagtgtggtctaaataggggagtaggattatgtgagaattttacttgttactttattctgtttcccaatcaccctcccaaatatctacaagtgtaatgacaattgtaataaaaaaaatactgtactccaaaactcctcatcagccacaattacattcatagaatagcagaaggtcctctcccattcccttatctcagggaaactccactccacctcccaggtcctaaactaaawtagtgacgtcttttcctcctct

SEQ ID NO: 224732 - DNA, 411 bp, Homo sapiens
ccttctgtcttggaggatttgcccgttctggacatttcatggagatgaatcacacaacatgtgggctcgggtctggcttcttttctgaggctctgccgtgtggtcgtctgtgtgagagctctgctcccttgcatggctgaggaacatcccattgtccggatagaccaccgcgtgtggaccctcctctgctgaggggtatctgggctgcttccacctttggcttctgtgaattgtgctctaggaacctcggtgaacacacacttgttggagtccctgtcttcagtkcttccaggcacacacctggctgtggagctgcacgtgctctctcgatggctacccccctccccggtggcccctctccccccagcattctctccatccttgggtccttgtgtcaggggttgcttctgg

SEQ ID NO: 224733 - DNA, 551 bp, Homo sapiens
tgctgccagccagctctgccttcccatcatctcctttcaggaccgtcccacaccttttacttgctcagtgctgtctgaagatgcagttgctgtttgcaaacaacaggaacaccagttaaactaattaggaaaagagggagatttccaggcctgggtaactatatactgtgaccattggaggtagagacaggtctcaacagttggaaccaggaactctgctgtcaggttgwgagttttgtttctcttccagcttttcactgtgtgggggtcttttctcttatgtcagctctttctatcacatggcagctgacctctcacgctccactctgcagcttggacacccagtagaccctgaatttcactctctctaaaaggttctgagggctcatcctgggccaggggccctcctgtgcactgttagctatggccacgggagcctccagagctgcctggtagcttcaggttgacctgcttatcaggcctacgatccttctgatttaagtacagctggaaagtattatctaattaagttcatgatagtgcttttggag

SEQ ID NO: 224734 - DNA, 551 bp, Homo sapiens
tgctgccagccagctctgccttcccatcatctcctttcaggaccgtcccacaccttttacttgctcagtgctgtctgaagatgcagttgctgtttgcaaacaacaggaacaccagttaaactaattaggaaaagagggagatttccaggcctgggtaactatatactgtgaccattggaggtagagacaggtctcaacagttggaaccaggaactctgctgtcaggttgagagttttgtttctcttccagcttttcactgtgtgggggtcttttctcttatgtcagctctttctatcacatggcagctgacctctcacgctccactctgcagcttggacacccagtagaccctgaatttcactctctctaaaaggttctgagggctcatcctgggccaggggccctcctgtgcactgttrgctatggccacgggagcctccagagctgcctggtagcttcaggttgacctgcttatcaggcctacgatccttctgatttaagtacagctggaaagtattatctaattaagttcatgatagtgcttttggag

SEQ ID NO: 224735 - DNA, 590 bp, Homo sapiens
tgctgccagccagctctgccttcccatcatctcctttcaggaccgtcccacaccttttacttgctcagtgctgtctgaagatgcagttgctgtttgcaaacaacaggaacaccagttaaactaattaggaaaagagggagatttccaggcctgggtaactatatactgtgaccattggaggtagagacaggtctcaacagttggaaccaggaactctgctgtcaggttgagagttttgtttctcttccagcttttcactgtgtgggggtcttttctcttatgtcagctctttctatcacatggcagctgacctctcacgctccactctgcagcttggacacccagtagaccctgaatttcactctctctaaaaggttctgagggctcatcctgggccaggggccctcctgtgcactgttagctatggccacgggagcctccagagctgcctggtagcttcaggttgacctgcttatcaggcctacgakccttctgatttaagtacagctggaaagtattatctaattaagttcatgatagtgcttttggagaacttgtcaaattacagccaatgagaaaataaggaccta

SEQ ID NO: 224736 - DNA, 403 bp, Homo sapiens
tatgtaatagcatagaggtacactgtaaatggtagttgattattaatgttctaatccaaattagtagctaatctgaacctctggattcggtaattggtagtacttacctcccactgtctcacagaatgcaacatttcatgggggaaacctgaccaaaactagcaatattgacaactgtagtgtgatgtgtccccyaccaggttacttaagagtgtacatgtgttgcttggatcctgaatgctgggcagggagtcaaggccctggtgcccagctgaggagcagggatccctgagaacccaaacatcccagggcatacctgagaacatgtcaaagaaaacactgtcatcgtgcacacagagtaggcaaacagtcagaacattagctgaaaggcagcttagagacg

SEQ ID NO: 224737 - DNA, 403 bp, Homo sapiens
tatgtaatagcatagaggtacactgtaaatggtagttgattattaatgttctaatccaaattagtagctaatctgaacctctggattcggtaattggtagtacttacctcccactgtctcacagaatgcaacatttcatgggggaaacctgaccaaaactagcaatattgacaactgtagtgtgatgtgtcccccaccaggttacttaagagtgtayatgtgttgcttggatcctgaatgctgggcagggagtcaaggccctggtgcccagctgaggagcagggatccctgagaacccaaacatcccagggcatacctgagaacatgtcaaagaaaacactgtcatcgtgcacacagagtaggcaaacagtcagaacattagctgaaaggcagcttagagacg

SEQ ID NO: 224738 - DNA, 403 bp, Homo sapiens
tatgtaatagcatagaggtacactgtaaatggtagttgattattaatgttctaatccaaattagtagctaatctgaacctctggattcggtaattggtagtacttacctcccactgtctcacagaatgcaacatttcatgggggaaacctgaccaaaactagcaatattgacaactgtagtgtgatgtgtcccccaccaggttacttaagagtgtacrtgtgttgcttggatcctgaatgctgggcagggagtcaaggccctggtgcccagctgaggagcagggatccctgagaacccaaacatcccagggcatacctgagaacatgtcaaagaaaacactgtcatcgtgcacacagagtaggcaaacagtcagaacattagctgaaaggcagcttagagacg

SEQ ID NO: 224739 - DNA, 492 bp, Homo sapiens
ctaaggtttctaccactggtaaagcatttcccacatccttgacattcataagggttctcacgaatatgaaatctataatgtccatgaaattggtaatgatattgaaaggccttcccacattccttacattcaaaggttttcacccaagtatgaattttctgatgttcagtaagttgctactgatgtctgaaggctgtcccacatttcttacattcaaagggtttctcacctgtacaagtttttgatgcagagaaagttgtaggtgaagtytaaaagccttcccacactccttacattcatagggtttctcaccagtatgaatactctgaggttgaacaaggtttgagccacgattaaaggccttcccacactccttacatttaaatggcttctcaccagtatgaatgatctgatgttgagcaagctgtgtcagaagaccaaaggcctttccgcattctttacattcaaagggtttctcaccagtatgaattc

SEQ ID NO: 224740 - DNA, 566 bp, Homo sapiens
gaaactatccaaaatggagcaaaaggtgactatcatcataaagacaaaagatgacaagcattgctgagggtgtagagaagaaggacccttgtacrttgttagtgggaatgtaaattagccattatggaaaacagtactgaagttcttcaaaaaattaaaaatagagctaccttagatctagcaatcccacttgggagtatatatccaaagaaaaagaaatcagtatctcaaagagatatctgcactttcacattcattgcaacattatttacaatagccaagatatggaaacaatctaagtgtccctcaacagataaatggataaagaaattatgagacatatatacatatatataataaaatatagttcatcttttagaaaaataaggaaatcctgccatttgtgacaacatggatgatcctagaggacattctactaagggaaataagccagatgccaaaagacaaacactgaatgatctcactcttatgtggaatctaaaaaagtcaaattcatagatgcagaaagtagaatgatggttacaaggaacaggagtaggcagagg

SEQ ID NO: 224741 - DNA, 566 bp, Homo sapiens
gaaactatccaaaatggagcaaaaggtgactatcatcataaagacaaaagatgacaagcattgctgagggtgtagagaagaaggacccttgtacgttgttagtgggaatgtaaattagccattatggaaaacagtactgaagttcttcaaaaaattaaaaatagagctaccttagatctagcaatcccacttsggagtatatatccaaagaaaaagaaatcagtatctcaaagagatatctgcactttcacattcattgcaacattatttacaatagccaagatatggaaacaatctaagtgtccctcaacagataaatggataaagaaattatgagacatatatacatatatataataaaatatagttcatcttttagaaaaataaggaaatcctgccatttgtgacaacatggatgatcctagaggacattctactaagggaaataagccagatgccaaaagacaaacactgaatgatctcactcttatgtggaatctaaaaaagtcaaattcatagatgcagaaagtagaatgatggttacaaggaacaggagtaggcagagg

SEQ ID NO: 224742 - DNA, 337 bp, Homo sapiens
gtgtagaaaacttctacactagcctagcccagtggctcatgcctgtaaccctagaactttgagaggctgaggagggaggcttgcttgagggcaggaattcaagaccagcttgggtaacatagtgagacccatgtctctacaaaaaatatttagctgggcatgatggtgtgcccctgtagtcccagctactcaggaggctaaattgggaggatcacttgggcccaggaggtcaggctgcagtgaaccatcatcacgcctctgtactccagcctaggtgacagagtgygaccctgtctcaaaaaaaagactttgggagcctgaagtgggaggatcactt

SEQ ID NO: 224743 - DNA, 474 bp, Homo sapiens
tataatcagaagagaataaatcaatactatgagaactcttcacaaaagggaacatgtayagagtggaactttgccttctattcttgaacacttctgcagaggctcagaaaagttgttgctctgattcacaggtcacaataaggagatttctatttacaaggtggaagactttttcatcagccttagaaagagcacttggagaatcattaccatttccaaagtagggaagaaactttaatacccttctttcaagcatactgtgtaattccaacaacataggatgcccaattcacaagattctgaaagaatgagccttcacgctacagcactttagcaaccagtaccaataggaaaacggaaaacccatttgaagctgctgactcactactgcataaggagtgttatccatccatacatatatacggcatcatccaatttctttttcaggcttacgaaacagatggagttaactaa

SEQ ID NO: 224744 - DNA, 581 bp, Homo sapiens
taattgtagtcattggttgtctttggtttctcataacattcaaacttctcatgtttttttccccttcactgaatctgagcttttgctcatatttcccttgatgaaataattgccggtttagtatacagttgggagtgcatcggtctttatttcctatccagcttttctatggcaggatgtaacttcataaaaagaaacacttyggcttcctgattttctttataggtaattcctgtttactgaaagttctgctttaaggcatactcagaatcgctctccttaatgattttggcaagaaccctaccttccccctcagcaaatctaatgttctaagaaattataagtgaatcagcttctgcttctgtgctcaaaatctataatattgcctttccggcccactacttgtttttactgtagtttaaaaaaatctgtcccttttgctgacttttttctttttgtacacactactttttaagaaaagttgctaacatttattaaatgatctgcatcctatggaggaggaaactgaggaaaagaaaagttaagtaactaactcaaggtgacagtatacagaggttact

SEQ ID NO: 224745 - DNA, 583 bp, Homo sapiens
ggttacatggaggaacaaaaaaataaatgggctcctttgcttcatctaagaacagaagctataacagaactaggtcttaaaagcacctgccttcagggatgctcagtggaccccatacgtagggattagcggaccttcactcccaaagctccaagaactgccaaaacccatgttaggtcgtgtcattcctctgttcagaatgctctggtggccccscatctcacccagagtaaaaggcaaaatcccccccatgactcacaggccctgtgtgatcctcctccccctgccctgccccatctactgcctcctcctcagccaccctgccttggccatgctgctcaccttgtagtcctttcacactccaggaatactcttgtctccagggttttgcacatgctgttccctgtgcctggaatgcttgtcccagatatctgcttatcacttcatgtaggtcttttttcacaggtcagctcagtgaggccttcccactcagtgagatctaaaattgtaagcccacactaccgtaacatctcttatccaacttacctgcattcttgtttaaattttttattataagaaatgg

SEQ ID NO: 224746 - DNA, 418 bp, Homo sapiens
ttttgacagtttaatgtagccccagaatttaacctgtatcatagaagggaggggaaagggagcccccagaaagaatctgaaaatgtctagaatgagcttttcctcaggttcaarcaatacattctaacctattatgaacctgcttggtggttttaagttttgcagcggtaacttaccctctctccttcttttcaagtcttgcctcttattcccacccacccctccccagccatctgtccttttgttcatccttagagtccagaggcgccatctggttctctcctggatggcctgggggtgtcagatgccaggaaaagacagaagggtcctgaactgcagtgtctcctcagggggcagaatccacaaaatcatcagcctttcaccacctgggtgaacaatgctgtatgtttttccctta

SEQ ID NO: 224747 - DNA, 589 bp, Homo sapiens
tggacatcctgagactgcaggcagcccccacaggaagtgagaggcagccacacacacctcggcttgcattctgggttgcgaaagaaaccatgtggggactgtggagacctcactcaccctccagcctgcccctacctgggagaagatcccggggcagggcccctgccactgagctgctctcctccatccgccatgaggacacccgggcctttctttggtcactcygtttccctggatattagcttcccaaaggagagccctccttaaattcaagctctgttgtttttgcatagacttttcggtgtcaactctattcctaacttcaccatctgacaaaaaattgtgtgggtcctttaagaaggtcccccatccctaattagagttctctggtaagaagataacatatgctttttaaataacttttgatcatgaatgccacagagattttcctactgaaaacacagaggaatcacaagggtcaaataagataatcagttcaaaatgtacatggacagaggaaaatcacctaggtcaattcctcgagagtctgcagccagaagactgaggctctaccagcaagggcagtggt

SEQ ID NO: 224748 - DNA, 605 bp, Homo sapiens
taggatcacttccagaataaccccctatggttgtgtgcactgtggctcaagggacttctcattggtaggtttaaaactcacttagctcgcccctagaagagcaggattgtttttgtaagcctgcataaaaaacaaaaagccagaccagaaaaatgcaaggagtctaggcaaggtggctcacgcctgtaatcccagtactttgggaggctgaggcgggcagatcgcttgagctcagaartttgagaccagcctgggcaacatggcaaaaccccgtctctaacgctacccaaaatacaaaaattagccgggtgtggtggcatgcgcctgtagttccagctatctgggaggctgaggtgggaggatcacttgagccagggaggtggaggttgcagtgagctgagatcgccccactgcagtccagccagggcgacagatccagaacctgtctcaaatacatcatacatacatacatacatacatacatacatacatacatacatacagggagtccacagactttttctttcttttcagttgctctctcccttttggcctgcttgctaaaaactctacatacgtgttcaagtaaaaccttctaatttacc

SEQ ID NO: 224749 - DNA, 599 bp, Homo sapiens
gccctgagtgtcctgtgtgttaaaggcttgtgcttctcagaacttgaaatacctttcagaaagaggctatgcttttgggagtgcaatcggtgatttaagtaaaccaatgtgccttgaaattctcttagatctcttaggaccttttgtcttttctccttcagaacagagttgttctaaaatcctgagtaacaacgtcagtttttacccttgctttactttctttttctcatctacagatctccaagtgtggcagctgatttgtatataagagctgaaatgcaattttggttaatatagtcacttggacttgcttatgataaatttgactttcctggcttctttctactactcacagcttctagaaggccatttatttakatattaatcttctgggaccctcaagatgtttgctttgcactattaaagaattctggtcctaagggaggacagctgaatcataggttaaatgtatcatcatctttctcatactcatcactgggagaacaaggtttcctgtcatccttccaattagctgtttaactcatttgcataagaatcattcctgaaacttgacctattgccatcaaatttgtgtagat

SEQ ID NO: 224750 - DNA, 599 bp, Homo sapiens
gccctgagtgtcctgtgtgttaaaggcttgtgcttctcagaacttgaaatacctttcagaaagaggctatgcttttgggagtgcaatcggtgatttaagtaaaccaatgtgccttgaaattctcttagatctcttaggaccttttgtcttttctccttcagaacagagttgttctaaaatcctgagtaacaacgtcagtttttacccttgctttactttctttttctcatctacagatctccaagtgtggcagctgatttgtatataagagctgaaatgcaattttggttaatatagtcacttggacttgcttatgataaatttgactttcctggcttctttctactactcacagcttctagaaggccatttatttatatattaatcttctgggaccctcaagatgtttgctttgcactattaaagaattctggtcctaagrgaggacagctgaatcataggttaaatgtatcatcatctttctcatactcatcactgggagaacaaggtttcctgtcatccttccaattagctgtttaactcatttgcataagaatcattcctgaaacttgacctattgccatcaaatttgtgtagat

SEQ ID NO: 224751 - DNA, 387 bp, Homo sapiens
gtccttggaaacaggggctgagtgtcccccactgtcgagacattacagttaccttgtgaaaacaaggtcaaataaaactggcccagcccctgaagagatggcaatctagtgtggacgacagacatgtaaacagatcatttcaatgtgatgtggtaaatgacatgaacaccaagacccagctgcgtgaggaagcatcgcacgctgccaatttttttatcccgtacrctcagaaagacttaaaagcacgtgacttgagcatcaaggtgtttctatttactgttttgccaacacagatcacgaacttctcagtgtaagatttggaggctattctccctgtcacctactgactgtgtcctgatgatcttataagaatcccacatttcttct

SEQ ID NO: 224752 - DNA, 597 bp, Homo sapiens
aattgtttaagaataagcatggaagtgacatatatcacattaagggggccttgaaattttaatattcctatgttcccacaaaaatgaaaaggtttcctgattatcgatctggttctcctacaataattgtttgtatgtgtgtgtgaaaagtgtcaataatttttttcttttttccatatatagaactcaccagccaccttcttaaggaaacataaacaaacaaaaacaaaaagtttcaaatcctactgaaagcaatgcattcatttcaggggccaggctttccagttgatgtggtttcttgtctttcaagtatagtcatggttctttgtggaacagaaatctgtaaaataaaagtaaattgtccccattccctctgccccacccccatacttccaaaatagtgattaaataggtaccaggtaatgacaatratttttccccttctggggaagggcgaataataaatcctcaaggttgcctatgtccagttgggtacagtggctcatgcctgcaatctcagcattttggggggccaagtggggggcagatcatctgaggtcaggagttcaagaccagcatggccaacatagtgaaact

SEQ ID NO: 224753 - DNA, 597 bp, Homo sapiens
aattgtttaagaataagcatggaagtgacatatatcacattaagggggccttgaaattttaatattcctatgttcccacaaaaatgaaaaggtttcctgattatcgatctggttctcctacaataattgtttgtatgtgtgtgtgaaaagtgtcaataatttttttcttttttccatatatagaactcaccagccaccttcttaaggaaacataaacaaacaaaaacaaaaagtttcaaatcctactgaaagcaatgcattcatttcaggggccaggctttccagttgatgtggtttcttgtctttcaagtatagtcatggttctttgtggaacagaaatctgtaaaataaaagtaaattgtccccattccctctgccccacccccatacttccaaaatagtgattaaataggtaccaggtaatgacaataatttttccccttctggggaagggcgaataataaatcctcaaggttgcctatgtccagttgggtacagtggctcatgcctgcaatctcagcattttggggggccaagkggggggcagatcatctgaggtcaggagttcaagaccagcatggccaacatagtgaaact

SEQ ID NO: 224754 - DNA, 418 bp, Homo sapiens
tggtaaatggatgtccaaatgtcccagcactctttgttgaaaagactatcatttctctattgaattgccctttctcctctgtcaaaattttgtagactgtatttttgtaggtctatctccaggctctttttctgttccatttatcaactagttaggaaacacgctcactatttccagtttctggatgagattgtaaagatttgacaccatttcttcctggaatggttgatagaattaaccagtaaaaccatttgagcctggtgcttacttctgtgtaagaccatcatcactgattcaatttcttaaatagatacagtgataatcaggttacatattgctaattttgtgagtttgggtagtttatatgtttcaaggatctratccatttcatctaaggcattaatttttggccatagaa

SEQ ID NO: 224755 - DNA, 627 bp, Homo sapiens
aatattaaatgtatgtgtgtacatgtagtttacttcttttaatagttaaattacttttaaaaccaaattacatgaatctttttaggttcatgtatcattctcttttcagaatcatttctgtttttctttttaaaatagcagctaccaagagatgccactatatttcatgatttcatgattttaattgttttggaaagaagtaatatatatatatatcttgcccaatgaaaataaactgttgcccctttactgtagaaagggtttattccctattctttcctccacctttcaaattctttgtgaagaacaygtgtgctgatcgtcaagcactctataagattcaaatgttcagcaatattttttctctaaatctacattttacaccaactattcaatttcttttattttctcccttcatgagataagaaatgaatagtgagtgacatgccttgaatctgactataaattttagcgaaaacaagatgttatgttttgagggattgtgctgcaagacctggcttgaagtagtgtaaactgctccagaccctcatttagaagagctttcacaggcttttctaataatgtgtatatactggtttcttgttttctggtgagtaaaggaaaaaa

SEQ ID NO: 224756 - DNA, 627 bp, Homo sapiens
aatattaaatgtatgtgtgtacatgtagtttacttcttttaatagttaaattacttttaaaaccaaattacatgaatctttttaggttcatgtatcattctcttttcagaatcatttctgtttttctttttaaaatagcagctaccaagagatgccactatatttcatgatttcatgattttaattgttttggaaagaagtaatatatatatatatcttgcccaatgaaaataaactgttgcccctttactgtagaaagggtttattccctattctttcctccacctttcaaattctttgtgaagaacacgtgtgctgatcgtcaagcactctataagattcaaatgttcmgcaatattttttctctaaatctacattttacaccaactattcaatttcttttattttctcccttcatgagataagaaatgaatagtgagtgacatgccttgaatctgactataaattttagcgaaaacaagatgttatgttttgagggattgtgctgcaagacctggcttgaagtagtgtaaactgctccagaccctcatttagaagagctttcacaggcttttctaataatgtgtatatactggtttcttgttttctggtgagtaaaggaaaaaa

SEQ ID NO: 224757 - DNA, 627 bp, Homo sapiens
aatattaaatgtatgtgtgtacatgtagtttacttcttttaatagttaaattacttttaaaaccaaattacatgaatctttttaggttcatgtatcattctcttttcagaatcatttctgtttttctttttaaaatagcagctaccaagagatgccactatatttcatgatttcatgattttaattgttttggaaagaagtaatatatatatatatcttgcccaatgaaaataaactgttgcccctttactgtagaaagggtttattccctattctttcctccacctttcaaattctttgtgaagaacacgtgtgctgatcgtcaagcactctataagattcaaatgttcagcaatattttttctctaaatctacattttacaccaactattcaatttmttttattttctcccttcatgagataagaaatgaatagtgagtgacatgccttgaatctgactataaattttagcgaaaacaagatgttatgttttgagggattgtgctgcaagacctggcttgaagtagtgtaaactgctccagaccctcatttagaagagctttcacaggcttttctaataatgtgtatatactggtttcttgttttctggtgagtaaaggaaaaaa

SEQ ID NO: 224758 - DNA, 339 bp, Homo sapiens
tgaaatacacatgttcaaggrctgtgtgatctgtctgaaattatttggtatgacgctcttggctacccatattttccccacttccacagaatattgtcatccaaggaagagccttatttgcttcctttgtctgtggcctgataattgctttctacttagatctggtaggttctctttcctgctgataaccttgtatctgttctcactgttctgggttttggagggagtttccaaaataactcagctttctatctatggtcctactctctccaatattcatggcttatgacatgttcccacaatcacattgccttttattctaaatttccagcataggcc

SEQ ID NO: 224759 - DNA, 577 bp, Homo sapiens
agctgtacacacacataaaaaatgtgtcctattccttgtataatgtgaaactaatgatggaacattgctgttcaggactttttgaatccaggtgcggttaggtgaccacttgtcaccaattgaatggagcaggaataatgagtaagtctctgggctagagcatttaaaaagcaagtttattgtgctctctccttctgcaagttgaaaatagatattctgagatcctgcagatggtaaaaccataatacgaagctgatctagattgtatcaccaaatggcataaagctacttycaaatttgaacagctgtattagacttttggctgagcaagaaataacattctattggattaagccattgggatttggtggtccatttgtttaaaaggcaacataaatacaacagagacaaagatgacttcctagagataaaatatacagcttcattttttgttgagttactgtgaatctgaattgagagaggtgaatgaatgctagtctaattgtactgaaagcttttgtatgtaccagcacctgtacttgtataagtcatttgggatttttttcttaatatagat

SEQ ID NO: 224760 - DNA, 463 bp, Homo sapiens
tggactttacccctattcaaggtatcaatgcctatgacagagaagcagaagccgcagcctagggtaagtgcatgaggggtctgcagtgaagatgggtgctctaggaagacctgacctcagagctggggttggataggtacccaggactagactgagaatggtgaggaacaggaatttctgtccatagacacccctagcctttattcatctcctttcagtacttccctctgaaaatgtgatgatcctcacactcaaaaaatgrctgacagcctggttttcttctgagttaagaatgaagaaagatttctctaaagaaaatgagtgccctgattttggacaataaaggttccaaggtcaggtattgacccaggtaggcacagaagtgcttaccttcagacagtcctgccttcacagcctaatgcctgtgctcatgctccctaaagttgaaggtttcagcccataa

SEQ ID NO: 224761 - DNA, 605 bp, Homo sapiens
cattttcaaaacttatcaaactctatacttaaaatgggtgtattgtatccaatttatatttcaataaagttgmtatctagaaacaacaccatgaataaaaataagagagagatgataaagatacttgtaatttcgaaaactgacaacatagcaatatctagaatgtactcaaaaatcctgctacaattgtgatagcaaaagagacagaaatattaagaaaatgggcaaaagtcatcacagaaggggaaacacaaaagactaagaaaaatattgttgagaatatgctcaaaatcattattaactagaaaatgaaaattaaaatacaataataaatttctttatatccaccagattgccaagttttgggcaagattttaacagaaattaaggtacatttctaataatacatctaaaccaaactgtctgataactgaaataccccattacctaacagtcatagatttctgcttctggttataaataatctagagaaatttttagacagatccataaggacattttaaaatatgttcattgcagtatagtttaatatagaagtgagttggaggctatctacatgtcactgtaggaaagaataatcaaaa

SEQ ID NO: 224762 - DNA, 492 bp, Homo sapiens
tgatcatcatttcaatatgctatattatagacaaatttgtgctagtcaacacaatcatatacccaatgtatatactttgtgcttaaattatttggccactcatgagcattattctttaacattactctgctttatagaaagatcctgcatggagcgacgagattctacaactatgagtccacaccctcctattctgttaatgtcattttttggaaacgaatttttgattgatatcctcattttgaggtttgtacttctgtatgcagtctttaaatactggtaataccaaaagtttcttcctagaatgtcttctcaatytgtattcttccactggtaatttctcccatgctctctgtgctatttatcaagttgctttatacttaatctataagataacacgtccaatcaccttcttgacatttctgttaccagaaaaagatcccgatccagaccccaagagagggttcttggatctcctgcaagagagaattc

SEQ ID NO: 224763 - DNA, 594 bp, Homo sapiens
tctgttcatcacatatgccatgtctcctcctactacatggtgtttcttttgcctggagaatgcttcttaaatttttcattcaataagttctcactcacctcaatcatatcaactcaattgttttgttctcaggaaagccttttttgacccagattactaaatcttccttagcagtatgtctcttttcttcatggtttcttatcacctttgacatgttatatttttctgtgtgatcatttaatttatacctaaattccatgaaggcttgtatctaccttttytcttcattatgtgaaagggccaatcatagtgcttgagctatggtgggtattcaataatagaggttgaatggacacatgttattttgcaatttttaatttacatatttttcttcctcccttaaggtcatagatgatgaaagtattaatctttgaattctgactaccttaacaggtactcaaatctacaaagaaaatattgaactcctcctgaagatacagctattttaaacatttaaaaaaatgaattgtttattctagttacaatgatatttaatagaagaacagtgaatttgaaatgactccattttccctc

SEQ ID NO: 224764 - DNA, 594 bp, Homo sapiens
tctgttcatcacatatgccatgtctcctcctactacatggtgtttcttttgcctggagaatgcttcttaaatttttcattcaataagttctcactcacctcaatcatatcaactcaattgttttgttctcaggaaagccttttttgacccagattactaaatcttccttagcagtatgtctcttttcttcatggtttcttatcacctttgacatgttatatttttctgtgtgatcatttaatttatacctaaattccatgaaggcttgtatctaccttttctcttcattatgtgaaagggccaatcatagtgcttsagctatggtgggtattcaataatagaggttgaatggacacatgttattttgcaatttttaatttacatatttttcttcctcccttaaggtcatagatgatgaaagtattaatctttgaattctgactaccttaacaggtactcaaatctacaaagaaaatattgaactcctcctgaagatacagctattttaaacatttaaaaaaatgaattgtttattctagttacaatgatatttaatagaagaacagtgaatttgaaatgactccattttccctc

SEQ ID NO: 224765 - DNA, 594 bp, Homo sapiens
tctgttcatcacatatgccatgtctcctcctactacatggtgtttcttttgcctggagaatgcttcttaaatttttcattcaataagttctcactcacctcaatcatatcaactcaattgttttgttctcaggaaagccttttttgacccagattactaaatcttccttagcagtatgtctcttttcttcatggtttcttatcacctttgacatgttatatttttctgtgtgatcatttaatttatacctaaattccatgaaggcttgtatctaccttttctcttcattatgtgaaagggccaatcatagtgcttgagctatggtgggtattcaataatagaggttgaatggacacawgttattttgcaatttttaatttacatatttttcttcctcccttaaggtcatagatgatgaaagtattaatctttgaattctgactaccttaacaggtactcaaatctacaaagaaaatattgaactcctcctgaagatacagctattttaaacatttaaaaaaatgaattgtttattctagttacaatgatatttaatagaagaacagtgaatttgaaatgactccattttccctc

SEQ ID NO: 224766 - DNA, 594 bp, Homo sapiens
tctgttcatcacatatgccatgtctcctcctactacatggtgtttcttttgcctggagaatgcttcttaaatttttcattcaataagttctcactcacctcaatcatatcaactcaattgttttgttctcaggaaagccttttttgacccagattactaaatcttccttagcagtatgtctcttttcttcatggtttcttatcacctttgacatgttatatttttctgtgtgatcatttaatttatacctaaattccatgaaggcttgtatctaccttttctcttcattatgtgaaagggccaatcatagtgcttgagctatggtgggtattcaataatagaggttgaatggacacatgttattttgcaatttttaatttacatatttttcttcctcccttaaggtcatagatgatgaaagtattaatctttgaattctgactaccttaacaggtactcaaatctacaaagaaaatattgaactcctcctgaagatacagctattttaaacatttaaaaaaaygaattgtttattctagttacaatgatatttaatagaagaacagtgaatttgaaatgactccattttccctc

SEQ ID NO: 224767 - DNA, 551 bp, Homo sapiens
  misc_feature (1)...(551): n = A,T,C or G
ttgcaggctttaaaacaccatgctgtaacaggcaagtgataacaggctttaatccttttaaagcgtgctatgggatgggatattggcattgagcagggtaagggtgattaggttttaatgggatggtaaggggtgcatcatccatcaccaagaagggagtagaggtgtcctatacttgtggattaaggtggggagatacaaggagaggatgtgaaggaggctttgaactgggggaaaaggtggcaatgagatgtggctgtagcctaggaatagtcagggaagcagaaaatttggttaaaatgtcttggtctaataagggaactgggcaggtggggataactaaaaaagagggcataaawgaatgttgtccaaattggcaccagagttggggagttttaaggggttttgaaacttggccatcaatacccccacaccagttatgggggcaagggaaacaggcccttgaaaagaaggtaatgtggagtaggtagtccccgtattgattaaacaggggatggacttaccctccannnnnnnnnnnnnnnnnnnnn

SEQ ID NO: 224768 - DNA, 566 bp, Homo sapiens
gcctttctggttccagagcccatgttcatttttctaccctccgctgcctcaaaagagaatgatcatcagagattcactttgtacagagattcactttgtatgaaccataatccattggtaatttgcatggtggattacagrgagaatatacttgtcttcatctgtacaggctattataacaaattaccacaggttggataactaataagcaacagacatttattgctcacagttctggagtccagcaagttcaagattagagatccagcaggtttggtgtttggtggggacctgctttctgcttcacaggtagtaccttctcactgtatccccacatggtggaaggggcaaacaaactcccttggtcctcttttataaggcagtaatcccattcatgagggtggagccctcatgggccaatcatctcctgcaggccctaccacttaacactactgtattggggattaggtctcaacatatgaatttttcggggacacaaacattcaggccacagcaataccaaagaaggttcttctttccttctaatcaacctgtggcaaatagct

SEQ ID NO: 224769 - DNA, 566 bp, Homo sapiens
gcctttctggttccagagcccatgttcatttttctaccctccgctgcctcaaaagagaatgatcatcagagattcactttgtacagagattcactttgtatgaaccataatccattggtaatttgcatggtggattacagagagaatatacttgtcttcatctgtacaggctattataacaaattaccacaggttggataactaataagcaacagacatttattgctcacagttctggagtccagcaagttcaagattagagatccagcaggtttggtgtttggtggggrcctgctttctgcttcacaggtagtaccttctcactgtatccccacatggtggaaggggcaaacaaactcccttggtcctcttttataaggcagtaatcccattcatgagggtggagccctcatgggccaatcatctcctgcaggccctaccacttaacactactgtattggggattaggtctcaacatatgaatttttcggggacacaaacattcaggccacagcaataccaaagaaggttcttctttccttctaatcaacctgtggcaaatagct

SEQ ID NO: 224770 - DNA, 524 bp, Homo sapiens
ctacttgaatactttcatataaaaatcagaaaatttaggaagaattggtgactcgtctaaattttacagcaaatgtatcagaactgtggaataataaaacacagtactctggatttgcagatccatattcttgtcttactatgttgcttgaataaaaatatatttttccatataatatgtccttccatgcaaattcaaatgcatcaacaccaccacctattctcaaaagcatttgataaagtttatttttaaaacaataaaaactgttttttaaaagcaaacaaaacaataggcgataactaaatartaattaggtacagcctaattacttaaaacaattacatcagaaaactgaaaacaaatataacactataattaaacatgaagattataaacaaacttcttggaagtcaaacaaatataagcacaaagaattagatgggttttagtttctaattcaaagaatctcatcagttcaacaaaagagaaaaatatttttaattatgaacataattagtcacatg

SEQ ID NO: 224771 - DNA, 524 bp, Homo sapiens
ctacttgaatactttcatataaaaatcagaaaatttaggaagaattggtgactcgtctaaattttacagcaaatgtatcagaactgtggaataataaaacacagtactctggatttgcagatccatattcttgtcttactatgttgcttgaataaaaatatatttttccatataatatgtccttccatgcaaattcaaatgcatcaacaccaccacctattctcaaaagcatttgataaagtttatttttaaaacaataaaaactgttttttaaaagcaaacaaaacaataggcgataactaaataataattaggtacagcctaattacttaaaacaattacatcagaaaactgaaaacaaatataacactataattaaacatgaagattataaayaaacttcttggaagtcaaacaaatataagcacaaagaattagatgggttttagtttctaattcaaagaatctcatcagttcaacaaaagagaaaaatatttttaattatgaacataattagtcacatg

SEQ ID NO: 224772 - DNA, 590 bp, Homo sapiens
  misc_feature (1)...(590): n = A,T,C or G
gtttatttctatgcaaacattccatttcctgttgacaatgtcaagctacatatttaattgatctcattaaacatggtcagatatttttacattacaccttgtgaatttgaaatgagaatatattgattaagatagggctctggaataaaaatccttctaaccctgtcataaactttcataaatatgttggttgaaactacttagcatttctatatctacagttctcaggacaatttccaaattgttcatcaggaatgatggacagcatgcctggcccaggtaaggagcagatattcaactcatattscaaagaaatatgcttcttaatcctatcatgggaatgaatggaatacttaatcctaccccccanccccatattcctatcacctttctggtatctgaagagtgaatgcaaatacttggcttgcattccaccagtactcagtcaaagcctgtctgacatcactaactgattattgtactcttggctctgtggcccagatgtggtgtcaaaatccttgtcagcatagatctctaagaagcgactcttaatggttcagaattgcctcttgagatgagatttatttcat

SEQ ID NO: 224773 - DNA, 609 bp, Homo sapiens
tttaaaggaatgtcttacaacttattttctattaagggagataaatgtatacatttactaagtgttgataataaatattataccatttttccatggaattgaaaattgaaaccactgcagagaaatggtgtactttaaatgtgcttattaattcagactctgaagaggtttcacatattgcctttcacaygaagacaatggtttattttataggctttgtgccatattctattttaattcaactttgcagtgggtagaagtgttccatatttgttttcctgtgaaactagatattgtcaaaacacaaatcaaattttaaaataatttttttcttttatttattgggagtaaatttgaaacgtaggatatttcggtttaagtagcttatattctaaagttttactattgaattctcttggctgtcagtggaaaaaaaaaagctttcttcctatgtagtttgatcacttggctacagtgaatttctatttctgaaataggaaaatgttagtgaaggaggccaagattcttataatagcttaaagttatggtttttatattttaaaagttcaacattaatgcttcatgaagtcaagggtgtttatactattt

SEQ ID NO: 224774 - DNA, 615 bp, Homo sapiens
agaggacacatatgccatctgtatattgtccatgtacttcctccttgtctccttaatctgccatttccaaaattctgtctctctctttatactgattttgcattacagaaacccagagaaccacctggtatgagcagaaaatcctctttggaagagggcaacaaactaaaagtgcagaggtcagaacactcattagcatatamataaggaagaaatatttggaataatacattgataattttcgttccaccccatctttccggtgggaatttgtggccctcgaaaagagagaaacagtatttgaatgtacggcccagacatgctctctgtttgtaatccattactcatttctgcctttttctatgtggaatgtgcacgttacctctcatatctatttgtagccatccttggttcaggtcatgatagtacctgactttcacaactttgagagtaggaaattagtgccccagatattcccctccaacaataatggctaatatttcttgagtacctactatatgtagacatttagaatttgtgtgtatatgtgtggacttttaaatgtaacatgcatatagacaaatgggtgaaacaatggtacagcttgatgaatgt

SEQ ID NO: 224775 - DNA, 605 bp, Homo sapiens
tctaacctctattcaaacttctggactgtgaaattaggctggaagtctccacatttattataagattcctggtatttcctgtttccagtcaggctggcaatatcgcaagcacagcctctctcatggtttttcgttcttctacttaccatccttgctagaatcaagaagggtagagcaacatgcaaaagatgcaaagttcaaaacagatgttatggaagatttcacttatgttgcctccaaggaggtgcactgyaatggtggaagatatttagctatttcttcaattacataaaattatgtatctggttttccttctcctccttgttcaccttccaatatatttgatttcataatattgagttaatttctaaatccagagaactagaatttggaattctagagattagctacctggttcgtttcgggtaaaccgatcaccattgtatgcaaaggactcatgtatttgactggattttggcataaactgatactatctccaaaaggaatggatagtcttattgattactgagaaagacttctggcccacgctgactgaggagaagcagaaaaaagctggaaaagaggagatctgggcaaagtcacaa

SEQ ID NO: 224776 - DNA, 339 bp, Homo sapiens
catgttaatgtctaagaagcagtgccctaggtcacaaagccactgaatgtcaaagccagaaggcacattcgaatcctctgatgctgcatcttgtactttttctacccataccacatccatgatatctccttccagaagaaacttatccatttagctcttcttatcaamcctggtcaggatgtcatgcaaatctcaggataccctctgcagtctttctcttggtattatttaaatccatcaggcactaccagaataattccctggatggtttgcattctgctgccactcctgcataattaaattaaactttttaaaaatagatttagggggtacaaatgc

SEQ ID NO: 224777 - DNA, 502 bp, Homo sapiens
aggatatgtaaccttgaaatttcatggacacttcctcatatccctacagattgtcttttcagctacctgctatttcaaagtagtaattcwttaaaagattgaattataactcctgtaatatttgtgacaatggataaaaacattcccgttacataattttatatgaattaaattgaagtcctgctcaaaagaatctgaaattcttttgataggtgctgatagaattagagattttaaaagtaaacacatttttagtctgcttttacttcataaattactctaaataaagctgattcaaccttttttaattcacctaacaaaaaaaaggttgtctttgtatatttatcactcagtcttgttagaacatgttactagttagcatagttttctgaggactacttcaagataatttcataacttttagctcagttttcacatttttttcatttttcttgagcaagaagaaaagaatcaagtcaggagtcctatgcattatggggcc

SEQ ID NO: 224778 - DNA, 539 bp, Homo sapiens
tcatagtattaagtaatcaaattcatgatcttcctctataacaagtaagctagggagaaacctgcctcacagtatccaaaattgtacatggctgtaaaaaatataattttgatcttgaaatccagaagacatgggtttgggttctttcttggtctgtttaggccactgcgaggaaaatacataaactgggtagcttataaacacagaaatgtgttgctcaaacttttgaagactgggaagcccaagatcaagggcgtcagcagatttcgtgcctggtgagggcccactttctgactcatagatggtgctttcttgctgtgtcctcacacagtggaagggacaaagagggcattaatcccattcatgagggctctgccctcatgacctaaccacttccgaaaagccccacctccaaatactatcacattggtgattggtttcaacatttaattttggagggacacaaacattcagaccacatcaggttccatcactcttgtcatgcgttagctgtgygactttttaaaattgcagcaaaa

SEQ ID NO: 224779 - DNA, 562 bp, Homo sapiens
ctgtgcatgtgttagccatatcccatctctcctcaatctgtaattatcaattccgtaagtgggaatcatcctccattcaggaaacactgcaataagtaattggtattatttactatgtgcaaaagcaagttgtgccacttttcccccactccttttcagtagggcatcatctgttttgttcttaagcatggctaaagatttggaacaaatccgtgcccctccccgccaaaaaatggtgataataataagggagaaggagacagtgagaggttgagagtgtggtaatttttggaagaagaaagtgtagggaaagagaaaagctcatctcagcaaaatcatgaacacgtacgcaaagggcacatttggaagcataaatggaaatacgtaaatcaatattaatcatcttcagaaatcaaagacactgactgtcatcactgtcattaattgtctattaacrgtgctttaggatagagaagcattatgatgtaaccagcactctttatagaaagataagttttttaaagatcttttgaatggaggctctaaaggaaaaaatgcatgt

SEQ ID NO: 224780 - DNA, 549 bp, Homo sapiens
tactttttacagttctgaaggctgaatgtctggatcagggtactagcatggttgggatctgctgaaggtttcttcctggcttgcagttggccactctcttgctgtgtcttcacatagtagagaaagacagagagagagagagagasagaggagagagaagcgttctctagtgcctcctgttataagggtttgtcccatcaaaccaaggccctaccctcatgaccttgcctaatcctaattacctcctaagagctccatctccaaatacagtcacactgagggttagggcttcaacatataaatttttgaaggacatagatatttagtccataccattaaccactcctataatctcttttttgaagtgtctatttttgtattggttgtctgtcattttattattgaatttaagggttatttatatattttgataaaagttcttcatcagacatattattgcaaatattttctcttaagagaattatgaggcattttcttaataacatattttgaaaagcagaggttttagttttgatcacatacagtaat

SEQ ID NO: 224781 - DNA, 559 bp, Homo sapiens
gggggttgtttttaatttaacatgtatgattaaaattttaaagtcacttttcaggcgtgttatcaagatgtatccattagaacattaaacattaatatatttatgtagtgctgcctacctgtcaagcactcttctaagcattttgtaaatattaacttatttaatccttttaagaaattgaggaggtaatttctggtattgtttccattttacaggtggagaaatggaggcactcatggatcaagcattttcccagggccacatagttaatgtagcacttagaagactgggtatctttttcaatgccacatagtagcacagctaggagttgaaccaggcagtctggtgctacaggccatacattttgacatgtgttttgttgcctcttgacaaagtccrtggactgtgatcctgggaccaacagcatcagtatcaactgggaacttcttagaaattcaaattcttggggctattccccaaatttctgagtcagaagctctggggatagggcccagcaagctatgtgttaacagactttttagatcaggggttcccccca

SEQ ID NO: 224782 - DNA, 574 bp, Homo sapiens
ctagagttgtgtgtgtatgtgtgttagtacaatgtcagcactaggttttgcaatcacatatgtgctgctagttctgtagcatctccatggaactagcccttgcaattataacaaagtctgatattggttggctacaagtaggtattgccttgtgtatgagttgggtgatattttgaatccctggaattgtcctcttcactttgcaacatccactcactcagaaaaagccttgcatcccttgcctgaagggtggaagaggtgggggtttaaattagtttcaagggactggacaatttcattctcacctactgaaagcaccatgtttgttgaagagaaactttcagagtaggctcaattaagcccagacagtttgatttaacttgtttttaattgtaatgggttattttttctggcacggagccacccagaatttcatctgtgarttccccagataatctccatctactttcacaattttctcagcaatattcagaattcccactacagtgggaccttctcccctcccctgtttttgtattctttacatcattcaagggtttggagattagaaggc

SEQ ID NO: 224783 - DNA, 255 bp, Homo sapiens
cagtaaatttactaacttggttctatgttcttttaaaaacatgattagaacttagggctttgattctgagtaagttgatatgaaatctcattaggagacataatactaaataatgcatggggttgggcaaaattttgatctcatagaaaccctctttctccttaaatgacaatcaccatcttttattcattatttagtatcccaaaggaaatacamaatttaatcaatgaccaaatatctcccctattttaagtg

SEQ ID NO: 224784 - DNA, 539 bp, Homo sapiens
cctgctttttccgctcctgaatcagctcctgatttcaaaacttggcttggacacttaaaaattgtatttccctggataagccatgtatcctctttcagattccatgtcttcatctataaaagtggaagaataatggcaaatgctatgtgaagatgaataacatcaggtgagatggtgtaaacaaaatatctaaaaccaagctcagcctgcggtaattctcacataatgaggtattatgattatggtgatgaytgctatgatgaaaatgatattgattctgttacacaatcctgattaaggtcagaaggtaccagtatttcccttgatcatgtcttttagaggtattaagataaatgggattgaagtataacaaattcagcaaaggatacagatcctaagtgtgcagcaccatgactttcacaaagtgagagcaaatttgtggttaagaaacagaatgtggccagctccaaagttcccaagctcagattaccagagccactattctgactcctagcacctaagactagttacaaatcata

SEQ ID NO: 224785 - DNA, 632 bp, Homo sapiens
tggaggtagattaagcaagaagggagtagactccactttcttctttttaataacacaataatatcatgatgtcttgaaagataaattgatgtccatgaacatggtgttcaagtgtttctctgcctggccacagcatgggagtggcagtgcagcaaagtgagggtaatagcaccaacacagacatcaatttctgttggcagaaaattttgcagccaggatcaaccatagagaatcattttcactgaaagtatttcccctgtcatattaccttaacattcttctgattcacagacagctaattttaccaacaatacagaatttggaatgactcttctctgattaaaaaaatctctatcctgagctagatttattaatttcttaagctgctcttatggtacaatcttatgcaatatccagtgagaacctcatgccttcaaaatgaagcatcgagagtaacaargatttttttaatataacaaggatttttttaataacccctttcagactggcaggatgcctccgccctctcttcaataggtttctttaatgaggatcactaatgaccagtgaaaatgttcattgcacaaactgccaagggtttggggatctttcaatacgtgatacaggtgatc

SEQ ID NO: 224786 - DNA, 528 bp, Homo sapiens
tttccacagttacttgcttgatgacacataatcatgagcttctttcttactttggcaatcaggttgtgagctctggcctttacaaatgaaggcagcaaaagatttgggcttccctaaggccagtcctagttacaacctactaattaaaacattcttcaaaatagaccattccaccaagatggagtcatccaggaacccctcatttgttttgctcagaggccagaacatctatgttctggcaagctatgagacagttgtccccrcactccaaaggtccctctgatggtaccccttgcagaaacaagcccttcaaaaaaggccaactaaattttccctgaagagcactgcccaaccaaagtttgcaaagactactaatatccaagtcccagatgatccaatttggagtcatctgtgtttattctgagaaagtgtgaatggcatcacctaccccaaacaaagcaaactattgtgcccctggataaaagccaacatccttgtcatgaatatttaactaagagccacagctta

SEQ ID NO: 224787 - DNA, 460 bp, Homo sapiens
aagagaaattctattccccattaatgtttgagtttctctcctacccacccgctttttctgtgcctttcagatgtctctctctttcttgacatttcaagatatttaaaaggtggaggacctctatccttrtttttttttgcctgtggagatagataaaattgtgtggccaatgtatctccaactttactctttctacataggaatatggggcaaagagtatcaattatcatagccatcttgacactccagaatctgtactttcctcctccctggaaatagtattcatttattctatttcatgagatgccaagtttggggctggaagtgggaaccattgcaaattaaaatcctggatgtaactgtcagttcatttgtgctgctataaggaaatacctaacactcggtgatttatgactaatagaactttatttctcacaattctagaggctgtgaagtccaa

SEQ ID NO: 224788 - DNA, 379 bp, Homo sapiens
agtggtatgccccttcatgccctcccaccagcctcacataccacacagagcacatttctgactagcttctgtcacatttgacacccaccctggggacctgagagtcacccaagggaatgaatgaagcagagctacaaatattcaaatgggtaaatttcacaatgtaatattgagaagacactcgtaagttaaggtgagtgtgtacaacatgataaaacatacataaagtttaagaaatgttaaacaaggctctacatttttraggatatatgcatatatagcttaagtataaaaaatgtggagtaatgctaatcttcaaattcagggagtggcttcttgggtggaagttgggggtggcgagtggaagcacagaagggtg

SEQ ID NO: 224789 - DNA, 379 bp, Homo sapiens
agtggtatgccccttcatgccctcccaccagcctcacataccacacagagcacatttctgactagcttctgtcacatttgacacccaccctggggacctgagagtcacccaagggaatgaatgaagcagagctacaaatattcaaatgggtaaatttcacaatgtaatattgagaagacactcgtaagttaaggtgagtgtgtacaacatgataaaacatacataaagtttaagaaatgttaaacaaggctctacatttttgaggatatatgcatatatagcttaagtataaaaaatgtggagtaatgctaatcttcaaattcagggagtggcttcttgsgtggaagttgggggtggcgagtggaagcacagaagggtg

SEQ ID NO: 224790 - DNA, 379 bp, Homo sapiens
agtggtatgccccttcatgccctcccaccagcctcacataccacacagagcacatttctgactagcttctgtcacatttgacacccaccctggggacctgagagtcacccaagggaatgaatgaagcagagctacaaatattcaaatgggtaaatttcacaatgtaatattgagaagacactcgtaagttaaggtgagtgtgtacaacatgataaaacatacataaagtttaagaaatgttaaacaaggctctacatttttgaggatatatgcatatatagcttaagtataaaaaatgtggagtaatgctaatcttcaaattcagggagtggcttcttgggkggaagttgggggtggcgagtggaagcacagaagggtg

SEQ ID NO: 224791 - DNA, 627 bp, Homo sapiens
gctcttttcctctattgtgcaaggcagggccaagtgatgtcattgggacatgcagatgtctctgtcctcttctttgactagtgccaagaaaaatgatctttgcaatgaactgatgctccttcccccaactcagattcagctgtcttatcatttctaaacctgtggccacaggctagatccctggaaactcaagaaatgctttccttgagggaaatcatgccctgctgctttctgctttaaaacagagtgctggcttatctccaggatagtggaaaagctgttggcatctcagttatgttacaaggggcacacacaaaaagcaaattaattgcttccttcctaccttcttttattcatttatgtattcattcatttaaggaaagaatattgattgaacatctactcaagaactgcaaaacagagattacctgacctaaaggtaagtattggcaacagaggagacaaacttgggagcaggcagctatagcacaacayggtgcagccatacctaggagagggagacgggagtcccaggaaggatcacctaacacagcctggagaagagctgagaggggaaagccttagaaaaagggccacatgagataagtctttaacagtaagtgggag

SEQ ID NO: 224792 - DNA, 535 bp, Homo sapiens
tagacatataaatcaatagaagagaattgagaacacagaaataacccctcacatttatggtcaattgatttttagcaaggttgccgaaacaatcaacagaatagaattttttttaacaaatggtgcatgaacaactggatatctacatgcaaaagaaaacagctggacccttcctcacataatatgcaattattaactcaaaatggaccaaacacctaaatgtgagagttaaaactgtaaaaatcttagaagaaaacataggggtaaatctttgagactctggattaggcaatgttttattaaatacaatgccaaatgcacaaacaacaaaaggaaaaaaaatggaacttcaaaaatgaaaacatgtgcttcaaaagatatcatcaagaaagtggaaaaacaaccaaragacttgaagaatatatttgcaaatcatatatctgataaaggacttgtgtctagaatatataaataacacaactcactaattaaaaaaaaaacaccaagtcaaccatttaaaaaaatgggcaaaaga

SEQ ID NO: 224793 - DNA, 311 bp, Homo sapiens
aaaaccaccacattgtatactttaaatgaattatttgcatggtatgtaaattatatctcaataaagttgttacaatgaatacatattcttgtagcaaaaaataaaagatgagatagtgaaatgcacaaaatgctactaaaaggtggtgtaaaatcaggatacaaatatccaacatatttggtaacacgcaagagagcggtcactttgataagagctggtagagcrggcttacctgaaaagcctctaagaatttccaggccatgaagagtgtttattggagatttatcaacatgagttcaaaatgagaccaa

SEQ ID NO: 224794 - DNA, 234 bp, Homo sapiens
cctttttcctcgaaggcacttgttgctttctcttttccttcctccagccatcaaactccatgggggacacatgcagtctaagggaagcgcctttgtgtgcccatcaccaaagctccacaccyatccccatcagcaactgtcttgccctactcccttccggttaaactgtggaagctccagggaccagtctccaccagagctcaggccctcttcgcttcctgccaacagacttga

SEQ ID NO: 224795 - DNA, 456 bp, Homo sapiens
tcaatcaaattacaagtttcctgagcagctgtgagtaaactgccttgctgagtgtgctgaagaaacacattattcctcacccttgcatggctaacagtcaagtcagggagacgtggcacaggcacagaacagccaaccttaagaggcaatatatgatggtgtggaataggctccgagatatgtgtacccatattttttaggaggtaggaaaagaaatggcaaaagagaccaagaagaggcagctgaaaaattaagaggaaaacctggacaatatcacatcaggcaagctgaaaagaaatgaagttttcagcattgtatgatagagagatrtcaaggaaattgaaggctaagaagcaggaaccacttgtgagaactcataatcttggagacccagagtcttagggtctaagaatagaagtagaagggaagaaaaagaaactgataaatataaactac

SEQ ID NO: 224796 - DNA, 495 bp, Homo sapiens
ccttggggaaaggggttgcacagtaatttctccatgcaattctttgggtaatrtattttaggaaagtcaccgtaaataaaagacaaacatagggatgtcgccatgccctgcggactaccatgaaaagcatcgtctcctccctgctgtccttcatacgagggacttttgcccccagtgcttcccttcatgtcactctaatttgggccaccagaccactgggggaaaccaggtcttccttgaaaaaaaaaaaaaaaaaaagttctccctattcctctctcgtatccacaacaacaacaaaataataagattgtttaatttttttgtttctattacacaataaagttgacctgtcttaggtatatagttttatgaattttacacatgtatagatttccattcccaccaccaccatcaggatacagtttcatcaccccgaaaaaaaaatccctccttctgtttatcttcacagtcacatccttcctccacctcaacccc

SEQ ID NO: 224797 - DNA, 398 bp, Homo sapiens
acccttcctccatgtcttcacagcgacacagacactagctggaacggaaatcctctgggaggcaaaacttccacttcaacattccacttcgagtgccaagaacagtccctgactctggaataacgggtcactgctatttcgcagagcactcggttgctaccatgtgtaggacaaaaataaaagcactgaacaccttaactctgtcgccctcacccccccgaaattccctcattcttccttgcttcaagattaacgtycaagcagcagaagctactggcctaattttgagcctgacatttgactatatgcatcctataatacacactgtataatttttgctcttatccccttgtgcaaagtgattgaatcgaaacattttaatcaccagccttttaaaa

SEQ ID NO: 224798 - DNA, 400 bp, Homo sapiens
atctcctgcataaatggcattcacccttcctccatgtcttcacagcgacacagacactagctggaacggaaatcctctgggaggcaaaacttccacttcaacattccacttcgagtgccaagaacagtccctgactctggaataacgggtcactgctatttcgcagagcactcggttgctaccatgtgtaggacaaaaataaaagcactgaacaccttaactctgtcgccctcacccccccgaaattccctcattcttccttgcttcaagattaacgtccaagcrgcagaagctactggcctaattttgagcctgacatttgactatatgcatcctataatacacactgtataatttttgctcttatccccttgtgcaaagtgattgaatcgaaacattt

SEQ ID NO: 224799 - DNA, 626 bp, Homo sapiens
ggaaaattgatccataaggaatagaaaaatcagtcaagaagcccaacttctttattgtagaatgaggagggaggcaagtcctctttccccaaaacatggcccttgaaatcaatcaaagtaaaaaacaaattgaaaagcatttgcttatgaaaaactactgaactccagataaaaacattgggaatctatcacgttattgactggaccttattcccttcttgccagcttgattagtagggtagttctactgtgtgtggcaagctatgaaarccagaagctttgttgccagaacagattcacttgattttgtacaaaatatgaaaaactcactttcaaaagcattctcagtaaaagtactgatcttggaagcaagcatatcaggaaagctagcaacttctcatctgagctgtcaacccagtttgagcaagcaccagaccaacgagccaattagaaataaaacagggagatcctagctataagacagacttagaggggatggatactttttctgtaccttcttctaactacattgtatatgtagatgggagaccatcaagagctcaatctgtctacgtatccttggctaattgggaggctatatacctgtagagttgatccacaagaac

SEQ ID NO: 224800 - DNA, 503 bp, Homo sapiens
catggtaggagcagtgggagtgaggatgggtgagattttgcaggctcttactaggaagaaaatctactttctgctttaaccttttcttaccctgccccattcacacctttttcctttaatctatttagccttttcaaaactctggtaaacagactcatacgttaaataaagatggtatatattccacttctagaagaaacatgttataaaaaaatgacattgcagatagtttaaaaagtaactattggaatatgacttaagtcagtataaattctttttataaaaacatatttattgagatataattcatataccataacattaacccatttaaagtatacaattcagtgggttttttttagcatattcacagggctgwataacaatcacctaagtataattttagaatattttcaacttattttccctaaagaaattctgtacttattagcagtcactctccattccctcatctcctccccaccatccttaagctaccatta

SEQ ID NO: 224801 - DNA, 577 bp, Homo sapiens
gtggtaatcatctcacaatgtatacctatatcaaaacgttatgttgtacaccttaaatacatacaattgtttttgacaattataccccaataaagctggaggaaaaaaggctcagtttttcctctataaagcattttatggctgtktttgcaacctttcctaaaaacaaggagacaaacaaacaaataaataaaaaacagaggaattgagagtttataacagtttcctttatcaaatttcacattaaggtagcctaactcagtgattaagagcctggatgttttaattggacaattctgggtctaaatcccagttctaccatcacctttgacatgacttttgattttgagcaagttagttgacttctctcaatttcaattttattatcatacagtgagggcaaggtgtgtaactttttgcatcaaatttcttatttcataggctttttgagaggattatatttgttaatatgggtatagcacttagaagagtttttgacccatagtaatgctttattatttttatctgtccagttttaaaatccatgctattttcaccaatccataccactcacata

SEQ ID NO: 224802 - DNA, 311 bp, Homo sapiens
agatggtcacagtctatgggctgcacaggatggagraagccagagaacaggcagggtgggcagctggggtgcagggagaggcaggtgcatgctggggaggtcagaccctgtcagtgctgtgggggcatcaggtggggtgggctccaggtgtaccctcagtgcactgggcaggtctcagcccaggctccctgcaccctggccgagtgatgcggtcactccctgggggactgccatcaggccccagccacccaccctgggcagtgctgtcccatctcaggactggactttctcagatcctgcagagggcacaa

SEQ ID NO: 224803 - DNA, 311 bp, Homo sapiens
agatggtcacagtctatgggctgcacaggatggagaaagccagrgaacaggcagggtgggcagctggggtgcagggagaggcaggtgcatgctggggaggtcagaccctgtcagtgctgtgggggcatcaggtggggtgggctccaggtgtaccctcagtgcactgggcaggtctcagcccaggctccctgcaccctggccgagtgatgcggtcactccctgggggactgccatcaggccccagccacccaccctgggcagtgctgtcccatctcaggactggactttctcagatcctgcagagggcacaa

SEQ ID NO: 224804 - DNA, 311 bp, Homo sapiens
agatggtcacagtctatgggctgcacaggatggagaaagccagagaacaggcagggtgggcagctggggtgcagggagaggcaggtgcatgctggggaggtcagaycctgtcagtgctgtgggggcatcaggtggggtgggctccaggtgtaccctcagtgcactgggcaggtctcagcccaggctccctgcaccctggccgagtgatgcggtcactccctgggggactgccatcaggccccagccacccaccctgggcagtgctgtcccatctcaggactggactttctcagatcctgcagagggcacaa

SEQ ID NO: 224805 - DNA, 311 bp, Homo sapiens
agatggtcacagtctatgggctgcacaggatggagaaagccagagaacaggcagggtgggcagctggggtgcagggagaggcaggtgcatgctggggaggtcagaccctgtcagtgctgtgggggcatcaggtggggtgggctccaggtgtaccctcagtgcactgggcaggtctcagcccaggctccctgcaccctggccgagtgatgcggtcactccctgggggactkccatcaggccccagccacccaccctgggcagtgctgtcccatctcaggactggactttctcagatcctgcagagggcacaa

SEQ ID NO: 224806 - DNA, 596 bp, Homo sapiens
gttaaacataattttcttcagtttgcagctaatgccagccttttttttgccattagatatactattaatctrttgataccattctagaaccattttttctctccccctcaccgtattttctaaaaatgatttttcatagttgatcatagtaatagacatattataaaagctaacagacatcaaacacattatcaaacacatgcatttgtaagctttaacttcaggaatggaatgagcaacactcagaacagtcatagcaaacatggaaagaaggtgaatacacaatgcatgtttcttaaggcattacatgtaaggcttgtcgatgatgcaaatgtaaggttagtattaggaataactctctttctgaactacagtggcaacgtgactatttggcttccattcattgaacttccagaacctccttagtaggatttatcttttcacatgggagcattaatcaagacaaattccatcacaactgttgtcacacatttcttgccatgtgctatgtagttagtttacccggagcctacttcaaaggactgtaatttcagtatttcatcatttcagcatttcatctgtcattctggcaatat

SEQ ID NO: 224807 - DNA, 478 bp, Homo sapiens
tcctgtgtcacctaaaactccgcttaggaagataagaggcattcatgagctctgcctgcccttggagcgagcagtccatacaaggagaaaaaccatgagctcatgaactcactcttcaaggctgcttcaagtcaagttttctgcctcacagcttgtgcggactgcagcatggcaacgagtaaacatttttagatgcaaatattccagaatgtcagcaatgctggcctctaacttgggctgccccctccagtgtactccagaaggtgccactttatcctggctgtctgttctccgatgagcagcattagagcataatgccaggggatrtggaatcacctccagagctgatttgttcagcagctgttaatatagtctgccatatatagagatggtttttgaaggtagataggactattatgaagacatctaaggggtgtctggactaccctagcaaccaacaggtctctatttgagatct

SEQ ID NO: 224808 - DNA, 221 bp, Homo sapiens
taactgccccatgcctcagtttcctyacctgtaaaatggggataacaacagcccctgcattctaaaataattgtgagatgaaatgagctaatgcatggaaagcacttacactgtttcctggcatgcagcaagtacattttaagagttggctggtattcagccacccgtttcacccctcgtgccttcccctgggccactccctttctgtgaccttagaattc

SEQ ID NO: 224809 - DNA, 584 bp, Homo sapiens
gcagtgttcaaacagtttgagtttctgtcttgtttgcctgatgtgctgagtggtttgggttggcaagatgacaatgctccacaaattcatttagatttagctctcaagctgatggggcattctttcatcamttggggtgactttcattcagttaaccaaaagaaaagagcatggaaaagtgtcagggtgagggttctatggacatgacaccatagtggcacatagcacttccactcacattccattgttagaacatatacaatatgaacatataattgtgaggccaggtaagggaggagaatgttgactttcttgaacacctaaaactctttgcaatatttataggaaaaaataaaaattattattaactttaatttttctaatatcagttctcagtgtacctttacagcccctttggaactacctctgtactttcccaccatgttgtttttatcagactgtttattctattttaaataattcaaatcactttctttcatctaaacccctttaaaggaaaagcacagtgccaactctttcactgttttctttcatgctttctctcagaaggtggaggacaaagg

SEQ ID NO: 224810 - DNA, 513 bp, Homo sapiens
aacacgtaaacatatttttactgttcatcacattcaagtcacagtaaatggtatgttaatagtgactataaaattatataaaatattcttgaaactgatctattttccgcaggtgtgtgagcccacccatgtggccaatgtctcaggaagaatttttagcagaaggaatcacagacccatggaatgttagagttgaaccaagcctcaraaataacctagtcctcttgctttgcttcataagtgagaaaacagattcccagagagatgaagtgacttgttcaaagataaacaacaattaaaaaactgtaactgagaaattaactattaatactttttgattcttcttaaatcatcaaaagccatccattttattcatccattcatctcatttaatggtcaggggaataaaaggtgggcaaaaaaagaaagattgttgcctgccctttggagttcaaaacctgataaccattgagacaaatagtaatcaaacattctcccagataaacaagtaaa

SEQ ID NO: 224811 - DNA, 578 bp, Homo sapiens
ttaacatacagcttatttatacttctttggtgaaagctaatcattttttaatttaaggtagatattctctataaattaacaatccagttggggaaaaaaaaacatgaaaatcttaaaaaataccctgcaatatacagtgtcaaaatgattagtacaaatggacattagtacactatagacatttgtgaagaaatgatattatagctaggtaaattaatatctttgaaaaaaggtacataagaaacagtgcagraggtttaagaaacatattaaaaagaggagaggttggaaaattagggcagtgtagggtcagaggaaggacaaaagagtggaaaatgttcccactggatgcttctgagaagctaaaaataatgaggaaagcccattctgagattaagcggcaaggagtgagaactgggggtgaggaaaagggagggaaaaatccagattgctggagtttaagaacagaagagatggtcagattactgcagacgacaacattcattagagaagtgcggcactctaagatgagaaaaagaatgacatatattattaagtctttcttgatgctcccctct

SEQ ID NO: 224812 - DNA, 579 bp, Homo sapiens
ctcagtttttattcactcagcacgtgttttcttagcaactattatgttccaggcatttttctaagcactagggaatacagccaagaataaaatcgacaaaatacttgctcttatagaactcacattctaggaggaaagacagatagtataataaatgcatatctaagttagcatatgtcagtgcacagaagaaacaaaataggttaaggggggttgttatagatgaggcagtcagagaagacttctgcaagcagacacctgagtgagtggagttggggagccctgaggaaccctgggtgaagaacwtcgggcagaatgaatagaagtacaaatgtcttggactgagagtgtgcaaggattggagtggagtgagcaatgtggagacaggagggggatggtgccaggaaggcaacacagtgggaaggcaatattaaagatcttaaaataatagatgatatttatacagcaattgctatattccaggtactgtctgaagaatcttatagatgttaacttatttaatacttgcaataactctatgagtgtgtgctactattattcctatttttaaaaatgagg

SEQ ID NO: 224813 - DNA, 585 bp, Homo sapiens
tgaacattacctgtgaatattatcactaaaaacactaaagtatgttcccttccttcatagcaaagtgtcatctcttcagagacaacagggtcatttgacaaaggctcttgctaaagtataattttatctgacttaacctgaaggttagttgaaagacttagtattacaaaccacatatttttttaaaggtttgggaataatgtataggtagaggaaaatgcaaatcctaaaagtaaatattaatactgactgctgccccccaaggcacaactcttataacttggatcatattaaccataatttggaaacgaaattaacatttgaattgtttttgttctcttcagccaccctttctcccctttgcattcccycatccctaccctggactccatttccttaagcattgaaaaggagaacttctcttttcccgctacattagtttccgtggctgccataacaaattaccacgaacttggtggatggaaacaacagaaatgtattctctcataattctggaggccacaagtctgaaatcaaggtgtcagcagtgctatactccccttggaggctctaggagagagtcct

SEQ ID NO: 224814 - DNA, 615 bp, Homo sapiens
ttgtatgagttacagattcccctgtgtgggttagatactccatagcagtctctaattcctgaaacatagcacttacagtattttattccttctacttcgtgactgaattctcccttcctttagactgtaagcttcatgagtatagaaactgtatctgtcttatttggagttgtactttcaaagcctagcatgctgtctggcacatggctgaaactctgtaaataaattaaagagtggccttattggttaaaacatcttatatgtcctttcatttcacaracaatattgtgcctgatcctatgtgcaggcattgctttagtcatttcaatacaaatgagtgacattctctaccctagaggagctttcactatagtagagaacttaactgagtgaataatcacaatatagtctgacaaaggctgtaaacagtggcatgaaccagacagaatgttggtaaaggggaggagtgatcaattcagtgtatgtcacttattaactatagatgcttataatatttagccttgtattattagttatcagttcatttatgcatcctatcacccccatcaatcatcagccatatgttctacatcttcatttcttctgcaacaccta

SEQ ID NO: 224815 - DNA, 610 bp, Homo sapiens
cacatatttgccagagatgagccacacatttatctctaagtttctgagccttcaatgcttgactctttattgatttgatttgatccagagagagttttgcaaagtctttacattattaaaatttagtttatatgtttcttcttgtttattttcaatgtggctactagaaaactttacagtatatgtgtaccttacatctgtggctctcattctatttcttttgaatatttgtggtctaagagaatgtatgggctgcccatgattgtatgatcctctataaaagcctatttctgaacaatggtgagttcaaatgatgctcccygacacatttctctgatgagtacttctacgtgcagggtgagggaaagagccaggtgttttagcagtctgctaaaatgagagtagcattaatgtgctcttgggaaaagcaagaagcctggttagtttatgaactaaataaaaggctataccaccttgataagagtgagatcaaagaaggaacatgaattaatctgcatgaagtggagtataggtgtgtgtgtccttggatgtctgcatgtgtgtatgtgtgaatgtccctatgtgtgtctttctacatagctccatgagt

SEQ ID NO: 224816 - DNA, 611 bp, Homo sapiens
gcctattgtagtgttaccctgacatttattctccctttcttaaataaatgtgctcgcctgtagagtcaaaaagacctgagtccatggttcaacaatatcacttattggatatggaatcctgaaaaactcatttaatctctataaacctcaatttccttatacataaattgaagctaataataacttaccttttagagagagtgtgctttttacattgtctggacaaatacaaatgttagctattatatttattattcagtagttcarttacccaagctctgaacagcttgtccataggggtaggtcttccatcttccttggtggtagcactgtaatcatcttcttagattatttgcagaagtgaacattaataggtaagctcatattatttgtagatttcaactggaatattctttcttcctttttattcagcccacttttttgcttgcatattttgttccaacattctgtcctttggggttgaatttttccatgcatgatctcagccaaaggtgatttttttatgatattgaatcaaattcactctgtctacttttgaattagaagcagatgaaagtaaattattttatttttctgcctgaaagaaacac

SEQ ID NO: 224817 - DNA, 606 bp, Homo sapiens
ttctgcatatggtgatcccaattttcctagcactatttgctgaaaagagtgtcctttccccactgtgtttttgttagcattgtcaaaaattagtgatggagacattaagagctttgacttcaccactatgcaatatatccatgcaacattgactacatggatacattttaaaacattagttacatggataaattttttaaaaattttaaagaatatgtatgccataaactgacatgcataacaaatgtttagataatatccatgtcgtatttcacagtaccagctagcctacttcactcttgtgtctcccatctttcagtatctatgtttacaactcatcatttagagacatagaaggagtattcattttatcagtcatgraactatgcaggaagtttatgtttagggaagatcgtttaaaaccaaagagttgaatgtctttcaaaataaactagggataaacaaaactgtacgatactttacaatctaatataaatcattatactgccacagaacgttagttaagagcttgaactttgaagtcatacagactgcaacatgcattacaactcaactctgttatttgctagctgtgttacctgggac

SEQ ID NO: 224818 - DNA, 611 bp, Homo sapiens
gcctattgtagtgttaccctgacatttattctccctttcttaaataaatgtgctcgcctgtagagtcaaaaagacctgagtccatggttcaacaatatcacttattggatatggaatcctgaaaaactcatttaatctctataaacctcaatttccttatacataaattgaagctaataataacttaccttttagagagagtgtgctttttacattgtctggacaaatacaaatgttagctattatatttattattcagtagttcaattacccaagctctgaacagcttgtccataggggtaggtcttccatcttccttggtggtagcactgtaatcatcttcttagattatttgcagaagtgaacattaataggtaagctcatattatttgtagatttcaactggaatattctttcttcctttttattcagcccacttttttgcttgcatattttgttccaacattctgtcctttggggttgaatttttccatgcatgatctcagccaaaggtgatttttytatgatattgaatcaaattcactctgtctacttttgaattagaagcagatgaaagtaaattattttatttttctgcctgaaagaaacac

SEQ ID NO: 224819 - DNA, 341 bp, Homo sapiens
tttatacagtaaataattgcacctcatggcactcttgccccaatggttcgttctggaaacttaaattttccactataatgtgtgctaaaatagaagcataactgyattgcaatgtggcccatatggacttcccgatgagaccatctcctcttcagtaacgtcttgctgaatttgggggttcagaacctaaagccaccttgctttgttcaacacattctctctgctgttgcacctatttggaggccccatacttcttggctgctgtgctgttcttacataattttaagtcaattaaaattattagtgcagttttaatagccagtgctccctcaggctaggta

SEQ ID NO: 224820 - DNA, 408 bp, Homo sapiens
catgacagcataaccttttcaaatgtgaccgctcccttcttcccatgaatctcttatcccacacttcactgcttgccttccaatcaaacttttatgattcactacaactttggtcagaactattctcaaatctacctgttttttttaaatacatttcactcagtatttccatgtaaggaaactctttggcataagttaggaataaatcccaggatttcccaaacattaaaccaggtagtccctccttgtgtctaacttagacgtcctgagccatgattttcagccctttccctcgtgttctctgactctctttaaggagaaacacctaagatgtctaagccatcctctaagaaaaagttgacgatttattctgtagayaagatgtccctgggaggaaaccagaggtca

SEQ ID NO: 224821 - DNA, 648 bp, Homo sapiens
acttaatctaagttgacagggattaaaaagagctcagtactataataaactcatcaatgatattagaattgagagactacaaaagcaaaatacatctatagtctgagggtagtttcaaagcatttgataactatataaagtgtcacaaaagaagtaacagaaataaaaactctaggaagttgttttctatttatgacaggagagagtaccgtgtcttcaaatggctacattttaaagtcaatttctgttctgggtgagtgacattttctgttttggaatttaaaaaagtgcacttaaaggacctaacaattttaaaaaacacacacaaattatcacatcagtttataaataattttctagagyttgttttatgtggtccttttccagaacaaagacaacatctcctcactccatcgtgggtggtttattatattgttggcttggttcccacattataagtaaggaaatgctatttaatgataattgacattgttatggcaaatgttttgattagtatcataatcaagatcttggttacacaattatcattattattcctgtttcatcttgataacaagatgggtcacttagtgatctcagagacctgtcgacttaaccattgattgcctggtgtaaaatgagaactgt

SEQ ID NO: 224822 - DNA, 519 bp, Homo sapiens
ttatatttttgtaacaaatagcctggttttcaatcaatcatatgcagccaactcatcacaccatgcccaagtaaggcagatgcctagctatagacaattaggtgatttctctattttgctttcatgttcagtttataaaagctcactgttggctgggcacagtggctcatgcctataatcccagcactttgggaggctgagatgggcggatcacagggtcaggagttcgagaccagcctgtccaatatgttgaaaccccgtctctactaaaaatacaaaaattagccaggyatggtggtgggcacctgtaatcccagctactcaggaggctgaggcaggagaatcacttgaatccaggaagcggaggttgcaatgagccaaaatcgtgccattgtgccactgcactgcagcctgggcaacagggtgagactccatctcaaaaaaaaaaaaaaaaaaaaaaagccaactgttaccattactgggaaaagatctctgagcctcttctgtttctgagtgctg

SEQ ID NO: 224823 - DNA, 595 bp, Homo sapiens
gggaaatggctggtcagttgcataaacccaaaccattgttcacccccatacttcctccctgcccccaaaataccttggaaaatgtgaggctcattttcaagagtgttcaaaaatagagtaaaaatattccagatgttttgtttggggtctgccaataatagtcaccttacctgagcctggccttattcacaggctgggagttttcttctctctctttctctctctctctctctctcacacacacacacacacaattttgcaaccacaattttgatccagactgccagagagatggggagggtgccatttctaggagtgggtctaaggtccctaaaacccttstggttaggaacctggtaagccaaccacatgacccttcccaatgaactaatttctcactagtctaaagatctatttagaaaggtgtggagggggtgaaggatggagatttaaaggtaacctctaattggtctggaaaaattaagctgatgacaccttgaaaatctctctgtttctttttcattctctgtctctccaccatcaagagatgacatcttgaaaatctctgtttctttttcattctctctctcttttc

SEQ ID NO: 224824 - DNA, 424 bp, Homo sapiens
cagccattagaatttagaacctactttaaatckatttaaattctgtaaaggcagtaccattttgctttgtgtaaattgcatgattttaagttaccttatacaaaactactttattttcatgtaaactcattactatttaaaatctgtgaaatgaggtgcccaccagtcactgctattggaatccaggcattcagcactcccaggtcaagatagaccagcaggcccagcctttgtctcccattgctcctgatgcaccaccaaaataaaagtggagaagttaaaaaaggaataattccccaggaacaaatgtgggggatggtggtttcaccatctttctcttgaaacaagagatttcagcaaatgtgtgaaaggtagaaaacagatgggagtgggctgctgatggaatgggcccagcctagaattc

SEQ ID NO: 224825 - DNA, 424 bp, Homo sapiens
cagccattagaatttagaacctactttaaatctatttaaattctgtaaaggcagtaccattttgcttygtgtaaattgcatgattttaagttaccttatacaaaactactttattttcatgtaaactcattactatttaaaatctgtgaaatgaggtgcccaccagtcactgctattggaatccaggcattcagcactcccaggtcaagatagaccagcaggcccagcctttgtctcccattgctcctgatgcaccaccaaaataaaagtggagaagttaaaaaaggaataattccccaggaacaaatgtgggggatggtggtttcaccatctttctcttgaaacaagagatttcagcaaatgtgtgaaaggtagaaaacagatgggagtgggctgctgatggaatgggcccagcctagaattc

SEQ ID NO: 224826 - DNA, 424 bp, Homo sapiens
cagccattagaatttagaacctactttaaatctatttaaattctgtaaaggcagtaccattttgctttgtgtaaattgcatgattttaagttaccttatacaaaactactttattttcatgtmaactcattactatttaaaatctgtgaaatgaggtgcccaccagtcactgctattggaatccaggcattcagcactcccaggtcaagatagaccagcaggcccagcctttgtctcccattgctcctgatgcaccaccaaaataaaagtggagaagttaaaaaaggaataattccccaggaacaaatgtgggggatggtggtttcaccatctttctcttgaaacaagagatttcagcaaatgtgtgaaaggtagaaaacagatgggagtgggctgctgatggaatgggcccagcctagaattc

SEQ ID NO: 224827 - DNA, 670 bp, Homo sapiens
cttttaattctatttaacatccaataaatttattgattctctacgcagggctcacaatatttgttttgtcactcagatttccctactctttatcttctctagccatcctattgtttcagtggcaattcagatgactatatgactcttctattcccaaatcccctcagccatcctgagtagatcataaagtcagccacaaaagtgttcttattccagttctagacaactcaagtgatcattagattccatcattgtctcagaaacaacagtttgtagttggaccagggtctgacctctatgttctttttgtcaaatgatgagttattggaccatctgatatgacattaatggaacagcagcatataagactcatgtacacattggtcatggacaatttgcaaaaagactaatagcaaaataaggsttaggttgtgtaaagcataatgaatgttatgattcaaattaaatctaagccaagaaaacaagtttccaagtggtcagttctttcaatttagagatttgtcattttacatggcagtagtattagtctgagtgtaacatcaaacaccattttggctaatagggaatctatagctacttatttgtctattagcacttggacaaaagacaattaaacttctccattgaaacttaaaagctgtgaaagtat

SEQ ID NO: 224828 - DNA, 368 bp, Homo sapiens
gccccagaaccttgaataaacataggcaataaccaaggagtggttatagaaatccttgggcaagacccagtgctgtgtggggctttggktctgacccagtgcattcatagtggtgatggacacagaggagcttctgtcatcccagatttaggtagctcagaacatagagagagactctatggttcaggagaaagtctggaaagagaataagagtctctgcctggtaatccagagcattatcctggatctttgccaagaccgtcaaagtgttaagtctatgagcctgtaaaaaccacagcattactggacttagggtgctccctaatgcagatacagcttagatcataccaccgaaattctttcaaaaa

SEQ ID NO: 224829 - DNA, 368 bp, Homo sapiens
gccccagaaccttgaataaacataggcaataaccaaggagtggttatagaaatccttgggcaagacccagtgctgtgtggggctttgggtctgacccagtgcattcatagtggtgatggacacagaggagcttctgtcatcccagatttaggtagctcagaacatagagagagactctatggttcaggagaaagtctggaaagagaataagagtctctgcctggtaatccagagcattatcctggatctttgccaagaccrtcaaagtgttaagtctatgagcctgtaaaaaccacagcattactggacttagggtgctccctaatgcagatacagcttagatcataccaccgaaattctttcaaaaa

SEQ ID NO: 224830 - DNA, 574 bp, Homo sapiens
gtcattccccatatcgtagctattatgaataatgatgttgtgaatgtttgtktacaagttaatatgtaaatatatgtttgaaattctcttgagtatatagaaaagtgtgaaattgttgggtcatatagtaacctatgtttaacattttgaggaattgtcagaatgtctcccaagagatacacacctagacacataattataatcaagctgttgaaggacaagcagaaaattttgaaaggagcaaaagataggcaacatattatctaaaagtaatcctaaatgatattaacaactgacttatcagaaatcataaagtcagaagttagtgggatgaaatattcaaagtacaaagagaaaggcctgtcaaacaaaagttttgatttgaaaaaaataaaggagaaattgaaatattcttagataaaagtgaacaacatccacaactagccagtctagactacaagaaatactaatggtagttcttcaggcttatatcagtccattttcatgctgctgataaagacatacttgagactgggcaatttacaaaagaaagaagtttaatgaacttacagta

SEQ ID NO: 224831 - DNA, 574 bp, Homo sapiens
gtcattccccatatcgtagctattatgaataatgatgttgtgaatgtttgtgtacaagttaatatgtaaatatatgtttgaaattctcttgagtatatagaaaagtgtgaaattgttgggtcatatagtaacctatgtttaacattttgaggaattgtcagaatgtctcccaagagatacacacctagacacataattataatcaagctgttgaaggacaagcagaaaattttgaaaggagcaaaagataggcaacatattatctaaaagtaatcctaaatgatattaacaactgmcttatcagaaatcataaagtcagaagttagtgggatgaaatattcaaagtacaaagagaaaggcctgtcaaacaaaagttttgatttgaaaaaaataaaggagaaattgaaatattcttagataaaagtgaacaacatccacaactagccagtctagactacaagaaatactaatggtagttcttcaggcttatatcagtccattttcatgctgctgataaagacatacttgagactgggcaatttacaaaagaaagaagtttaatgaacttacagta

SEQ ID NO: 224832 - DNA, 574 bp, Homo sapiens
gtcattccccatatcgtagctattatgaataatgatgttgtgaatgtttgtgtacaagttaatatgtaaatatatgtttgaaattctcttgagtatatagaaaagtgtgaaattgttgggtcatatagtaacctatgtttaacattttgaggaattgtcagaatgtctcccaagagatacacacctagacacataattataatcaagctgttgaaggacaagcagaaaattttgaaaggagcaaaagataggcaacatattatctaaaagtaatcctaaatgatattaacaactgacttatcagaaatcataaagtcagaagttagtgggatgawatattcaaagtacaaagagaaaggcctgtcaaacaaaagttttgatttgaaaaaaataaaggagaaattgaaatattcttagataaaagtgaacaacatccacaactagccagtctagactacaagaaatactaatggtagttcttcaggcttatatcagtccattttcatgctgctgataaagacatacttgagactgggcaatttacaaaagaaagaagtttaatgaacttacagta

SEQ ID NO: 224833 - DNA, 574 bp, Homo sapiens
gtcattccccatatcgtagctattatgaataatgatgttgtgaatgtttgtgtacaagttaatatgtaaatatatgtttgaaattctcttgagtatatagaaaagtgtgaaattgttgggtcatatagtaacctatgtttaacattttgaggaattgtcagaatgtctcccaagagatacacacctagacacataattataatcaagctgttgaaggacaagcagaaaattttgaaaggagcaaaagataggcaacatattatctaaaagtaatcctaaatgatattaacaactgacttatcagaaatcataaagtcagaagttagtgggatgaaatattcaaagtacwaagagaaaggcctgtcaaacaaaagttttgatttgaaaaaaataaaggagaaattgaaatattcttagataaaagtgaacaacatccacaactagccagtctagactacaagaaatactaatggtagttcttcaggcttatatcagtccattttcatgctgctgataaagacatacttgagactgggcaatttacaaaagaaagaagtttaatgaacttacagta

SEQ ID NO: 224834 - DNA, 577 bp, Homo sapiens
tttacgtttctgattgtgtttatttggatctactcyattttcttggttaatctggtaatgggtttactaattttgtttatgttatcgaagaaccaatttttcatttcaatcatcttttgtattttttttttttttttggtctcaatttgatttagttcttctctgacctttggtatttcttttcttctgctaactcttgtgatgatttctttttcttgtttttctagttccttgaggtgtgatgttaggtaaatttgtaatctttttacctttatgatgtagatatttaatgctataaacctcccttataatactgcttttgctgtatcccaaaagttttgatgtcatgtttttatttttatttatttcaaatgtttttacaatttttttcatttcttcattaacccagttgttattggaaagaggtcccgatccagatcccgagatggttcttggatctcacacaggaaaaaattcagggtgagtctgcagtgcaaagtaaatacaactttattaagagagtaaagtggtgaaagaacagctactccatagagtaggacattcctgaaagtaagag

SEQ ID NO: 224835 - DNA, 577 bp, Homo sapiens
tttacgtttctgattgtgtttatttggatctactctattttcttggttaatctggtaatgggtttaytaattttgtttatgttatcgaagaaccaatttttcatttcaatcatcttttgtattttttttttttttttggtctcaatttgatttagttcttctctgacctttggtatttcttttcttctgctaactcttgtgatgatttctttttcttgtttttctagttccttgaggtgtgatgttaggtaaatttgtaatctttttacctttatgatgtagatatttaatgctataaacctcccttataatactgcttttgctgtatcccaaaagttttgatgtcatgtttttatttttatttatttcaaatgtttttacaatttttttcatttcttcattaacccagttgttattggaaagaggtcccgatccagatcccgagatggttcttggatctcacacaggaaaaaattcagggtgagtctgcagtgcaaagtaaatacaactttattaagagagtaaagtggtgaaagaacagctactccatagagtaggacattcctgaaagtaagag

SEQ ID NO: 224836 - DNA, 457 bp, Homo sapiens
catgtgacatatctgctccccttttactttctgccataattacaagttttatgaggcctctccagagcccaatcatatgccgctatatttcctgcacagyctgctgaaccatgagacaagtaaacctcttttctttataaagtacccaatcccaggtatttctttatagcaatatgagaaaagactaatacagaaaattggtaccaaggcttaaagcattgttatcaagataccaaaaaatgtgaaagcagttttggaattgggtaagaggcagatgttggaagtgtgttgagggctcagaggaagacagaaagatgagggaatgtttggaaattcctagagattggttaaattgttgtgactaaaacaccaatagtgatatgaacaatgaaggccaggctatagaggtctcagacagataagagaaacttattgggaactggaaaaaaggtcattt

SEQ ID NO: 224837 - DNA, 595 bp, Homo sapiens
cagactcatagaagtatcactttgatggttttgcacaagatccaagtgaattctctggattaccaggcagagactcctattctcttctgttaatttctcccaaacatacagagtctctctctgtctgttctgtgccacttaaagctgggggtggagtgacccaggcaccctgtggccactactaccactaggactgtactgggtgagacctgaagccagcaaagttctgggtcttgctcaaggcctgctgtaaccactccctgactactgcctctgttcattcaaggccctggggctctacaatcagcaggtagcaaagccagccaggcgtgtggtgtgtccttcccttcaggacatmaaagtcccccaggctttgggagggtccataagtgatgtcagggagtcagagactagagtcaaaaaccttagacatctacctggtattctattatattgcagctgagctggcacttcaaccgcaagacgcaattcttccctttcttccctcagaggagccttaccctgtagccaccaccacccccggccatgaggagtactgccagactaccactgatgtccccctaaggcccgtggt

SEQ ID NO: 224838 - DNA, 478 bp, Homo sapiens
catgtccactatgcccaggcaatcgctggaaggtgcactgccccagaggacaaagattctctgagtcagaagcccccaaccaaatgatccaacaacaggactgagggtgcctggggcaagcrccagctcatgtcatcaacctcattgagccctgggtatgtttaaccattgagggtcaggaaattgacttcctcccggatactggtgcgaccttctcagtgttaatctcctgtcctggacgactgtcctcaaggtccattaccatccaaggaatcctgggacagcctgtaaccaggtatttcttccacctcctcagttgtaattgggagactttgctcttttcacatgactttcttgttatgcctgaaagtcccacacccttattagggagggatatattagccaaggctggagctattatctacatgaatatggggaagaagttacccatttgttgtcccctacttgaggagggaat

SEQ ID NO: 224839 - DNA, 478 bp, Homo sapiens
catgtccactatgcccaggcaatcgctggaaggtgcactgccccagaggacaaagattctctgagtcagaagcccccaaccaaatgatccaacaacaggactgagggtgcctggggcaagcgccagctcatgtcatcaacctcattgagccctgggtatgtttaaccattgagggtcaggaaattgacttcctcccggatactggtgcgaccttctcagtgttaatctcctgtcctggacgactgtcctcaaggtccattaccatccaaggaatcctgggacagcctgtaaccaggtatttcttccacctcctcagttgtaattgggagactttgctcttttcacatgmctttcttgttatgcctgaaagtcccacacccttattagggagggatatattagccaaggctggagctattatctacatgaatatggggaagaagttacccatttgttgtcccctacttgaggagggaat

SEQ ID NO: 224840 - DNA, 478 bp, Homo sapiens
catgtccactatgcccaggcaatcgctggaaggtgcactgccccagaggacaaagattctctgagtcagaagcccccaaccaaatgatccaacaacaggactgagggtgcctggggcaagcgccagctcatgtcatcaacctcattgagccctgggtatgtttaaccattgagggtcaggaaattgacttcctcccggatactggtgcgaccttctcagtgttaatctcctgtcctggacgactgtcctcaaggtccattaccatccaaggaatcctgggacagcctgtaaccaggtatttcttccacctcctcagttgtaattgggagactttgctcttttcacatgactttcttgttatgcctgaaagtccyacacccttattagggagggatatattagccaaggctggagctattatctacatgaatatggggaagaagttacccatttgttgtcccctacttgaggagggaat

SEQ ID NO: 224841 - DNA, 225 bp, Homo sapiens
agactcatcaatgaggcagtaattcctctatatccagttgtacycaacccctatacattgctctctcaaataccagaggaagcagaatggttcactgttttggacctcaaggatgccttcttctgtattcccctgcactctgactcccagtttctctttgcctttgaggatcccacagaccacacgtccaacttacgtggatggtcttgccccaacggtttaggg

SEQ ID NO: 224842 - DNA, 225 bp, Homo sapiens
agactcatcaatgaggcagtaattcctctatatccagttgtacccaacccctatacmttgctctctcaaataccagaggaagcagaatggttcactgttttggacctcaaggatgccttcttctgtattcccctgcactctgactcccagtttctctttgcctttgaggatcccacagaccacacgtccaacttacgtggatggtcttgccccaacggtttaggg

SEQ ID NO: 224843 - DNA, 225 bp, Homo sapiens
agactcatcaatgaggcagtaattcctctatatccagttgtacccaacccctatacaytgctctctcaaataccagaggaagcagaatggttcactgttttggacctcaaggatgccttcttctgtattcccctgcactctgactcccagtttctctttgcctttgaggatcccacagaccacacgtccaacttacgtggatggtcttgccccaacggtttaggg

SEQ ID NO: 224844 - DNA, 225 bp, Homo sapiens
agactcatcaatgaggcagtaattcctctatatccagttgtacccaacccctatacattgctctctcaaataccagaggaagcagaatggttcactgttytggacctcaaggatgccttcttctgtattcccctgcactctgactcccagtttctctttgcctttgaggatcccacagaccacacgtccaacttacgtggatggtcttgccccaacggtttaggg

SEQ ID NO: 224845 - DNA, 582 bp, Homo sapiens
ttatgctgcacataaatttccttagtaaagtaaacaatgttcttttgattatgtgatttttcctttttgtttcaggattccattcaggatacttcattatatgtagagttgaccctggaacaacataaaggttagggrtgccaatcacctgtgtggtcaaaaatctgagtataatttttactcccccaaaccttaattacaaagagcctacagttaacctgaagctctaccaataacatgaacagttgattaatacatattttgtgtatgtgttatttactgtattcttagggtaaaataaactagaaaaaaaggaaatgttattaataaaatcataaggaagagaaaatatattcactattcaataagtggaagtggatcatcgtggatcatcttttttttattattatactttaagttctagggtacatgtgcacaacatgcaggtttgttacatatgtatacatgtgccatgttggtttgctgcactcaataactcatcatttacattagatatttctcctaatgcaatccctcccccatcctggcaccccacgacaggccccagtgtgtgatgctccc

SEQ ID NO: 224846 - DNA, 582 bp, Homo sapiens
ttatgctgcacataaatttccttagtaaagtaaacaatgttcttttgattatgtgatttttcctttttgtttcaggattccattcaggatacttcattatatgtagagttgaccctggaacaacataaaggttagggatgccaatcacctgtgtggtcaaaaatctgagtataatttttactcccccaaaccttaattacaaagagcctacrgttaacctgaagctctaccaataacatgaacagttgattaatacatattttgtgtatgtgttatttactgtattcttagggtaaaataaactagaaaaaaaggaaatgttattaataaaatcataaggaagagaaaatatattcactattcaataagtggaagtggatcatcgtggatcatcttttttttattattatactttaagttctagggtacatgtgcacaacatgcaggtttgttacatatgtatacatgtgccatgttggtttgctgcactcaataactcatcatttacattagatatttctcctaatgcaatccctcccccatcctggcaccccacgacaggccccagtgtgtgatgctccc

SEQ ID NO: 224847 - DNA, 455 bp, Homo sapiens
gcttccagactctattgtattaataattatgctatgcggmctccagggtattagctgttcaatttttattatttcctctttttttttttttcctgctagtatctctttatagatcccattcttgtttttccttttgaactcatcattgaaaaaggcgtgtttttctggaccaactactatgggagtttcagatgtaaaggaggaaccagagctgtgttacaggttagcaggatttctgcacattggtttatgtagctactacttctctccagccagctgggtgtaggtagatgcaagacagtgcagagactatcctgaaccatgtgcttccttgtatatatgctggtgtgtgtgtgattccttatttagatttccttcttctttgtctaaaaatcaactcaggtccagggttgcttctggggccaacacaagtgccccaatcctgcattgcaaag

SEQ ID NO: 224848 - DNA, 442 bp, Homo sapiens
tgggtagtctgcttccagactctattgtattaataattatgctatgcggcctccagggtattagctgttcaatttttattatttcctctttttttttttttcctgctagtatctctttatagatcccattcttgtttttccttttgaactcatcattgaaaaaggcgtgtttttctggaccaactactaygggagtttcagatgtaaaggaggaaccagagctgtgttacaggttagcaggatttctgcacattggtttatgtagctactacttctctccagccagctgggtgtaggtagatgcaagacagtgcagagactatcctgaaccatgtgcttccttgtatatatgctggtgtgtgtgtgattccttatttagatttccttcttctttgtctaaaaatcaactcaggtccagggttgcttctggggccaacacaag

SEQ ID NO: 224849 - DNA, 582 bp, Homo sapiens
cttgccctgatttagtacacacctaaagtgtccagtttcatacacagtatctgttcaatacatgcaatgaaataaaataaaaatgctcttcagtttaaaggttattttgtggttatgcttgaattatttgagaaaaagtatggctctcctttgacatttccataaaatatgcaacaaaattgaaagtagtaagacaaaatatggtcttaatcatcagctaaacatttatttttaaggtcattcatttcattgtcaaaatactctagaaaacagaccttttaaactgtattttcaccatacaatgctgaaattgaaaatcggtgttgttttctattccaaatgttaaaattattgtaaaataaataccattcaggcaatgacagtttcaggaactctctggaagttctcaaattgcaaagtgaaatgtatgcacatattgtttccctgattgttggacttgaagcctcccttctatgttccaggtaaaaatattatccatgtttttgtatgatcattccttaatgttttatatgcatttcttcccatgtttaatcccatttratttatatatgcaggctctaa

SEQ ID NO: 224850 - DNA, 490 bp, Homo sapiens
tacattacacaccaattaggctttgactcctgtagccatggggaagtcaaggatgtctggggccacagcttcagtaacaaagagtgaaaactgacattagtttacaggatggtacaaggttaatccatatgacatgcctgcagtgcacagtatatggctgcctatcctacaaacacaatgaatacaaagtttctttgaaatccataagatatcaatgcaaaataattattacattcaaaataatcaaaataatataagatgaaaacttctatattaccatcgacttagaactgtaattgaatttrttataaaatctagtatagacacggatgaaacaaaacaatgtgaaaatggaagggttaggttttttctttcatgagtcagattgtatggtacagacatacaaaagcattttggccttgcaaaagcccataggtgtcttataattgccctcctaccttgcattctgaggtggaatgggaagagcaaa

SEQ ID NO: 224851 - DNA, 576 bp, Homo sapiens
ttctttttttttttgctactataccaggcatctacagctctacataaggaaaatgtcaccagggtaaattttgtaaataaatagatatttttctacaagtcactacaggagtctgttcagtttcatgccatatcctagatatagcctcccatgtttgttttttatcaacactgtagttttagaccttgcagtcaccagtaagaaatttaagatttttcacagataatcccaccacgtgccacacctagaatcacacattttacactggttttgaatcaggtaagcacttaaccagatcattctcttcatcttttgattatccttctactctgcatttctcttatgaattcataccaaagraaacattgctaagtaattttctcatagcttaaaaagtgttgcccatgaaactgcagttaaaaccttaccttatgtcttaactcctattgttcttagaaagtcagtttagataacattttctttctaaagttgaaaattatcttcatttgttctttatgagacctcagctagcttcatataaccaaaaacgtcaagacttcttacttacttctgagt

SEQ ID NO: 224852 - DNA, 404 bp, Homo sapiens
ttcatcaaaatatcaaaatagctgcaacagatatttcttcttccataaaatgtgacagatataaatatccacatgtaaatacatttgaatttaatataattttatgcataataaagttaaaatccaaagttaccaaggggcaataacttgcyttacttccaagtgatttatatgcatataaaagattagaaaacaattatcctagaacatattggaaagtttttgttttccaactagtgttaaatttcactggagctataatttagatgggtctcataaattttctcgagatgtttttattagcatttagctttacagttatcaaatagataacctaaaagtatcctaaagtaaccaaatttgttttctgagacatacaggtaaatgaaccagcaaacaaatag

SEQ ID NO: 224853 - DNA, 564 bp, Homo sapiens
ttcttcttccataaaatgtgacagatataaatatccacatgtaaatacatttgaatttaatataattttatgcataataaagttaaaatccaaagttaccaaggggcaataacttgccttacttccaartgatttatatgcatataaaagattagaaaacaattatcctagaacatattggaaagtttttgttttccaactagtgttaaatttcactggagctataatttagatgggtctcataaattttctcgagatgtttttattagcatttagctttacagttatcaaatagataacctaaaagtatcctaaagtaaccaaatttgttttctgagacatacaggtaaatgaaccagcaaacaaatagcattttactcactgtacataccaacattcatgaccacattacacatatggtgctttatgaaaaggttttactgactttgtccccatatcatctcctaggacttattttttaagcattacattattttttacaggtgaaaatgtctgatccagcttatagctcttttccgtgtaatccctgcgttttttccacat

SEQ ID NO: 224854 - DNA, 404 bp, Homo sapiens
ttcatcaaaatatcaaaatagctgcaacagatatttcttcttccataaaatgtgacagatataaatatccacatgtaaatacatttgaatttaatataattttatgcataataaagttaaaatccaaagttaccaaggggcaataacttgccttacttccaagtgatttatatgcatataaaagattagaaaacaattatcytagaacatattggaaagtttttgttttccaactagtgttaaatttcactggagctataatttagatgggtctcataaattttctcgagatgtttttattagcatttagctttacagttatcaaatagataacctaaaagtatcctaaagtaaccaaatttgttttctgagacatacaggtaaatgaaccagcaaacaaatag

SEQ ID NO: 224855 - DNA, 404 bp, Homo sapiens
ttcatcaaaatatcaaaatagctgcaacagatatttcttcttccataaaatgtgacagatataaatatccacatgtaaatacatttgaatttaatataattttatgcataataaagttaaaatccaaagttaccaaggggcaataacttgccttacttccaagtgatttatatgcatataaaagattagaaaacaattatcctagaacatattggaaagtttttgttttccaactagtgttaaatttcactggagctataatttagatgggtctcataaattttctcgagatgtttttattagcatttagctttacagttatcaaatagataacytaaaagtatcctaaagtaaccaaatttgttttctgagacatacaggtaaatgaaccagcaaacaaatag

SEQ ID NO: 224856 - DNA, 404 bp, Homo sapiens
ttcatcaaaatatcaaaatagctgcaacagatatttcttcttccataaaatgtgacagatataaatatccacatgtaaatacatttgaatttaatataattttatgcataataaagttaaaatccaaagttaccaaggggcaataacttgccttacttccaagtgatttatatgcatataaaagattagaaaacaattatcctagaacatattggaaagtttttgttttccaactagtgttaaatttcactggagctataatttagatgggtctcataaattttctcgagatgtttttattagcatttagctttacagttatcaaatagataacctaaaagtatcytaaagtaaccaaatttgttttctgagacatacaggtaaatgaaccagcaaacaaatag

SEQ ID NO: 224857 - DNA, 521 bp, Homo sapiens
agagggaaaagggccctcaccagacaccagatctgccagcaccttcatcttggacttcctagtcttcagaactgcaagaaatacacttctgctgtttaagctacccagtccattggtattctgttaggccagcctaaaatgactcagacaactctaacacgatcaaaacatggaagtcactctgcctttaatgtttagtggcaagatttctcagtctcttagtttaccacaaasttattcgttttattgattaacatgtggccatattttgataccatgtgtttgaggctataatgatgcaatataatttatctgctttttaaatgatttgaaaaaaaaaacctttacttttaggattaatttaagtttcaaaaaataaagtaacttggtcatagagggcttgtaaattcactataagttatatataatataacttgtgtgtacatatacatacataaacctagccatatgcctggcccataatttagtgactattacttagcttcacaagaaatatgtat

SEQ ID NO: 224858 - DNA, 461 bp, Homo sapiens
atgggatactgtgcagccataaaaaggaatgagatcatgtcctttgcaggaacatggatggaactggaagccatcatcctcagcaaactagcacagaaacaggaaaccaaacaccacatgttctcagtcataagtgggaggtgaacaatgagaacacatggacacaagaaggggaacgacacacactggggcctgtcggggtggggatgaggggcaggggagcatcaggacaaatagcttatgcataaggggcttaaaacytaggtgacaagttgataggtccaacaaaccatcgtggcacacatatacctatgtaacaaacctgcatgttctgcacaagtatcccagaacttaaagtaaaaacaaacaaacaaaaaacctatagagaaagtaatatatcactataatattactattttaaaaatcagttataaaataagacatcttttgaaagggttaat

SEQ ID NO: 224859 - DNA, 571 bp, Homo sapiens
tatgtacgctaaagaagcctgcacataaattactgcagtgagatatttactggttgagagaatgaagaacaggacagtattctaatggttgcatgatatttcattagtgctatgatgaacctctaatgttggacatgtaagtgtcactattatcaataatacaacaacaaatatctttgggygtaaggctttttctgtacagattgttaggagtgaaattacctagttgaagagaatgaatatttttagggttcttaatatatattgccaaatccaagagcaattgtattactgtatcaaaataaatcaaagtttttaatgtcatgccttattttgccagcattggattttctcattaaaaggaaaagggctaatttcatgggcgcaaatgtcatgtcactgttgttttgacttctttattggcgacactgaatattatgtaggttgttaatcagtttgattttctcttttatggattgtttatgtccttggcccatttatctataagatgagggagtaatatttaagttgttgttaatgaattattaatttattatcctaggcatagtcc

SEQ ID NO: 224860 - DNA, 403 bp, Homo sapiens
acacagctagatggtgtgaagacagggcagsactgtggtccctgggtcccttgtctgatgttgttgcagtctctgcattagtgctccataatgggtctgtggtgtgcccggatgtaagggttggtttggagcatttccaccctggctctctggacatggaacttgctggactttgggatttttctgtcagccattgataggagcagagtgttgttgtgttttgtggcagagaccacccatggaagtgatcgactgtaagcacagagccagctgcagcccgaggtgatgtggatggagcctaaatgtgttgttctgtgtgtctctccttttccttttaaacaaagtttccctcaccacacaggttttcagccagctcatctactctcaagtgctgggaagttcg

SEQ ID NO: 224861 - DNA, 403 bp, Homo sapiens
acacagctagatggtgtgaagacagggcaggactgtggtccctgggtcccttgtctgatgttgttgcagtctctgcrttagtgctccataatgggtctgtggtgtgcccggatgtaagggttggtttggagcatttccaccctggctctctggacatggaacttgctggactttgggatttttctgtcagccattgataggagcagagtgttgttgtgttttgtggcagagaccacccatggaagtgatcgactgtaagcacagagccagctgcagcccgaggtgatgtggatggagcctaaatgtgttgttctgtgtgtctctccttttccttttaaacaaagtttccctcaccacacaggttttcagccagctcatctactctcaagtgctgggaagttcg

SEQ ID NO: 224862 - DNA, 403 bp, Homo sapiens
acacagctagatggtgtgaagacagggcaggactgtggtccctgggtcccttgtctgatgttgttgcagtctctgcattagtgctccmtaatgggtctgtggtgtgcccggatgtaagggttggtttggagcatttccaccctggctctctggacatggaacttgctggactttgggatttttctgtcagccattgataggagcagagtgttgttgtgttttgtggcagagaccacccatggaagtgatcgactgtaagcacagagccagctgcagcccgaggtgatgtggatggagcctaaatgtgttgttctgtgtgtctctccttttccttttaaacaaagtttccctcaccacacaggttttcagccagctcatctactctcaagtgctgggaagttcg

SEQ ID NO: 224863 - DNA, 427 bp, Homo sapiens
gaaggggcagtagatttgttcaaggttacacagctagatggtgtgaagacagggcaggactgtggtccctgggtcccttgtctgatgttgttgcagtctctgcattagtgctccataatgggtctgtggtgtgcccggatgtaagggttggtttggagcatttccaccctggctctctggacatggaacttgctggactttgggatttttctgtcagccattgataggagcagagtgttgttgtgttttgtggcagagaccacccatggaagtgatygactgtaagcacagagccagctgcagcccgaggtgatgtggatggagcctaaatgtgttgttctgtgtgtctctccttttccttttaaacaaagtttccctcaccacacaggttttcagccagctcatctactctcaagtgctgggaagt

SEQ ID NO: 224864 - DNA, 403 bp, Homo sapiens
acacagctagatggtgtgaagacagggcaggactgtggtccctgggtcccttgtctgatgttgttgcagtctctgcattagtgctccataatgggtctgtggtgtgcccggatgtaagggttggtttggagcatttccaccctggctctctggacatggaacttgctggactttgggatttttctgtcagccattgataggagcagagtgttgttgtgttttgtggcagagaccacccatggaagtgatcgactgtaagcacagagccagctgcagcccgaggtgatgtggatggagcctaaatgtgttgttctgtgtgtctctccttttccttttaaacaaagtttccctcaccacamaggttttcagccagctcatctactctcaagtgctgggaagttcg

SEQ ID NO: 224865 - DNA, 522 bp, Homo sapiens
ctgattcttttaacgttgctttttatggaattaatgacatctaggtttaatacagtatctaaatttctatatgtgacagaaatcagtctgattagacatgtatcaaaacccaataataaaatactatatctcttttaatttatgcctgaggttgcaattttttgaatttttgcaatcagcccttggcgatgaccttgagcagtaggatataaataaatcccacatgcttagcattccaataatggaacactaggcataaattggttaacccatttatgcctagtgttctaaaagacagaagttggcatttttggctaaacaacaatttcacaactaagaaaaacagctttaccaatagtatataaatttaaatattacagaaatctttagaaatttatataaaagtgaaaataaaggtgatctaacttattscttccccaaaatgaacatggtgtttcaaaggaaaaatctgtatcctttaccaagaatcaatttgaggagcagcaacaaatgaagctccac

SEQ ID NO: 224866 - DNA, 522 bp, Homo sapiens
ctgattcttttaacgttgctttttatggaattaatgacatctaggtttaatacagtatctaaatttctatatgtgacagaaatcagtctgattagacatgtatcaaaacccaataataaaatactatatctcttttaatttatgcctgaggttgcaattttttgaatttttgcaatcagcccttggcgatgaccttgagcagtaggatataaataaatcccacatgcttagcattccaataatggaacactaggcataaattggttaacccatttatgcctagtgttctaaaagacagaagttggcatttttggctaaacaacaatttcacaactaagaaaaacagctttaccaatagtatataaatttaaatattacagaaatctttagaaatttatataaaagtgaaaataaaggtgatctaacttattgcttccccaaaatgaacatggtgtttcaaaggaaaaatctgtatcctttaccaagaatcaatytgaggagcagcaacaaatgaagctccac

SEQ ID NO: 224867 - DNA, 615 bp, Homo sapiens
aaagaattcaaagcatggattccaaggaagctcaatgagattcaaggttgaaatcaacaaaaggaaacttctaaatcaattcagcaaatgaaggaagagataaacatcttaaaaagaaatcaatcagaacttctggaattaaaaaaactcacttaaggaatttcaaaatacaatggaaagatttatcaataaactggaccaagyagaggacataatttcagagcctgaagactggtcttttgaactaatgcagtcagacaaaaataaagaaaaactatttttaaaaagtgaggaacgtctttgagaaataggttatgtgaagtgaccaaacctacaaattactggcattccctagagacaaggagaaaaagaaaacaacctggaaaacatatttgatgcaatcattcaagaaaatttcctgaatcttgctagaaaggtagacatctagatacaataaagccagagaacacctgcgagatactataaaaaagtggacattaccaaggcatataccaaacagtccaaggtcaacgttaaagaaaaaatcctaaggccagatcacatacaaaaggagccctatcaggataacagcagacgtctcagcagaaaccttaa

SEQ ID NO: 224868 - DNA, 502 bp, Homo sapiens
tctctcacacaaacaaaacaccaaaaagagcagggatcactattcctaaaacagataaaacaggctttaaaccagcaatagtaaaaaaggacaaagaagggcattacataatgataaggggttcaattcaacaagaagccttaacaatcctaaatatatatgcacccaacattggatcacccaggttaataaaacaggtacttctagacctatgaaaagactcagccacataataatagtcaggagactttaacaccccactgacagcattagacagatcattcagatagaacactaacagaggaattacggacrtaaattcaacacttgaccaactggatgtaataggcacctaaagaacactccatgcatcaaccacagaatatacattcttctcatttgcacagcgaatgtattccaagatcaaccatatgttccaccatgaagcaagcctcaataaattcaaaaaatgttgaaatcataccaaccattttttttggac

SEQ ID NO: 224869 - DNA, 472 bp, Homo sapiens
tggttacagcaggttttgggcaagacccagtgctgtgctggcttcacgtctgacccaatgcagtcatagtagcggtggccacaggggtgtttgtgtcacggtggctcagaacagagagagagactctgtttgtttgggagaaattaagggaagagaacaagactctctttttggtaacccagagaattatcctgcatgttgtccaagaccattaaggcagtaccactatgagtctgcaggaaccacagagtttaggaggcttggggtgccycctaaagcagatacaacttagatcacaatatccaagttctttccaatatctggaaagccttcctgagaaagataggtacaaacaagccctgacagggaaaactacaataaatacctaattcttcaatgcctagacaccaaagaacatctgctagcatcaacactgtccgagaaaacatgacctcaccaaatgaactcaata

SEQ ID NO: 224870 - DNA, 472 bp, Homo sapiens
tggttacagcaggttttgggcaagacccagtgctgtgctggcttcacgtctgacccaatgcagtcatagtagcggtggccacaggggtgtttgtgtcacggtggctcagaacagagagagagactctgtttgtttgggagaaattaagggaagagaacaagactctctttttggtaacccagagaattatcctgcatgttgtccaagaccattaaggcagtaccactatgagtctgcaggaaccacagagtttaggaggcttggggtgccccctaaagcagatamaacttagatcacaatatccaagttctttccaatatctggaaagccttcctgagaaagataggtacaaacaagccctgacagggaaaactacaataaatacctaattcttcaatgcctagacaccaaagaacatctgctagcatcaacactgtccgagaaaacatgacctcaccaaatgaactcaata

SEQ ID NO: 224871 - DNA, 472 bp, Homo sapiens
tggttacagcaggttttgggcaagacccagtgctgtgctggcttcacgtctgacccaatgcagtcatagtagcggtggccacaggggtgtttgtgtcacggtggctcagaacagagagagagactctgtttgtttgggagaaattaagggaagagaacaagactctctttttggtaacccagagaattatcctgcatgttgtccaagaccattaaggcagtaccactatgagtctgcaggaaccacagagtttaggaggcttggggtgccccctaaagcagatacaacttagatcacaatatccaagttctttccaatatctggaaagccttccygagaaagataggtacaaacaagccctgacagggaaaactacaataaatacctaattcttcaatgcctagacaccaaagaacatctgctagcatcaacactgtccgagaaaacatgacctcaccaaatgaactcaata

SEQ ID NO: 224872 - DNA, 470 bp, Homo sapiens
ctgtctcaaaaaaaaaaaaaaaaaaaaaaacaggccaatatatctgatgaatattgatgcaaaaatcctcaacaagatactaraaaactgaatgtaacaatacattggaaggatcattcatcatgacaaatgggatttatccctgggatgcaaggatggttcaaaatatgcaaatcaaccaaagtgatacatcatatcaacacaataaaggataaaagctgtaagatcatttcagttaatgctgaaaaagtgctggataaaattcaacgtttcttcatgataaacactctaaaaaaactgggtaaagaaataacacacctcaatataataaaaaccatatatgacagatccccagtcagtatcatactgagtggggaacaatggaaaagctttcctctgagatctagaacacaagtaggatgcccactttcaccagtgttattcaacatagtacaggaagtcctagctag

SEQ ID NO: 224873 - DNA, 461 bp, Homo sapiens
ggttgatgtcgtttacattttttttgacgttaagtttcttaaggatattcccaggtatgaaatataagactcacttctcttaaaatttttcatttactttttgcattttctgtggcttttattctgtataatcttttcaacttcaaatggctcattttataccaaatatgttgctttaaaatgaaatgtttaggtaaattcccacataggttgaaactaaaagattgtgatayttagggaccagtgaagagtatacacaccaagtaccattcattgaataaaaaagatggagtagccaaagaaggactttacttcctgtactaactttaacttcactacattttgaagttctcgtcaaattcccatttgtatcatttttggccttttggctaagatcaagtgtgacattcttattagtttcatatgtgatacataaaaaaatttgatattaaaaacaattc

SEQ ID NO: 224874 - DNA, 339 bp, Homo sapiens
gactaggattctcagtgaagctggaagaaaagaggatatcagataagctccaggaatatgagatttgtactgcaaaagaaaaaaatatatatttatgacacttgttaaagaaacgtaagacaagggggktcctacaatggggtttcacagtaggggagagagaattggctcaactgtgaatacagcatgaacaagtggaaatgtatagccaaggaacagagtgggagtggggtggatggaaagttactaagaggagacaactggaataagggaggattctagctaaattaacctccaaggaattttgcagaaggaaagccagggtgatcagacctcatc

SEQ ID NO: 224875 - DNA, 607 bp, Homo sapiens
gatctacatgggagacattaaatgtaaaacctaagaaaaggaggaatatttccagctgataaaagcagacttcaatgtatatcttcaatcctgagagagattaatcccattaatacgtataaaaagctagtcaagtagagtcaagtagattgaccacacagagacaagaaagatcagaaagctgtacttaaaaattctaatagatttctaaagtgtaagtgaactaggcaacagatcttagaatattatctgagaacaaaattatacaagtaaatatatttaaaattaaagcctttacatgtcacaggatagagacaaccaaatattttcttgagaggaagtgacactgcagggttaggataatccaaaaacattctgaaggtgggagcattttggatattcttagaaggatttctgttagtagtaattgaaggcaagagatagtttcaattgaaagagagarcagcataaacataaatatagactcaaattgagggaagtccagaatgtttatggactatagttgataccaccccacttagggaagtccagaatggttatggactataattgataatgtcccactttacctgaaatgtatgttaca

SEQ ID NO: 224876 - DNA, 554 bp, Homo sapiens
aaaccaatatttgatatttaggatattctatttgctgttctgtattaaatgacaaaagccttcacaattatctttgcagaaatgcattatgaaatagatrtttgtcaggtacaattttcatttctattactctcattttttgttctgatcctttttctgaatagatataaaggttgggtataacttatctgaagtgtttgagaacaaaaatgtttctgtttaagaatttttttggattttggaatatttgcatgtacataatgagatattttggggacagaacccaaggctaagcatgaaatttatgtttcatatgtacattttacacatagcctgaagataatttaatataatatttcaaataatgttgtacataaaacaatttttactgggttttgactatgacttatcacatgatgtcaggcccacttatgaagtcattttgatgatctaaaagttttgaattttggataatttttggatttcagatttttgtattagggacactcaactaacgttattgtgtattttacaactgtaactcattattttac

SEQ ID NO: 224877 - DNA, 519 bp, Homo sapiens
aacaaacgccatcaggaagtcctactaagactattttcacattctctatgtctgagcattgaataaagcccagggatttaatcttacgtcgtggccttagttagtttgatgtttgtttatttttattagcagcctcagagcctttcattggcactctcaaagcaataaataactcaatgaacacatctgttccagattaccagttctctctgttactgtaattgttctacttaacagtttgtcttctagtcactagtatgaagttgtgcactatataattattcacaaagtttctagattagggcttcaaacataatctatgtatataaaggcttatgatctcaaaattatatatttccttaatatttattttaagaaaatagtctttccaaaaaatatcaacacacttttgagtttttcagttgttaatttgctgtataacaaattaccacctaygtagtggcttaaaacaacacccctctattttctcacagttttgtgggttagacatccagccac

SEQ ID NO: 224878 - DNA, 615 bp, Homo sapiens
acaataagaaaataatccatttaaaatgtgagctaaagaacttaacagacatctcaccaaatatttgcagataaaaaacatacttacaaaaaggtgttccccatcatctgtaataaggaaaatgaaaattaaaacaataataaaatacaagtatatacctataagaatggccaaaattcagaacagtgacaccaccacaattcaaaagggtgagaatgtagtgcaacagaaactctcattcattgctggtacaaatccacaatggtgcaaccattctggaagacagtttgagagtttcttataaaactaaacatattcttctattgtgacccagcaatcatacttcttggaatttacccaaaggaaatgaaagcttatgtccacacaaagacgttcacatggatgtttatagcagccttactcataattgccaaaacttggcagcaaccaagtttcccttcagtaggtgaatagataaataaactgtggtacatccaaccaatgggatattgtttaatgctaaaawgaagtgatctgtcaaccatgaaaagacatggagtgttcttaaataaatacttctaagcttaaaaaaatgtctgaaaaggctacaccctg

SEQ ID NO: 224879 - DNA, 609 bp, Homo sapiens
ctctgaagtagtttttaaaagttaattttctctgcctctgccaaagcataagtagatttttctstgatgttcactgtgaggacctggtagagtacctggtagtagtaaaattcacttaagtgtggcctcctttttcctcatcccccattgacttgtgtccccctggagttttcatcttgcaggttttgctacgctggatcttcagcaatttagcaattacaagttaagttttcctatctcaggactggttcctgtggaggttgctgcctatgggtttctgctccagtaagatctgattctttgtatttgcctgatgttctctcaaattctggtggcagctgtttgcctattatgtcactttgcttactgatttaagaagagttgttgattttttagtttgccacattttttattattaggatggagtgttgatttccaagcttcttaaatgccaactgaaaactcctaaaatggttttttttaatcatccctgtgtcctttccatttcatgtttatttaaataataatattctgaagaaaacaagtactgctactgacattaagtgttaagatatataatacaataatgtaggaaggtaagatgggaca

SEQ ID NO: 224880 - DNA, 526 bp, Homo sapiens
ggggcaactgaaaacacaaatcacgaattccatggagaagtctgggctgggaatataaacatagatgctaaaatcacaaayttcattttttcatttgtatatatataaatttattaaattttattaaatcatatttctactataacacattatcaaaacccaagaaattatgtttctgtacaaatatgtgagaaaacattgtttaaaattttgatgatcatgaatctactcccaagttatggcatgaaaaatatgagctcctttatttacttttttaaactcccaaagtcatgcatgttagaaaaatcatatatattaatcttgatctcttgttcctatattatcatatagtaatttgagtatttcctgttttttccacttttggcattttcatgattctcctccaaagctgcaccatttttcccttatatgaatgtgaggaggacccaccaacaaagcaataaagagttttgcttttattaaaagagattacatatgtgtgtgtgtgtgtgtgtgtgtgtgtgtg

SEQ ID NO: 224881 - DNA, 526 bp, Homo sapiens
ggggcaactgaaaacacaaatcacgaattccatggagaagtctgggctgggaatataaacatagatgctaaaatcacaaacttcattttttcatttgtatatatataaatttattaaattttattaaatcatatttctactataacacattatcaaaacccaagaaattatgtttctgtacaaatatgtgagaaaayattgtttaaaattttgatgatcatgaatctactcccaagttatggcatgaaaaatatgagctcctttatttacttttttaaactcccaaagtcatgcatgttagaaaaatcatatatattaatcttgatctcttgttcctatattatcatatagtaatttgagtatttcctgttttttccacttttggcattttcatgattctcctccaaagctgcaccatttttcccttatatgaatgtgaggaggacccaccaacaaagcaataaagagttttgcttttattaaaagagattacatatgtgtgtgtgtgtgtgtgtgtgtgtgtgtg

SEQ ID NO: 224882 - DNA, 526 bp, Homo sapiens
ggggcaactgaaaacacaaatcacgaattccatggagaagtctgggctgggaatataaacatagatgctaaaatcacaaacttcattttttcatttgtatatatataaatttattaaattttattaaatcatatttctactataacacattatcaaaacccaagaaattatgtttctgtacaaatatgtgagaaaacattgtttaaaattttgatgatcatgaatctactcccaagttatggcatgaaaaatatgarctcctttatttacttttttaaactcccaaagtcatgcatgttagaaaaatcatatatattaatcttgatctcttgttcctatattatcatatagtaatttgagtatttcctgttttttccacttttggcattttcatgattctcctccaaagctgcaccatttttcccttatatgaatgtgaggaggacccaccaacaaagcaataaagagttttgcttttattaaaagagattacatatgtgtgtgtgtgtgtgtgtgtgtgtgtgtg

SEQ ID NO: 224883 - DNA, 526 bp, Homo sapiens
ggggcaactgaaaacacaaatcacgaattccatggagaagtctgggctgggaatataaacatagatgctaaaatcacaaacttcattttttcatttgtatatatataaatttattaaattttattaaatcatatttctactataacacattatcaaaacccaagaaattatgtttctgtacaaatatgtgagaaaacattgtttaaaattttgatgatcatgaatctactcccaagttatggcatgaaaaatatgagctcctttatttacttttttaaactcccaaagtcatgcatgttagaaaaatcatatatattaatcttgatctcttgttcctatattatcatatagtaatttgagtatttcctgttttttccacttttggcattttcatgattctcctccaaagctgcaccatttttcccttatrtgaatgtgaggaggacccaccaacaaagcaataaagagttttgcttttattaaaagagattacatatgtgtgtgtgtgtgtgtgtgtgtgtgtgtg

SEQ ID NO: 224884 - DNA, 403 bp, Homo sapiens
gcagtagccttttcaaataaagtctctcttgacccaagtctagatttgtttttaattcaacattatataacatatttacatcacggaaagttctgcgaagggtatatctgaactctctgcactatttttgcatctgtcttgtaaatctcttgaaaataaaaagctgaagaaacaaaaggatatttctcagtttatacattctaggcctcttgaaaattatttataaaattaataaattgattactacagagaaaawaaaagaccagaaagtcatacagtttaaatatgacatttaatacttagtatctacctaaaggctataacctcaggagtggggatactttgtttctgggtgaagacttcaccttgattcttgacacagttctcttttacataggacagc

SEQ ID NO: 224885 - DNA, 577 bp, Homo sapiens
agtcatctcttgttaggcccacctcccatcactgttgcattggggactaagtttctaacaccatgaactttgaaggacacattcaaacaatatcaggatccttcttcatttttaatgtaggcatttattgctataaattcccttttagaactgattttgccatatcccatagrttttggtgtgttgtgttttcattatcgcttgtctcaagatattttcaaattgcccttttgatttcttctttgatccagggcatgtttagttatttgtgaattttccaagatttcttactgttattgatttctagtttttttataattatggtctaaagtgacactagatatgatttcaatctttctcaatttattaagacttgttttgtggcctaacatggcctatcctggagaatgttccatgtgcattagagaaaaatgtatattcagctgctcttggatggaaaggtttttttatacatttgttaggcccatttgatcagaagtacaatttaaatccagtatttccttatgaattttccggctggttgatctacccattgatctaaccattgaagaaagtg

SEQ ID NO: 224886 - DNA, 521 bp, Homo sapiens
tacttggtggcccgaatggtggtgctgacacacattgcaggggacacagatgcaaatgacattctgccagcaacaggattttctatttttgaatgaaaaattcctctcatgaagtgagagcctccccatatgctcggccacccatgagtarccaaagactttattgcaaaaatgaatattccatgttattattgtgccattttgctccctaaagcaagaataatttctatctccttattattgcttcatgaatttctgcaaacatttctatgccagtcatggccatagtcatttctcacagcaagtaagaggtctgcttttcttctcccttcttcagtatatgtttaattttttttcctaaatactcctgacagcctcacttatataactgtgctcagcattttattttactttgctttccacctaaagcagctgtcttctctccgtcaaacctagaccccttctgccttcaaactgctgcttaaaattcatctctacagagtctccaatccattaacaaa

SEQ ID NO: 224887 - DNA, 474 bp, Homo sapiens
cattcttgatttggctctcagcttgaacattattagtgtgtggaaatgctactgatctttgtgcattgattttgtatcctgagactttgctgaggtcttatcagatctaggagtcttttggcagaatctttagagttttctaggtaytgaatcatattgtcagcaacaagagataatttgacttactctttttctattgggatgccttttatttctttctctcactttgaattcatgaatgtagaactcaagttagacctttatgcagcctttctagttcattcattcccttcctttttaagattttgtcatactttcttctcaaactctcaacatcactgcccacatgctcactttcaacagagaactctgcttcctatgtttgcatggtactaaagagtttacaaagtacttttgcatgccttttctgattctatctctccctcttctgcccttggaaattgctagtttaag

SEQ ID NO: 224888 - DNA, 380 bp, Homo sapiens
tggatggtacatctgtttatagatcatttgagcccaacagaatagtttgaacagattatataacctatgctactctgtaacttaaacaaaagtgtttggcggtgggcaccgtggttcacacctgtaatcccagcactttgggaggctgaggcrggaggatcacctgaggccaggagttcgagaccagcccagccagcatgttgaaaccccatctctaaaacaattagctgggtgtggtggcgggcgcctgtaatcccagctactcaggaggctgaggagaaagaatcgcttaaacctgagaggtggtgtttgcagtgagctgagatcgcaccactgcactccaggagacagcaagactctgtctcaaaaaaaaaaaaaaa

SEQ ID NO: 224889 - DNA, 380 bp, Homo sapiens
tggatggtacatctgtttatagatcatttgagcccaacagaatagtttgaacagattatataacctatgctactctgtaacttaaacaaaagtgtttggcggtgggcaccgtggttcacacctgtaatcccagcactttgggaggctgaggcgggaggatcacctgaggccaggagttcgagaccagcccagccagcmtgttgaaaccccatctctaaaacaattagctgggtgtggtggcgggcgcctgtaatcccagctactcaggaggctgaggagaaagaatcgcttaaacctgagaggtggtgtttgcagtgagctgagatcgcaccactgcactccaggagacagcaagactctgtctcaaaaaaaaaaaaaaa

SEQ ID NO: 224890 - DNA, 466 bp, Homo sapiens
tatgacagttaatgtgtttgagaatgattgatgttcatatgtgtggcattttgcctttgaaatggaaatttaaaaatcactgaaattctagtttgatttgcaatctgacaggtttttttgtcttttyttaggtatggtgtggtggactttctttgagtactgggatgcaggttccaagtgctgtgagaacacttcagaaaagtgaaaatggaatgactggttcagctagcagcctgaacaatgttgttactcaatagtgtctactcagaatacgtttaccctccgtcttgattaggtggccttttctgtgcagttactaatcacaggaatttggtagtagtgaaaatcaggtttgctgtgttctgctttgaggcctggaatcttttatcattaaacacctagtacgaagcatttgcaggaacctactgtgcagtatcatagaagcaagcagataccaagcaaaaaa

SEQ ID NO: 224891 - DNA, 402 bp, Homo sapiens
ccagtgttacaattcactcctgttccaacagcctgagaaccaggggaacagatgatgtaaatcccaatcccagggcagaagaagaagaaatgagatgtcccagctcaagcatggaggaaagggggraagagagcaaattcctctgttctctgtcttttgttttgtgcagaccctcaaggggttggatgaggcccacctacattgagaagggcatccgcttcactaagtcttctggttcaaatgctaatcccatcagaaaactgtcacagacacacccaaataatgtttaatctgagcacctacggtccactcaaattgactcataaaataagtcatcacatgggtgaaagccttccctggatggtgagttttctgtctccccaacgtgcatgcatgaagagc

SEQ ID NO: 224892 - DNA, 402 bp, Homo sapiens
ccagtgttacaattcactcctgttccaacagcctgagaaccaggggaacagatgatgtaaatcccaatcccagggcagaagaagaagaaatgagatgtcccagctcaagcatggaggaaaggggggaagagagcaaattcctctgttctctgtcttttgttttgtgcagaccctcaaggggttggatgaggcccacctacattgagaagggcawccgcttcactaagtcttctggttcaaatgctaatcccatcagaaaactgtcacagacacacccaaataatgtttaatctgagcacctacggtccactcaaattgactcataaaataagtcatcacatgggtgaaagccttccctggatggtgagttttctgtctccccaacgtgcatgcatgaagagc

SEQ ID NO: 224893 - DNA, 402 bp, Homo sapiens
ccagtgttacaattcactcctgttccaacagcctgagaaccaggggaacagatgatgtaaatcccaatcccagggcagaagaagaagaaatgagatgtcccagctcaagcatggaggaaaggggggaagagagcaaattcctctgttctctgtcttttgttttgtgcagaccctcaaggggttggatgaggcccacctacattgagaagggcatccgcttcactaagtcttctggttcaaatgctaatcccatcagaaaactgtcacagacacacccaaataatgtttaatctgagcacctacggtccactcaaattgactcataaaataagtcatcacatggrtgaaagccttccctggatggtgagttttctgtctccccaacgtgcatgcatgaagagc

SEQ ID NO: 224894 - DNA, 452 bp, Homo sapiens
cctgagaatccctggaccaatagaatatggagggagtgatggtgtagcagctctgaatgtagctcttgaccgtcccagcacctcttccctctttgtgagaagcaggcttgtgtaagaagcatgaccgcctaagaccaccacactgtgggaaggccaaggcccgtgtaatgaggtaccatgttcagaggaagaccaaggagcaccaaggaggcagcagactgagtggagaggaatatgcaggggatgctgtgtrgtcagaatcaagcttcccaggtgagtctccctcaatctcctgatccacaaaactgtcagcaaaagaaagtggttgctctaggccattaaatttgtttttattttgttttctttttgtttgtttgtttgtttttggagggggtgctggtgtcactcagcaatagaaaaccagagcacaggattatcaaggaaatgaattc

SEQ ID NO: 224895 - DNA, 462 bp, Homo sapiens
tgggtgaactttatatgttggagccttaccttcttaaatataaaatatgaatactagtacttatctcctatggttttgaaaatgcttggttcatagtagatgcttaataatttctaccttattttatcttctgttactttataaaacctaccttatttggagattaataataagttttgcaccaagatgtcttttacttgaggggagtgtcacaatatagtcaatgwtgtgttgatttcctctcaatttataatgcaatattgcctttaacctcaaacttcaaaatcatcataattttatgcctttactcataaaatcacagaaccataaaactagagagaaagaaaccttcaaaagtcatttagctcaggtttcacacctgctagcaaaatgatgggcatgataaaatatctattgtgttttaatgattcccaaaaagaaactctagcctttccttaaatg

SEQ ID NO: 224896 - DNA, 446 bp, Homo sapiens
tagatctgggtaaaatgtaaagtattgttggacttgggaatttctgaggaaaatatattctggaattgctactgtggcaattgactaggaaaacaaaaagaaaaaaaagtggtagaaagagctagacagggaatcagaaagcctatgtgtataactctgataaattactaaatttctttgagctaccagttcctagtcttcctaatacttatttacttaaataaaagaatgccattgaacttaaattatctctaagwttcctgccagctataagattcaatgattttattgacgatgtattagggataatgtaaataactttgaatgaaattgaactctgcccttagaagaatattctttttttctctcttttgagactgagtctcgctctgtcgccaaggctggagtgcagtggcacgatctttgttcactgcaacctccgcctc

SEQ ID NO: 224897 - DNA, 446 bp, Homo sapiens
tagatctgggtaaaatgtaaagtattgttggacttgggaatttctgaggaaaatatattctggaattgctactgtggcaattgactaggaaaacaaaaagaaaaaaaagtggtagaaagagctagacagggaatcagaaagcctatgtgtataactctgataaattactaaatttctttgagctaccagttcctagtcttcctaatacttatttacttaaataaaagaatgccattgaacttaaattatctctaagtttcctgccagctataagattcaatgattttattgacgatgtatyagggataatgtaaataactttgaatgaaattgaactctgcccttagaagaatattctttttttctctcttttgagactgagtctcgctctgtcgccaaggctggagtgcagtggcacgatctttgttcactgcaacctccgcctc

SEQ ID NO: 224898 - DNA, 549 bp, Homo sapiens
tcaaattgtaggagtggcctggcgggaggtgatgatttccccttggatttcccccttgctgttctcatgatagtgagttctcacgagatctggttgtttaaaagtgtgtggcacgtccccctttgctccctctcycacttgctctgccttggtgagacgcgctttcttcccctccccttccgccatgattgtaaatttcctgaggcctcccaatcatgcttctctacagtctgtggaactgtgagtcaattaaacctcttttcttcataaatgacccagtctcgggtagctcttctagcaatgtaaaaagggattaatacactcagtaaatatttgatgaattatatgcatgttgaacaattgagactgaataaaaacaatcattatttcagaagaaagggaggcatagaaacttgaaacaatacctctaaaactgaagaaaagtaggcagggtcctattttaagatactcaaccaccagtttacattctaggcactaaaattcccattctgttttctaagctgttgaaagctggagcaacagctcaag

SEQ ID NO: 224899 - DNA, 549 bp, Homo sapiens
tcaaattgtaggagtggcctggcgggaggtgatgatttccccttggatttcccccttgctgttctcatgatagtgagttctcacgagatctggttgtttaaaagtgtgtggcacgtccccctttgctccctctcccacttgctctgccttggtgagacgcgcttkcttcccctccccttccgccatgattgtaaatttcctgaggcctcccaatcatgcttctctacagtctgtggaactgtgagtcaattaaacctcttttcttcataaatgacccagtctcgggtagctcttctagcaatgtaaaaagggattaatacactcagtaaatatttgatgaattatatgcatgttgaacaattgagactgaataaaaacaatcattatttcagaagaaagggaggcatagaaacttgaaacaatacctctaaaactgaagaaaagtaggcagggtcctattttaagatactcaaccaccagtttacattctaggcactaaaattcccattctgttttctaagctgttgaaagctggagcaacagctcaag

SEQ ID NO: 224900 - DNA, 583 bp, Homo sapiens
caatcttacttttgaaaagtgaaaggcaagcttttacttaagattattcctgatgaaataccctagggccaaggttagaatttttcaacttgctctgcaaaaacaaaacaaaataaaatgtctccatgttctcttgataagtaactctctgatagctaaaataggaatttttcatttaacattttcatatgaagtggctttgagctagaagagatatctattgaaaacacaaaaaaagttacatttaaaaacagcaaatacrtggaagcattagattctgaaaatattaaacattttgcatctggattatctatatctgtacatggaagataaagaaattgattttaattaagatcacacagaagaacagacaaagcaggaacaataaaacccatatctattctcagagcactaaatcttaaccgtactatttttataatatgcttgtgctttaaaacttacaaatggctgccagtggcatctgttgtataatgttatttagttcacaaagataaataaatgcatgcaaaagaatttctagctgcctttcaatcgtttttaaaataatttatttcatttcttt

SEQ ID NO: 224901 - DNA, 583 bp, Homo sapiens
caatcttacttttgaaaagtgaaaggcaagcttttacttaagattattcctgatgaaataccctagggccaaggttagaatttttcaacttgctctgcaaaaacaaaacaaaataaaatgtctccatgttctcttgataagtaactctctgatagctaaaataggaatttttcatttaacattttcatatgaagtggctttgagctagaagagatatctattgaaaacacaaaaaaagttacatttaaaaacagcaaatacatggaagcattagattctgaaaatattaaacattttgcatctggatwatctatatctgtacatggaagataaagaaattgattttaattaagatcacacagaagaacagacaaagcaggaacaataaaacccatatctattctcagagcactaaatcttaaccgtactatttttataatatgcttgtgctttaaaacttacaaatggctgccagtggcatctgttgtataatgttatttagttcacaaagataaataaatgcatgcaaaagaatttctagctgcctttcaatcgtttttaaaataatttatttcatttcttt

SEQ ID NO: 224902 - DNA, 598 bp, Homo sapiens
gtttcaaactcctagagaatattcaactccacagaatgttgttcttctaaaatattaaaaggttagagccactcataatattggaaggtacagtgtgaagacacatgtgctctaaacatacataattaatgccatacagaaagagatgtacgttctctccatctagttcaacagtctttcccggagagtaaccaagtaattctctcatgttaattactttaaaagtcatattacatacaccagagacagtttcatcttactcagcagccaaacatcagtgacatattcttttctgaacatttttctatattgaagatatattaaataaatgtgtatgaatatacttgctaaatatgcattgcaatatgaagaaaaattatttagaattccttttctagagtctctctaataaggcaaccwgccatcggcctggcaacatggcttaatctaacctgagcaacaaataaaattagatgacttcatgtatgctcttttaactccagatcgttataattgcaataatttatcaataaagctaaaagcctataaagtgaaaaatgaaaacctggaagtgacagtgaaagactaacttgtcaaa

SEQ ID NO: 224903 - DNA, 617 bp, Homo sapiens
gagatactttatcagtgaatcacatagttcaaaygttcactaaataaattctaactgaaggcctaaggtatactagagaccagatttaccaagataaataagatatgtattatccctgtcctgagagtttagaatctagcagaggagacagaataaagaagtataagcatggtaatcacattaatacataactgataaaatcttcaagtttctgctaatgtctcaagatatcctgtaaaatctctgataaacggtcgcgaatttctggcttggctctgtaaactaaaaataaagttctaagccttcccagccaaccaaatggaccctcctcttggccaagggctttccaaagtcaatctgaaacaccagttcaggccatggtgcaaatgggtggtcagacatgccttccttacaccccacttctctttggaattcaggcatgattgaccagcactaacatttaaaacagagaacttaagactgacaaagcagacgctttgttacaataatataccgacatgacagacagcaggccccgagagaaatcaaagtatttcacccccgaatttgtttctttgacatattttgaaatgaccctgtaaagctgtcttttgtgg

SEQ ID NO: 224904 - DNA, 617 bp, Homo sapiens
gagatactttatcagtgaatcacatagttcaaatrttcactaaataaattctaactgaaggcctaaggtatactagagaccagatttaccaagataaataagatatgtattatccctgtcctgagagtttagaatctagcagaggagacagaataaagaagtataagcatggtaatcacattaatacataactgataaaatcttcaagtttctgctaatgtctcaagatatcctgtaaaatctctgataaacggtcgcgaatttctggcttggctctgtaaactaaaaataaagttctaagccttcccagccaaccaaatggaccctcctcttggccaagggctttccaaagtcaatctgaaacaccagttcaggccatggtgcaaatgggtggtcagacatgccttccttacaccccacttctctttggaattcaggcatgattgaccagcactaacatttaaaacagagaacttaagactgacaaagcagacgctttgttacaataatataccgacatgacagacagcaggccccgagagaaatcaaagtatttcacccccgaatttgtttctttgacatattttgaaatgaccctgtaaagctgtcttttgtgg

SEQ ID NO: 224905 - DNA, 412 bp, Homo sapiens
gtaagggaaatttattttgtgggccaatacccttaattattcacaaacaaattttcacaatcattatctattattaacttccatgtgcaaactcaatgaagtcataaggagactaatttttcaccatctgaaaagaatgctattcaagraaatcttatgatcatatcttttctttaaattaatagtcagaacaaaagcctgtacacaaaaagttgaaagaaaactattttgaaagggtgttgtggtgtcttgccatcacagtcctgtgaaaagtccatgatctgagcaggaacagaaggtcaccaaaaaatggtagtggtgatgataaagatattcctgactcaaatggatacaatggtttcccttaaatcatcttatttaaaccacacaaataaccatctgaagaggccag

SEQ ID NO: 224906 - DNA, 531 bp, Homo sapiens
tattgatgttacttctgtagacctacagtttgtcaaaattaattcttcatgacaaaatgtacactaaattcatataattcaatgggtgtctaaattctccaaactaygtacgaccttctgtaacaaatccatttatctgcactgaaatagcccacttttatttcttacaagaattcacaaatgccagctctctggtcactcataggtcattgttctgtaatgcatcttcctctggataatcacatttctcaaggcctgctgtgcaaatacacaataggtaatactcaatggcaatccatttttctatttggcattgattggtggagttgtcatattatcttttctatcagagaagttactgttaactaaatatcttcctttctaatgctactaataaaaaaaacctctcctaccatgacacctccttaattgcattttagtccattttaatctgatgtgatacattctggaggcatatgggaggtggggacaaagggaaaggtaattcaccagatgtaagttcaaagagta

SEQ ID NO: 224907 - DNA, 489 bp, Homo sapiens
gaaatagtggtattttaattgtaccatattattttagtttgctagctgtaataattataaagagatcttcattataaaagagtgactatcccttatttggctacccagagttacaggaatatgggaaagcaaaaataaatgcttgatgttttctygttgttagtttacaataatgaattgtttccctgtcatccacaaaggtaaccagctggccttttaacatcattctgaactcatgaatttaaaccttttacaggttccaaaacattcgaactggtatcttaattaaaaatcaagttgttctatttttgagcagtaggaacttcttcaagttggttcctgactccttttgacattatctttgtagtctttgatatagtttttgctatctgatgtagcagactgttccagggttatcttgttcacttcctgacccagactcaagatgaattattccccccaaaagctctgatttctttaagtgggcaa

SEQ ID NO: 224908 - DNA, 503 bp, Homo sapiens
actctactttattttattgccaataaaggtatccaaccagcttgcatttttcactttctgctttggcttaatctataaaaataagaatataagtgatattttcaaaaatacttgtcagaatggtgataatttcagtggtaagtctaattttgtctctaatatggaagaaactattggcaattaggaaattatgttgggtagcatggaacgttacccaccagccaacttaacttgagtaacaaaaaagaatacttaaaaaataaaagatttaagtacagattttaaagtccattcatagagttccartgtccaaggcatatctgtgtggcaaagggtcagaagcaaggacggggcttgtatctcctcttctttcaatctgttgctatctctttgggctctagttctctcactgctaagaagtataagtccccaaacgagaaagctaaaagaggaaaataagcacttcaggatattgtcaccttgtcctcatgtcccgggagtca

SEQ ID NO: 224909 - DNA, 583 bp, Homo sapiens
agaagtgacagcaattaagcataattcaaaagaaaggcaaaggagatgggatttagagcacagattgtggggttgccattattaatataagagcactattttcctaaatctttctggcttctgattgaagacatccattaactcaaaaagctgatttgtctccctcaatctgcatacatgtttgcactcaccaaggctaacactcacctctaaaatgaaatgtagaaaatagaagtcattctcagaaagatcttttactatttcttcttaaaataacaattaccaccagcactagtaccaatacaacaaaaatcgaaaccaagagtaccgtgtaaaaaatactttcacatagtttatttcatttggacttctcattaatattcccagcactcttctataagacttgtttctaagtgattaatygcatgttattaaaatgcttcttacatgggattgcctctagaagaaggctgagtggattaaatccccaccttagtcttgccaattctttcttaacaggtatcttaatccattttgtgctgctagaacggaataccacgggctgggtgattataaacaatag

SEQ ID NO: 224910 - DNA, 347 bp, Homo sapiens
ttcttaacaggtatcttaatccattttgtgctgctagaacggaataccacgggctgggtgattataaacaatagaagtttaattagctcatggttttggaggttagaaagtctaagatcaaggagccccatccagtgggagcctccttgctacagcataacatggtggaaggcatcatgtggtgaaagggcactcaagagactgaggaaagggatctcagccttttatgaggaatccgcatctaccataactaaccyactcccaagataaccatgttaatctattcataagggtgaagccctcatgatctaatcacctttttaaagtcccacctcttaacactgtgg

SEQ ID NO: 224911 - DNA, 469 bp, Homo sapiens
ctgcctttaatctgggcggacaccatctaagcagctgccagcatggctagaatataaaacaggcagaaaaatgtgaaaagactagactggcctagcctcccagcctacatctttctcctgtgctggatgcttcctgccctcaaacgtcrgactccaagttcttcagttttgggactccgactggctcttcttcctcctcaggttgcagacggcctttcttaggaccttgaggttatgtgaatgaatacttaataaactcccctttatatatttatctatcctattagttctgtccctccagagaaccctgactaatacatactgaaaaaattaaaatccagagatggcactgggtatagaaaaggaacaggctgaaacagaacacagttcaaagtgacaactgaataaaaaatatacttttttatgttaatacccagcagcttttggactattaaataaacctgttact

SEQ ID NO: 224912 - DNA, 505 bp, Homo sapiens
tgtgttaaatgtgactaatttcaatattagatatgtggctctcatcacaagacccagtatgaatgcagcagaaaatacctttaaagctttgtgcagtatcagatgtttaccatgagttgaagaaaggatctaaagtcacaagactggtgttaaatcagtaggctggactaacttgtagtatgaccttaagcaaaaacttgatctcctcttcttttcttyagttttcaaagaaaataaaatcttcttaatgacgttgttatgagggtgaatgagagaactcctaagaatatggtttgttaacagtgaaggctgcatgcatattaatggttactcaaaccattatgaaggcacaacttttccccatttggcccaaaagtgtaagtcttatttggtccaactccttcattatctatgcctgattcattgcaagcactgttataaagcactctcattataaagcaaaagttttttcttttctcgccaatgcctcctaagtttatttcct

SEQ ID NO: 224913 - DNA, 496 bp, Homo sapiens
ttgctagaatgattggtttagaaaaggcataacacctaattggatcaataataaactcttggaaagactcattcttttcttttcttttctttttttttttgagatggagtcttgctctgttgccaggctgcagtgcagtggcgccatgttggttcactgcaatctctgcctcctaggtttaagtgatttcccctgcctcagtctcctgagtagctgggattacatgtgcacaccrtcaagcccggataattttttgtattttttagtaaagacggagtttcaccacattgaccacaatggtcttgatctcctgacctcataatccactcgcctcggcctcccaaagtgctggaattacaggtgtgagccaccatgtctggccggaaagactcattcttaaagtctttccccctcattccttgaagatgtgaacatttaggcagttggttcactattcctctttctgaccttacacctaattaagtattggcaaatt

SEQ ID NO: 224914 - DNA, 496 bp, Homo sapiens
ttgctagaatgattggtttagaaaaggcataacacctaattggatcaataataaactcttggaaagactcattcttttcttttcttttctttttttttttgagatggagtcttgctctgttgccaggctgcagtgcagtggcgccatgttggttcactgcaatctctgcctcctaggtttaagtgatttcccctgcctcagtctcctgagtagctgggattacatgtgcacaccgtcaagcccggataattttttgtattttttagtaaagacggagtttcaccacattgaccacaatggtcttgatctcctgacctcataatccacycgcctcggcctcccaaagtgctggaattacaggtgtgagccaccatgtctggccggaaagactcattcttaaagtctttccccctcattccttgaagatgtgaacatttaggcagttggttcactattcctctttctgaccttacacctaattaagtattggcaaatt

SEQ ID NO: 224915 - DNA, 496 bp, Homo sapiens
ttgctagaatgattggtttagaaaaggcataacacctaattggatcaataataaactcttggaaagactcattcttttcttttcttttctttttttttttgagatggagtcttgctctgttgccaggctgcagtgcagtggcgccatgttggttcactgcaatctctgcctcctaggtttaagtgatttcccctgcctcagtctcctgagtagctgggattacatgtgcacaccgtcaagcccggataattttttgtattttttagtaaagacggagtttcaccacattgaccacaatggtcttgatctcctgacctcataatccactcgcctcggcctcccaaagtgctggaattacaggtgtgagccaccatgyctggccggaaagactcattcttaaagtctttccccctcattccttgaagatgtgaacatttaggcagttggttcactattcctctttctgaccttacacctaattaagtattggcaaatt

SEQ ID NO: 224916 - DNA, 565 bp, Homo sapiens
tggtgttctctgtatttcctgaatttgaatgttggcccgtcttgctaggttggggaagttctcccggacaatatcctgaagtgtgttttccaacttgkttccattctcctagtcactttcaggcaccttaatcaattgtgggttttgtttttcacacaatcccatatttcttggatgcgttgttcattccttttcattcttttttcctctaatcttgtcttcatgctttatttcagtaagttaatcttcaatctctgatatcctttcttccgcttgatcaattcagctgttgatatttgtgtatgcttcaggaagttcttgtcctgtgtttttcagctccatcaggtcatttatgttcttctctaaactggttattctagttagccattcctgtgatctctcccagtcaggaagcatgggggtcagggacccacttgaggaggcagtctgtttcttagcagagctcaagctgtgctgggagaatcctccttgtcaggatcagctgctctcttcagaaccagcaggcaggaatgtttaagtccactgaagctgtgcccacagctgc

SEQ ID NO: 224917 - DNA, 605 bp, Homo sapiens
tgaattgtaagacgctctaacttcaggggtgtaaaataaatcagaacaaattaattagcacattctaccacaattagatttaagttcagtgttctgggtaaggaaattcaatacaacagtatgtgttcaattaggcatgtagaagaatactgaaatgaattagatcatctgcttggtcttaatttagtgaaagagatagatacacttacttatgtccataggaatgtgtggcatttcactttacttttcccattgagtcaactactagttcattagtccatgaccagatggaccactaagagtccgtcctttctgtccctctctttgctacctttatggttctgtccatatttttacccatcttttctcccctttttttttctggtagccagggaatcagaacaaaattggttcaaattccagctattttctgcctcaggagctacagctctagttcctgagctctgtcccagggtgctctggggcacagcagcaaattcacagaagcaccatttcaatgaaagttttaaacttttgaggaaaacaggacagcttctgttggacatcatgtgaaygactgtttgaatatcagagagtgctatgtt

SEQ ID NO: 224918 - DNA, 508 bp, Homo sapiens
catgagcagggtggtctaccactgacacacatacacacacacacacacaygcgtgcacacacacacacacacatgctcttccccaacccaagttttaagaaaaaagattgttagatactatatggtctatataaagaagaggaaattcattttgtcaaatgctccatactctattaggccacttctttccacaatggcaatagtaatttgtgtttctatagagacagctgtggttctttttgtttatccttagcccctacaccttacctttgaaattgtgacctagtggtagaggccaactatctgtttaacaaagttatttccttatcttcttggcctcatagttatttccatatttctgagcctctcttacagttaagttatagcaacgtgactgaattctggccaaagaaatgtgggcaaaagtgatctataccatttttaggcttggtccctagagctcttctataaaatttttcattctctctcttgttccctgctaattggg

SEQ ID NO: 224919 - DNA, 506 bp, Homo sapiens
tgccattggtccagtgccctgcctcagaactatctagcagttaggaaagaaaaccacaggggaagggaatgacgaaagatacggaaatattaaatagacaacagtttaaagcatgtggaccacaatgagaaggtgtcactcagtatgaagtgttcatctagaaaaaaatcactattatccatttcygtaattatatcaatacagaataaagttaagagattcaagatcttatgcctggcctgtagaaagaactgaaggtgtaccccttcagtgggaaaaaaacttgtttaggttatttcagaggcatcataggattgaggagtgacataatccctttcttggaagagtctggctggattttgtgccattttcggaaagtgtgggtgatgcaccaagaatgacagactgcttggaaaaagaactatgtggaaacctcctaacccccttgagttttatctgaggaatatcaggagggcaaaaaacctctaggcattaatgtacaagtt

SEQ ID NO: 224920 - DNA, 506 bp, Homo sapiens
tgccattggtccagtgccctgcctcagaactatctagcagttaggaaagaaaaccacaggggaagggaatgacgaaagatacggaaatattaaatagacaacagtttaaagcatgtggaccacaatgagaaggtgtcactcagtatgaagtgttcatctagaaaaaaatcactattatccatttctgtaattatatcaatacagaataaagttaagagattcaagatcttatgcctggcctgtagaaagaactgaaggtgtaccccttcagtgggaaraaaacttgtttaggttatttcagaggcatcataggattgaggagtgacataatccctttcttggaagagtctggctggattttgtgccattttcggaaagtgtgggtgatgcaccaagaatgacagactgcttggaaaaagaactatgtggaaacctcctaacccccttgagttttatctgaggaatatcaggagggcaaaaaacctctaggcattaatgtacaagtt

SEQ ID NO: 224921 - DNA, 565 bp, Homo sapiens
tctctttgccgggctcagccggggccaccttacagtaatttttttttctctgaattcctgtaaaatttgaagtctatgttcgctaatgtaataatggattaaaatgtgctttgggtttttttttttgagctgtttcaaggactatgtcttatatcgttaactggctctaaaagttctttaaggcaagagccagatattctaaataaatctaaatttttcttatctctaacatgataaagaattcctaaactcttgtctcgttctatagttttgtcatgtttctggctgtgttagaacatgcagcaaagctctgggaagaaatacgtscttaataaatatcagtaggtttgactcgtcctgaaatcctgtgaaataaaccaaagaagagaatttctgccatttgattagggattttggaagcgtagagtcattgtaggttttaagctcctatttcccatcatggagaaatgaaagatgaaaatcactgtgttgaatgaacttatcagtcactcagcatccctatgtagtttcaacagctttgtcaacagctcaggggagcaggact

SEQ ID NO: 224922 - DNA, 613 bp, Homo sapiens
actgcagaccatagaaaaggaacaaaatcttcctgactctataatgttagcatagctttaatacaaagaaaagacaaaaatagttttctatataaatatagttacaaaaattctgtatagtatatagctactgattccagctgtatagtaaaagaacagtgtagcacgacctagtagagtttattctaagaccataaggatggttcaatattaggaatctatcaatgtaatatatcaacacattaaatttaaaaagctgatgattatatcaacagatgcctaaaaggtatcataaaattcaaaagttatttytaataaaaattccaagtaattcagaaataaactatttagaaatgatagattttttttttttttggccaaaattcaacagtaaacatgataaaaaaaaaaacaacaactatgaaatgctggagctatttccattaaaatgagaactgatttgtcattaaacataatgtgtagtgaagttgatcacacctttcaacccccactggtctaggacattcccccggtgtggcaattgcaagaatgtatttaaacatcattgtcccatttgattgtgacttcctagaggcaggtatatgccttacaa

SEQ ID NO: 224923 - DNA, 589 bp, Homo sapiens
tttgtgaggtagaaatgttgggagagggcattctaggtaaggggaacagcataaaaaataagtcatgaactttatattccatactctatacgggtctctgtctacaagccatgactacatgtatgtgtttaagttgctgtgtaagcttstgaaacttgtggaagaaatcaacttaatactccattagataagcactgtcagaggctagtcaagatcttttgtggttccaaacaaatttaaagcaattctgaacagaaagctggagatatcatactaccagacctcaaaatatactacaaagctgtagtaatcagaacagtatgatactggcattaaaaacagacacatagatcaataagacagagcaggaaagctggaaatttatccacatatctacagccagctgatttttgatgatgctaccaacaacactcactggggagaggatagtttcttcaagaaatgggaaactggatatccatatgcagagaataaaactaaaccacaacctcttaccctatacaaaaatcaactcaaaatggttcaaaaacctaaatgtcagactaaaaataacattagcaaaagaaaa

SEQ ID NO: 224924 - DNA, 511 bp, Homo sapiens
tctcctttgttgcttattattgtttatttattgtgtacatagaactatgytagtgtaaatatatttatataagctacctcttaaaatgagcaagagccaattgttaaaacattaagaaattttgcaaggtagttattaaactgctggtagcttgaaattgtccagggaagagtatttacaccactaaaatagtccaaccactcaaatagtcaaacacacacacacaaaatcactactctttctgtctttgttttttttgtgtggggggcggagccagtcccctagcacaccacatgtatatgtactcatgcaagagtgagagtgtgatgaggggagcagagcatataggagcttcaaaagttcatggaagatgcatattgtggaaaaattatgcatacatttcaaatttttttccaccaaaataaacttgaactaacttgttatgacatgtctgcaaagggcctagcttgaggcactaagaaagataagacataagtttgaaaagagtccc

SEQ ID NO: 224925 - DNA, 478 bp, Homo sapiens
gttagatcaattttgacgaactcatgcacatgtgctgcccgcacctccrctggagaaccagaattagaatcatgctcttggctacaaatgcaaaagtacagaaagcataatgcccactgggatttcagcttccatttgggaagaccttcctttctctgaaggtctggtccccactccctgaactggcacatggtatcacctcccctttcctttcttcttttgtcccattccaagaacctatattatttttgagccggagttcagatgtcttcctagtttagtcagggttgtctaggaaactagaaataactgcagattccaggctctacagatcaggtgatccttggctcctctcttcagagccatgttaattcctgccatccttttccagcgttctctgctttttcctgccctcacattactgggatcacccccaccttacgcagtttactttcagctccccagcagaagcagatct

SEQ ID NO: 224926 - DNA, 478 bp, Homo sapiens
gttagatcaattttgacgaactcatgcacatgtgctgcccgcacctccgctggagaaccagaattagaatcatgctcttggctacaaatgcaaaagtacagaaagcataatgcccactgggatttcagcttccatttgggaagaccttcctttctctgaaggtctggtccccactccctgaactggcacatggtatcacctcccctttcctttcttcttttgtcccattccmagaacctatattatttttgagccggagttcagatgtcttcctagtttagtcagggttgtctaggaaactagaaataactgcagattccaggctctacagatcaggtgatccttggctcctctcttcagagccatgttaattcctgccatccttttccagcgttctctgctttttcctgccctcacattactgggatcacccccaccttacgcagtttactttcagctccccagcagaagcagatct

SEQ ID NO: 224927 - DNA, 500 bp, Homo sapiens
attgctcaaagaacagtcgctggaatcagactctggcttcaatacatgattggctattatcagacaagatgttggaagagtaatttaacatatttttgcattaatttcctcatatgaaaaatagtatctaccactagggacatcttaaaagttccatgagaatatgcaagtggaacacacagtaagtgctattccacaaatgtttactgaactcctcttatgtttcaggtgcatcttagtcacttggagcacacatgtgaattaagatagatctctaccctagtggatcttgtattataccacrttttagtttatattgtcattatttctattgctatccttatttttataaaacctagcacagagcctgattagtagatgctaaaaaaatttgcttgaatgaatattcaactaaaactgtgctgatgataaacagcacctgtgagtgaacagaataagggtaaatgctttggaaagttagaaaattctacaaaagagac

SEQ ID NO: 224928 - DNA, 500 bp, Homo sapiens
attgctcaaagaacagtcgctggaatcagactctggcttcaatacatgattggctattatcagacaagatgttggaagagtaatttaacatatttttgcattaatttcctcatatgaaaaatagtatctaccactagggacatcttaaaagttccatgagaatatgcaagtggaacacacagtaagtgctattccacaaatgtttactgaactcctcttatgtttcaggtgcatcttagtcacttggagcacacatgtgaattaagatagatctctaccctagtggatcttgtattataccacattttagtttatattgtcattatttctattgctatccttatttttataaaacctagcacagwgcctgattagtagatgctaaaaaaatttgcttgaatgaatattcaactaaaactgtgctgatgataaacagcacctgtgagtgaacagaataagggtaaatgctttggaaagttagaaaattctacaaaagagac

SEQ ID NO: 224929 - DNA, 581 bp, Homo sapiens
atatattttggggtaaatatgtgaggatatatacatgtaaacaaatctgaaatctttagagcagacaaccgagaagggaaattacaagtgggatggagtcccaatctaaaatgtgttgtttacaggcagtgttctcttaactcagagaaggcctaaaccctcttttaaagactgcacaactgattaacttatagttaattgatcagatactttaatcacatctgcaaaactctctttaaagtagcaactagtttattgttttattgaataactagaagaaggtataygcatgctacaaaatgacggcttccttccaatattcaacttttgcaagagaacatcccttgaagctcagtttaactgtaaaagtagtagaaagggaactctggaaactatagtatagaagagcaaatttgatacatcaaaagccactgcagttcacctgttctcaacttgacatctataaacatatcttaaaacctcactgaatctccaaatacagacagtaacagagttatacttctgcataatatgatacaactatctcatgttcagtcaaaaataggctaagctgttctcca

SEQ ID NO: 224930 - DNA, 218 bp, Homo sapiens
ttgcttcaatattttgtgatatagcaatctgcttctaagttgtttatttaactacattgtttgaatggctatcatagccaaaataggtattttacaaagaaatatggatccagaagggaggcttgcatcactgactgcatttctaaatcrtaacactcactactcaaatccattgtccagttattcaattgttcaggcatactgtacagtttttttaa

SEQ ID NO: 224931 - DNA, 602 bp, Homo sapiens
tatcaacttgttgatgaaaagagtcaaaatctgaaaatatttgcagacatttgttctgagccaattatgagtgaccaatggcatgcaatacagcccccagagattctgagaacctgtggccaaggtagctgggctacagcttggttttatacattttagggagacataagacattaatcaatacatgtaagatgtaaattggttcggtccagaaaggcaggacaactggaagcaggagcttccaggtcacaggtggattcaaagactttctgattggcaattggttattaactgaagacctggaatcaatagaaaggaatgtctgagttatgataaaaggttgtggaaatcaaggttttatcatgcagatgtagcctccaggtagcagatttaagagagaatagattgtaaacttaacagacttatagagtctgttctatcagtcttaaggcctttgttttaatgttaatgctatcagctgtgcctgaattccaaaaggagaagggtataatgaagcctgtctgatcyccacttcccatcatgggctgagctagtttttcaggctaactttggaatgcccttagccaaggggtgtgtccatc

SEQ ID NO: 224932 - DNA, 402 bp, Homo sapiens
ttcagctggaaggaagctccatttgtctctcttcctacctgcagagacactgctaccttcagaactcagacagaggatgactctgtgctgatggcagccaggtgccttcgtaaattctcagagaggacttattccacgtcctgtgtatctccagcatgcagaggtgggtgtgtgtgcacgcacgtgtgcatgtatcatctgtttacatgtgggcaggctgacctgaagatgcatctcagccctgagrgtccttgcctgagccaggacagggaggtaatggtaaatggcagaaaccctgtggatagaagttatgagcctttgctcttaggctgtgggaggcactacttagagatgagtgcaagatgatgatgcgttttggtgagggtgttgtcagcagttctt

SEQ ID NO: 224933 - DNA, 639 bp, Homo sapiens
cttcccccagttctgtcatcagctctacattactccttcttcctctagtttttataatcacagtaaattgtataatcagacacatactgttcaagccaggatattgtagtcatactcaatcctttccacgtccttaaataggacaataatatttgtcctagttccgatttggtctctttttcctagttgagaccagcatcaaccctgatttgactgttacaaaatcccaataactgttttacttattttctcccttgcttctcttaagtttattctccatacagtagccagaatggctttaaaaataaacaaagacaaacaagcaaacaaataatgaatttgattatgctgctatcttggtaaaattttttttttatttccactggaatattaaaaaatttccactttatttttatttcaactagaatgaaactaattgttaggacatgttaaaccgattctaagaggatgaaaatctttgttttgtcatgcttggtttaccaatttcctgtgtcaaaactcactgatttcaagcaatcaacatgataccacwggaaggagatgtgtagtagcataccattgtattgtatttccaccctacagacacaatagatgtcaagtgtctattgtggtaataga

SEQ ID NO: 224934 - DNA, 420 bp, Homo sapiens
tgaatgtgaagccttaggacattattgtacgctactgtggacgttataggcactgtacacttaggctatattaaatttattaaggaatatcttttctttagcaataaactaacctgagcttactgyaacttttttactttataaagtctttaatttaactttttgattccttaataatagcgcataaatataaatacattgtacagctgtacaaaaatattttctttctttatatccttatttcattagcatttttctatctttgttaaattttttaacttttaaaacttttttgttaaaaattaagacacaaaaagacacatgagcctaggtcttcatagagccaagatcaggatcatcactatcaggtcagtcagatgccaccccgctatttccttcttcatttttatagatgcccag

SEQ ID NO: 224935 - DNA, 509 bp, Homo sapiens
taatttaacagatagtgcttaaggctacatttcccaaaatcaggtctgttatacaaatgcatcagaaatacctttaaatctcttaaaatgcagattcctgggctaactgtatgacacattgaatcataatgtatattttaagaaaakatttagtgtaaaaggatctaataatttccagaataaaataatgaacgagaatatgtgccaaaatagtgaattttatggttatagagattctactgtttaaaaaagtaaattaagcaagagctgaattaatttcaagtctgattttgtttttcaaggctactgcatagatgatactgtatattttctattctagcatactaaaaggcataaaatgctttggtttttttctgatttggattttgttaagttggatctgtgatttggatgttgttatgataaattctgaattaaccatcacatagtggttttaataggtattgatggttgttgcatacatgcattatttctccaccagaaaaatc

SEQ ID NO: 224936 - DNA, 413 bp, Homo sapiens
aaaccatatatgtatataaaacatgagtttttaatggaaggcttggcaatattattactgaatgttctaagtttaacctaaactatccctgttgttcctagtggcaggcctggggtataggtgaagaagagagaaaagggcagaaagaggcgtgtgtgtgtgtgtgtgtgtgtgtgtgtgtgtgtgtgtgcgtgtgtgtgtgtgtataggaggtgtgtaggtggttgttgctgatggagacagtgaaggaatgagcactcattyatccattctactagtatttatttactgagcacctattatgtgtcagacactattgtagacccaggagatagaggagtgaaccaaaactctttgtcctcatggatattatttaaaatggaaggtggtagagaataaacatattgtagtct

SEQ ID NO: 224937 - DNA, 547 bp, Homo sapiens
gaattcttatagatacctagcataagcactgtgagcctgtacctaatccrttctaccagaaggaaaaatataaacagatagcaattcacctggtatttgcagatgttgagccctgaggaagcaggaagagtaacctggtctctcttcagccacccaggatgagagatgaatgtgagctgttctgagattgtgaagtttgagaagcaaatctccctccccttaaagattagagaagactttcagatatatctagccacttactcaaggataaaaattggttttgccagaaaaagcaaagatttcctctatcaggaagataatgttcagatctgaaagttacacctaccacacatttgagcctggccgtgatcagttcagatcgaggacagacaggaagcctaacagagcagttagagaaatgcgcttcctgaaacatacaagagtctctgccttggagagcaaactttagcttctgagcaaaagttcagaatctgcaagacaaagggagaagagtagcatcagtctttaggattttaaatataaaaga

SEQ ID NO: 224938 - DNA, 579 bp, Homo sapiens
tatagatacctagcataagcactgtgagcctgtacctaatccgttctaccagaaggaaaaatataaacagatagcaattcacctggtatttgcakatgttgagccctgaggaagcaggaagagtaacctggtctctcttcagccacccaggatgagagatgaatgtgagctgttctgagattgtgaagtttgagaagcaaatctccctccccttaaagattagagaagactttcagatatatctagccacttactcaaggataaaaattggttttgccagaaaaagcaaagatttcctctatcaggaagataatgttcagatctgaaagttacacctaccacacatttgagcctggccgtgatcagttcagatcgaggacagacaggaagcctaacagagcagttagagaaatgcgcttcctgaaacatacaagagtctctgccttggagagcaaactttagcttctgagcaaaagttcagaatctgcaagacaaagggagaagagtagcatcagtctttaggattttaaatataaaagatacattagaggaattatattttaagcatttactatgtgt

SEQ ID NO: 224939 - DNA, 248 bp, Homo sapiens
gaattcttatagatacctagcataagcactgtgagcctgtacctaatccgttctaccagaaggaaaaatataaacagatagcaattcacctggtatttgcagatgttgagccctgaggaagcaggaagagtaacctggtctctcttcagccacccaggatgagagatraatgtgagctgttctgagattgtgaagtttgagaagcaaatctccctccccttaaagattagagaagactttcagatata

SEQ ID NO: 224940 - DNA, 424 bp, Homo sapiens
  misc_feature (1)...(424): n = A,T,C or G
gttctacagaccctagaatggtagatccactgacagtttgcaccatgcacctggaaatgctgcaggcactcaatgccagaccatgaaagtagctgcaggggctgtatcctgcagatccacaggggcagagctgcccaaggccttgggagcccacctcttgcacagggatgccctggatgtaagacatagagtcaaaggagattattttggaattttaagatttgatggttgccctgttggcttttggacttccatggggcctacagcttccttgttttggccaatttttcccactntgaatgggactgtatagttctctttgtagagctcttttacctccctggktagttgtattcttaggtattgtattcggtatgtggtaattgtgattaggattgagtttctgatttggtttttgcttgac

SEQ ID NO: 224941 - DNA, 419 bp, Homo sapiens
atcttagttcattagttccagctctttcacctggctatctctagtcagccttcttgcccagttcctgttttgttttgcgttgttttgttttaawgtctctctcattgatgtttccagcttgctggcttcttcagccccatttataggtatttgaggcaaaaaaaaaaaaaaaaagtaaaccaggaggaagctcatcattatgtagtgtattaatcaatttttgcattactaaaagaaatgcctgaggcttggttatttggctcacggttctgtagggtatatgtgaaatgttatgccagtatctgcttttggtcagggctttaggaagctgacaatcatggcagaaggcaaaggagagccaacacattacatggtgagatcaggagcagcaaaaaaggaggaggtgccacactcgtttc

SEQ ID NO: 224942 - DNA, 419 bp, Homo sapiens
ataatgtgccaatcatcttagttcattagttccagctctttcacctggctatctctagtcagccttcttgcccagttcctgttttgttttgcgttgttttgttttaatgtctctctcattgatgtttccagcttgctggcttcttcagccccatttataggtatttgaggcaaaaaaaaaaaaaaaaagtaaaccaggaggaagctcatcattatgtagtgtattaatcaatttttgcattactaaaagaaatgcctgaggcttgkttatttggctcacggttctgtagggtatatgtgaaatgttatgccagtatctgcttttggtcagggctttaggaagctgacaatcatggcagaaggcaaaggagagccaacacattacatggtgagatcaggagcagcaaaaaaggaggaggt

SEQ ID NO: 224943 - DNA, 508 bp, Homo sapiens
atttaaaatcatatacaatttctaacagaatacttattatttttctcaacagagatctgtgagaattaattcatctttctatgtaataatctcctatgcagatgctgagtaccctcatgttcattgagggtaatgtttttgtattcattgccmcttctgcttctgaaagccattgaatgtgcatttcatgtctgatactgggcaagctatggtctgaaattctcctgaatagtggcttctttcatgttctgcctgcagtaggaacaatgtgataggtgagtgttggttgtatgagggtggaaaacatcttcaatgacatttatcttattgtttttctaattatgtatgtatctttatgtgatttttatatgtgtatataataaaatatatcaattttatctgtgtaataatgtatatatctatttgttcccttatagtataagctcctcgggagcagaaattttgttttttctgaatatctgcaatacacagcaaaaatcatgtgcat

SEQ ID NO: 224944 - DNA, 354 bp, Homo sapiens
ctaagcaaagcatcactataattcaatattagaatacrgaatgataaaataaaagacatagatgtatgagacaaaaaaagcctaggtttaaatccaggtgatgactcctgtagttatatgtcctcacgacttatttcaccttcaggagttcttatattaaagtaggaataaagttattctactgaatggctgtggtaaaggttagaaatatgtcttttggaggacataaaatgggtcctgacacagagtagggagaatcaaagaatttagaaacctcagctatcaccatagttattatgatcaaggttatatcaagctcttttgagaatttacctaagtattattgatacagta

SEQ ID NO: 224945 - DNA, 577 bp, Homo sapiens
ttttataattaaaagtaggctgtcttatcttaggccaaatatagggataaaacaataattactaattaatataattttctaatagaattttttacgttgtttgcccatgagttgtgtgatmtgtgtttgcaagttttgcctggatataaaagcatatgagtggagaagtggtaggatggcttgcagggaatcagaatcaaggatactttatttctagtggatctaagtttgttcaaaggaagttatggacaaacaattgaggagaaaagaaaactagttaaaaatacattatttataatccacaaaggaacaaagctagacaaaaacaaaacaaaacaaatacaacatgggcataagcaggaagaattaaaagtcttttcattttttccttttctctcctcatactactattaagcagtgagtttctgttcaaattcaacactctttcaaaaaacaaatggtgtatttcaggtttgctctttattcttcttttttcattaaaatagcacacattcattgaatgtctttttttttttttttcaaacttcctggaatcaaggccaagggttgacattta

SEQ ID NO: 224946 - DNA, 508 bp, Homo sapiens
gtttgttcaaaggaagttatggacaaacaattgaggagaaaagaaaactagttaaaaatacattatttataatccacaaaggaacaaagctagacaaaaacaaaasaaaacaaatacaacatgggcataagcaggaagaattaaaagtcttttcattttttccttttctctcctcatactactattaagcagtgagtttctgttcaaattcaacactctttcaaaaaacaaatggtgtatttcaggtttgctctttattcttcttttttcattaaaatagcacacattcattgaatgtctttttttttttttttcaaacttcctggaatcaaggccaagggttgacatttacagcgataagtgatccaagtgctacattagcatctatttattaaagatgatctttcctgtacagtacagctaggacatttggcctaatttactatactaacatttccaatttggctttgagtagggagttgtgccaacagagctctgtcctatggtg

SEQ ID NO: 224947 - DNA, 577 bp, Homo sapiens
ttttataattaaaagtaggctgtcttatcttaggccaaatatagggataaaacaataattactaattaatataattttctaatagaattttttacgttgtttgcccatgagttgtgtgatatgtgtttgcaagttttgcctggatataaaagcatatgagtggagaagtggtaggatggcttgcagggaatcagaatcaaggatactttatttctagtggatctaagtttgttcaaaggaagttatggacaaacaattgaggagaaaagaaaactagttaaaaatacattatttataatccacaaaggaacaaagctagacaaaaacaaaacaaaacaaatacaacatgggcataagcaggaagaattaaaagtcttttcattttttccttttctctcctcatactactattaagcagtgagtttctgytcaaattcaacactctttcaaaaaacaaatggtgtatttcaggtttgctctttattcttcttttttcattaaaatagcacacattcattgaatgtctttttttttttttttcaaacttcctggaatcaaggccaagggttgacattta

SEQ ID NO: 224948 - DNA, 530 bp, Homo sapiens
tatgccatggaacctatccctagaaaaatgcgttatgcacaaatccacaaacttttgcctgcagtttcaaaagagtcaccggctcttaaattaaaggagatataacacattttaaattctttcatatatatggttgttragttttgaacactttgttaacagttaggctcttttgtatccctaaggatatattcctacttctgaatattttacttttcaccatttcaagttcataacatcacactggattataaaacaaagaaatatgtacaataattgtagcccatgtaatgggtaatggagtataagtattaataattccaataaattccatgttgggacaggtgtgattatccatgtattttttgccccttttttttttttttttttttttaccttaatcagaatgtgttatttcctgattgctttgatggcttttcccaggcttacctggtttgtgacaaccggctgctaaaatcaacaatcatgctgatttcttttagtttttcacgagtgtgctttcttactag

SEQ ID NO: 224949 - DNA, 494 bp, Homo sapiens
ccaactgatctttgacaaagcaaacacagacataaagtgggggaaaagacacccttttcaacaaatggtgctgggataattggctagccacatgtaggagaatgaaactagatcctcatctctcaccttatacaaaaaccaactcaagatggattaaagacttaaacctaagacctaaaactataaaaattctagaagataacattggaaaaaccctcctagacattggcttaggcaaggatttcatgaccaagaaccccaaagcaaatgcaataaaagcaaagataatagctgggacctaattaaactaaagagcttttgcacggcaaagggaacagtcagtagagtaaacagacaacccacagagtgggacaaaatcttcacaatctatacatctgacaaagsactaataccagaatctatgacgaactcaaacaatcagtaagatcaaaatcagtaagaaaaaaacaatcccatcaaaaagtgggctaagg

SEQ ID NO: 224950 - DNA, 509 bp, Homo sapiens
caggtaggacagactttcctacactcttgcttcccacacactcagctctaacccactttgttaaaatacaaactttttcatgtttctaagttgtcacaaaaccaccagcatgagggacactaacacacacacaaggctgagaggagtcatgtgggtcatgtgaggaataggccgtgcatcagctttggtctgtcgtctcccaacaatgcatcttgatgagataagtatatgaagctcygattaggttcaatattttagtcaaatgagctgtttacctccactccccaatgtgtcagtgtagacgcaagatgacttggatgaatatgttagaaactttgagtttgcaggggtgctttcttcctgagaatggcaaattagggctgctctgaaaagttaccctagttttgttttcttgttaggaacattcaaatgagcatgaagaaagagcaaatacttaccagtggtaatttaaaaatgtatatatatatataaaaattagctttattgcc

SEQ ID NO: 224951 - DNA, 597 bp, Homo sapiens
cctccctcattctgcaaatcaaacaaacaactcaaagctctcattaaattgctgtcttacaatcaagggaataagatgatattttctagttcctcactcctgtcccccagagacaccttttctgcttattagctgggtgagaagaaatcatctactttaaaatgtcctactgagggttaagcatccttcccaagaggatgctaccaactctggaatcacccatatataagacatgtctagactatttccatcagctgaggccctttcttctcctgaaaattgagattcatctgagtaattctcacatgtgcatgtcctctgccatccaactgtcctcctcagaggcttcatgacagaaagcagcgagggattaatttttaacaacccagcctggttttatgacggtcaacattattattttttaatgtacaaatagtcctatgatgattccattacaagtagaagtgcaggcactttggtagattggtatatttatccttaacaaaamtaaatatggatacaaaaatacagtgaatgaaatctagtattgaataagatctagtattcagtagcacaacagagtgaccatcgtttgca

SEQ ID NO: 224952 - DNA, 605 bp, Homo sapiens
gcagtcatgtcatttgctttcttattctatttttgttgcacagatgtgaaggagttttaatgtatttcatattcctgctaacaataaagaaaaataagatgcaccaaaaaagaatgagcccacaggacatctggtactctcacctcatttaaaaaaaatatttaatacaggtgtttgtattccaaccattctatcatattccatttaatttacagtcaaggttccccaccaaaccgtcttaagccataagctgtgtctttcatcgtctcataatgactttaacatagactctgtgaaataagcaatttttgccatatgactttaggatcgagtataacactagaagggactccaagaaatatcggggctattaccttgtgtcccagtatagttgaatcagatatggacatgtcatttactgtcttattcatagaattcttcttgaaatctaatttcaggagaatttctagtaataattaataatagaagtccagggccagaagcaaagagagaaaaaaaattatagcaaaatttgcaactcaaaaagtttttttytacatcatacttcaggacagtagttaacaaaaaaagcttaattggacaaa

SEQ ID NO: 224953 - DNA, 568 bp, Homo sapiens
tgggtgagtcctagaccaggaggcattcatgacaagctaactgaagagcccttgggccttaagagaacattggcagttgtctggcaatattcatcgtgggcccgaggtggcagtggcctgaaggtgagacttttctgcctttggaaaggggagagaagagtgggaagaaccgtgtcttgtggtttgagtgccatctcagaagcagtacaatagaataccaggtggacttctaaggtttttgactctagcctggatggcacctctggacccacccagggcctagaggaacttgacgccctgaagggaaggagataggcctggctggctttgccacctcctgattatagagccccagggcttttagcatacataactggtagccagggagggattacagcagggcttgggtaagacccartgctgtgttggctttatgtgtgatccagtacactcctagggatggtggctacagggggtgcttgtgtcactccaccctcagctccaggtggctcagagcagaaaaagagattccatttgtttgggaaaaagtaagagaagaaaacaaaag

SEQ ID NO: 224954 - DNA, 568 bp, Homo sapiens
tgggtgagtcctagaccaggaggcattcatgacaagctaactgaagagcccttgggccttaagagaacattggcagttgtctggcaatattcatcgtgggcccgaggtggcagtggcctgaaggtgagacttttctgcctttggaaaggggagagaagagtgggaagaaccgtgtcttgtggtttgagtgccatctcagaagcagtacaatagaataccaggtggacttctaaggtttttgactctagcctggatggcacctctggacccacccagggcctagaggaacttgacgccctgaagggaaggagataggcctggctggctttgccacctcctgattatagagccccagggcttttagcatacataactggtagccagggagggattacagcagggcttgggtaagacccagtgctgtgttggctttatgtgtgatccagtacactcctagggatggtggctacagggggtgcttgtgtcmctccaccctcagctccaggtggctcagagcagaaaaagagattccatttgtttgggaaaaagtaagagaagaaaacaaaag

SEQ ID NO: 224955 - DNA, 458 bp, Homo sapiens
aaaaacctagactgtaaagactacaataaatacctaacacttcaatccccagacacagatgaacatctacaaagatgatccaggaaaacatgacctcattagatgaactaaataatgcaccatggatcaatcccagagaaagagagatatgtcacctttcagacagataactcaaaatagctttcttgaggaaactcaaagaarttcaagataacacagagaagggattcagaattctatcagatacacttaacaaagaaattgaaataattaaaaggaatcaaacagaaattctggagttgaaaaatgcagttggcatactgaagaatgcatcagagtcttttaatagcagaattaatcaagcagaagaaagaactagtgaacttgttgaagacaggctatttaaaaatacagagtcagaggaaacaaaagaaaaaaagaataaaaaccaatgaagc

SEQ ID NO: 224956 - DNA, 609 bp, Homo sapiens
aatctggctccagagtagctgcttttaagcactacacaacacacctccttgatgacccccaaattatacctctacatcctgcgactcctttgaagtcaagatttgtacattgaaaatctttggtttgatcgttaagatgaatttcaaacttaacatatccaatccccccaatctcttcctcctatagcctccttcagtaaatggcccctgtctatgccagttgctcaagccatccctgacttctctctttctttcatttcccacactcatcccattagcaaataatgttagcttggcttctaagtataccaagaatccaactgcttttttcaccttttctgtagctactatcctaagtcacatcaacttctctcacctagattttcacattgactttataaactaaattccacatatgctgagactgtactatgtgctaagaaaaagcagccccacttccrtggccatgacatattggcccaagggtcagagtccaagccaatggtaattatgtaaaagtggacataagaaaggttaaatcccttcatccactaaggatgctccatgtgtggtgatgtacaccagcccaatcagatgataactttgaaa

SEQ ID NO: 224957 - DNA, 577 bp, Homo sapiens
tgatccaatcacctcccaccaggccccacctccaacagtgggaattacaattctacatgaaatttgggtggggacacgaatctaaaccatataaaagattgtcatgatcattatgctatttcttattttgtttttaattatttctattctgctttcttaagataatttctaaagatgttatggagtaataagcaggattaattttttaaaaatccaagtgctcatcctggattatccaatggaactggccccactcctactcctactargaaacctgcatccaatccttcccctagcagcaagggcttcaatttcctattggcctcaaagtctccaggtgttatggagctgttttcccaggattgctgcaaactgcagccgcctaaattctggcagcttggcaataagaagtcttcttgctgataagggcatttttgtgctcattccaaaaaaaaagtaagagcagtaggtgttgttgtcccttgactggagcactctggatctatcgagcccaaaatgcctctgcacagggtggtaacaggtctgctgcctttgtggccatgagttctggccaaaa

SEQ ID NO: 224958 - DNA, 600 bp, Homo sapiens
aatgaatgccaggtcactttacccaaggctgcagggtacccacagcagcacaggtgtctccctcacttccttcaggcctctgaacaagtgtcaccaaagagaaggtacagaatgcagtgagaaccatgacaatatttcattgcctttaatgtagaatgagtctttggaaaatatttgaatgtgaaaatttatcttgaaggtaacttggcaatatgtatcaagatcagtaatgtgcaggcttttgacacagtaattgcatttatcctacagataaattacatagttatatttgtaggataaataattacataaatatatgataattatttaacgtatatatttatctgtccatgtatacagaggtagaattacaaagatgttcaatgcyatatttttgtgattatagaaaacaacctaaattgcccaccagtaggcgaacagttaaatgacttcacaaccttaagaatgctaggccattatttcacaaaatgaggtaagtttatacatagcaacatgaaaacatatctaacttatatattaaatttaaaaagctagttgtagaattttatatctagtttaagagtcattgttttattgctt

SEQ ID NO: 224959 - DNA, 562 bp, Homo sapiens
taacagtaatgatttaaaaggttaaaaaataaaatgcaattgcattcaaggtgtatacattttgatatatttttataaaaaataagaaacatctagaatatcaaaaaattattttttcaggtttaaaaatgctgtttttctaaaatattcaacattatacgttaaaattaaaggcaagatgcaaataaattactgagtttcaaaattttaaatcaatattaagaaaatatgacrtttaaaatttggttttaaaaaatttaatgaattttattaaatatttttataaaaatgaaactttttcagttctaacatggaacgtccttctatatgccaatgaaaagaatcaccatgaagcttcacaaatgttaggtctggaagtaaatatatgaaaatttaagaataacataaattgtttcatactgcaaaatattgctcagatggcatacacaattactcaaaaaatgttgctaatttacgaataacttgctgatcttcaaaattaaaaatcagaatgcaagatgagtgaggaaaaaaagctcagacctactgggagtcaatacta

SEQ ID NO: 224960 - DNA, 562 bp, Homo sapiens
taacagtaatgatttaaaaggttaaaaaataaaatgcaattgcattcaaggtgtatacattttgatatatttttataaaaaataagaaacatctagaatatcaaaaaattattttttcaggtttaaaaatgctgtttttctaaaatattcaacattatacgttaaaattaaaggcaagatgcaaataaattactgagtttcaaaattttaaatcaatattaagaaaatatgacatttaaaatttggttttaaaaaatttaatgaattttattaaatatttttataaaaatgaaactttttcagttctaacatggaaygtccttctatatgccaatgaaaagaatcaccatgaagcttcacaaatgttaggtctggaagtaaatatatgaaaatttaagaataacataaattgtttcatactgcaaaatattgctcagatggcatacacaattactcaaaaaatgttgctaatttacgaataacttgctgatcttcaaaattaaaaatcagaatgcaagatgagtgaggaaaaaaagctcagacctactgggagtcaatacta

SEQ ID NO: 224961 - DNA, 454 bp, Homo sapiens
gggtaagttacttaacttctctgtgcctcagtttcctcatttaaaatggggacaattacrgtacctaccacccaggattgttttcaagatgagtaaaaacatatgtagcacttagtatgggatgtggcacttatgaagatgtatgtataaacccaaataaatattttggtaaatccaatgttaggtgcagagaaggcagatgtaagaataaaaattttacaggtgaaaatctatcagattatctcaccttaaatcatgtaataaccttccagtgctataaaggtacctagacttctttcagaactgtctaggtacttggcaactaacaattattcattgtttacttttggtccaattacataattctcagttgtaggcaactttttctgatttaacctatcatttggaaagtgagtgattctttaatttagtgatcttttttctgcacacataa

SEQ ID NO: 224962 - DNA, 638 bp, Homo sapiens
tgactgaatttttttatctttaacttttaatttagaaaatttcaaacatatacaaatgtaagaaagtagtataatgaatctccatggggccataaccagcttgaacaattatgaactcatggacagtcatatttcatctatacccctttttcctatgtcatcattttgaagcaaatcccagagcatcatatcattttatctgtaaatattttcagaaagcaagaaaactatcaactaccactagggttgtgtcaagaaggggacaattcaaataggctgtcactgaccaaagacgggctaatttgagcatcaaaaaaaaaaaaaaaaaagataatcgcaattgtttaaaacacatcaaacatgattatatctattaattgataatattttaaaaacaactgaacagattgattgcttgatggttcagagggaaccagctcataattttcaaaactgttttaggaaaaggaaaacaattgtgcatttattttgccttttctatacaaattggacctctgggtaaccaattaggctttatttttaccctgcctttgtctactttcctagtttaacaatcytattcttccctgaggcaataggtgcctctggctacatggggtgcggaggggaatatcaca

SEQ ID NO: 224963 - DNA, 569 bp, Homo sapiens
tgtgggcaacccagggacaaaataaagtacagtactcatacttactttgttaatcatttctttcttcattctctccacatatacaaccttttttctgacttattaaaatctctagcttctctgttattaaaattgcaggcartcagcacacttatgaagtattcaatgtgcacaaaaccagtagttccaaacctcgactttagctaaacaaaagaactggggttatttttaaaagactcctgacaatgaccctcactctcctcccattactgtgagccccgtgagaacaaagagtcagtatcatgcatttctcagcatctagccctgcgcttggcattttggctaacacatatctgtggagtgaattaagatgatggcaaatacagttacttaaaggaaggtgagtcaatcaggaggatgtaggttatgttatgataacaaaaagttcaaaaatcacagtggcttaaaacaatgaaggtttttgtttctcacttgtgctacctgtcctttgtgaagtttgctgtgtcatcctaactcctaaccccaagctggtcactatctagaacact

SEQ ID NO: 224964 - DNA, 557 bp, Homo sapiens
tgtgggagaagggtgaggattgctgattacctgggtgacaaaattatctgtacatcaaacccctgtgacatgcaattaccagtgtaacaaacctgcctgtttacctctggaacctacaaataaaagttggaaagttaaaaaaaaaaaaagccacagtgtgagttctccaagggcagaagtgkggtctgtccatttcatcaagagacttggagtctcaacccttggctactattcctaccgatgccagcagggacttcctgagagtcccccagggtgcttccttgtctctcagaggcacaccagtaaggaaataaggataaataatactggtaaaggaggcatgctggagaagagggtacaaaggcaggacagcccactcggaaagcaagcaaggagcattgctctttatgactcaaaaaaaaaaaaataaaaaatcgtgctcctgctgccttctttcctaagctagactctacctatttctagttcagaatttcaacataaaataaagcttaaaatactggaaaagaggagccatgtgccttgagcctcaaacatag

SEQ ID NO: 224965 - DNA, 591 bp, Homo sapiens
ttctatcttattctttgcatatttctattacagtttcccatttttatttcataggtctagtagcttctcttatgtctctgagataatgtaagtttcatgaggtataaactttatttggtttgttcattactttatgttgaatgcctagaacaatgagtgcctactgtagtaggtgttcgataagtatctttgaattaatgagactatttactgtagcttattgtgtattttcttctgctccctgaagtttctgtttcccacaagttcctttttactatatttgttctggcctggttttcatatcacaggcctttctaaaatatctggtgatctttggtgtctgttaataattacgaatcaggcattaaaatgctaatgaaagctcttgcttggatgcgacctgccaagtagaggtctttactgtagagtaatcaagtgaggatgcaaccatttcacttccagaaacacatgtcagtatctstgcataatttctcttaggctgatcaatttccccagggcaggttctctaagctcttctctgaagtatttgtgtttggctgccagcagtatgagagctgagctaaaaaagag

SEQ ID NO: 224966 - DNA, 589 bp, Homo sapiens
ttctatcttattctttgcatatttctattacagtttcccatttttatttcataggtctagtagcttctcttatgtctctgagataatgtaagtttcatgaggtataaactttatttggtttgttcattactttatgttgaatgcctagaacaatgagtgcctactgtagtaggtgttcgataagtatctttgaattaatgagactatttactgtagcttattgtgtattttcttctgctccctgaagtttctgtttcccacaagttcctttttactatatttgttctggcctggttttcatatcacaggcctttctaaaatatctggtgatctttggtgtctgttaataattacgaatcaggcattaaaatgctaatgaaagctcttgcttggatgcgacctgccaagtagaggtctttactgtagagtaatcaagtgaggatgcaaccatttcacttccagaaacacatgtcagtatctctgcataatttctcttaggctgatcaatttccccagggcaggttctctaagctcttctctgaagtatttgtgtttggctgccagcagtawgagagctgagctaaaaaag

SEQ ID NO: 224967 - DNA, 583 bp, Homo sapiens
acattataagtgaaaagctgggttaaaagttacatgtctggacttatccttttattttacaatattaactttaaaaattctgccagactgkgtgaggtagctcaatcctgtaatcctagcactttgggattctcttgaatccaggagtttgagaccagcctgggcaacatagcaagactctgtctctacaagaaaaaaaaaaattagccaggcatggatggtggtggacacctgtagtcccagcaactgaggaggctgaggtgggaggatcacctgagacctggagttggaggctgcagtgagctgtgattgcaccactgcactctagcctgggcaacagagtgagacattgtctctaaaaataaataaataaacactaagatatttaaaattgtgccaacttatacccaactccttttttcattgttcccttttgattttcagcagcagttgggaaccaggggttttggggcgggtggcatggcacttttcgtgggtgattcggtcccttcctggcctgctccttgtcttttcagcctcccacaaacccaacactgcaacagtccgggtgactgtgaagggg

SEQ ID NO: 224968 - DNA, 608 bp, Homo sapiens
tatatctgtattcaaaaactatcatttttgagagtccactactgcacatgctctagaccaggtatcattacatactaatgtatgtaaaaggtattattacatactaaggtatgtaaagcgaatgctttaatcctcaaataagatagataccatccctgttttacagacgataacactgagggtcaaagacatgaaatcttttatcccaagatcacttagcaggtggcagagctgcaattcaaacccagattccctccctcatccagactggatatctgtggttcccctgccatgctgccagtcctgagatgggtctgtccccaaggtccaggcctctttagtgatcttatgtggcctgtagatttgtcaattcctgtgtcaatatatarctttctctttatgcatagattaatgtgatctgctattgggggtaaatgatatgcattggcccaggctaaaggattccccttctcccttagcttgctcaagtttaaggcagataatacaaagttccatggctaaagcattagaggagggtgactgagcttttgaagacttgggggccaaaatagtggtaatgggggaatccaaggagacgcagcatggag

SEQ ID NO: 224969 - DNA, 608 bp, Homo sapiens
tatatctgtattcaaaaactatcatttttgagagtccactactgcacatgctctagaccaggtatcattacatactaatgtatgtaaaaggtattattacatactaaggtatgtaaagcgaatgctttaatcctcaaataagatagataccatccctgttttacagacgataacactgagggtcaaagacatgaaatcttttatcccaagatcacttagcaggtggcagagctgcaattcaaacccagattccctccctcatccagactggatatctgtggttcccctgccatgctgccagtcctgagatgggtctgtccccaaggtccaggcctctttagtgatcttatgtggcctgtagatttgtcaattcctgtgtcaatatataactttctctttatgcatagattaatgtgatctgctattgggggtaaatgatatgcattggcccaggctaaaggattccccttctcccttagcttgctcaagtttaaggcagataatacaaagtyccatggctaaagcattagaggagggtgactgagcttttgaagacttgggggccaaaatagtggtaatgggggaatccaaggagacgcagcatggag

SEQ ID NO: 224970 - DNA, 609 bp, Homo sapiens
agctccaaaatgcatgagcagtcctatctctcccctcgctggtcctatctctgccctcgctgggacgtggcagttcaactcttgtacccgtgaggcatcccagacccttctaatcacctagagtcagtttctatatcatgcaaccaaaataaccctagttcatacagtattgaaggttggaatggagtttgttacacagtggggtcctggaagggcatctagccgagtagaaaccggtgtagggagcaggaaacagcagtatgatgctgttggttgtggctggagggctggaggggcataagggccagcccatgcttggcagaccacacttaagtctgcagaccagggggtggttactctcgggaccgccataatgaacccaagtctgtactttccatagaatcaaaggcctcccaccaactcccattgtctcaggtggaaggaaggttcttcttcttcatttttaaattttttgatatagggtcttgctctgtccccctggtgggagtgcagtggtrtgatcatggatcactgcaacctcaaactcctgggctcaagcaattctcctgcctcagcctccagagtagctgggaccacaaaggtgaactg

SEQ ID NO: 224971 - DNA, 579 bp, Homo sapiens
ctttagttggccagagatgatttctattgtttgaaatcaggaatctcctccagaaccttggtgaactaattaacccacagtttgctgtttatgatggaaagaattttgaggtcttacctaatcccaaaggtgtttatggcttcaaggaagttgctggtatcagcaatatctcaacccgaggctgccacgtagacatcacctcacctgccagtcctgctsggttgacagtggctttgtggggcactgtgttgaggaggattctgaaaccaaaactcattaacaaagtcagccagtgggagacagttggcagagcccctactaactttcagggggttgggaagatatatgttaatatggtttcgttctgtgtccccacccgaatctcattgaattggtaatccccatgtgtccagtaggggcctggtgagaggtggttggatcatggcggcagatttcccccttgctgttttagtgctagcgagtgcgttctcatgagatctgatggtttaaaagtgtgtggctttttttgctctctctctctcctctctctctcctgctccaccatggtaagacatgctg

SEQ ID NO: 224972 - DNA, 591 bp, Homo sapiens
ggaagcctcttgaactctttgagcctgtttcctcatctgtaaaatgggcaggataacagtgcctgccccacyagacttgtgagagtcaacaagagaatgcacacacaatgcttggtggcttgcgggcacagaggaggctgctctcttgctaaagattaaatgcaccattgccttttgaggaagtgcctccttgccacttgccatttctgcctctgtctcatcctgctggagactcaaaacatctgaggggggctggctgcggtggctcacgcttgtaatcccagcatgagcctttgggaggccgaggcaggtggatcacttgaggtcaggagttcgagaccagcctggccaacatggcaaaaccccatttctgctaaaaatacaaagattagctgggcatggtggtgcatacttgtaatcccagctactcaggaggctgaggcaggaggatcgcttgaacccaggaggcagaggttgcagtgagctgagatcacaccactgcactccagcctgggctacagagtgagactccatctcagaaaaaaaaaaaatctgaggggccctctcattcccccacagaaccaagcaaag

SEQ ID NO: 224973 - DNA, 546 bp, Homo sapiens
gggtgcagagaggtaaagtgattgcccgaggtcatggagctaagccgggcagacgcggagccagaaggatggtttctgaccttygaattcagaactctttccacataaccatacttgcagagcctctttcaggagaatgcgggaaagtaactctttcctcatctaccagaggtccttggtatgttgcacaggactgaagaagctaccccagtaggttggccagattccacaatgggatattgaatctggtttcagaaattcccctggtgatttcaattagatgcgctgttctttctgacttcccctccctggcagcgatgcagtgttttttccagctgcttggattgccgtcgtatgctgctccaagctgcctccagtgctctgctgttcactagaacagagctcagaggcccgtcgccgagcctgcagtacaggttaaacattggagaggctttgctctcatttgaggtgtatctaatgattgtggcccagtgtgccagtttcttgtgaatacaatgaagatactacttctcggaagtgcagtgg

SEQ ID NO: 224974 - DNA, 538 bp, Homo sapiens
tttttccaacagcatgtgctcacttcatgtctctgtgccatattttggtaaatcttgcaatatttcaaatttttcattattattatatgttttatggtggtccataatcagttatctttgatgttaccattataatttttagggaggcgttacaaactatgcccatacaagacggctaagttaataaatgttgtctgtgctctgacttcccaactaccagtcattccccatctctttctctctccttgggcctttctattccccaagatacaacaattttgcaatcagaccaattaaaaaccctacagcgatctctaaatgttcaagtgaaaggaagagcatcacatctctcaatttaaatcagaagctagaaatgattaaggttagtgaggaaggcrtgtcaaaagacaagataggttaaaagttaggtttcttgtcccaaacagttagccaaatggtgaatgtaaagggaaagtttttaaaggaaattaaaattgctaatccagtgaacatatgaatgataagaaagttaaacagc

SEQ ID NO: 224975 - DNA, 538 bp, Homo sapiens
tttttccaacagcatgtgctcacttcatgtctctgtgccatattttggtaaatcttgcaatatttcaaatttttcattattattatatgttttatggtggtccataatcagttatctttgatgttaccattataatttttagggaggcgttacaaactatgcccatacaagacggctaagttaataaatgttgtctgtgctctgacttcccaactaccagtcattccccatctctttctctctccttgggcctttctattccccaagatacaacaattttgcaatcagaccaattaaaaaccctacagcgatctctaaatgttcaagtgaaaggaagagcatcacatctctcaatttaaatcagaagctagaaatgattaaggttagtgaggaaggcgtgtcaaaagacaagayaggttaaaagttaggtttcttgtcccaaacagttagccaaatggtgaatgtaaagggaaagtttttaaaggaaattaaaattgctaatccagtgaacatatgaatgataagaaagttaaacagc

SEQ ID NO: 224976 - DNA, 538 bp, Homo sapiens
tttttccaacagcatgtgctcacttcatgtctctgtgccatattttggtaaatcttgcaatatttcaaatttttcattattattatatgttttatggtggtccataatcagttatctttgatgttaccattataatttttagggaggcgttacaaactatgcccatacaagacggctaagttaataaatgttgtctgtgctctgacttcccaactaccagtcattccccatctctttctctctccttgggcctttctattccccaagatacaacaattttgcaatcagaccaattaaaaaccctacagcgatctctaaatgttcaagtgaaaggaagagcatcacatctctcaatttaaatcagaagctagaaatgattaaggttagtgaggaaggcgtgtcaaaagacaagataggttaaaagttaggtttcttgtcccaaacagttagccaaatggtgaatgtaaagsgaaagtttttaaaggaaattaaaattgctaatccagtgaacatatgaatgataagaaagttaaacagc

SEQ ID NO: 224977 - DNA, 538 bp, Homo sapiens
tttttccaacagcatgtgctcacttcatgtctctgtgccatattttggtaaatcttgcaatatttcaaatttttcattattattatatgttttatggtggtccataatcagttatctttgatgttaccattataatttttagggaggcgttacaaactatgcccatacaagacggctaagttaataaatgttgtctgtgctctgacttcccaactaccagtcattccccatctctttctctctccttgggcctttctattccccaagatacaacaattttgcaatcagaccaattaaaaaccctacagcgatctctaaatgttcaagtgaaaggaagagcatcacatctctcaatttaaatcagaagctagaaatgattaaggttagtgaggaaggcgtgtcaaaagacaagataggttaaaagttaggtttcttgtcccaaacagttagccaaatggtgaatgtaaaggkaaagtttttaaaggaaattaaaattgctaatccagtgaacatatgaatgataagaaagttaaacagc

SEQ ID NO: 224978 - DNA, 554 bp, Homo sapiens
gacttgttgaaggctcaaatgataattagcatttttaataagaaagtgttttataataagtgatatactttttttagacataatgctattgyatacttaatagatgacaacataatgtaaacacaacttttgtttattggtaaattaaaaaaaataatgtgacttaattgagatatccacttcatcgcagtggtctggaaactgatccacaatacctcccaggtaagcctataccataagagacataatggtttataggacttcaagaaagaagagatcatatttcactgcattagaatttgtaaaattagctggggaaataggaatgtgaaatggttctttatagacaggaatcatttagcgttagaaaagaggatgaataagagctgtcgacataacagttctcagcaggggacaccaagagaaacacagataaagagacacaaaataaggagtgaggttgtggactagcataaaatctcatttgattcaatagagtgtatgaaagaagtggggatgaaaagttccataattcgcttggaggtaaatgatag

SEQ ID NO: 224979 - DNA, 554 bp, Homo sapiens
gacttgttgaaggctcaaatgataattagcatttttaataagaaagtgttttataataagtgatatactttttttagacataatgctattgtatacttaatagatgacaacataatgtaaacacaacttttgtttattggtaaattaaaaaaaataatgtgacttaattgagatatccacttyatcgcagtggtctggaaactgatccacaatacctcccaggtaagcctataccataagagacataatggtttataggacttcaagaaagaagagatcatatttcactgcattagaatttgtaaaattagctggggaaataggaatgtgaaatggttctttatagacaggaatcatttagcgttagaaaagaggatgaataagagctgtcgacataacagttctcagcaggggacaccaagagaaacacagataaagagacacaaaataaggagtgaggttgtggactagcataaaatctcatttgattcaatagagtgtatgaaagaagtggggatgaaaagttccataattcgcttggaggtaaatgatag

SEQ ID NO: 224980 - DNA, 554 bp, Homo sapiens
gacttgttgaaggctcaaatgataattagcatttttaataagaaagtgttttataataagtgatatactttttttagacataatgctattgtatacttaatagatgacaacataatgtaaacacaacttttgtttattggtaaattaaaaaaaataatgtgacttaattgagatatccacttcatcrcagtggtctggaaactgatccacaatacctcccaggtaagcctataccataagagacataatggtttataggacttcaagaaagaagagatcatatttcactgcattagaatttgtaaaattagctggggaaataggaatgtgaaatggttctttatagacaggaatcatttagcgttagaaaagaggatgaataagagctgtcgacataacagttctcagcaggggacaccaagagaaacacagataaagagacacaaaataaggagtgaggttgtggactagcataaaatctcatttgattcaatagagtgtatgaaagaagtggggatgaaaagttccataattcgcttggaggtaaatgatag

SEQ ID NO: 224981 - DNA, 587 bp, Homo sapiens
  misc_feature (1)...(587): n = A,T,C or G
nnnnnnnnttaattacccagctcttgttcatcctttacagttcaacataaataacattgtgtgggacgccttcttctaatacctaaattaaatgaatgcctttgtaaactcatcattgctcttttacttcctgtgactttcatggtggctcctctgttagattgcaggttktggtgcagggagtgacccagccttattctctcctgcgtctccagcacctgcctcatgcctgtacctcacatttacctcataaaggtgctggatgtaagtgaattgctggctcaccttgaggttccactggttctggcaccactcattattcagagtcttactcaaatttcgccctccctagaaattctctctgacttcctggagcaaatatctgtgctccctctttcatggtcctataatactgggtacacccttcctgccaaaaaaccatctatttccctttttataacgcttgctggactgggcacctggagggcatgcacttatttctgcactggagtgagaaagctagaatgaacttaaagtataatgaatcaattaaattttctcagagaacaaaaggaaaagtgggagaa

SEQ ID NO: 224982 - DNA, 587 bp, Homo sapiens
  misc_feature (1)...(587): n = A,T,C or G
nnnnnnnnttaattacccagctcttgttcatcctttacagttcaacataaataacattgtgtgggacgccttcttctaatacctaaattaaatgaatgcctttgtaaactcatcattgctcttttacttcctgtgactttcatggtggctcctctgttagattgcaggttttggtgcagggagtgacccagccttattctctcctgcrtctccagcacctgcctcatgcctgtacctcacatttacctcataaaggtgctggatgtaagtgaattgctggctcaccttgaggttccactggttctggcaccactcattattcagagtcttactcaaatttcgccctccctagaaattctctctgacttcctggagcaaatatctgtgctccctctttcatggtcctataatactgggtacacccttcctgccaaaaaaccatctatttccctttttataacgcttgctggactgggcacctggagggcatgcacttatttctgcactggagtgagaaagctagaatgaacttaaagtataatgaatcaattaaattttctcagagaacaaaaggaaaagtgggagaa

SEQ ID NO: 224983 - DNA, 587 bp, Homo sapiens
  misc_feature (1)...(587): n = A,T,C or G
nnnnnnnnttaattacccagctcttgttcatcctttacagttcaacataaataacattgtgtgggacgccttcttctaatacctaaattaaatgaatgcctttgtaaactcatcattgctcttttacttcctgtgactttcatggtggctcctctgttagattgcaggttttggtgcagggagtgacccagccttattctctcctgcgtctccagcacctgcctcatgcctgtacctcacatttacctcataaaggtgctggatgtaagtgaattgctggctcaccttgaggttccactggttctggcaccactcattattcagagtcttactcaaatttcgccctccctagaaattctctctgacttcctggagcaaatatctgtgctccctctttcatggtcctataatactgggtacacccttcctgccaaaaaaccatctatttccctttttataacgcttgctggactgggcacctggagggcatgcacttatttctgcactggagtgagaaagctagaatgaacttaaagtataatgartcaattaaattttctcagagaacaaaaggaaaagtgggagaa

SEQ ID NO: 224984 - DNA, 475 bp, Homo sapiens
caatatcacaccattcaccagaccacaatgtatctgaaaaactaaattttgatgtctttcatgaacattagacccagtggatgagttcctttacattttgccagatgagcttcacagccatgatggtttcctattggtacatctccaggatttcaaaatttctgcagcccaaatcttcaaagacaaggaattgaataagaacatcacccttgatgaggctttcaatatctgaacagtcttcttcagagacaaattygaagtgttaggaacctcaattccttggtttgaatttatgagtgttttgacaaaacatcatgacattattactatcaaaaagacagattttcagaaaatttatcatcttgacatggacttttagttacatgagaacaggttccggatgttttttacattgttgctactggaaacctggtcatgtttgtcatggacaagagtacagaggaaaagaacaaga

SEQ ID NO: 224985 - DNA, 575 bp, Homo sapiens
cttactgtgtacatggaacagtatggaaaaaagcatatggaaaactattagacattattcatacccccaagaatcttgcacttcatttggaaagaatagatacctatatgaacacaaaaaccaccatcaaarcttctgaatttggaacaggtcttgaagacctaactttctgactgttgtaaatatgcactcttgacatcctgccatttgatcctatcagttcatcactgggaaattttaatggcaaataaattctatccacttctaaattctaaaggctttaatgcatgacaggtctatagaagttaaatgaccgtagaaattgtcagcctggatagaaattttggctttaccaatcattaatagtgtggcctcaggcaagttacttaatgtttttgcctttcaatttcgtatcataaagtggggaaaaatactagtatcttcctcatagggttgggagagttaggtgttgaattttcagaatagcccctgatagagggtaagtccacatcacattaaatggtatttgtacaactgtcatacaaatatttgactcaacttttaatgttctgttt

SEQ ID NO: 224986 - DNA, 551 bp, Homo sapiens
gcaaatgactttcaagactcctrtaaactatatttaaattatacggaaggctgatcccaggttttgaatttggctctggctcctcttttgttccaatcctttgctctttctgttccaattagtagtttccaggcttgagtccatcctctaccaccttttgctgcaatctcatttctggcatacagcctgcaccctactcctattattttctggtatagattctcatttctcacccagctgtacagctgctgctgcagctagctgggatgtttctccggaagccacaatacctgtttgcttcccaccagcctctgcatgagtcagacaatttggctgcagtagtgtggtgaggattgcaaatgtgcagctgagacattccatttgctgtgactccatatgctgcccattaaattctggccacaatcatacacgtttgcactatgacccaaagcagctttcctttccttggtgaaaattgatacttttcgtaaagcccagtgccctggcatgtccataatcattcacttgtcaatcattgctttggtgtggaa

SEQ ID NO: 224987 - DNA, 432 bp, Homo sapiens
tatgtattcttttaatatattttatagttatttttaatacttttacatttcaacatttatactagaattaataatgatttatacccattaccactacaataatatggtattctgcatttcttatatattaacctttattaatgagtttcatacttcttaggctactgtgttgctgttttgtgtcctttcacttcaacttgagaaactcacrttagcgttttttaagccatgtctggtaatgatgatttccctcagctattctctgtctgtgtaaatcttaatctatccttcagctttaaaggatagtttcgtagggcatagtattcttggttgatagttgtttacttttagcatttttaatatgcaatcctactctctcaccacctgtaaagtttctgcagaaaaatccactagtggtattattgatgtttc

SEQ ID NO: 224988 - DNA, 432 bp, Homo sapiens
tatgtattcttttaatatattttatagttatttttaatacttttacatttcaacatttatactagaattaataatgatttatacccattaccactacaataatatggtattctgcatttcttatatattaacctttattaatgagtttcatacttcttaggctactgtgttgctgttttgtgtcctttcacttcaacttgagaaactcacgttagcgttttttaagccatgtctggtaatgatgatttccctcagctattctmtgtctgtgtaaatcttaatctatccttcagctttaaaggatagtttcgtagggcatagtattcttggttgatagttgtttacttttagcatttttaatatgcaatcctactctctcaccacctgtaaagtttctgcagaaaaatccactagtggtattattgatgtttc

SEQ ID NO: 224989 - DNA, 534 bp, Homo sapiens
tctaagtttctaacaactccttccttttctagggagaagcaggcagctgttgacatttttgttgttrttgttgttgttgttggcttaatctgtgctgagctggttttgtggtgggcaggggtggattttggtgtttaccagtctaaatctccatctctatttctccattgtcgttcaggcagccagactctgctggacccatcagagttctaagaccaggaagacaatgctaattatctttacagccctggagaaattaagacatgagatacatggatcaactctctccccaggacgtaactgagatatgggatttttcatttgcagcactctctgctgaccaagtgagaagatctacaacatcaatcagctcaaccttctatctctactctctttcatatggctaaactgtgctggtcttgtctgagttttaaggctgaaaagaaagaagccagtcctctggggagccaccttggaaaattggggcactagacatgcaaccaacccctttcctccccagagagaagctgggag

SEQ ID NO: 224990 - DNA, 380 bp, Homo sapiens
gatgatatcaggatgattcatgtgcattacatttaktgtgtactttatttttattattattacattataatatataatgaaataattctacaactcaccatgatgtagcatcagtgggagccctgagcttgttttcctgtaactagatggtcctacttgggggtgatgggagatggtgacagatcatcaggcattagattttcataaggaacacacaacctaggttccttgcatacacagttcacaatagggttcatgctcctatgagaatcttttgccaccaatgatctgacaagaggcagagctcaggcgggaatgctcacttgcctaccactcaccttcctggtgtgcggcccggttccacggcctggtactgccgt

SEQ ID NO: 224991 - DNA, 437 bp, Homo sapiens
ctcttggaaccagggattgcctacatggatgacagtttttccactgaccggaggagggggagggtgatgatatcaggatgattcatgtgcattacatttattgtgtactttattwttattattattacattataatatataatgaaataattctacaactcaccatgatgtagcatcagtgggagccctgagcttgttttcctgtaactagatggtcctacttgggggtgatgggagatggtgacagatcatcaggcattagattttcataaggaacacacaacctaggttccttgcatacacagttcacaatagggttcatgctcctatgagaatcttttgccaccaatgatctgacaagaggcagagctcaggcgggaatgctcacttgcctaccactcaccttcctggtgtgcggcccggttccacggcctggt

SEQ ID NO: 224992 - DNA, 563 bp, Homo sapiens
ataccagttgttgacttggcttagcttttctatgcatctattrccagtctgttagatagtgcttattttccatctacctcatagggttgttataatgagtaaatggaataatacaaattaggcacttacaagtgcaccttgcacataacaagcactaaaaatatctgccactattatgcagaaaggctcaaagtcattcagtgatctagatttccactacatctcctgttcccttactattagtgatcttgtgttatgtcaaggaaagattttattctgactcatggaggagttaaatgacaaggagccacagtactaatttgctggctgtaaagaaaaaattttatttgctctcgtccaaatttaactatctttagagcacattaatacatataatatccactgctttatcgctaagagattctgatgtcttcatgtcctggggttaaactaaaacccaatgtcagcagtaggtacagatttaaaccatcaacaattgtccattagaagaaaaactcatccttagaacagcatgactcaaggatgatggattttcagagaaa

SEQ ID NO: 224993 - DNA, 563 bp, Homo sapiens
ataccagttgttgacttggcttagcttttctatgcatctattaccagtctgttagatagtgcttattttccatctacctcatagggttgttataatgagtaaatggaataatacaaattaggcacttacaagtgcaccttgcacataacaagcactaaaaatatctgccactattatgcagaaaggctcaaagtcattcagtgatctagatttccactacatctcctgttcccttactattagtgatcttgtgttatgtcaaggaaagattttattctgactcatggaggagktaaatgacaaggagccacagtactaatttgctggctgtaaagaaaaaattttatttgctctcgtccaaatttaactatctttagagcacattaatacatataatatccactgctttatcgctaagagattctgatgtcttcatgtcctggggttaaactaaaacccaatgtcagcagtaggtacagatttaaaccatcaacaattgtccattagaagaaaaactcatccttagaacagcatgactcaaggatgatggattttcagagaaa

SEQ ID NO: 224994 - DNA, 532 bp, Homo sapiens
ttcctcaatttaaagattttctccttcgtctccaagtagagaggtgaagtttacagaccatcactcatgcaggtaagtagcagtgactatggagctcatgtcatttttagttgtttcgaagtggccaatcataacacttatactctmttttcttgatatccggtgttggaactaacagatggcaatcatttgtgtaatcacacctttagacttctcatagataccttcaaaagagccatcactctgatgttctaactgtgctcatgcatacatgctcacatctgatctgtctaccattttacttctaccaacttacttcttcctcattactgggcacacagaaatgtttatgtctaatctatgcccttctcagggtccaaggaaacttctaggagaattatgcttccaatctacttgttctttcccttatattagggttgctgaacacataataaagcttctgttttcaaactctagccagaaaacaaaatcccagggtattgtactctttcagtccctgcaacttaaatga

SEQ ID NO: 224995 - DNA, 419 bp, Homo sapiens
aattctttttttctttctattactgaaacatcatagatttggtctagatcctgctgcytgctacacagaaagccaatcactgaaacaagtactgccagggaggaaggttttattcaggtgctgcagcccaggagatgggagttcagtctcaaattcatctccctgactgactaaaattacggcattatatgacagaaatgtaactacatgtagaaaaacaagaattaggaaagggtaagaaagataatttggtcaacacaaagcaggtggtcagataggtaatcatgatgggtgaagggtctagcatcttattgtccagatgcagtgacctagtaaacttcaattccatgatactatctagaaggcctgaaggttggtttcctgagaaagaaactttaataaaacaaaggaactttctc

SEQ ID NO: 224996 - DNA, 388 bp, Homo sapiens
catcatagatttggtctagatcctgctgcttgctacacagaaagcyaatcactgaaacaagtactgccagggaggaaggttttattcaggtgctgcagcccaggagatgggagttcagtctcaaattcatctccctgactgactaaaattacggcattatatgacagaaatgtaactacatgtagaaaaacaagaattaggaaagggtaagaaagataatttggtcaacacaaagcaggtggtcagataggtaatcatgatgggtgaagggtctagcatcttattgtccagatgcagtgacctagtaaacttcaattccatgatactatctagaaggcctgaaggttggtttcctgagaaagaaactttaataaaacaaaggaacttt

SEQ ID NO: 224997 - DNA, 496 bp, Homo sapiens
gtctcaaattcatctccctgactgactaaaattacggcattatatgacagaaatgtaactacatgtagaaaaayaagaattaggaaagggtaagaaagataatttggtcaacacaaagcaggtggtcagataggtaatcatgatgggtgaagggtctagcatcttattgtccagatgcagtgacctagtaaacttcaattccatgatactatctagaaggcctgaaggttggtttcctgagaaagaaactttaataaaacaaaggaactttctcaagtttcaagactgggagaatccatttctatgtgtattcaacagaagctataaagctaagttctgtgggacaattaggtcagtttcaattcacccctacctttctatttttcaactcctcaatcatgaggaatccacctggcaatcttttagctgcttcatgctgaggaggggtgttgtgggcagctccatgccatggctgtccacgtggctacccaggaaa

SEQ ID NO: 224998 - DNA, 266 bp, Homo sapiens
aagaaactttaataaaacaaaggaactttctcaagtttcaagactgggagaatycatttctatgtgtattcaacagaagctataaagctaagttctgtgggacaattaggtcagtttcaattcacccctacctttctatttttcaactcctcaatcatgaggaatccacctggcaatcttttagctgcttcatgctgaggaggggtgttgtgggcagctccatgccatggctgtccacgtggctacccaggaaacaaaggttaatc

SEQ ID NO: 224999 - DNA, 588 bp, Homo sapiens
ttcctgagaaagaaactttaataaaacaaaggaactttctcaagtttcaagactgggagaatccatttctatgtgtattcaacagaagctataaagctaagttctgtgggacaattaggtcagtttcaattcacccctacctttctatttttcaactcctcaatcatgaggaatccacctggcaatcttttagctgcttcatgctgaggaggggtgttgtgggcagctccatgccatggctgtccacgtggctacccaggaaacaaaggttaatctactactatagtttccttttgaaacacaatctttctctctccagtatcctactgccaccaaagacaaatcacaagaccagcccacctgccaaataagctttagtcccatatacttggcctgattacctatacaatctgcaacaagaawcattgtccatataggttctcctaaattgtctttgctggaacctctcacaaggccatttcagttaaagccttaggaagaaaaccagttccccaactgcatcccataggttcttattaaacatatgtgaacaagcacattgccatgaattaataatattcataaata

SEQ ID NO: 225000 - DNA, 595 bp, Homo sapiens
tatgccaatagatcattgtctaaaatctcgacatatgctgtttttcaaataataaaagtgcattaattattttgtgatgcgttataacrttttctgctatctttttttatgacacaaatctaattagtacatattcttgagacatctaaagtaagaaactttattaaacattttcaaacttcttcctgagctagtagaagagcaagccaaatgaatttcaagtgacattaaaaataatcacagcaaaaggcttgagaaaaggaatgacatagtcagctttaaatatgtatattcctatcacatgctaatcatacttgcaaaaattgtagaattgcttatttggtatcattacttgcttgaactacttactacattcttgaaggtaattagtcctcagtaaccacacttccatgtattcttctttaaatagaatacctttgtatctaaagttagatatagagaagttaccttctttaaatagatgcctttatatctagagttagaacttaaagagaaatatctccataacagccaaaaaacccagatgtagcgtattactgtactctactatgttcatatttttttatttttcaac

SEQ ID NO: 225001 - DNA, 595 bp, Homo sapiens
tatgccaatagatcattgtctaaaatctcgacatatgctgtttttcaaataataaaagtgcattaattattttgtgatgcgttataacattttctgctatctttttttatgacacaaatctaattagtacatattcttgagasatctaaagtaagaaactttattaaacattttcaaacttcttcctgagctagtagaagagcaagccaaatgaatttcaagtgacattaaaaataatcacagcaaaaggcttgagaaaaggaatgacatagtcagctttaaatatgtatattcctatcacatgctaatcatacttgcaaaaattgtagaattgcttatttggtatcattacttgcttgaactacttactacattcttgaaggtaattagtcctcagtaaccacacttccatgtattcttctttaaatagaatacctttgtatctaaagttagatatagagaagttaccttctttaaatagatgcctttatatctagagttagaacttaaagagaaatatctccataacagccaaaaaacccagatgtagcgtattactgtactctactatgttcatatttttttatttttcaac

SEQ ID NO: 225002 - DNA, 571 bp, Homo sapiens
aaaagcagaaaccagagctgtcgctcccattctttcagaatgttttgatgaatcagaagtttttcttaaaaatgcctcaaagagtcaaaagatcttaactatattgattatttcatttttcactatctctttaaattttaaaagaacataaaagtaaaaaggagaagccaaggattaaataaaatacttgactatttattcagaaatacttcttattactctattttattttccatcttaattctgatttatatgcttttaccactgtccaataastaataaataagttaatgagatatttaaaaggtaatatgttttcttacacttttttcttttgattcatttactatttcttgtagttacagtcttgttttattaagcactttgagtctacatatcattttaatggaggtatcaggtgggatgtccttctcatttaccctacaatgaatacccagacattcatccatcctactcagtcctaggcagatatgtgaattaattccttgtcacccacaatattccatcttcattgtttttcttcctcaacccccaaatcattcacatagtt

SEQ ID NO: 225003 - DNA, 547 bp, Homo sapiens
tcatcttggtatttgttaagttctaaaaattatccattctaataggtgtacagttatctcattgcatatttttaagtaattaatgatgatgaacatctcttcacgtgtgtttatttgccatttatgtatctctgatgaagaaacttcccmaatctttttgaccatttttaaaattgggttgatggacttttagtattgaatttaatggtaagagttctttatatgcttggaaaggtccttttgatcagatatgtgatcagatatgtgctttgcaaatattttctccctgtctggggcagataataactttgtttctacccttctcccagcagcagtggtcttttgcctggatcctctgccccacccagcatcagaaacctattgactctagtcctctacaaagggcagcagattattctctgggaccacagtacataggttttcctacctttccactagtggcttatggctttcgcttatattcaagaaggatccatgaaatgttggggattatgtggttttgtgccatggaggtatgggggcatgc

SEQ ID NO: 225004 - DNA, 547 bp, Homo sapiens
tcatcttggtatttgttaagttctaaaaattatccattctaataggtgtacagttatctcattgcatatttttaagtaattaatgatgatgaacatctcttcacgtgtgtttatttgccatttatgtatctctgatgaagaaacttcccaaatctttttgaccatttytaaaattgggttgatggacttttagtattgaatttaatggtaagagttctttatatgcttggaaaggtccttttgatcagatatgtgatcagatatgtgctttgcaaatattttctccctgtctggggcagataataactttgtttctacccttctcccagcagcagtggtcttttgcctggatcctctgccccacccagcatcagaaacctattgactctagtcctctacaaagggcagcagattattctctgggaccacagtacataggttttcctacctttccactagtggcttatggctttcgcttatattcaagaaggatccatgaaatgttggggattatgtggttttgtgccatggaggtatgggggcatgc

SEQ ID NO: 225005 - DNA, 591 bp, Homo sapiens
cctattgactctagtcctctacaaagggcagcagattattctctgggaccacagtacataggttttcctacctttccactagtggcttatggctttcgcttatattcaagaaggatccatgaaatgttggggattatgtggttttgtgccatggaggtatgggggcatgccaaagtcccctgtcgtgcctgatatctttctcatgagcactagtgaagtgctaaggggggctagggaatgagcgcagacaactcatgtatctgggctccaagaatctaaactcaatctagcctatacttgacatttgtaaattatttaaaaattaatatttttcttctttcctgttttcatggaggctgcttcttcctctttgaccatgccaaaagcaaaatagtaaaagagttcatatatcctacctctgctcagagcaagatctcatcttagtccacagtcctacctgccatcttttgggattcagttgacaagttgcttggtgttgcattcttggtgtcattgccrggtcttttgtttttgtttttgatgtgttgtgacacaagagtcctgttgttggtagaagagtggttagctgaa

SEQ ID NO: 225006 - DNA, 560 bp, Homo sapiens
gggacttttcaatcatgtgaaatactatatttcatttattgatatgctggcttacgttaggtattctgtcacttttcctgaaggacatctgataataaaaaaaaagatccatggccagagcaaagggtacacagtgttggttaagacaccaaaattaagtttaggttaaatagcattgtctaatattcccccaaaggatcctatgaggatggaatcttgaargtagggaaaggaatcataggtggtctggacattagtcctgtcctttatcatctccttcagatttctgtaagttttagagtatattgaaattcataattttaaaagaataaatgaatcatatttgaggaaatttatgaaaattaagctgcctgagtttcactcacctgttgtactttgccaaaaacataaaaaacataaacatcccccattcacacttaaatattaataatgttttaatttactgtttactttttattaaagtatgtttttctttcttaattctattatattgaatccttttatgtttgcttttttccctaacatggcctgcaaaaagt

SEQ ID NO: 225007 - DNA, 560 bp, Homo sapiens
gggacttttcaatcatgtgaaatactatatttcatttattgatatgctggcttacgttaggtattctgtcacttttcctgaaggacatctgataataaaaaaaaagatccatggccagagcaaagggtacacagtgttggttaagacaccaaaattaagtttaggttaaatagcattgtctaatattcccccaaaggatcctatgaggatggaatcttgaaggtagggaaaggaatcataggtggtctggacattagtcctgtcctttatcatctccttcagatttctgtaagttttagagtatattgaaattcataattttaaaagaataaatgaatcatatttgaggaaatttatgaaaattaagstgcctgagtttcactcacctgttgtactttgccaaaaacataaaaaacataaacatcccccattcacacttaaatattaataatgttttaatttactgtttactttttattaaagtatgtttttctttcttaattctattatattgaatccttttatgtttgcttttttccctaacatggcctgcaaaaagt

SEQ ID NO: 225008 - DNA, 547 bp, Homo sapiens
actcaggaactcttagcctctaaggaagttcttacagctaccgcagcctctttatgtttattcyagtattacagtgttctctcacagaagagattgggaaacatgggctcatcctatctttgttcctaactggaatcctaacttgatatacatgtttctctcctataaagaagctctttgaaatgagacctgaatcagctatatgttgtctccacttccttcctcctagacaattgcagtgaatttttgggtgagtttgggtgacattctcaacaatcacttctatgataaacttgatgctcttcgctaactaaatgtgttttacttccgttactttttcaaatatgccatgccacaatttatgctgaaagtcacatattgatttccttttgggggggtctccactttcaaacagttttaaaagattttggttgatcacctgctttatgggagacttggaactcattgaggcaagggattcagaatgattgaagacagtgctcaaaattcaatgagcaagcatgggtagatattaaaaggattatac

SEQ ID NO: 225009 - DNA, 524 bp, Homo sapiens
aaccacccagctagaacataatagctaatataaatcagccagctcacaagcaaaacagatttttaaaatctgctttatattctctaatgcaccacagagaaratagcaagaatttgaaatttatatacagagaaaaattatttagagactttgttgaaaaataagtatatataggagcaataaacaaatctatcatattagaacctagaattgcactaaaaggaagcagatttcagttatttcccatgccataaaaaaaatatcaaaaactatagatttagaaacctgagccttcctcattccaccaaaaatgggggaggcaggaatgttaccaacaggacaaattacacacatttgggttgaaagaagagaaagaactgtaataagcataaccagcaacatgcagaaaatcagcagaagagcttggagatcaaagcagaccataacctaaagctaaagcctttaacagactataccaagtcatgcatgaaaagtgccaggaaggaatgtatttactaaattat

SEQ ID NO: 225010 - DNA, 524 bp, Homo sapiens
aaccacccagctagaacataatagctaatataaatcagccagctcacaagcaaaacagatttttaaaatctgctttatattctctaatgcaccacagagaaaatagcaagaatttgaaatttatatacagagaaaaattatttagagactttgttgaaaaataagtatatataggagcaataaacaaatctatcatattagaacctagaattgcactaaaaggaagcagatttcagttatttcccatgccataaaaaaaatatcaaaaactatagatttagaaacctgagccttcctcattccaccaaaaatgggggaggcaggaatgttaccaacaggacaaattacacacatttgggttgaargaagagaaagaactgtaataagcataaccagcaacatgcagaaaatcagcagaagagcttggagatcaaagcagaccataacctaaagctaaagcctttaacagactataccaagtcatgcatgaaaagtgccaggaaggaatgtatttactaaattat

SEQ ID NO: 225011 - DNA, 537 bp, Homo sapiens
ggagatattagcaaatagattcttaaaaaaaactacatgaaaaacaggtagaatttattcctcatatacaaaaaaattagtattatgaattctacttatgtaatgtatttaacaataggtcaaaggaagaaagctacaaaaccaattcaataacatctgaagcctgagaggaaaatgaaagacaagaggctgtggctgcagctgtgtctgctgacaacaggataaaaatggttgcattgagagtgagctgcattttcaccaggcagagcaaactgggagcwaatgtgtttcttggaaatcaaaagaggactccaagaatagaagcttttaagaggactggctggagagtcaaagaagatccattagcttctggaccactgaaaacctaagggctgatggtggggcagggtaagtggccggcagcagggagacattttctgtatctaggatggtatagaaaagacccccactggacagatctacaaagaacaactaaagagtctcatggtagaacaggtcagctctggacatcattca

SEQ ID NO: 225012 - DNA, 537 bp, Homo sapiens
ggagatattagcaaatagattcttaaaaaaaactacatgaaaaacaggtagaatttattcctcatatacaaaaaaattagtattatgaattctacttatgtaatgtatttaacaataggtcaaaggaagaaagctacaaaaccaattcaataacatctgaagcctgagaggaaaatgaaagacaagaggctgtggctgcagctgtgtctgctgacaacaggataaaaatggttgcattgagagtgagctgcattttcaccaggcagagcaaactgggagctaatgtgtttcttggaaatcaaaagaggactccaagaawagaagcttttaagaggactggctggagagtcaaagaagatccattagcttctggaccactgaaaacctaagggctgatggtggggcagggtaagtggccggcagcagggagacattttctgtatctaggatggtatagaaaagacccccactggacagatctacaaagaacaactaaagagtctcatggtagaacaggtcagctctggacatcattca

SEQ ID NO: 225013 - DNA, 510 bp, Homo sapiens
aatttatatacagagaaaaattatttagagactttgttgaaaaataagtatatataggagcaataaacaaatctatcatattagaacctagaattgcactaaaaggaagcagatttcagttatttcccatgccataaaaaaaatatcaaaaactatagatttagaaacctgagccttcctcattccaccaaaaatgggggaggcaggaatgttaccaacaggacaaattacacacatttgggttgaaagaagagaaagaactgtaataagcataaccagcaacatgcagaaaatcagcagaagagcttggagatcaaagcagaccataacctaaagctaaagcctttaacagactataccaagtcatgcatgaaaagtgccaggaaggaatgtatttactaaattatccacttagtccccttgagatagcagtattctgtagaatttcaatggaaatgcaacaagatccaaagtgttattaragtccatataaatgtcctttcccctctc

SEQ ID NO: 225014 - DNA, 489 bp, Homo sapiens
acagtaagcatccttccccaaaatctctgtgcccaggaagcaagtgccatgtcttctgatttccaacccgtctgttcttcccactcttccaatgctgatactccatcatagtgagtccctcttcctctccttctgctggctttttcctctccttgttatagtttggaattttttaaggctaaaggaaaagaaaagaaaaatcaaagaaaagattaaaagccatccttaattaactgctgacattatcttaccttacctttcattttcagtgccttgtttataggcatgaaatgcttagcattcttctatcaccattttaaaaaataaaagtagcattattagaacctcccttcacaaattgtagacaacattgctagtcctattggcactaaataggactagtttttgactttagatctcaaaataaactaggtcttktttttttttttaacttgtcattgttgttatatactagtgttatttgttaag

SEQ ID NO: 225015 - DNA, 573 bp, Homo sapiens
ttatatatgtaataaatactcatattataaataattaattatatataactagttatatatatcatcttccacctatcacagaccaatatttttataaaatatgataaaaataattactggaaagatgaaatttttaaaaaagtcatatgaaatagaagcaagccccaatttttttattttattaagtttaacaaacataaaattactccacaaagtgctaaaattgtctaaatgctcaccctcagtctctaccataaactcattgcagataaggaaccaacagtttcctgactagcactggtctttggaccatagtttaatgcgtatatcctggacccctactcctcagagtgtgatgccaggacyagcagttttagcctcacctgtgagcttgctataaatgcagcattttaggccttacctcagatctactgagtaagaacttgctcaatgaattttaggcactattctcaatcattctgaatcctgagttcagagtctcctataaagcaagtgcacaaccaaaatctattaaagctatttgaaagtgggagatcccccaaaaggaaacaa

SEQ ID NO: 225016 - DNA, 454 bp, Homo sapiens
gaagcacagttgggacactgggtgcaagatcagaggagagggattcttttcaatgagacacagtaagaaccattgaaatattttctgacccagcacgggggattcgtcgcaggctccttgagagggatgctgcaaaatataaaacagcagcttgcttaccaggatccacctagagagatgcactctctgcaaccaatcatgcggaccctggcttagagatgcttcctcagttttagggccgtgagtcattggcagcagagcacaacagtcatggatggagaatggtgatgaccaagaccacagccatattgttcctaccacacttttgaggtyaagaattgagtcttactcgttttgaatcaatgagtaagtcccactagggactgcacaggaaatgcagagagatttggaatctttctgtggggagtttaggggccagagatcatcaagatta

SEQ ID NO: 225017 - DNA, 510 bp, Homo sapiens
gggtttctgcttttgcttcctcctcatcttctcttgctaccaccatgtaagaagtgcctttcagctcccaccataattctgacatctcctcagccatgtggaactgtaagtccaattaaacctctttttcttctcagtcttgattgggtatgtctttttcagcagtgtaaaaatggactaatacagtaggtgtgcaacaactttttctttctttctttttctgaaagtaaaggagaactccatatgtctggaaaaataattcgaattaacyttcacatcggacaatgcacaaacccaggctttcccactactgtagatttgggttgcttagtttcaggttacattgctgagacattaatgctgttggggtctgaatttcttgaatcattgttgagtactggtgactaaaataaacaatgtgatatggtttagaaactttgttacattctatacacttgtttatctacgtgtacatgttctaaaaatgtttacatatatgtgctatggttt

SEQ ID NO: 225018 - DNA, 510 bp, Homo sapiens
gggtttctgcttttgcttcctcctcatcttctcttgctaccaccatgtaagaagtgcctttcagctcccaccataattctgacatctcctcagccatgtggaactgtaagtccaattaaacctctttttcttctcagtcttgattgggtatgtctttttcagcagtgtaaaaatggactaatacagtaggtgtgcaacaactttttctttctttctttttctgaaagtaaaggagaactccatatgtctggaaaaataattcgaattaactttcacatcggacaatgcacaaacccaggctttcccactactgtagatttgggttgcttagtttcaggttacattgctgagacattaatgctgttggggtctgaatttcttgaatcrttgttgagtactggtgactaaaataaacaatgtgatatggtttagaaactttgttacattctatacacttgtttatctacgtgtacatgttctaaaaatgtttacatatatgtgctatggttt

SEQ ID NO: 225019 - DNA, 584 bp, Homo sapiens
actgcaggctgtaatacgtgagactggctcatttatttaaaaaaagaggtttaattggctcatggttcggcaggctttaaaacatggcactggcatctgcttggcttctggggaaccagcttctgggaaccatgaacggcctaatacacccagcttcttatagctgggcccattcattcttgtctaccacccaatctcttgagccacttcctgtggctcccacaacctcccactatggcattgtatttttctttcttgtacagttacagagcagctataattcaagatttatgaacttttgaggttcattcttctgatgatgattggaactcatgcatgagtttccactaatgttccattttatagaaaagggcttccatttttattttggcttccattttcattcttgttctagaagtcttcatgattttctagatccttcctacgaagagtttcgtttcactcagacagtcctgcctctctggagataaggcwttattatccagagcaaaatcttagtggctgtgatctttctacctgcacacaagcttccctaatgacatctgtttggatttctatgttct

SEQ ID NO: 225020 - DNA, 500 bp, Homo sapiens
agccctctggtgagcaatgtgatatgggacccccaaggtgcttacagcgaagcattaagacgggcgttcagacagaaagatatgaaggggtactttctttaaagttcaagttgtacacaagtagcagttggcagcaaagggaaacaggcttttacatggaagggggcagtcaaggaaagcttcccagagaaggaagtgcttgagttgaactttgaagaagaaatgagtaggaatttcccggatgacagtccaggaaaggtgtggcaattttgtttctgtgatgtggctctagatgagtgtcttcctgcctctctagtcatgtcatctctgctcttctcttcaggctcctcttcttcccaccyctactgtgattgatccttcaaggttctgtgctcagcccttccgttggttcttggatttgtcctttcccgccatgtcttcatcacatccacaacttccactaacacttgcgagcttcaaacttcttagtaagtaaagac

SEQ ID NO: 225021 - DNA, 394 bp, Homo sapiens
tagtggtggctgttcatgccagttctgatacatatggcacaagtagatgtcttttgaagagagaatacttctgggaaagcaattgcttttctgaaaacataataggataaatgtgggtggtgccatattttcctttgtttcctgtctggaatacagatatgaagcctggagttctagtagccattttgtatccatgaaggaaaaccaaagaatcatagcagtcatagccgaagccttgataatatagaggcaatgaaccaatgtcagcacctaacggtataacttgtccttattacgtcattaaaaataaactacagtttgcttattcactcttggtaatgttttctgttagttgtrattgaagacaagctgaaattatacaagcaacaaaaaa

SEQ ID NO: 225022 - DNA, 553 bp, Homo sapiens
aatcagttctacctccccccacccacaaactgtgtgacctggggcaagttactagccactgtctcaatgcatcccaagcatgctccatatcctggtggcttcagtgtcctaaaaaatggctcatctgatactctagttatttgctttcttgattgactcaatgaccttcattcactcccactcatgactacactttggaccttgttttcactgggaacygctccactattgaaagtctaacaaaaataacccacaatcggcatacaatgttgtggtaggttgaataaagaacccccgtcccccaaaatgttcacatcctaaaccctggaacctatattaccttatacagcaaaaaaaaaaaaaaaaaaaaaaagttgaagatataattaagttaaggatgttgagatagggaagtcatcgtggattatccaggtgggaccagtaacataatgacaggcatccttataagatagctactactgcagaagaggaaacagcaatgtgatgatggaagcacattggagcgatgtagacaccagaagttagaagataa

SEQ ID NO: 225023 - DNA, 603 bp, Homo sapiens
attttactcttaaggagcttttcaagagttttagggagggaacaaactatatttgggttttatgctagtagttgtgtgaagggtaagttgcaggggactagagtagaaacagaaatcagtttgtaagtttgttacaataacccccataaaaatcctaagtactggaactaagggagataagcaaataaaaagcctggtgaagagattaggagagaaaatagataaaagttcacaccaattgtcatagggtgtaattgtactatatccttcaatgactcagtattagactcttcaatacttcactagactttctggatgcaatgactgtaatggtaggaattttgaatatgtcagaagcaacctgtgagttataaggattctgaaaacacctcagccacacttcagtgacactagcctttcccacagaggtgcaagcttgaactaaaaaacctaaagctaccaattttcttycttattttcttcagcatgttgttgttgttgttttgatacaaagcttgtttcagattgcctttacttttatctttatttttgtcttattttactaaatgatttaactttaatttattatcttaaagacgactg

SEQ ID NO: 225024 - DNA, 590 bp, Homo sapiens
tatcatgacaataagcatctgaatgattttttggtcaattttctgctcttttaaaatcatctacacaatcccattattgccagaacctgaggcagagatttcccagtgctctaatctggatgccactgctcttaggagcagctctcagccaatgactgacccaccaggacaggaggcggtgtactgatacctcagctccttctcccctggagcaggataactctgatgcttgcatctgtactggctcccagagtttcctcagtaggattgagctccaagtacactaagtgataactgactcaataatgcacccattattggctattttcccttcctgtttcactttcccattcccctgttggactttcctccaccatctaaataacctatttgtattcagatccttgtctcaagatctgcttcwatgtgaacccaattaagccaggggtctataagaatagtaaatgcacatgtcttttgccccaagatttccacttccaggaatttatcctgaagtcatactcacaaatgcccccaaaggcatgatctttgtaacaatagtagtaaaacatcattaagtccttactata

SEQ ID NO: 225025 - DNA, 524 bp, Homo sapiens
ttgcagcaactgtttgcagcttgaggtcacaatcctaagagaattaacacaggaacagaaaaccaaatactatatgttctcacttgtaagtggggcattgagtacacacggacataaatgtgggaacaatagatactgcagacaactgggcgtgggggaggaggagaatgtgggttggaaaactacctattgggyactatgcttactacctggttgcaatatacccatataaaaaatctgcatatataatctaaagtaaaagttgaaaattttttttaaaaagctaacttaatttgtttggatattaatatgacttttaaattcacaattgacacgtaattgtatatatttatgggatacaatatgatgtttcaacacatgtatacatgatataacggtcaaattgtggtaattaccttacccatcactataaacatttatcatttctttgtgacaacatttaaaatcttctctcttctagttatcttgaaatatacactacattgttatttgctagagtcact

SEQ ID NO: 225026 - DNA, 598 bp, Homo sapiens
aagcttaatgcttgtgggtaagaaggatttactggctcaggttagggctctgtataacctggagccacttgctgagcttctgtttcctccgatgtcaagtggcaggaaatattaataatagtacctaggtaggtcttgggctgttatgaagactgcatgagaaaatagatgtaaagcgctatgcacgtggcaatcaacgaatattaaactgttggctgttattaagcccttgcatttgtacagcccttcagttcgcagagtgtatgcacgtaatcgtaccttctgagtctgaggtaggcagcctggcgtccccatccacaggagaggaactgggggcctgaggtgtagtgagcaggagaaggagattccagtctaggtctcccgtggccaatcgttttttgttcktgcatcatcacagttgaacggcaaaaagcactccatttatgtgtttctagtttaaattcccttttctcctgttagaccatttagcaacactgtacagtgttaaataaaagtgagatcataagcactctccattcaggtttgcaccacgttttataaatatggagattttccagctgaagtgctatttgtcatc

SEQ ID NO: 225027 - DNA, 512 bp, Homo sapiens
agtatgcagattgacttctatatgcctttttctcacaggaatttcaggttgagygtataccattataaagccattcctactgggtataattaaaaagagagccttaggctgggcccggtggctcacacctgtaatctcagcactttgggaggcccaggtgggcgattcatgaggttgggagtttgagaccagcctgaccaacatggtgaaaccccatctctactaaaaatacaaaaattagccatgtctggtggtgcaaacctgtaatctcagctactcgggaggctgaggcaggagaatcgtttgaacccaggaggcagaggttgcagtgagcagagatcatgccattgcactccaacctgggcaacagagcaagactctgtctcaaaaggaggggagtggagcttaaaaggaagcaaaggatttccagtcttggaaacctagaggaaggggggtccttgctatgtagtggcagaaagctgagtgacactgtagccttcagtgacaccaaa

SEQ ID NO: 225028 - DNA, 534 bp, Homo sapiens
ctaatagataataaaagaaatgtaaaatgaagcaattaactacaattcatttcagtttacggtatgagtaaggctacaactagactttctgaatgaaatgaatgatttttctaatactttgtggtaagaaacccaccccctatatggctttaggatgcttcactrtgaaatgttaaatttgtgtgtctgtttcaagaccactgtactcaattttttttttttttttggacagggtctcactctgtcacctaggttggagtgcagtgccatgatctcagctcactgcaacttccgcctcccgggttcaagcagttcttgtgcctcaacctccccagtagctaggattacaggtgcacgccaccatgcctggctgatttttgtatctttagcagagatggggtttcaccatgttggccaggctggtctcaaactcctgacctcaagtgatccacccacctcagcctcccaaagtgctaggattatagacgtgagccgccgccaccgacctgtactcaataattttatctgtgaatt

SEQ ID NO: 225029 - DNA, 607 bp, Homo sapiens
cagccagtactcacctgaaccactggaaaggcaagaatgttttccaggaccccttcccacagtgatgatttgtttcagcatttagaacacagtggccagcatagaaataactttcacaaagtgtttgtagtgtaagcgttggaagacatggatggataaatkgtcgaattcctcaggatgaggtttccagagcctcggtctgccacctgacccaactatctctaattggtggtttgcttgagtccctgtgattgcagccaagcccttttccttggctagcctcagtggaactgctcctcatcttcccaaagaatgccctctacaccccaatgtagaccgagaagggctcacacctgcagcaaagtccatgtgcatagacgtgcatatacacacccctgcataggcacacacccatatgcacacacacatgcccacagggacactcacagatcccacaaataccatggccaggtgggtcaggccagaggctggtgttaccaaccttcctggttttactggaacaaccctagtttgaccattgaacatcctgcaaccctaaaatccttcagtctcaggcaagccaggatggttggtcaccctaccaaag

SEQ ID NO: 225030 - DNA, 607 bp, Homo sapiens
cagccagtactcacctgaaccactggaaaggcaagaatgttttccaggaccccttcccacagtgatgatttgtttcagcatttagaacacagtggccagcatagaaataactttcacaaagtgtttgtagtgtaagcgttggaagacatggatggataaattgtcgaattcctcaggatgaggtttccagagcctcggtctgccacctgacccaactrtctctaattggtggtttgcttgagtccctgtgattgcagccaagcccttttccttggctagcctcagtggaactgctcctcatcttcccaaagaatgccctctacaccccaatgtagaccgagaagggctcacacctgcagcaaagtccatgtgcatagacgtgcatatacacacccctgcataggcacacacccatatgcacacacacatgcccacagggacactcacagatcccacaaataccatggccaggtgggtcaggccagaggctggtgttaccaaccttcctggttttactggaacaaccctagtttgaccattgaacatcctgcaaccctaaaatccttcagtctcaggcaagccaggatggttggtcaccctaccaaag

SEQ ID NO: 225031 - DNA, 496 bp, Homo sapiens
gaattcccttgaaactaatgaacaaatacaaaacaaaaaaatagaagttaaaaaaataaaaatagaaattatataactaaaatttaaaatgaccaaaataagccaacttgctaaatgggctaaaatatagagtggagatgacaaaatatagaaacaacaaactcaaagacagatgartatagtttactcaatctgaagaacagagaaaaatggactgaccattgggacccagggagcaacagggtaataagttctcctggttttctttctgcctcataaatcccagacttggaagtgaagaagtcagcaacctagaaatgccaacaagaacagacagaaaaaaaaaaaaaaaagccctagcaaaatcctgctctcttgagccaaaggaccaaaaaaggagcaacccagcatgagagaaaacttttcgataatatccgctttagtcaaacactacagaaaaaaaacctgtggccccaccccattcacacaaacaacc

SEQ ID NO: 225032 - DNA, 495 bp, Homo sapiens
gaattcccttgaaactaatgaacaaatacaaaacaaaaaaatagaagttaaaaaaataaaaatagaaattatataactaaaatttaaaatgaccaaaataagccaacttgctaaatgggctaaaatatagagtggagatgacaaaatatagaaacaacaaactcaaagacagatgaatatagtttactcaatctgaagaacagagaaaaatggactgaccattgggacccagggagcaacagggtaataagttctcctggttttctttctgcctcataaatcccagacttggaagtgaagaagtcagcaacctagaaatgccaacaagaacagacagaaaaaaaaaaaaaaaagccctagcaaaatcctgctctcttgagccaaaggaccaaaaawggagcaacccagcatgagagaaaacttttcgataatatccgctttagtcaaacactacagaaaaaaaacctgtggccccaccccattcacacaaacaac

SEQ ID NO: 225033 - DNA, 564 bp, Homo sapiens
atttcacaggtgaggaaactgggacacagagaggttacatgtggtgacagtttggtgccatgaagattgattgaaagatctagggctgtctagcctgaagaagattcaagggaatgtgggcctcttgtcttcagacttctctcagagtccaagagaacaggtgtatttgtacatggccactgagggcagagctggaacccaagagtggaagcatatctggacttaatgaaaggaaaaaatctgccttaggagtcagagttgtctgtgggtaaaacaggttgcctggagaggaagggagatgtctaagcagaggctggatgatcactcaagaagggaggaggtgaagaagatgttcctaaaggtttcttgtagttctgaggggctagacatctctattttctggctgcacactrgcttgaggacccaaatatgtccctttaaagtcctatggatatccatacttcagctgtcagagataaatatgcccatctctgtatgtaggaagcccctgtggcctgcttttatgctcatccttctgcacagagtccctaattatcttctttt

SEQ ID NO: 225034 - DNA, 622 bp, Homo sapiens
ttatggttttgtgctttgcatttggatctatgatccattttgagttaatttttgtcaaagttgtctagatttttttgtataaatgtccagttatcccagcaccatttgttgaaaaaaaaactatcccttctccattaggttgcctttgctcctttgtcaaaaatttattgactgtatttgtgtgggtctatttctgttccattaatttgtggtatttcacaaataccactgtcttgattactgtagctttatagtaagtattgaatcaagtagtgtcattcttcaactttgttgttattcttcaatattgtgttggctgttctgagtcttttgcctttccatataaactttagaatcagtttgttgatacccacaaggcaacttgctgagatcttgatattgtttggctgtgtccccacctaaatctcatcttgaattgtggttcccataatccrtacatgttgtggaggggcctggtgggaagtaattgaatcataaaggcagttactcccatgctgttctggtgatgctgagtgagttctagtgagatctgatggttttatgaggggctttttcccctttgctcggcactcctttcgcctgcctccatgtaagacatgcc

SEQ ID NO: 225035 - DNA, 563 bp, Homo sapiens
catggctttaaacagcccttttttttttgccaacaactcttatcggggatcctaccccattattcgtgtaggttctttctattttccctaagcgtcggccagcttgagaaataaagggacagagtacaaaagagagaaattttaaagctgggcatccgggggagacatcacatgtcggtaggttctgtgatgtcccacaagccacaaaaaccagcaagtttttattagggagtttcaaaaggggagggagtgtgcgaataggtgtgggtcagacatcaagtactttacaaggtaatagaatatcacaaggcaagtggaggcagggcgagatcacaggaccacaggactgaggcaaaattaaaattgctaatgaagtttcgggcaccattgtcattgataacatcttatcaggagacagggttttgagatcaacgggtctgaccaaaatttattaggygggaatttcctcttcctaataagcctgggagcactatgggagactggagtctgtttcacctctgcagtctcgaccataagagatgaccatgcccaggagggccagt

SEQ ID NO: 225036 - DNA, 582 bp, Homo sapiens
cacattatttatgtaccactaagaaagaaaagtaatttcattgtcatatcatcatgtaatatttttgaagacattttaaatagaaaataaactcaacaatgaacataatttaacttaagtgactataatatgagcagctattacaagttcatgcatatggaggccatgataattacatcaaaactgctgcytgataagtgtaattttaagaaaccattgattttcagatgtgtacagaattcagattacaatttgagaaaaagtgttattagaactgatgaaatttggtttatgtgcttgttagttttcatgtatactctaacatgtataacgtattagttataattgtagtattctaattgtgaatacacgcatactctaggggtgattaatgagtatttaaagactcaggtaaaagtcagaggggctcctgtaagtttcagctaacattatctccaaccaacaccaaaggctttgttaatgagcataacataaggtaaaaatgaattatcattgcctagatgtattaaagacatatggactagctgaaaatattgtacagacactctcagccctgcattg

SEQ ID NO: 225037 - DNA, 469 bp, Homo sapiens
ttcccagggtcagacatcacacttcagatgccttatagacttggcctccatggatgggcatctcttccaccttcttatttgcttttaacattttgttttgcacatttggtcttttgtgggtctcctatctctgactgatacccacaggtctcccagtccagggaacctccactgaaagttttgtttctttattttagtttcccttcagctctcccctcaacaccctcatagaccatgcccccttctctcccatcttcrgacttccaactccaatgaagcccacaaatatctgcctttggttggcttccgttaactcatatttacttcacttctaagaaaagctaaccctgagaaagcttgaatacaatccttggagccagttcttaaagtgacctcttcagtctgctggcttcatttaagaagtggcacatggggaaagagtgggctttgcatgcatactgggattcaa

SEQ ID NO: 225038 - DNA, 539 bp, Homo sapiens
tatactttgaccatttttttccattaaagccaaccatacacctttaagtcygggcagcccgaatgtctaagtattccctttgtttgcacacagccctggtcttctatcctcttatgcttggttcctccaagcatgcttggagaatgctccctcccatccttgacaccacttctcacctacaatcaaaacttggttcagatgcctcctccaggaagcattccatgctcctcctagctgggaataattctttcctccttttcattcccttgtagcaatgatgacttcctatcttgcattgtgtacatcttacctcccttgtttgatggtaagctccttgtaggtgagatccctgttcaacttggagtccccagcactcacagaggacctagcccatggtgatatgcagtaactttgtgacatgcaataactttgaaaatgtattaatgaacatattaggaaccatttgtgtgggcccctattctggcttttttgttaattgggcaattgtgttcaggagaatgaaaccctgggaataaatc

SEQ ID NO: 225039 - DNA, 622 bp, Homo sapiens
tgcatgttctcacttataagtgggagccaaatgttgagtacacatggacaccaggaaggaaacaacagacaccaggacccacttgagggtggagggagagtggcagctgagtactatgtttaatacctgggtgaygaaataatctgtacaccaaacccctgtgacatgtaatttacctatataacaaacttatacatgaatccctgaacctaaaataaaagttaaaaaaacttgaaaaagaaaatagaaaacttggtggtacttctcaaaaacaaagatattctagcacagaaacaatgcttccagagaagaaagaaagagtttcttgagcatctactgtataccaggctctgagatagtttatttaccgtgtcatctagagcagaggtcaccagcctttttggcatcagggagaggtttcgtggaaagacagtttttccatggatgggcaggcggggtgtgggggatggttttgggatgaaactgttccacctcagatcatgagacatgagtcagattctcataaggagtgtacaacctagatcccttgcgtactcagttcacaatagtgttcccactcctgtgagaatctaatgccgctgctgatgtgagaggcagcaga

SEQ ID NO: 225040 - DNA, 620 bp, Homo sapiens
ttggttactgtaatcgtgtaacatagtctgaagtcaggtagggtgatgccttcagccttgttctttttgtttagaattttcttggctattcatgctccattttagtttcatactaaataattgtaaagtagctttttctagttctctaaaaaatgtcattggtagtttaattggaatagggtcaaatctacaaatttctttggacaatatggccaatttaatggtattgcttcttcctatccatgagcatgaaatgtttttatttgtttgtgtcatctcggatttcttcgagcagtgtttttagttcttcctgtagatactttttgcttcccttgttagctgtatttccaggcagtcttttgtgtgtggcagtcatgaatgagattgcatttctaatttggctcttggcttaactgttattgacctatagggaggctatatatrtatagatttttaattctgagactttgctgaagttgtttattagcttaagaagcttttgggctgagactatggggttttctagatataggcttatgtcatctacaaacaggaatagtttgacttcttctcttcctatttgatgccctttatttctctttctattgcctaattgctct

SEQ ID NO: 225041 - DNA, 619 bp, Homo sapiens
taaagtcaataggaagaaaagaatcttaagagctgtgaggcaaaagcattaggtaacctataaaggaaaacctgccagactaagagcaggtttctcagcagaaacattacaagccagaagggattggggtcttatctgtagcctccttaaagaaaataattgtcagcccaaaattttgtatccagtgaaactaagcttcctaaatgaaagagaaataaagtctctttcagacaaacaaatgttgagaaaatttcccaccaccaaaccagcactacaagaaatgctaaagaagacagagaaggtagcctattagaagcagctgtggtccgtggcagttatggagaggaatgaaaaggggcaagtgaattcaacaccttcaacagacatatccaggttcttgcattgggactgaataggcaagcaactcggacccacggagagcaaggacaagyaggggtgggggtgacagctcacccgggagcagcgtggagccaaaggaacccccatctccagccaggggaagtggtgagtaattgtgtgacctgcccaggaagccatgcttctcccacaaatctttgcaacctgtggaccaggagatcccctcgagatgccacaccac

SEQ ID NO: 225042 - DNA, 384 bp, Homo sapiens
acaaaaagtcttgtctgagcaaatgagaattgaatgaagtgggttaggaggcaaggagaatggagaataggagatagagataaatgatatatttttcatgcccatcaattattcagcaaggtttacattcaagagtattgttcccagcactgaccctgtaaacaaaaatatgtcactttgtttcatgggaaacagaaaatttaagagtaggcaaggagcatgaccagccaggtagctgcaaggaggcaaaaagaccctcccagaaaatctaagacaaatctggagggaggcctatgtttagtgtttggtacataawctgtgttgacagagtcttcgagagtatcaactaatcatagacccaaagtccttagatttgttaagaac

SEQ ID NO: 225043 - DNA, 576 bp, Homo sapiens
ggaattagagaattaaggctctaattctggatctgtcactaacttgttgacttcagattaattacttcatttttctgggctcctttttcttatttgtagagtgaggaaaataatccccatctcttatggttgtttaaagtgctccaaataacatagtaaacatggacgtgttttataaggggaaaatactgattatgtaagcatggtttttagttatctttagttactcacargattctgcttgtggaaatatgatttgggaattttcttagtttaaaatatttgcttttaaatgtactaagaagagaccaatatgtgtggtttccctggaccctcttagatggcccccttgctaatacacagtctactaaatgttcttctctgcccacagggtttgtggactgctgcctatgttgttttcaaaggcatttgcccccatttcattcagatagcactagaaagctcagctgtacttctctttagccctagttgtttctccatctcttttatttacccaataacaaagccctcacatattgaagtagtattcatcttttgagatgttgtttttctcac

SEQ ID NO: 225044 - DNA, 619 bp, Homo sapiens
aactgtgtgagggagtaagggcatatgagaactctgtacttactatttaattttctgtaaacctaaaacttctctaaagatgaaatctaaattttttgaaagtgactaactcaagattgccctgctcatttttttattgaataagtaataaaaggacatctagatatagcaccaaacacctagaacactccagaaggtgtcctagcaaaagtctccaatagtttggattgtgtccagggtccagaagaccaccccaattttaataattctttaataaatcttttttgagcaggactcaaagtactcaacatagtagtactcacagctaagatttatttcagtgaaagcgtacacagccgactgagcaaagagaaaaggtgcctggggcaaaatgcagaggaagctaggtamaagcttccaaaagatctctcacggtggtgtcacccaagacacatttaattcttccttcaacaagttgtaacaacacagagaaaatgttatcagtcagggaagctcataagagaatgagtagcttagggttttactgcggggctagttacacaggcacactctgcccagcacaaccaaaattcaagagtaccagaagaaaaaggtgttc

SEQ ID NO: 225045 - DNA, 419 bp, Homo sapiens
tatgggattcagctgacctggactgaattcacctgggcttgcttatgcatctgtggtgaactgccaggcaaccaggtggctctgctgatcttagcaaggtatgtttacacttccagggrttggcaggctgtttgctgatctatgatgtctcagttggagtgattgggattactggggtggtttagggtagccagggtgcaagagaaggagcaagtctgaacatgcaagcatattttaagtctttacttatgtcacatttgctaatgtaacataggtcaagttacgtgactgattttgcagtcattgtgtgagagcattacaaagttcaaagttgcaaggcaaagatgtgaataagagagatgtattagttaggattcatcagagaaacagaatcaataggatatatgtagatatggaga

SEQ ID NO: 225046 - DNA, 350 bp, Homo sapiens
cttatgcatctgtggtgaactgccaggcaaccaggtggctctgctgatcttagcaaggtatgtttacacttccaggggttggcaggctgtttgctgatctatgatgtctcagttggagtgattgggattactggggtggtttagggtagccagggtgcaagagaaggagcaagtctgaacatgcaagcmtattttaagtctttacttatgtcacatttgctaatgtaacataggtcaagttacgtgactgattttgcagtcattgtgtgagagcattacaaagttcaaagttgcaaggcaaagatgtgaataagagagatgtattagttaggattcatcagagaaacaga

SEQ ID NO: 225047 - DNA, 398 bp, Homo sapiens
tatgggattcagctgacctggactgaattcacctgggcttgcttatgcatctgtggtgaactgccaggcaaccaggtggctctgctgatcttagcaaggtatgtttacacttccaggggttggcaggctgtttgctgatctatgatgtctcagttggagtgattgggattactggggtggtttagggtagccagggtgcaagagaaggagcaagtctgaacatgcaagcatattttaagtctttacttatgtcacatttgctaatgtaacataggtcaagttacgtgactgattttgcagtcaytgtgtgagagcattacaaagttcaaagttgcaaggcaaagatgtgaataagagagatgtattagttaggattcatcagagaaacagaatcaata

SEQ ID NO: 225048 - DNA, 435 bp, Homo sapiens
tttggttgttacagctggtaactgagaggcagggatggtgccactggcatctggtgggtagaggcaaaggatgcggcccaacgtcctacaatgcataagggatccccccacccccaataaagaatcatctgactccattagagtggtcctgacttaaataggccagagaaagctgaaattagactaatgtaattttggggtttggcckggcacagtggctgctcgggaggctgaggcaggaggatcacttaaggccaggagtttgaggctgcagagagcatttgtcatgccactgcattccagccttggtgacagagtgagaccttgtctcaggagaaaaaaaaaaaaagttttgaggttcgaagcaattagagattagttgagggcttttcagctttggttgcccatgagatgacctgggaagctttaaaatac

SEQ ID NO: 225049 - DNA, 420 bp, Homo sapiens
taactgagaggcagggatggtgccactggcatctggtgggtagaggcaaaggatgcggcccaacgtcctacaatgcataagggatccccccacccccaataaagaatcatctgactccattagagtggtcctgacttaaataggccagagaaagctgaaattagactaatgtaattttggggtttggccgggcacmgtggctgctcgggaggctgaggcaggaggatcacttaaggccaggagtttgaggctgcagagagcatttgtcatgccactgcattccagccttggtgacagagtgagaccttgtctcaggagaaaaaaaaaaaaagttttgaggttcgaagcaattagagattagttgagggcttttcagctttggttgcccatgagatgacctgggaagctttaaaatactga

SEQ ID NO: 225050 - DNA, 434 bp, Homo sapiens
tttggttgttacagctggtaactgagaggcagggatggtgccactggcatctggtgggtagaggcaaaggatgcggcccaacgtcctacaatgcataagggatccccccacccccaataaagaatcatctgactccattagagtggtcctgacttaaataggccagagaaagctgaaattagactaatgtaattttggggtttggccgggcacagtggctgctcgggaggctgaggcaggaggatcacttaaggccaggagtttgaggctgcagwgagcatttgtcatgccactgcattccagccttggtgacagagtgagaccttgtctcaggagaaaaaaaaaaaaagttttgaggttcgaagcaattagagattagttgagggcttttcagctttggttgcccatgagatgacctgggaagctttaaaata

SEQ ID NO: 225051 - DNA, 418 bp, Homo sapiens
taactgagaggcagggatggtgccactggcatctggtgggtagaggcaaaggatgcggcccaacgtcctacaatgcataagggatccccccacccccaataaagaatcatctgactccattagagtggtcctgacttaaataggccagagaaagctgaaattagactaatgtaattttggggtttggccgggcacagtggctgctcgggaggctgaggcaggaggatcacttaaggccaggagtttgaggctgcagagagcatttgtcatgccactgcattccagccttggtgacagagtgagacmttgtctcaggagaaaaaaaaaaaaagttttgaggttcgaagcaattagagattagttgagggcttttcagctttggttgcccatgagatgacctgggaagctttaaaatact

SEQ ID NO: 225052 - DNA, 546 bp, Homo sapiens
cctgctaggctcttcccacagctgatggaacatctggccaggttttcccacatcttcattgaaatgatggaccaagctatggctccttaattcccatttcacactgctacatggatttcaaagttgctcaatgttctcaggttcaggaaggctgctaatattagcacttttggacccagatagcaagaatcctttcctgaaagaaacttctcagctcctccatctgagactgcaggaatccagacaaggcccasgtttgttcagaaggccaagttgctgttgggcagtgcttctcagtggagtccccaacccagggctcttattacaatgcagattcctgggccctggcccaacttgataaaccaatctccagggatggagctcagatgtctgcagctgcaggtggttctgatacatgccgaaagttatgaaccacaactgaggatagtttcagaccatcgcatggcccctgtctcatgcttcacctcactccagaccctcctgcagctggacccattcagggacatccagaatcctagtgccccc

SEQ ID NO: 225053 - DNA, 481 bp, Homo sapiens
agagtccatctacctaggaaaagagcagtgaagtcgcatctgtatctgtaccacagtctagagaggcacactccacatttattgcagttggctctgcccccacacttggcaacaggcaccccagatctgttgtgtaacacaaataaactcacaacaacaaaactattaataccaccacctgatatccagatgtcttgatcatttttatcttcgtggtttctaaaagatcattgtacctactatcttatttgacaggataaatattattattatttcattatgaagatgagaaaatagatggttaagaaagaggtaagctctactaaagagattgtagatatctgagattttatagatagtaagtgggagtcagmactagaagctaagtcttcagactccttgtgcggtgctttctgctattctctgctaaatctgctcttcagtgcggcttcactatttgtttgaagaagggtcccaggat

SEQ ID NO: 225054 - DNA, 363 bp, Homo sapiens
caccccaccaccaccatcaccacataagtaaagactgagagaggaagagacagtcagcttgaggaagatgcagattcaggagagaggctagtgggcagggctgctgtttcctctgcccaaagccaggggtcaayggctttaagagactccctgggaagtttggaggtaccttcaaaaaggggagcctgagatttcaccttctgtatgggcatctgcttggccaacagatttggtaacctgcccttacatttcctgaaacaggggaaaggagaatgggtaaagatatgcatgtgccttgtgagctgtgggacaccattgatgagagccaccctcccactgcccagtgggaaccccaccccaaaa

SEQ ID NO: 225055 - DNA, 363 bp, Homo sapiens
caccccaccaccaccatcaccacataagtaaagactgagagaggaagagacagtcagcttgaggaagatgcagattcaggagagaggctagtgggcagggctgctgtttcctctgcccaaagccaggggtcaacggctttaagagactccctgggaagtttggaggtaccttcaraaaggggagcctgagatttcaccttctgtatgggcatctgcttggccaacagatttggtaacctgcccttacatttcctgaaacaggggaaaggagaatgggtaaagatatgcatgtgccttgtgagctgtgggacaccattgatgagagccaccctcccactgcccagtgggaaccccaccccaaaa

SEQ ID NO: 225056 - DNA, 568 bp, Homo sapiens
tccaccctcccgagctcccagaagtagaggaatggggagcaggtgagagggctagtgggggggcattccagtagaagggaacctggaaagttctttcctttcttctctgcatgggctcagtgccagggagtcaggmcaaaaggtaataaaaaatccacctgtcagaatctgcgaagatcgttttgatgagggaaaacttggctggaggacagagactgcctggccgctgaggttacaccacagccctgggatcggtcctgaaattagggttggtgcaagggagcagacaccaggaaaaggccatcagtggatgggacagccagaagccctgcctatttcctgtttctctccaggactcctgggacccatctgagccatccctctacgaacactcattttttcctgagctgtggctcattcagctagggtccaagagcggaggacttttggtatgaaaaataaaccaaaggacactgggattgggctggatttgaatgagcaggtccaggggactctgggcaagtccctccttgcctcagtttccctgcaggaaggtaaccagtccagt

SEQ ID NO: 225057 - DNA, 270 bp, Homo sapiens
cggggcctccctcagggtgtccacgcagcttctaatctctaatcaatctttccagatttgctgccaaactcattgagggtgtgttggatttcaaggtcatgattgacaagtgagcatccccacccctgcccagccccmcacctgcccaggcctgcttaattaccacagccacctctgaccccagccctggcccggcatgccagcttgggccctgggccctgctccagctgctggaatctcctcttggtgggtgaccctgtcccatcccaa

SEQ ID NO: 225058 - DNA, 270 bp, Homo sapiens
cggggcctccctcagggtgtccacgcagcttctaatctctaatcaatctttccagatttgctgccaaactcattgagggtgtgttggatttcaaggtcatgattgacaagtgagcatccccacccctgcccagccccacmcctgcccaggcctgcttaattaccacagccacctctgaccccagccctggcccggcatgccagcttgggccctgggccctgctccagctgctggaatctcctcttggtgggtgaccctgtcccatcccaa

SEQ ID NO: 225059 - DNA, 360 bp, Homo sapiens
ctggtcttgaactcccggcctccagcaatccccctgcctgggcctcccaaagtgctgggattacaggtgtgagccactgtgcccagcctacatcctatatttttatttgctaagcctggtgaccctaaatgaggccttttccaagctctcccttgacctctcgtcgcccatggtgtgagaagggaaggagaccacaggatggccatcggcttccataatttcctgggtttgtctcaccccatccttggcatcaggacttgttcctgaagcygaggggccgactggaagggccaacatagggtgagtggttggggtccagggtagacagctgtcaccgcgtgtcagagtgtgtggttcata

SEQ ID NO: 225060 - DNA, 535 bp, Homo sapiens
ttacagggaaatgtaaggcatgaggggcagtgagagctccgaggacgtgggcgtgggcttctgggcaggatgggagcccactcaggccctgggagatgggccatggaggcacgtgcacctgtagcctgtgctgtgctcggtggaggttggcctgctgctggcaccccagcggctcaacatgtccgaaagaagccctctgagtgtggggctggctgcagagctgaagggygggtgtcacttcccagcatcctgggccacaggagctccaggatggacaagctgaactcagccacttgtgctcctttttggttcgccggggcagaggccgcttcatgctcgtgagaggtgagaggaagaagccttcctgggaggaaaatcctgggcagaggttggggttggaaggagagcaaagctgagggtttggtgtgcccaagacttgggcctaagtcaggtgatatgtttttcttgaatcccacaagcattaagcatgtgttatatatgtatgaggtattggaggaatgtggagatgagaaaa

SEQ ID NO: 225061 - DNA, 535 bp, Homo sapiens
ttacagggaaatgtaaggcatgaggggcagtgagagctccgaggacgtgggcgtgggcttctgggcaggatgggagcccactcaggccctgggagatgggccatggaggcacgtgcacctgtagcctgtgctgtgctcggtggaggttggcctgctgctggcaccccagcggctcaacatgtccgaaagaagccctctgagtgtggggctggctgcagagctgaagggcgggtgtcacttcccagcatcctgggccacaggagctccaggatggacaagctgaactcagccacttgtgctcctttttggttcgccggggcagaggccgcttcatgctcgtgagaggtgagaggaagaagccttcctgggaggaaaatcctgggcagaggttggggttggaaggagagcaaagctgagggtttggtgtgcccaagacttgggcctaagtcaggtgatatgtttttcttgaatcccacaagcattaagcatgtgttatatatgtatgaggtrttggaggaatgtggagatgagaaaa

SEQ ID NO: 225062 - DNA, 629 bp, Homo sapiens
gggcccaaaacaggtccccacccaagtagtcttacctgtaaggtcaccaagctggctgtggtggccaggtcaatcttcccaaatttgatgagatttccataagggttaaaaggaagagtgaacggtttcctttggcttaggggcttttctctaaaattccttgtcttcttcccatctggacttttccctctgaactattagcttactgccaaccaccgtcyccacagaaatcacaagagtttaggcaaatgaaaagcaagttctgcccagccttttacatctaagcacaacagcccatactaggacaacaaattaccaatgacttaatgactaaggcacagcattctcttcaacctctaaagaaaagcccgtaatgtcctctacttaatacaagtgaaaaatatgagaacatgttttggaatatttttgcttcaatttttgaaggtgaagagttccttctattaattcaagttaactagagtcagaagatactacttagtaatcaactttactgtgctttcacctaaaatttttcctccaaattatttaggatttgccttctgttcagaaaattagtttccacaatatccttcactatgccagaatgctgactgacttaaaaaaaaatg

SEQ ID NO: 225063 - DNA, 328 bp, Homo sapiens
gaattccaggacctagggtgggggtgggagggcagttttcctggctgtgggcgacagccctgacatcacacccagtgctccttgcaggctggggtkggggagggacgggagagtttccaagggctgcaataatgggagcattcactggggaaggcagctgaagaccttttgtttaggtttccattccagaatccaaattaagggcagagactggcccggacaacctaaggccctgatcactcttagtctggaggcataaactccaccagctacctgaacagatcttaatataaagaatcattaactacgcatcaagttgttaactcac

SEQ ID NO: 225064 - DNA, 476 bp, Homo sapiens
cataacttgaataaaggggtaaacaattattagraagtgagctccagattgtttgtccacttgggttcaccatctctggtgcagatgtggccccttccctaatgtgattactaacaggtaatccagcaccaggcaagtgtgagtttctgacaatttgcagaattcttaccaagcaggaactagaaatcacatgggaatttgagtgagacctggctattgaggacctaaataaatccttatggaatcaaatcaataatatatatatgcgtatctaaattttcatattaataattaatttgcctatatttgcaaattgtataacataagaagctataaaatgtatataaaaattagtgtttataacatttgtaacactgtcccatttaatcctcacttccatgtagttccattttacagatgggaaagttgaggcccaggaaaggttaaaaggaatgatctgagatcccgtagctgag

SEQ ID NO: 225065 - DNA, 561 bp, Homo sapiens
ctttcaatagaaccttgaatgcttttgtcaggaaaaataattcaactggcaccccttgaggaatcgtggaggaaattttgccatcatttgcattttgagtatttcccgaattttaattatccgtgattgaaccactagtatgatttcaccatcttatattacaggtttagtatgatatactattttttatattgacccctacttttactgatatagttttggttctatttgttttttagatgatagctgagtggtttattgaattgtctcagcttggaggagtaaaaacatgttattgttttatttttstcgaatcattgcccctggtactatgtcaaatctctctaacccctgaaaaaagtattgaatcccgtcttgggcagatttcaaaaatctctcaggggcttttggttattaaagttgcaattgtccattttcagtttttagttatgagccagtataaaatttctttctctactccattgaaacatatatattcaaccactgcagcccaggttactggcatcagacttgaagaaggagagggcaaaattgactctt

SEQ ID NO: 225066 - DNA, 469 bp, Homo sapiens
caatgctgataaatacaagaggcaggatttatacccaggcagtctgattccagatcctgttctcttagtctttagcacttaccgtctctctattcaaatataacatagagaaattaatttgtctgcatcaaatcaatttgtaagtatcataaaatgctagatatgatataattttgtgaagaaaatgattctgtattttctcattatttccttctggtgaatctatttctcttctattacaatctgatcagtcttacaggaaagcaaaatcaaakattactgggtacattgtctgtggtaaataacaattttaagatgctaaacctaccagtatttagcaatatttcacttagattatatactaattatacctacatattatgctgcttaggatgtatattatttataacaagccattgttgaagagtgattagttctacaagggctggtccttggcttgatatttgtc

SEQ ID NO: 225067 - DNA, 469 bp, Homo sapiens
caatgctgataaatacaagaggcaggatttatacccaggcagtctgattccagatcctgttctcttagtctttagcacttaccgtctctctattcaaatataacatagagaaattaatttgtctgcatcaaatcaatttgtaagtatcataaaatgctagatatgatataattttgtgaagaaaatgattctgtattttctcattatttccttctggtgaatctatttctcttctattacaatctgatcagtcttacaggaaagcaaaatcaaatattactgggtacattgtctgtggtaaataacaattttaasatgctaaacctaccagtatttagcaatatttcacttagattatatactaattatacctacatattatgctgcttaggatgtatattatttataacaagccattgttgaagagtgattagttctacaagggctggtccttggcttgatatttgtc

SEQ ID NO: 225068 - DNA, 469 bp, Homo sapiens
caatgctgataaatacaagaggcaggatttatacccaggcagtctgattccagatcctgttctcttagtctttagcacttaccgtctctctattcaaatataacatagagaaattaatttgtctgcatcaaatcaatttgtaagtatcataaaatgctagatatgatataattttgtgaagaaaatgattctgtattttctcattatttccttctggtgaatctatttctcttctattacaatctgatcagtcttacaggaaagcaaaatcaaatattactgggtacattgtctgtggtaaataacaattttaagatgctaaacctaccagtatttagcaatatttcacttagattatatactaattatacctacatattatgctgcttagratgtatattatttataacaagccattgttgaagagtgattagttctacaagggctggtccttggcttgatatttgtc

SEQ ID NO: 225069 - DNA, 629 bp, Homo sapiens
cctatgggataccatggtggaaggatccaagctcctcattgaggagggcagccaacagagccacctgcccaagaatattggttctgaagcttgcctaaaaaagaagtcatctttataatgcgataagccactgagacttggggttgtttgacatagccatcagcctagcccgtctgatgtaatgatggagataagtgatcagaaaaagaagcaaagaaaattcttgtgtgtgggaatgattggaggtggtttcttcaggggttagtatttgagctcatttagttagtagaaatgatggaggaggacagatggtgaatgtcgttagtagtttcagattttactgtggtcattttcccatcttctccagaccaaacatttactcaataaagcattttccatttaacttctcagatgttattaagccaagaaccccttcttttcaaatggaatctcatataaaatcctgatatttaaacagatactactttagatactcttactgaaataaaaacagggctagttctgacttcttggccactttcttactaattacatgcccctagatcactcccatggaacccyaaaatgttgaaacagaatttgagcatcagtgtatcagaatacactca

SEQ ID NO: 225070 - DNA, 499 bp, Homo sapiens
ctgccttaatttcattatttacctaaaagtcattcaggagcaggctctctaatttctatttaattgtatggttttgagtgattttcttagtcttgagttctatttttattgtgctgtggtccaagagagtggttggtatgatttcagttattttccattttctgaggatttcttaatatctgattgtgtggttgatcttagtgtatgtgacatgtacagatgaaaagaatgcacactcttttgttttcaggyggagagttatgtagatatttattaggttcatttggtacagtgttgatttcaggtcctgaatatctttgttaattttctgcctctctgatctgtccaatactgtcagttgagttttgaagcctcccactattattgtgtgagtttacatctctttgaaggtctctaagaacttgctttatgaatctggagatttataaattcaaaggtgacattttaaaggttgttgggtcccttaagaatatgataa

SEQ ID NO: 225071 - DNA, 499 bp, Homo sapiens
ctgccttaatttcattatttacctaaaagtcattcaggagcaggctctctaatttctatttaattgtatggttttgagtgattttcttagtcttgagttctatttttattgtgctgtggtccaagagagtggttggtatgatttcagttattttccattttctgaggatttcttaatatctgattgtgtggttgatcttagtgtatgtgacatgtacagatgaaaagaatgcacactcttttgttttcaggtggagagttatgtagatatttattaggttcatttggtacagtgttgatttcaggtcctgaatatctttgttaattttctgcctctctgatctgtccaatactgtcagttgagtkttgaagcctcccactattattgtgtgagtttacatctctttgaaggtctctaagaacttgctttatgaatctggagatttataaattcaaaggtgacattttaaaggttgttgggtcccttaagaatatgataa

SEQ ID NO: 225072 - DNA, 501 bp, Homo sapiens
atgctttatatgaattatctaatttattgtttataatgctaaggattagacatgmcttttttaaatttttttctgaaattccagaaaacaaactgaggcttagagaatttaaactggttttgtcaaagtagtagagatatagatattagaataggggtcaaagtagggaaatccaaagcattctaacccaaagtgaatgcttataacttcaccactccaatagtttcctacccttagcagagcccagagagaatacatcaaacatataaatttttaaattaggaattaagcatggaggaagaaagtctagacatataagagttacctatacagtgtatgcatatatacatttgtctgtgtgtgtacacactggcatgtgtgtaagcaggaaggaggggaagcttatagtgatctgaagacaagtactaccaacatctagtaacatctgaagtgagtagagccagaaagaagtgagaacaaagagcacaggaatactacgta

SEQ ID NO: 225073 - DNA, 547 bp, Homo sapiens
gtcagccccagttaatttcctcactaatgaaactccgcctgcttgtttctgaaagacagaggatgcactgagaccctcaacctttgtatttgctaatctgtacatcgtaagtacttagcacggaattgactcagtgtctacatcagggcagcacaaaccagcatggggctgtggctgactttgatttggaatcctaagtgagccccctcagcaggatgcctgagctcacatcacctgcccttgtcaatcattttgcctttccctccaattctatttcagatgagactcccaaggaaacacgggaaatcatgccatcctcagaggctgggaaagttcagtcccatccgaaacccaaatgggcytaagagcttctagttttaaaaataattttaaagctcttgatacttttgtctctaaagatgtattttacagtgggatggccacatatacgcaaattagcttactataaaatggtctttatttttaacagtagatttaatttactgtgtaacccaggggagtccagaacaggaaaaggcccaaagca

SEQ ID NO: 225074 - DNA, 516 bp, Homo sapiens
taaaagtattaaaataattatagatctgataccaatgaagatcaactcaatcaagtcagtctctctctctcccgcccctgctttttttttttttttttttttttttttgagatagattctcactctattatccaggttggagtgcaatggcacaatctcagctcactgaaacctctgcctcccggsttccagcgattctcatgcctcagcctcccgagtagctggtactacagatgcctgtcaacatgcccccctaatttttttttttttaggagagacagggttttgccatgttggccaggctggtctggaactcccagcctcatgtgatccgcccaaagtgctggaattacaggtgtgagccaccacacccagccaatgtctctacatccatctctttgattttactcttgaccagtatttctcaaacgtccttttacttgaagaaaaaaaatttatgacttcaatccttctaagtcactttttgaatcacacagcttcttatatatttacaaa

SEQ ID NO: 225075 - DNA, 544 bp, Homo sapiens
aagatcaactcaatcaagtcagtctctctctctcccgcccctgctttttttttttttttttttttttttttgagatagattctcactctattatccaggttggagtgcaatggcacaatctcagctcactgaaacctctgcctcccggcttccagcgattctcatgcctcagcctcccgagtagctggtactacagatgcctgtcaacatgcccccctaatttttttttttttaggagagacagggttttgccatgttggccaggctggtctggaactcccagcctcatgtgatccgcccaaagkgctggaattacaggtgtgagccaccacacccagccaatgtctctacatccatctctttgattttactcttgaccagtatttctcaaacgtccttttacttgaagaaaaaaaatttatgacttcaatccttctaagtcactttttgaatcacacagcttcttatatatttacaaatataaaagcaggaatgaatccatatgctacagatattggtgagttgcagttgtggtctctgaaag

SEQ ID NO: 225076 - DNA, 544 bp, Homo sapiens
aagatcaactcaatcaagtcagtctctctctctcccgcccctgctttttttttttttttttttttttttttgagatagattctcactctattatccaggttggagtgcaatggcacaatctcagctcactgaaacctctgcctcccggcttccagcgattctcatgcctcagcctcccgagtagctggtactacagatgcctgtcaacatgcccccctaatttttttttttttaggagagacagggttttgccatgttggccaggctggtctggaactcccagcctcatgtgatccgcccaaagtgctggaattacaggtgtgagccaccacacccagccaatgtctctacatccatctctttgattttactcttgaccagtatttctcaaacgtccttttacttgaaraaaaaaaatttatgacttcaatccttctaagtcactttttgaatcacacagcttcttatatatttacaaatataaaagcaggaatgaatccatatgctacagatattggtgagttgcagttgtggtctctgaaag

SEQ ID NO: 225077 - DNA, 378 bp, Homo sapiens
ttccccaaggtagtcacttgcgaaagctcaaaatcacgtgttttccacccattccacacatgtgygcatgcattatacttatatatctctacgtatgttcttcatataaatggcatcatagcatatacattattctgtcacttgctctttttaattactggtagttgacattttttatactgatacatttatgtcatcttttctaatgttattatagttttcagctgtatgttcataccacaactcatttattttgtgctactttaatgagtatttaggcagtttccagagtgctgctactgctatctatgctgtaaccaatacgcttatacatatacacatatacatatatattttgaagaacaatcatacagccca

SEQ ID NO: 225078 - DNA, 378 bp, Homo sapiens
ttccccaaggtagtcacttgcgaaagctcaaaatcacgtgttttccacccattccacacatgtgcgcatgcattatacttayatatctctacgtatgttcttcatataaatggcatcatagcatatacattattctgtcacttgctctttttaattactggtagttgacattttttatactgatacatttatgtcatcttttctaatgttattatagttttcagctgtatgttcataccacaactcatttattttgtgctactttaatgagtatttaggcagtttccagagtgctgctactgctatctatgctgtaaccaatacgcttatacatatacacatatacatatatattttgaagaacaatcatacagccca

SEQ ID NO: 225079 - DNA, 378 bp, Homo sapiens
ttccccaaggtagtcacttgcgaaagctcaaaatcacgtgttttccacccattccacacatgtgcgcatgcattatacttatatatctctamgtatgttcttcatataaatggcatcatagcatatacattattctgtcacttgctctttttaattactggtagttgacattttttatactgatacatttatgtcatcttttctaatgttattatagttttcagctgtatgttcataccacaactcatttattttgtgctactttaatgagtatttaggcagtttccagagtgctgctactgctatctatgctgtaaccaatacgcttatacatatacacatatacatatatattttgaagaacaatcatacagccca

SEQ ID NO: 225080 - DNA, 606 bp, Homo sapiens
ctacctgccattaacacacccattccccaaggtagtcacttgcgaaagctcaaaatcacgtgttttccacccattccacacatgtgcgcatgcattatacttatatatctctacgtatgttcttcatataaatggcatcatagcatatacattattctgtcacttgctctttttaattactggtagttgacattttttatactgatacatttatgtcatcttttctaatgttattatagttttcagctgtatgttcataccacaaytcatttattttgtgctactttaatgagtatttaggcagtttccagagtgctgctactgctatctatgctgtaaccaatacgcttatacatatacacatatacatatatattttgaagaacaatcatacagcccagttcagagcaaattcttcgatgtgacattactgggtcaaatgatgtgtgcatttaaaattttcacagatattgccaaatagaatcaaagaggttttacaacaatttttatttttaccatcagtatataatgattcatttttaccctaagaaatcatcagtcattttgtcattgctgatatggttggtgaaaatacgcctgtaattt

SEQ ID NO: 225081 - DNA, 606 bp, Homo sapiens
ctacctgccattaacacacccattccccaaggtagtcacttgcgaaagctcaaaatcacgtgttttccacccattccacacatgtgcgcatgcattatacttatatatctctacgtatgttcttcatataaatggcatcatagcatatacattattctgtcacttgctctttttaattactggtagttgacattttttatactgatacatttatgtcatcttttctaatgttattatagttttcagctgtatgttcataccacaactcatttattytgtgctactttaatgagtatttaggcagtttccagagtgctgctactgctatctatgctgtaaccaatacgcttatacatatacacatatacatatatattttgaagaacaatcatacagcccagttcagagcaaattcttcgatgtgacattactgggtcaaatgatgtgtgcatttaaaattttcacagatattgccaaatagaatcaaagaggttttacaacaatttttatttttaccatcagtatataatgattcatttttaccctaagaaatcatcagtcattttgtcattgctgatatggttggtgaaaatacgcctgtaattt

SEQ ID NO: 225082 - DNA, 378 bp, Homo sapiens
ttccccaaggtagtcacttgcgaaagctcaaaatcacgtgttttccacccattccacacatgtgcgcatgcattatacttatatatctctacgtatgttcttcatataaatggcatcatagcatatacattattctgtcacttgctctttttaattactggtagttgacattttttatactgatacatttatgtcatcttttctaatgttattatagttttcagctgtatgttcataccacaactcatttattttgtgctactttaatgagtatttaggcagtttccagagtgytgctactgctatctatgctgtaaccaatacgcttatacatatacacatatacatatatattttgaagaacaatcatacagccca

SEQ ID NO: 225083 - DNA, 391 bp, Homo sapiens
gaattcataatctaaagtgcgggaacagaattggcccccttcccttgaactctctacagtgtgggttggtaagctacagctatcaggccaattcagcctgctgcttatatttgtaaataaagttttattggamcacaggctagcacattcttttacatatcgtctatggcaccttttatgccaagatggcagtgtgaagtagtttcaacaggactgcaaagctgaaagcatttattgcttggccctttacacaaagtttgatgacccctgctgtagactactttttgttcatcaaaatgcgctttttccctcagggagtatttgttaaatacgctgtaaacttttataacataaataggaaattatgagatctccacttgctcaacaaaga

SEQ ID NO: 225084 - DNA, 557 bp, Homo sapiens
ggaatgaagagaaaagttcccattagtcactaaaatggccttcaactttgaggggagaaaaatttcactacaagagatcatccttagccatatagattcagtggaaggaacacagaatttgaaattagaatttggaacagactttcatctgaaccctagaacaaccacaggctgactacatgactttaggcaaattatttaatatgtccaaacctcaatttctttaaccatgatatagggcaaataattactatcttgagggtttaagatgataattaaatgagatatgttcaaaatattgtaattatcataattaccttgatcaccaataaaagagcataaacaactattctttatattctttaataatgagtttatgcagaaagggaaaatggcccatgaaaaacatttcccatgaagtttgatatttatgagcaaatggcatggttctatgaacaaacactgacartgtgaatcgggcagtgtttgcttgttggagaggaagagagtccacctcatcacacttcccaaagatctaatgcattgataagttagga

SEQ ID NO: 225085 - DNA, 504 bp, Homo sapiens
gttggggcagatcctgtagagactgagaatttggcaaagtgtcttctcatgtctcagttcagaatgaagctgctttcctctgaaataattctttcagggagccataaatctgattaaccacctagtagtcatttatactttagtatgaattcttacattcaagtgcattcaactggtrccctccaaataccacagtgagagaagaattttgatgggaggtattgaaaaaaagggttaattctgcaatacaaataatttttaagctgtttctcatgcaaactcccatgcaagaagggaatcacatagtgggagatcataatttccagctgctagagacagatgcattcagtttatggatttatccatagcaaatatggagattgaagtcaagctgagaaggcagctgttgctgaggagatggccaagtaggagtgaaatcaaagatgtgtccaatcccattgctggatcagagagggagcatgtcaactggggtgcaagatagaa

SEQ ID NO: 225086 - DNA, 447 bp, Homo sapiens
acggggagaacaagagagcacacacagcaaccaaattttataactggaatcaggcggtccagtggcccctgacttagccaacacaagagtgccaaaccctgagctgacagtggagaaagcagaggaccagtgtcattcctgccgcccaacaatcttcaaaaggtacaggatatagaagcagaagggatctctgaatctagaagtgaacagtcagaaagggctaaaataacaactttctgaaagctgtttgagagctaataagaggttagtagaactagctcagcaagaagttagcattcatgaaaattctttaaaaaatacctcctcaaacagatacattgcaaaataaatacattacaaaataaatacactgcaaaataaaccccttctattgcctacttcttggggaaaatttytaggctgaacttcggcacaccctccaacccc

SEQ ID NO: 225087 - DNA, 507 bp, Homo sapiens
tgaccaatttactgcttaaactctccatcagacttttcatttttgtgatattttcctttacttttgtattttttatccaaatatgcccattatgtttgcctgtcatttttgatagtaccttgtttctttttcatgtcattagctctagtttctatttccatcaacattttgtccatatatatgtaacattttgaaattaataattctagtatctgaaatcttgggtgtcgattattgaaatttacagattctgctgactcttgttcatgatggcttgtacccatttgtgttttataatttctgttagtgagtttttattcatggggccttatctgtagtaatctttaccatactaagttaagggctcttacytccaagaaaggctttttgtttggtttccccaaatgtctgaggggcactgcaactgaggacctctttatgttaatgccttgggcttgactttgcagaaaccttacaagtggtgtggtgagcttttttcagctatcc

SEQ ID NO: 225088 - DNA, 451 bp, Homo sapiens
aaaataatggtaaaaagtatagtaagtaaatactaaaccagtaacacagacgttcatcatcattctcaagtattatgtactgtgcttaatggtattgccagacttgtatactactggcagcagagtagatctgtttacaccagtatcaccacaaatacatgagtaatgcattgtgctatgatgttatgacatcactagacaacaggacactttcaactccattataatcttatgggatcactgttatatatgcagtctgccattgaccgaaacagcattatgtggcacaygagtgcacttcaaaaagaagtgcttgagttatgatttaaacagataacatataaaatggaactttaaaataaacatacattctaaaaccttatcatagaccctcaagagctcttttaaaaatctaatcacggaggaaagaaaattaacattaacatacata

SEQ ID NO: 225089 - DNA, 451 bp, Homo sapiens
aaaataatggtaaaaagtatagtaagtaaatactaaaccagtaacacagacgttcatcatcattctcaagtattatgtactgtgcttaatggtattgccagacttgtatactactggcagcagagtagatctgtttacaccagtatcaccacaaatacatgagtaatgcattgtgctatgatgttatgacatcactagacaacaggacactttcaactccattataatcttatgggatcactgttatatatgcagtctgccattgaccgaaacagcattatgtggcacacgagtgcacttcaaaaagaagtgcttgagttrtgatttaaacagataacatataaaatggaactttaaaataaacatacattctaaaaccttatcatagaccctcaagagctcttttaaaaatctaatcacggaggaaagaaaattaacattaacatacata

SEQ ID NO: 225090 - DNA, 451 bp, Homo sapiens
aaaataatggtaaaaagtatagtaagtaaatactaaaccagtaacacagacgttcatcatcattctcaagtattatgtactgtgcttaatggtattgccagacttgtatactactggcagcagagtagatctgtttacaccagtatcaccacaaatacatgagtaatgcattgtgctatgatgttatgacatcactagacaacaggacactttcaactccattataatcttatgggatcactgttatatatgcagtctgccattgaccgaaacagcattatgtggcacacgagtgcacttcaaaaagaagtgcttgagttatgatttaaacagataacatataaaatggaactttaaaataaacatacattctaaaaccttatcatagaccctcaagagctctttwaaaaatctaatcacggaggaaagaaaattaacattaacatacata

SEQ ID NO: 225091 - DNA, 583 bp, Homo sapiens
ataacaccatgggacgcatatgaagtgccgttagtgatgctggaagtgctcccaagaagcagagaaaagtcatgacattacaagaaaaagctgaatcgcttgatatgtaccatagattgaggtctgcagctgcggttgcctgccatttcacgataaatgaatccagcataaggacaattataaaaaaagaaaacaaaatttctgaagtcatcactgcagctatgccagcaagcatgaatactttacactttttgcaaactccctttttatctcatattaaaaatgcagygtttatatgtaagtaggattgctgtaagaaaggcatacctatagactctaatatgattagagaaaaagtaaagtaattgtatgacaactctgtcagcacactttttctgtgaagggccagatagtcacacaaaagtggccatagataatagataaataaacaggcatggctgtgttcccataaaactttatttacaaaacaggcactgggctgaatttagcccacaggcctttgtttcatggtccacgtcctagattaaaatgtagtttaatcacgctgggcatggtggctcat

SEQ ID NO: 225092 - DNA, 568 bp, Homo sapiens
tgacccctgttgtgggggggtctcatcccaatcaggaggcatgggatcagggactcgcttaacaaagcgctctagctgccccttggcagagcaggtaaactgtgctgtggggaatcccactagtccagcctgcctggattcctcagagccagcaggggaaggactaagcctgctgatctgtggagaccatggccacatggagccccaggggctccatctcagggagatcagagktctgttcataaacccctggctggagttgctgaaattcccgcagggaggtcctgcttagcgaggaggaaggagtcagggtccagcctaaagaggcagtctggccacgatctgtcacagctgctgtgctgcactatggggaattcctcctctgtccaaattgcccagtctccctggcaccagcagggaaaaaaaaatggtagactggagctgcagtgatggtggccgcctcttcccccagaagctcagtcatcttaggcagcaggcagccacagtgacagtggctgttcctccctccgataactcagtagtcttaggcagttttcagctgagtggc

SEQ ID NO: 225093 - DNA, 593 bp, Homo sapiens
ccacgttgggtccagtcgtcctgttttcaatgtcagctttcccattgagaaattcaagtggagtttcacacctggtctctaaaaacaagaataaaagcctcatattaattgcttccccaattcctctttccttcttttcctatgattgccaaagatatttcatggaatatataaaatattatggcctactcatgtgtgaagcacagtgatattcattgaaggagaaaaatatagcatacctaagtattggattaatacatgcatgcaattaaagattgggagttagtcttattgactccagctgtctttatgtattattaataatgctggggacagggagtatggatgagcaggtgggtaaaataaaacaatctcattgtaagttgctaacaatggccaagaacttttcaaacaatactaaatttatttcttacaacacttaagttgtaagcccaaataaaatagaggatgccctgttaaatttcagtatcagataaataacaaatamatttttagtataagcgtgtctccgatattgcatatttataagtttacatttaaattatttttcatctgaaatttaaatataactg

SEQ ID NO: 225094 - DNA, 566 bp, Homo sapiens
ttggtcaaggtcatactgcttgtaagaagagataaaatataaaattatcagaaggtaaaagacaatargaaagtataaagaacagggacccaagagcttgtggggaatagaataaatgacattttatatggcttttgaggaatatgctgacttcataaactggtgagtattatagtaaagttataaagaatgattttgcattattgtgagaaatgttattaacagggatgctatgaggaaaataggatcaccctttcaagaatctcaaaaaatgggcttgagtcttaattttataatttttgtgaaggcagagaaggtggttctagactagtgcttctcaagtttggccgtaccttagagaacctgggaagcatttatggcctatcacagaccaaatgagtccaaatctttatactgagggctacttttcagtattatattaaaaattccccaaacaattcaaatgtgaactcagagttgagtccctggaccagatgctaatggacttctttcagcccaaagttgagtatgctgagatcacagatcttaaccttggctgcactttg

SEQ ID NO: 225095 - DNA, 566 bp, Homo sapiens
ttggtcaaggtcatactgcttgtaagaagagataaaatataaaattatcagaaggtaaaagacaataagaaagtataaagaacagggacccaagagcttgtggggaatagaataaatgacattttatatggcttttgaggaatatgctgacttcataaactggtgagtattatagtaaagttayaaagaatgattttgcattattgtgagaaatgttattaacagggatgctatgaggaaaataggatcaccctttcaagaatctcaaaaaatgggcttgagtcttaattttataatttttgtgaaggcagagaaggtggttctagactagtgcttctcaagtttggccgtaccttagagaacctgggaagcatttatggcctatcacagaccaaatgagtccaaatctttatactgagggctacttttcagtattatattaaaaattccccaaacaattcaaatgtgaactcagagttgagtccctggaccagatgctaatggacttctttcagcccaaagttgagtatgctgagatcacagatcttaaccttggctgcactttg

SEQ ID NO: 225096 - DNA, 587 bp, Homo sapiens
acacccaacacttaggttgactccatatatatcttggtaattgtgtatcccaaaatgtatacaattatgatttgacaatcagaaataatattaagcatacaatctaaaaatgcaaacccccagaaactatttggttcacatgatcttggtctagcaatatatactcttttctttttacaacttctcaggtgattctcaagcagatggtagtgaactccactgattataagagcagcaatttgtcagtgattctcagtcctggctgcacacacgaatcaccaagggaactctgaaaagggtactgctgccccagactcaacccacagaaatattgaattaattagtctgatgtgagaacaggtatttgcattaaaaaaaaatcctgtctgatggaaaaattcaaacatatgagaaataccaacagtagaaagaacagtataagaaacttctgtgtagacatcacccagtttacccaattaactcarggccaaccttgtttcatgtaagccccaccccttccatgaactcctattattttgaagcaaattctagacttcaaatcatttaacaataattatttcagtatg

SEQ ID NO: 225097 - DNA, 600 bp, Homo sapiens
aaacaaattatttctagttaaacaatttgttcgcttacctctagttcatagccaggctcacactgataaataattgtgctttcaaaggtgtatttactgccaaccacaaatccatgttctggactttcaggtttcccacaagamactggactgcaagattcatcggagaatggtggctcccaggttccatcaagctaagtgacaaataacaaaatgtaagttatgtttagaagttaatacatatgaatgaagaaatttgcaaatattggttatttgcagaataatctccaaaatgatagtcaaaagcacccagggtttggtcctacttttgctacttattatatgtgggcttaaaaaacacactttaattattagatggtcttaatagtcacccacagacaattttagacatttcttaagcccataaaacaggcattttcttcctaatagaatctattcaaaaatcacgagcaacaagaaatatattttcattataatgcacgagaactggaggttaatacaaatattctataacttacactaatgcactcttaaatttcaagattctatattttataataaagtttatgagaaacagta

SEQ ID NO: 225098 - DNA, 498 bp, Homo sapiens
atatcttgttatagaaatcttaatattttacctaaccctggcactttcttagtttaaagtgggaatactgcagaaaaaagatacattttactatattttctaccaagaaacttttcaaatcctttgaaatgagtgaaaacttcagacttttttttctttttgggattactattatagatactgcttgcttggcaatatatgtatatgtaggcattacacattctaattaagacagaatcttacctgacatactgatatgttaactccctcaaaggtatacccttctgcacatgacacagaaacttgcctattcacactgaaatcgtccccatgwacaagtatatgtgttatgttttccgggagaggacattttttaggactgcaggagattctctcagggaaccagcgaccatctttctgacaggtgaatgtatctgtatctgtatccatcgtataaccttccagacatctgcaatggaaatgcaaaaatgagtgcct

SEQ ID NO: 225099 - DNA, 588 bp, Homo sapiens
gatcatgcattactttttaaatcagaaaaagccccagcaatagtcaatatctagatattgtttggaacatgtatatttgctaagatttcacaaacatttaaatgactaattttaaatagtcctatcagttcattaggggtagtttcttatgtgagtgagtccacaggggatagatgggacaatcaaaagccattcctgcattgacattttaatattaaagattccttgttcacttaagaagatgttaagatttgggcttcagttatttatgcaagtctttaactcttattatcttttcgcaagaaaatattgttgccacctgctggcagtcatgtattagtggaatggttttctaytcctgtgaagtaaaatccaacttccatgaaaatacagaaactgcaccaatcatcataataatggctaagtttgttgggttcattgattttttttttctggttaggccatgtattatatcattttatttctcacaatatccataagtatgaactcattttatgcaggaggaccatcaaggcagagcggtcacactatttccctaaggccccacagttagtgaacaacagagtt

SEQ ID NO: 225100 - DNA, 457 bp, Homo sapiens
tcttctggctcagtggagggggttcttagcagttgggttatactgaggttgccagaccctggagaacagaatcccagccccactcccttccccaggaatggattaataatttgtcacacaataggtgcttggaaaaaaagtatatgaaagacaattcactactaaggatcttttcaacacatgagggctgctaaaatgagaatcccactaagaaaaaactgattgagaggaagataaaagatgacagtggcaatcaacataygaggaaaaaacactgagagtcaataataatcaaaggaacaaaaggatcggggacacattgcagacacacttctgtttccgaagcccacccggcaccaaacaggtcagggcacccgaggcgggcgaggacccgccctcctctgcttcccgcaggtagggaggggtaatcgcagggtaggcgctggcgaggggtctt

SEQ ID NO: 225101 - DNA, 520 bp, Homo sapiens
cagttgtagagaaaagagaaactatgtggaaatctttgccctctctagtaatgccccattatcatctctcattttttggctctcagtgcactattaagagcgtcttgatagaagtgaaatattttgtgccactttatgttgaaactttgttagtgccctctagtggtatttaaaatcccttatttttagtggcacactagagcattatggtcacaacccaggacgcatgcattataaacctattygtagttctcagtgattcagacacactgaagcattgcatttgaatcataattatgaaccatttaaaaattggggatttattttttaattatgaaaaattctgttgtaatagtaccacatccaatgtatatgttattagctgtttgttacccactatttcattatattggaatgagggcaaataatcctgtaggcaagcacgatattttaaaagttaggaattctgacacatctcaacttttaaatctaatagattgatatgctgctgaaagaatat

SEQ ID NO: 225102 - DNA, 520 bp, Homo sapiens
cagttgtagagaaaagagaaactatgtggaaatctttgccctctctagtaatgccccattatcatctctcattttttggctctcagtgcactattaagagcgtcttgatagaagtgaaatattttgtgccactttatgttgaaactttgttagtgccctctagtggtatttaaaatcccttatttttagtggcacactagagcattatggtcacaacccaggacgcatgcattataaacctattcgtagwtctcagtgattcagacacactgaagcattgcatttgaatcataattatgaaccatttaaaaattggggatttattttttaattatgaaaaattctgttgtaatagtaccacatccaatgtatatgttattagctgtttgttacccactatttcattatattggaatgagggcaaataatcctgtaggcaagcacgatattttaaaagttaggaattctgacacatctcaacttttaaatctaatagattgatatgctgctgaaagaatat

SEQ ID NO: 225103 - DNA, 504 bp, Homo sapiens
ataagggatattgttgaagactacatatgagctaatactttttcctgaaactgcaatgggactaattggcatatccaaaaattttcctttcctttaaagaaattatatttagtctctccatgagactcagcaaataaaataagaatgtccgaggatgttacattataaaaacattgctctaaactttgctttttgttaatatgtagcagaaaaatggcaatggtaatgccaagctgtccttttctgagtttaatactttctaaatcccacatgattattttatacagaaaggaggaagtgctaaataatttatgaactttatrgatacaagtgaaaacagtagatgatacaggaagggaaaatacacataaaacatttatttgtacttaaaatgtaggtattgcaatgggaatgatctctaaaaaatgtaattgcaaatttctaatttatctaattgtgtagcttgaatcatttaaaatagataagttattatacattaaaatt

SEQ ID NO: 225104 - DNA, 464 bp, Homo sapiens
catggtggcatgtgactataatctcagcttcttgggaggctaaggcataagaattgcctgaacccaggaggcagaagtggcagtgagctgacatcatgccactgcactccagcctgggcaayggagcaacactctgttgcaaaaaaataaataaaataaaatttaaaatgtaaagtttattgtgataaatgcctaaggaatatatcttaaataaaaaaactcattttatacatcaaggagctagaaaaagaataataaactaagtccaaggttagcagaaggaagtaaataataaatattggagcagaaataaatgacattaagatagtaaaacaactgaaaagatcaatgaaactaaaagtttctttgaaaggctaaacaaaatagataaaccaagagctgttttttttttgaaaggataaaataaacctttagctagattaaccaaagggaaaaaaaaagaa

SEQ ID NO: 225105 - DNA, 464 bp, Homo sapiens
catggtggcatgtgactataatctcagcttcttgggaggctaaggcataagaattgcctgaacccaggaggcagaagtggcagtgagctgacatcatgccactgcactccagcctgggcaacggagcaacactctgttgcaaaaaaataaataaaataaaatttaaaatgtaaagtttattgtgataaatgcytaaggaatatatcttaaataaaaaaactcattttatacatcaaggagctagaaaaagaataataaactaagtccaaggttagcagaaggaagtaaataataaatattggagcagaaataaatgacattaagatagtaaaacaactgaaaagatcaatgaaactaaaagtttctttgaaaggctaaacaaaatagataaaccaagagctgttttttttttgaaaggataaaataaacctttagctagattaaccaaagggaaaaaaaaagaa

SEQ ID NO: 225106 - DNA, 571 bp, Homo sapiens
gcgtgagttctccaacttcttcttctttttcaatattattttagctattccttgttcattgcatttctatatacattttaggatgacttataaatttctaacaaaaagatagttgaaattttgataagaattatattgaatccatagatcaatttggtaggcactatcatctagcaatattaagtctttcaatatatgaacacaggttgtctttccagtttggtatcttgacgaatattcttttgttcttgaaaagagtatgtattttgctattgytgatggagtgttctataaatgtcaatttggttgacagttttttcaggacctttatatatgattaccctgaaaggagtgttgaactcatcattgtgaatttatgtatttctttttttaaatatatcaatttttgcttaatgtattttgaagatctttaatgtgcatatacatttaggatttttgcattttctttcttttttttttttgagacaagatctctttctgttgcccaggctagagtgcagtggcataatcacagctcacagcagcctttaccttccaggttcaagcaatc

SEQ ID NO: 225107 - DNA, 557 bp, Homo sapiens
gaaggattttttttcccaaagaattggaacaggagatgaaacatggccttaccastatgattctgaagacaaagaacaatcgaagcaatggctaccaagaagtggaagtggtccaatcaaagtaaaagtgggatggttaagagcaaaggtcatggcaacagtgtttttggggatactcaaggcattttgctggttaactttctggagggacaaagaatgataacatctgcttattatgagactgttttgagaaagttaaccaaagctttagcggaaaaatgtctgaaaaaacttcaccagaaagtccttctccaccacaataatgggcctgctcttttctctaatcaaggtcaattttgttagtttctatgggaaatcactaggcatccacctgagcttcctactttggttcctattgatgtgtttttgtttccttttaagtcttttgtttttcttttaaatctttaaaggcacccagctttttttaagttaataatgtaaaaaaaaaccaaaaacaaaaaccaaaaaaaaaaaaacctacattgatgtgcttaaat

SEQ ID NO: 225108 - DNA, 521 bp, Homo sapiens
aaatgaacaataaacaaggtttcatctcatgcatggagttcccctatatcctacttaaaattaactccaggtcactcaaattttgacatgaatacctaaaaatgacaagatttcaattgtatttcccattatttattaagatgtaaaggcttcttattcttttaaataaaaagaaagagctctcccacctaaatcatgtaaacctatatatttttgcagtttaagagtttaaaaaggagctttcaaagttagaagaccaaaagattggtccaaagaatgasaaaacacccacaattaacatgctcaaaagaatgttattgtttacagagaaatggaaaagcacacctttaagcagcacaagtgaacctgaggtaggggatagaggctaacggctgtccacaaaaataaaatgttctacacttgtccatttaactagaattatgtcaagagtccacaactcatagcatcttcaaattcattcattcaactttttccctccttggtaaggaagcaaaataaaa

SEQ ID NO: 225109 - DNA, 267 bp, Homo sapiens
gcctgccgatggacacaggtgtgctgaagtctccagttacacctgtgtcagatctcctctctggggacacaggagggtggctcatttctgactcccacgttgcaatcaggtggggcatgtgaccagctctggctaatgatgcattgtaattctggttcaaacatttggatacagggcaagaccttccagcatgttcttctcctgccacatcaattatagaagcagsttattgaaatgaaggtgccacaagactgaagcaatttggat

SEQ ID NO: 225110 - DNA, 461 bp, Homo sapiens
cactacaagttacatttgcgtaccgtcagcttttaggatgttctcattgacacatctctgttccacacttttagaggttataaaaggaatgtgtaggccyggcacagtggctcacacctgtaatcccagcacactggggagttgagggaggtagattgcttgaagccaggagttggagaccagcttggacaatatagtgagaccccatctctacaaaaaaaaaaaaacacaaaaaacaaaaattagctgggcatggtggtgtgcacctgtatccccagctacttgggaggctgagacagaaagattgcttgagctcaggagctgaaggctccagtgagctgtaattgttccattgcactccagcctgggcaagagagcaagaccctgtctcaaaataaaaaaaaaaaaacagaaatgtgtgtgagataataataatagtaataaacagctatggctacatg

SEQ ID NO: 225111 - DNA, 461 bp, Homo sapiens
cactacaagttacatttgcgtaccgtcagcttttaggatgttctcattgacacatctctgttccacacttttagaggttataaaaggaatgtgtaggcctggcacagtggctcacacctgtaatcccagcacactggggagttgagggaggtagattgcttgaagccaggagttggagaccagcttggacaatatagtgagaccccatctctacaaaaaaaaaamaacacaaaaaacaaaaattagctgggcatggtggtgtgcacctgtatccccagctacttgggaggctgagacagaaagattgcttgagctcaggagctgaaggctccagtgagctgtaattgttccattgcactccagcctgggcaagagagcaagaccctgtctcaaaataaaaaaaaaaaaacagaaatgtgtgtgagataataataatagtaataaacagctatggctacatg

SEQ ID NO: 225112 - DNA, 592 bp, Homo sapiens
tttgaattctgggtttgaatctttgctttgctacttactgccttacaagtcatctttctaaacctttttattttctttcctacaggatcacaaacactataaaggcagagacaatgcttgatttattgaccaatgtgtagccagcacttctcatagagctcaatatttaataggtgctaaataaatatgaatgagtgaatgaacgtgtcataygtgaccttcttaactttatgatcctaagttatcctcatctataaaatgagaatattaattgcatctattttgtagggctattgtagggtttaagtgaaataatctatgtaaaatatttagcatgcagtgagaatgcactaaatgttggttattgttattattggtcaatccatgaattacatgtcaaatgaggcaagaagagaagtaaaaaaagggggcaccaacaggagacaggcaagtgctggattgttggcctatgtatgttatattttcgtgaagaaaaagaaatgtggccattttagaaatgatttggatggtaagtaaatcctttgactttctgctgtgcttacattttaaaactctttttcctaggaccctc

SEQ ID NO: 225113 - DNA, 390 bp, Homo sapiens
ctttatgatcctaagttatcctcatctataaaatgagaatattaattgcatctattttgtagggctattgtagggtttaagtgaaataatctatgtaaaatatttagcatgcagtgagaatgcactaaatgttggttattgttattattggtcaatccatgaattacatgtcaaatgaggcaagaagagaagtaaaaaaagggggcaccaacaggagacaggcaagtgctggattgttggcctatgyatgttatattttcgtgaagaaaaagaaatgtggccattttagaaatgatttggatggtaagtaaatcctttgactttctgctgtgcttacattttaaaactctttttcctaggaccctcattagaatcatggagaatgaattc

SEQ ID NO: 225114 - DNA, 576 bp, Homo sapiens
gaccataaggagctgttcatttcaggactgttcctcaggatatgggcattgatttagttaatttggcaagtcttcacaagtattatcttttaaagtaagacctacacaaaaagaagcagtctcattagaagaactctgaggcctgtgcaaagaatgcatgtggcttcagagaaaatgctactttgaaaaagcatctctgagtctttaaataattaagaggttgttagagcaatggggtggggagacaagctagaggaargccccagtatacaactggactgtgttctcaacatttgtttgaagttagctgtgtggtacctggagtgaagtttttggcagcaatactgttaatttatcaagctatgcatggagactatttaaatgtatgctggtattaaaatactatatattatcctcaaaaattatttgtaatgatagatttagtaaaacaatcacaactaattagggaaaaaattccaccatttttcctgaaagctaatattttagataaaactaatttagttgtttggcagatgagatgggcagaaatgtgtggattctgaaacagacttgaaa

SEQ ID NO: 225115 - DNA, 573 bp, Homo sapiens
aaattctaagttcagctgaaggtagacgggaatagaccagggaaacatctagcatttttctycaatgggactgagctgcgaaattcaaagctagaaggatatccaaggccgtgggtcacattgggcctggtgctgacctaactacactgcacagcactagagatttcagaacaggccccagctcaggatgtaacggttcccagctttgatgtgtttgatgcctcattataatttatctaataagccaaatgaaaagtttccttcctgatttctgcatgactggcttcagcttaacaagccatttggaacagttttgcaggcatacatctttacacaaagggatgtcagtaaacgcttagttccatcagccaattgcatgacccactacatgactgtatctcaaaatgtagggtgtggaccccagcatctgaaacccctgagcacttgctaccaagtgagattcctaggctcttctccagacccactcagtcagaaattctaggagtataacctgagggtgacgatttaaacaagcctccctgaccctcagatgatcccatgtacacaaagctt

SEQ ID NO: 225116 - DNA, 573 bp, Homo sapiens
aaattctaagttcagctgaaggtagacgggaatagaccagggaaacatctagcatttttcttcaatgggactgagctgygaaattcaaagctagaaggatatccaaggccgtgggtcacattgggcctggtgctgacctaactacactgcacagcactagagatttcagaacaggccccagctcaggatgtaacggttcccagctttgatgtgtttgatgcctcattataatttatctaataagccaaatgaaaagtttccttcctgatttctgcatgactggcttcagcttaacaagccatttggaacagttttgcaggcatacatctttacacaaagggatgtcagtaaacgcttagttccatcagccaattgcatgacccactacatgactgtatctcaaaatgtagggtgtggaccccagcatctgaaacccctgagcacttgctaccaagtgagattcctaggctcttctccagacccactcagtcagaaattctaggagtataacctgagggtgacgatttaaacaagcctccctgaccctcagatgatcccatgtacacaaagctt

SEQ ID NO: 225117 - DNA, 581 bp, Homo sapiens
accaggaactaaccgcattagggataaaaaccccttccctcctttgtttggtgtgctcttgcagtggccagaattgtgagcggcatacttctgcagaagtaaatttgccttcttgagaaatcctttgtttgagtgctcattttccttgtgactccgagctcttgtttctaacagtttccttggtgtcttctttctgttcaagttccttatgctctccttaggtgaaaagagccttaacccccaaaatgcagaaaacttccgggaccatcttggaagacaccacttgacactagaaattgtggtgaattaacaagggggaggccatgctgtatggatcacagtttcagccaacatttgccccaaaattagtgatttcaatggtctcattttatcctggtgataacctctatggtaagaggtggtttgtgttattgttcttgtaaccaagtacccccattttttctaagagatagtttaattattctttcctctttctttttctcttttctccttttccacacttcctacttcctacttagccctttagaaatgcatatrtagccttttttacctccttttat

SEQ ID NO: 225118 - DNA, 489 bp, Homo sapiens
tcttgttaactggattctacaagtgatgagcaactggaccagcattttagtcacatgctctcagttttgcagttgaaatcaaacmcccagcaagctttgcaattccaagtttacccctttcctatgattctggctaatgctctaaaacctccagaccttatgaaaagtgaattaattttccccattttctgttctcttcctttttaaaaaggaaaacgttgaatattgttgctaaatataaaagtaatgcatgctaattatgacatcataagaaatgcatagttggtctctgtccctggttcctgacacaagctcctgaactgcaagaaataaatttctgttggttatttatactttcctgtgtgataggggtgataggtgcatcttttgttataatatttggtctccgtccttcattcctaacacaagaacttctaagacccttggaatctccagagtgataagtgtcttttctctactaatgagatg

SEQ ID NO: 225119 - DNA, 591 bp, Homo sapiens
aagctttgcaattccaagtttacccctttcctatgattctggctaatgctctaaaacctccagaccttatgaaaagtgaattaattttccccattttctgttctcttcctttttaaaaaggaaaacgttgaatattgttgctaaatataaaagtaatgcatgctaattatgacatcataagaaatgcatagttggtctctgtccctggttcctgacacaagctcctgaactgcaagaaataaatttctgttggttatttatactttcctgtgtgataggggtgataggtgcatcttttgttataatatttsgtctccgtccttcattcctaacacaagaacttctaagacccttggaatctccagagtgataagtgtcttttctctactaatgagatgactgctggctgggagcccatagggtcgcttcgggataggggtgggtcaccagaaagaccaaggcctgatgagtgaattaggactttcaacctcacccccagcctccagagaggggaaaagggctggagattgacttaatcatcaatggccaacgatttagtgatcatgccttcatcaatgaggcccccagaaa

SEQ ID NO: 225120 - DNA, 467 bp, Homo sapiens
aggtggagcagggccttggactggttaacacagagactggctgtgcacaaaggtcaattgctgatggcagagtgagtcttccaaagattagatgcaagccatttggaagtgttgacactataagctttagtgttgaggacccacgagatgatgagattattttctctaaatcagtgaataactattcaaatgctttttaatagtgatacaaactccaagttaacaggttaatctgaatttttkgctgttctccgttgatcaccttttgaagaaaggaccttttcccaagtctaagaagctacccacaggaaagtaaataatcactaaagaaatagaagattgtcttcaagattcaggactttttggattcctgaaaattctatatcaaaacctaactgatgggaagaccaaaaccaggtgtgtgacatttatttaataaactagatttgtctgatttattccagaat

SEQ ID NO: 225121 - DNA, 467 bp, Homo sapiens
aggtggagcagggccttggactggttaacacagagactggctgtgcacaaaggtcaattgctgatggcagagtgagtcttccaaagattagatgcaagccatttggaagtgttgacactataagctttagtgttgaggacccacgagatgatgagattattttctctaaatcagtgaataactattcaaatgctttttaatagtgatacaaactccaagttaacaggttaatctgaatttttggctgttytccgttgatcaccttttgaagaaaggaccttttcccaagtctaagaagctacccacaggaaagtaaataatcactaaagaaatagaagattgtcttcaagattcaggactttttggattcctgaaaattctatatcaaaacctaactgatgggaagaccaaaaccaggtgtgtgacatttatttaataaactagatttgtctgatttattccagaat

SEQ ID NO: 225122 - DNA, 376 bp, Homo sapiens
taggagtaggcagggctacggggaggctctcaggtccctgtttctcatgttttccttcacaaacatgcatgaggcctctgctatatgcaaagccagcccatactctgctgcggrggagcagagatatggagccacagcctagtggcaaaggcagtggactttgaaccctgcaggctgtagacacagcaatgctgggtccctgttgttcggccggcgccacacctggccctctactctggtcctggcgcctgttttccctccaggaatgcaggcttccttccccactcacccctgcggctggggaagggccgattccagccccagctccaggatgggcaggtagccttggcccattagtggatggcttggggaattc

SEQ ID NO: 225123 - DNA, 470 bp, Homo sapiens
cctaaagaccaacatcttgggtaggattgatggttggagtctgtgtcaccccctgacaaatcctaactgcttggcggagggaatgtgagtgaacaggaaggacctcccctgggaggtggagcactttggagcagcagctgataggtaaagggcacctcaccagcccacaaaggacaaaaggttaccctgtctatactgagctcaagtgtcatttttgrctacaagtatacctggtattacagtattaacatactcctgaaaagttatgttaattggaattgtgctttatatacactgggtaagcttaatacctttcagaagaccatagctaatccttttgtgaagcagctaatctttttagagaacaaatggtcacttcttaactatttctttcaagattaggagtctattgtgttttctcaaggcagagtagccagtgtttaagttttcccttttgctcacggtgagga

SEQ ID NO: 225124 - DNA, 538 bp, Homo sapiens
taaaaaactacctgagactgggtaatttatgaagaaaagaggtttaattgactaacagttctgcaggcttaacaggaagcatgactgggaagcctcagaaaacttacaatcatggaggaagatgaaggggaagcaagaaccttcttcacrtggtggcaggaaagagagagagaaggggaaagtgtcaccttttaaaccatcagatctcgtgagaactcactcactatcatgagaacagcaagggggaaatccatcccatgatccagttacttcccaccaagcccctcctccaatttgacatgagatttgggcagtacacaaatcgaaactatatcagggattaatgtgtttttggttgtacgcaggatagctgcatcctgtcaggtgaaactattaccttattattatcttatctggaaattaagtatgatttcaggagttgcatatatataggtgccaagttgacaaggggtgggcttgtgatggttaattttaggagtcgactatattaaagaatatctaaaaacctggtaaaaca

SEQ ID NO: 225125 - DNA, 538 bp, Homo sapiens
taaaaaactacctgagactgggtaatttatgaagaaaagaggtttaattgactaacagttctgcaggcttaacaggaagcatgactgggaagcctcagaaaacttacaatcatggaggaagatgaaggggaagcaagaaccttcttcacgtggtggcaggaaagagagagagaaggggaaagtgtcaccttttaaaycatcagatctcgtgagaactcactcactatcatgagaacagcaagggggaaatccatcccatgatccagttacttcccaccaagcccctcctccaatttgacatgagatttgggcagtacacaaatcgaaactatatcagggattaatgtgtttttggttgtacgcaggatagctgcatcctgtcaggtgaaactattaccttattattatcttatctggaaattaagtatgatttcaggagttgcatatatataggtgccaagttgacaaggggtgggcttgtgatggttaattttaggagtcgactatattaaagaatatctaaaaacctggtaaaaca

SEQ ID NO: 225126 - DNA, 519 bp, Homo sapiens
  misc_feature (1)...(519): n = A,T,C or G
nnnnnngaattcatttcaaatgtgtcactaaatccgaacattgaaataaatagaccttgaaaacagcyctttagttattgattcacaaagtgttaagccaaatttttcaaaaataataaaatcatgttattacaaaaatattttattaataataatttgactatagcaaatgtgctgttaataaatttttaatgttaatttcacctctatgtcattaattttcaaattttagttttatgtatgttgataatttatgtagcatattagtactgaggtacagaagtatgatttataactcaatgtacatctaaagaggatacatgcttaactttctttattaatggaatttgtgataaagtttgcagacgcctcagagaagagctctcacttggacaggaggccctggccaagttgtgtaatgaggagggttgttgaggggaaaagacaaaaaacaagaggtattaagccccagaagacagttatcacctgcctcagaacacaagcatgcaggatgataca

SEQ ID NO: 225127 - DNA, 486 bp, Homo sapiens
aaaacagctctttagttattgattcacaaagtgttaagccaaatttttcaaaaataataaaatcatgttattacaaaaatattttattaataataatttgactatagcaaatgtgctgttaataaatttttaatgttaatttcacctctatgtcattaattttcaaattttagttttatgtatgttgataatttatgtagcatattagtactgaggtacagaagtatgatttataactcaatgtacatctaaagaggatacatgcttaactttctttattaatggaatttgtgataaagtttgcagacgcctcagagaagagctctcacttggacaggaggccctggccaagttgtgtaatgaggagggttgttgaggggaaaagacaaaaaacaagaggtattaagccccagaagacagttatcacctgcctcagaacacaagcatgcaggatgatayagcttttagtgccaagaagtagaattc

SEQ ID NO: 225128 - DNA, 495 bp, Homo sapiens
gaattcctgggctccagcaatcttcccacctcagcctcctgagtagctgggactacaggcacaaaccaccatggccagctaatttttctattttttgtagtaatagaacctcactatgttgcccaggctggtctcgaactcctgggttccagtgatcctccctcctcggcctcccaaagagctgggattacaagtgtgagccactgcacccarccagtcatttttcttgatagcaagagacagatgacgagaccacagaaatatgaagaaatatgaaggtgatattgcacaagaaaactcaaaatctatgcaattacaaaccaataaagtataggtgctgtctgattatactgagccacgctaaggggtcacccacacatcagctgtggccctgtcccctcaacatcctgggcagaatgactcaaccttttataagggaagcccaaggtcttctgcaagattcctgagacctaaaaagcttacattttcatgctt

SEQ ID NO: 225129 - DNA, 484 bp, Homo sapiens
tagaagaagaaataccaggaaccacatatccaaacaattttgccctcttctgttttgtagataaagtatttgaggtgacgctcacaattcaaggagatatctcagggtrtaagatttataccaatttaaactacaagtccagagaaaaggaagtttgggaaattccctttaactgattttgggagaaaaaagacaggattgagaatcagggaaacatttctgattttatgtgtactgggacattcttgctgatgtaagataacatattttgcagtagatctttaatttatgcctctcactggagccccctcttcattcccatgtagctgaaccccactccttcctcttgtaagttgttcttttgcattattttacaaaagtaagccatgcttatttgaaaagatttatgcaatataatataggaaataaaactgaagataaaactgaaaaaccttaatttcttttcttaaccccttgccattag

SEQ ID NO: 225130 - DNA, 484 bp, Homo sapiens
tagaagaagaaataccaggaaccacatatccaaacaattttgccctcttctgttttgtagataaagtatttgaggtgacgctcacaattcaaggagatatctcagggtataagatttataccaatttaaactacaagtccagagaaaaggaagtttgggaaattccctttaactgattttgggagaaaaaagacaggattgagaatcagggaaacatttctgattttatgtgtactgggacattcttgctgatgtaagrtaacatattttgcagtagatctttaatttatgcctctcactggagccccctcttcattcccatgtagctgaaccccactccttcctcttgtaagttgttcttttgcattattttacaaaagtaagccatgcttatttgaaaagatttatgcaatataatataggaaataaaactgaagataaaactgaaaaaccttaatttcttttcttaaccccttgccattag

SEQ ID NO: 225131 - DNA, 533 bp, Homo sapiens
cagtttccttatcattaaattaaggggttgaggtgcaccatctatcatcccagttgtcaaattctgtgatattaactaggatttatgcaaggtgctatcctagggaatccagtagacagaaagaaaattcactggttttatttcacttgcaagaaagcacctctttattatccagtatttgcccctcagctaggtcacactgggctcatctcagagctctgttggtccagggttgactagttctctgctttgtttccaagagaactcaagcagatgggaactttccttgagagatgtggatccaaagagagtttactttgggtatgctaaagtgatcaatggaggcatatggaaagaacagctgatcaccytctaccattctggagaaatcattcatttgtgcacccattcatttcactggcactcactgagaggcagcagagcatgtggttaatggttcaggctctgtattcagaagccctgggttcaaattctggttccatcacatatgctttgtggccttgaacaagata

SEQ ID NO: 225132 - DNA, 354 bp, Homo sapiens
gaacactctagaaggaagtaaccacctgagaaagttgaggacatgagaatgcaatagaaagggcattaaagagaaaayagtgcaacatctagacatgagacagtgagagcctaaactagggggatattggctgcagcacggcaaaaggagaagccgatgtgagaatagtaaggaataaaaaagagctcttggtcactaactggataagggatgagtgaaggtgagcactgggaaatgattaggaaataatcccctgaaaggcaggcaaaaataggtagcaggcattttggaaagtaaggtgcttaatgtcaagataagacctccaaaagaaaactatttctaagaggcagctaa

SEQ ID NO: 225133 - DNA, 354 bp, Homo sapiens
gaacactctagaaggaagtaaccacctgagaaagttgaggacatgagaatgcaatagaaagggcattaaagagaaaacagtgcaacatctagacatgagacagtgagagcctaaactagggggatattggctgcagcacggcaaaaggagaagccgatgtgagaatagtaaggaataaaaaagagctcttggtcactaactggataagggatgagtgaaggtgagcactgggaaatgattaggaaataatcccctgaaargcaggcaaaaataggtagcaggcattttggaaagtaaggtgcttaatgtcaagataagacctccaaaagaaaactatttctaagaggcagctaa

SEQ ID NO: 225134 - DNA, 550 bp, Homo sapiens
ctgtgatgtcatttaccatggctgggttgacttggttgattactccaaagcagtaacagaggaccctagtgaaggctgaccrcatcactgcgatttttgcatggctcgtcatagccctgtgcacggaatgatctcttgaggttgtttctagctataagatctataactctatgaaccacctctatttattatggctcgtaaaagtcactggccacatattttattctcacgtggcacataaaggatcagagaggataattgaataaccccggcccatgcagcaagacaacattcattctgaaaccacacttgggctatttgaagctcagagcgcactgcctcacccacctttctttgttgatcaattgcatacagcaaaggaagagtgacaatttatcatccaaatcgacactcttgagagtacacggggacaccattaatagtcatgctgagacgacagtcctaaaccatgacaaacgggtatgttcagtagaaggggaaagtaaggtagatttttatgagggcatcaatgggtcttaaatatgaattc

SEQ ID NO: 225135 - DNA, 566 bp, Homo sapiens
gaattccacttgataaaagacataagtcaccaagtcatcagctctctgtgatgtcatttaccatggctgggttgacttggttgattactccaaagcagtaacagaggaccctagtgaaggctgaccacatcactgcgatttttgcatggmtcgtcatagccctgtgcacggaatgatctcttgaggttgtttctagctataagatctataactctatgaaccacctctatttattatggctcgtaaaagtcactggccacatattttattctcacgtggcacataaaggatcagagaggataattgaataaccccggcccatgcagcaagacaacattcattctgaaaccacacttgggctatttgaagctcagagcgcactgcctcacccacctttctttgttgatcaattgcatacagcaaaggaagagtgacaatttatcatccaaatcgacactcttgagagtacacggggacaccattaatagtcatgctgagacgacagtcctaaaccatgacaaacgggtatgttcagtagaaggggaaagtaaggtagatttttatga

SEQ ID NO: 225136 - DNA, 566 bp, Homo sapiens
gaattccacttgataaaagacataagtcaccaagtcatcagctctctgtgatgtcatttaccatggctgggttgacttggttgattactccaaagcagtaacagaggaccctagtgaaggctgaccacatcactgcgatttttgcatggctcgtcatagccctgkgcacggaatgatctcttgaggttgtttctagctataagatctataactctatgaaccacctctatttattatggctcgtaaaagtcactggccacatattttattctcacgtggcacataaaggatcagagaggataattgaataaccccggcccatgcagcaagacaacattcattctgaaaccacacttgggctatttgaagctcagagcgcactgcctcacccacctttctttgttgatcaattgcatacagcaaaggaagagtgacaatttatcatccaaatcgacactcttgagagtacacggggacaccattaatagtcatgctgagacgacagtcctaaaccatgacaaacgggtatgttcagtagaaggggaaagtaaggtagatttttatga

SEQ ID NO: 225137 - DNA, 550 bp, Homo sapiens
ctgtgatgtcatttaccatggctgggttgacttggttgattactccaaagcagtaacagaggaccctagtgaaggctgaccacatcactgcgatttttgcatggctcgtcatagccctgtgcacggaatgatctcttgaggttgtttctagctataagatctataactctatgaaccacctctatttattatggctcgtaaaagtcactggccacatattttattctcacgtggcacataaaggatcagagaggataattgaataaccccggcccrtgcagcaagacaacattcattctgaaaccacacttgggctatttgaagctcagagcgcactgcctcacccacctttctttgttgatcaattgcatacagcaaaggaagagtgacaatttatcatccaaatcgacactcttgagagtacacggggacaccattaatagtcatgctgagacgacagtcctaaaccatgacaaacgggtatgttcagtagaaggggaaagtaaggtagatttttatgagggcatcaatgggtcttaaatatgaattc

SEQ ID NO: 225138 - DNA, 566 bp, Homo sapiens
gaattccacttgataaaagacataagtcaccaagtcatcagctctctgtgatgtcatttaccatggctgggttgacttggttgattactccaaagcagtaacagaggaccctagtgaaggctgaccacatcactgcgatttttgcatggctcgtcatagccctgtgcacggaatgatctcttgaggttgtttctagctataagatctataactctatgaaccacctctatttattatggctcgtaaaagtcactggccacatattttattctcacgtggcacataaaggatcagagaggataattgaataaccccggcccatgcagcaagacaacattcattctgaaaccacacttgggctatttgaagctcagagcscactgcctcacccacctttctttgttgatcaattgcatacagcaaaggaagagtgacaatttatcatccaaatcgacactcttgagagtacacggggacaccattaatagtcatgctgagacgacagtcctaaaccatgacaaacgggtatgttcagtagaaggggaaagtaaggtagatttttatga

SEQ ID NO: 225139 - DNA, 566 bp, Homo sapiens
gaattccacttgataaaagacataagtcaccaagtcatcagctctctgtgatgtcatttaccatggctgggttgacttggttgattactccaaagcagtaacagaggaccctagtgaaggctgaccacatcactgcgatttttgcatggctcgtcatagccctgtgcacggaatgatctcttgaggttgtttctagctataagatctataactctatgaaccacctctatttattatggctcgtaaaagtcactggccacatattttattctcacgtggcacataaaggatcagagaggataattgaataaccccggcccatgcagcaagacaacattcattctgaaaccacacttgggctatttgaagctcagagcgcactgcctcacccacctttctttgttgatcaattgcatacagcaraggaagagtgacaatttatcatccaaatcgacactcttgagagtacacggggacaccattaatagtcatgctgagacgacagtcctaaaccatgacaaacgggtatgttcagtagaaggggaaagtaaggtagatttttatga

SEQ ID NO: 225140 - DNA, 394 bp, Homo sapiens
agaataacaggaggttcaacactcttgttatttggaaagagataatcataaaggtcagtatgtatctttagaattttctcaatagaacccaggcacttgtgtgsaaataaaaaaccaacacaatgcttggaattctgtcaccttgtacacagtgatcactgagcaaatatttgttgtttgtggagtgttctcaccctacagacattttcaagtctgcatggagaacccaggaaaacatagcaagagaaggaccagtgttgcggggggtgggggagggctggggaggggcagattataatgaaaagtgcttccatgagtattttcttccacttccattccatttctgcctctaaaagtttctctgcccaattcttattcctggctagagcatgat

SEQ ID NO: 225141 - DNA, 638 bp, Homo sapiens
tggctcacctgcagccttgacctcctggactcaagcgatcctcccacctcagcctctgagtagctgagaccacaggtatgcaccaccatgcctggctaacctttgattttttgtagagatggggtcttgccatgttgcccaggctggtctcaaactcctgggctcaaacaatcctcatgccttggcctcccaaagtgcttggattacaggtgtgagccaccacgttgggctgcaaccttcattttttctgcaaacttcattcccctttgccatgtaacataacatttcagtttccaaggattagggtgtggacacttttgggagggtcactattgtgcataccacagtgggagacaggactctaaaaataatcttgttagtttcactcccgcagatcctccagccagccctctctgacctcccaaaactaggtgaggtgaacctgcttggtggtcctatgtggttatattcatcactcatccctctgtgttgtgcttgtttccttttctgtatctgtgaggagagagactgctttttcactcttaattgtgtctgtktcttcactggaatataagcaccacatgggcaggatctttgttggttttgttgtagattgaaaaaggacattatatgtaaag

SEQ ID NO: 225142 - DNA, 568 bp, Homo sapiens
tgtttaatcacctatcacctcttccccgagaggacactggtggagttttagagtaaccaaccttgcagagtggtcaactggagaggagggaggagagctgagaagtttgggtctgttctgcagataaatcgagggcttgtttccaacactattagtccaattcttattgttaacctttcattcattaaaacaacaaaactgtaaaatcacctctgtgtcatgatattcatttccacccaatgggttatttttcatcaatgttaagaacttgacatatgtcagccaaagtgacatataacagaaatcagggagagaatytatctgggagctgggaatagtaaaaaaaataaaataaatcctagcttaggtgaaattggaattgccgctgtttgtctcattttcctcccaggcattattttccacttgtaaaagagaaaggaagaaaaatacgtctcagtagccaagccctctgggagagaggttctctctttaacagccacatccccctacaagctgaggagtctctccagggtcctgtgctcagttacaatcacagtcacagtgaacc

SEQ ID NO: 225143 - DNA, 568 bp, Homo sapiens
tgtttaatcacctatcacctcttccccgagaggacactggtggagttttagagtaaccaaccttgcagagtggtcaactggagaggagggaggagagctgagaagtttgggtctgttctgcagataaatcgagggcttgtttccaacactattagtccaattcttattgttaacctttcattcattaaaacaacaaaactgtaaaatcacctctgtgtcatgatattcatttccacccaatgggttatttttcatcaatgttaagaacttgacatatgtcagccaaagtgacatataacagaaatcagggagagaatttatctgggagctgggaatagtaaaaaaaataaaataaatcctagcttaggtgaaattggaattgccgctgtttgtctcattttcctcccaggcattattttccacttgtaaargagaaaggaagaaaaatacgtctcagtagccaagccctctgggagagaggttctctctttaacagccacatccccctacaagctgaggagtctctccagggtcctgtgctcagttacaatcacagtcacagtgaacc

SEQ ID NO: 225144 - DNA, 411 bp, Homo sapiens
aattaagtgatatgttaatgccatatggcaaatgagaagcaaaaccaagatgatattttcacattttctgagttctagtgcagaggagaacatcagacatatctgtattatttatttctgttaatgtacaaatgtacatggtgtaatgggtcttacttagcagggcaggcagcatwcgcatgaaagaacaacatgagccgtgctggatgcaaatcccagctcaacctctggtttgttgtttgactttgggaaatgtctttatctatacaatagatagaaatagataaatgacctacctcatcagctaggtgtgaagataacacaatgtaatatatggaatatagtaaagggttaaatagggaattaaatgagaagagtgcctggaatatagtaagcatttgataaatgtta

SEQ ID NO: 225145 - DNA, 483 bp, Homo sapiens
accctggccaatgtcaccagtgacctcaacaggaagaacgtgacgtgctgggcagagaacgatgtgggccgggcagaggtctctgttcaggtcaacgtctcctgtgagtctcagtggcagctccggcacccaccccctactcatctcttcttccctcaaaagaggatgtagggtggggggctggaagaaagggtgggatgtgtgtctccacagctgctccctcccagctrtttccagattcccatgaaaacctgatcctttgggggaagtcctggggtcttgtcaaggccagagggatggagatggatttctttctggccccctgcccgagccttgctacctgaggccctcaacgccagatgcccggctgttcccactgctccgaagtattttttcatgcccgtccctcatcgggtccttctccccgcatcctagtttcaaaagaggaaattctcctcctgagttcctctttacgctcgctgc

SEQ ID NO: 225146 - DNA, 478 bp, Homo sapiens
atccctggggctgaccctggccaatgtcaccagtgacctcaacaggaagaacgtgacgtgctgggcagagaacgatgtgggccgggcagaggtctctgttcaggtcaacgtctcctgtgagtctcagtggcagctccggcacccaccccctactcatctcttcttccctcaaaagaggatgtagggtggggggctggaagaaagggtgggatgtgtgtctccacagctgctccctcccagctgtttccagattcccatgaaaacctgatcctttgggggaagtcctggggtcttgtcaaggccagagggatggagatggatttctttctggccccctgcccgagccttgctacctgaggccctcarcgccagatgcccggctgttcccactgctccgaagtattttttcatgcccgtccctcatcgggtccttctccccgcatcctagtttcaaaagaggaaattctcctcctgagtt

SEQ ID NO: 225147 - DNA, 559 bp, Homo sapiens
gaaatgacagtatattcaataaatggtgttgggaaaactggatatccatatgcagaagaataatactagagccctatctctcaccatatacaaaaatcaaatcaaaatggattaaagacttaaatctaagacctcaagatatgaaacaactccaagaaaacattgaggaaaatctccaggacattkgtctgggcaaagatttcttgagtaatgctccacaagcacaggcgaccaaaccaaaaatagacaaatgagattataccaacttaaaaagcttctgtgaagcaaagaatacaatcaacaaaatgaagagacaatccacggaataagagaaaatatttgcaaactacccatctgacaagggattgttaaccagaatatataaggagctcaaacaagtttacaggaaaaatcttattagactctgatcaaataatgggcaaatggtttaaatagacatttctcaaaagaagacatataaatggcaaacaggcatatgaaaaagtgctcaatatcattaatcaccagagaaatgcaaatcaaaactgcaatgaaatat

SEQ ID NO: 225148 - DNA, 559 bp, Homo sapiens
gaaatgacagtatattcaataaatggtgttgggaaaactggatatccatatgcagaagaataatactagagccctatctctcaccatatacaaaaatcaaatcaaaatggattaaagacttaaatctaagacctcaagatatgaaacaactccaagaaaacattgaggaaaatctccaggacatttgtctgggcaaagatttcttgagtaatgctccacaagcacaggcgaccaaaccaaaaatrgacaaatgagattataccaacttaaaaagcttctgtgaagcaaagaatacaatcaacaaaatgaagagacaatccacggaataagagaaaatatttgcaaactacccatctgacaagggattgttaaccagaatatataaggagctcaaacaagtttacaggaaaaatcttattagactctgatcaaataatgggcaaatggtttaaatagacatttctcaaaagaagacatataaatggcaaacaggcatatgaaaaagtgctcaatatcattaatcaccagagaaatgcaaatcaaaactgcaatgaaatat

SEQ ID NO: 225149 - DNA, 402 bp, Homo sapiens
atttagtaactattgccatccagaggctgagttcaaaccttaatcctaaaagccctacagaaaaaaaaaaaaaatcaacactcactattcaactgtcaaaaagactgatatccctgaggccattaagtggcaatagtaagcaataacccccatcatcattaagactggaaatcatctaaaaatttatcaacagaaatacaatgatttaaatgcttcagaagaagaaatagattaggtaaattmatatgaaataacagggactagggaagatccatatgttactaaatctagaccttgctcagagacccattgtaaactccaaatatattacctgtatattgagctaattaatgctacacttgaggcacaaaactacaaattagacatgtaaaactaaatatt

SEQ ID NO: 225150 - DNA, 549 bp, Homo sapiens
ctgaatagttctgatgacataaatcttacatttcatcttctaggtagatacttgtagttagtgragttcgaaggaaaaaaaatttattatccacataaaatatctcaatgccaaaaatgtgcagttctttttctttttgatagagtcttctattgtaaaaaaaaatgcgccttgatttttgagtacagtacaaggcatgaagccctgtcattgttagcataaagaagacatctacacaagtattactgtgcagagggcaatctttctgtctctggcatttgttaggttactgcacgtagaatttaacagataaatatgttctgcttcgtggcattttagtgatcctactggtatgcaagctactcggctaggatagcaaccgaaaaaaaaaaggtatatgttttatagcagtgggtaataaaagaccttcacagtgagagaagaggaatttgacttatttattacacagtaattagaatttctttaaaattctttgaaatgccgagttgtaaagtaaactgaggctttccaggaagggctaattgaatt

SEQ ID NO: 225151 - DNA, 549 bp, Homo sapiens
ctgaatagttctgatgacataaatcttacatttcatcttctaggtagatacttgtagttagtgaagttcgaaggaaaaaaaatttattatccacataaaatatctcaatgccaaaaatgtgcagttctttttctttttgatagagtcttctattgwaaaaaaaaatgcgccttgatttttgagtacagtacaaggcatgaagccctgtcattgttagcataaagaagacatctacacaagtattactgtgcagagggcaatctttctgtctctggcatttgttaggttactgcacgtagaatttaacagataaatatgttctgcttcgtggcattttagtgatcctactggtatgcaagctactcggctaggatagcaaccgaaaaaaaaaaggtatatgttttatagcagtgggtaataaaagaccttcacagtgagagaagaggaatttgacttatttattacacagtaattagaatttctttaaaattctttgaaatgccgagttgtaaagtaaactgaggctttccaggaagggctaattgaatt

SEQ ID NO: 225152 - DNA, 549 bp, Homo sapiens
ctgaatagttctgatgacataaatcttacatttcatcttctaggtagatacttgtagttagtgaagttcgaaggaaaaaaaatttattatccacataaaatatctcaatgccaaaaatgtgcagttctttttctttttgatagagtcttctattgtaaaaaaaaatgcrccttgatttttgagtacagtacaaggcatgaagccctgtcattgttagcataaagaagacatctacacaagtattactgtgcagagggcaatctttctgtctctggcatttgttaggttactgcacgtagaatttaacagataaatatgttctgcttcgtggcattttagtgatcctactggtatgcaagctactcggctaggatagcaaccgaaaaaaaaaaggtatatgttttatagcagtgggtaataaaagaccttcacagtgagagaagaggaatttgacttatttattacacagtaattagaatttctttaaaattctttgaaatgccgagttgtaaagtaaactgaggctttccaggaagggctaattgaatt

SEQ ID NO: 225153 - DNA, 601 bp, Homo sapiens
tcatccccatttcaaagataaagagaggtacagagaggtttaagtaacttagccaaggccacacagttgggacagaactgggatgtgaacccatttattctgttcctggctttgaaaactcacacaataatgccttcctaattatctctgatgactagtagtagggacattccaccccccacaaatagcaaaagtgctccgatttacccatttgtcatctggattcaaatatctgattctgattttccaactcttttcaaagttcttcatctcaatctgtattatcattatcacacaggttttagaagttgtttcatttaacgtatgtcaggaatggttactcttacagaacatttgtcttttacctcaaggagttaagaactaaatcagatctgtaattgactgacttgtctactgacagcctttgaagagccaccactccccaccttgtttttctgtctaaagagcaagattgacatctctttatawgtttaaaatttgtcagtggtgtaaagtgctcagtaatgatggaaattaacctgaggctttatctaactacctttcctagcaactccattgaagttctgataacaattaaaat

SEQ ID NO: 225154 - DNA, 564 bp, Homo sapiens
agggtgacagaacagaatttgtatcatcccaaatacctgatggacaaagtctcaacatatcagtggacattctgatgggccacacctgagttttagtttctgaaatcgtcttgctgtttatttacctctgaggaatcagttagaatgacacaaaacccagcaaaatacccccacctgatgtatttgaaatataactttacacaaccagcttaaactctagctgtgaaaacttgaatttaaacagcctgaaattgcatatagtttaagtcttaggtcaggcagtgtgctagttctgggggttctggaggatactagtttagrtaagcaagataatcttggaaaatgaaaaattttgttgtacctcgaaattctagcttcaattctttaagacaatggcgattaaataaggattagtgttatatggccttcctatcaacttaagatatgccatgtgagagaggaaagtggtttttaaacctccgttggtaaattttatgtacctgtttagttcacagccattctttttagtcatctaaacacttttgatgtagaagggagacatat

SEQ ID NO: 225155 - DNA, 564 bp, Homo sapiens
agggtgacagaacagaatttgtatcatcccaaatacctgatggacaaagtctcaacatatcagtggacattctgatgggccacacctgagttttagtttctgaaatcgtcttgctgtttatttacctctgaggaatcagttagaatgacacaaaacccagcaaaatacccccacctgatgtatttgaaatataactttacacaaccagcttaaactctagctgtgaaaacttgaatttaaacagcctgaaattgcatatagtttaagtcttaggtcaggcagtgtgctagttctgggggttctggaggatactagtttaggtaagcaagataatcttggaaaatgaaaaattttgttgtacctcgaaattctagcttcaattctttaagacaatggcgattaaataaggrttagtgttatatggccttcctatcaacttaagatatgccatgtgagagaggaaagtggtttttaaacctccgttggtaaattttatgtacctgtttagttcacagccattctttttagtcatctaaacacttttgatgtagaagggagacatat

SEQ ID NO: 225156 - DNA, 564 bp, Homo sapiens
agggtgacagaacagaatttgtatcatcccaaatacctgatggacaaagtctcaacatatcagtggacattctgatgggccacacctgagttttagtttctgaaatcgtcttgctgtttatttacctctgaggaatcagttagaatgacacaaaacccagcaaaatacccccacctgatgtatttgaaatataactttacacaaccagcttaaactctagctgtgaaaacttgaatttaaacagcctgaaattgcatatagtttaagtcttaggtcaggcagtgtgctagttctgggggttctggaggatactagtttaggtaagcaagataatcttggaaaatgaaaaattttgttgtacctcgaaattctagcttcaattctttaagacaatggcgattaaataaggattagtgttatatggccttcctatcaacttaagatatgccatgtgagagaggaaagtggtttttaaasctccgttggtaaattttatgtacctgtttagttcacagccattctttttagtcatctaaacacttttgatgtagaagggagacatat

SEQ ID NO: 225157 - DNA, 529 bp, Homo sapiens
acaaaaccctgcacataaatgtttatagcagctttattcataattgctaaaaattggatgcaaccaagatgtccttcaataggtgagtggacaaacaaattgtaggatatctatgcaatggaatactattcagtgataaaaagaaatgagctaacaagccatgaaaagacatagaggaaacttaawatatatatatatatatatacacatatatatacacacacacatatatatacacatatacatatattgctaactgaaaaaaaaaagccagtctgaaaaggctaaaaactatatgattccaactatgtgacgtgctgaaaaagataaaattatggagagagtaaaaacatcagtgcttgccaggagtttgcaggggaagagaaagggatgaatagatggagcacagaggattttaggcagtgaaactattctgtgtgataatatactagggaatacatgacattgtccatttatcaaaacccatagaactgtgcaacacaaaagatgaaccttaatataaccttaa

SEQ ID NO: 225158 - DNA, 529 bp, Homo sapiens
acaaaaccctgcacataaatgtttatagcagctttattcataattgctaaaaattggatgcaaccaagatgtccttcaataggtgagtggacaaacaaattgtaggatatctatgcaatggaatactattcagtgataaaaagaaatgagctaacaagccatgaaaagacatagaggaaacttaatatatatatatatatatatacacatatatatacacacacacatatatatacacatatacatatattgctaactgaaaaaaaaaagccagtctgaaaaggctaaaaactatatgattccaactatgtgacgtgctgaaaaagataaaattatggagagagtaaaaacatcagtgcttgccaggagtttkcaggggaagagaaagggatgaatagatggagcacagaggattttaggcagtgaaactattctgtgtgataatatactagggaatacatgacattgtccatttatcaaaacccatagaactgtgcaacacaaaagatgaaccttaatataaccttaa

SEQ ID NO: 225159 - DNA, 496 bp, Homo sapiens
ggaaacccaggcaacaggaactttctggttcctctaaagaattctgtaatggccacaaaatatctccctcaaacttccagaaattttgctaatttgttttgtgtgtgtgtgtgtgtgtgtgtgtgtgtgtgtgtgtgtgtgtgtgtgtttgacctctatactcttcttgactcagaactcttcttaccctttccatcattgccactgttgccagaaacaatatgattcctccattaggaaatttgaggtaattcttcccgtggttcttcaatgtgaactctttccatttcagtgcattttacacattgttcaatattcctacaggaaagttcggatcatttttgttgcctactctaaaagccatgaaggttcgacattgcctataaatcaggyattcgaggcaatcatcatgacattaatgatgttttcttatctggcttcaatcattcttccgagcatgttccccaatacttcctaaacttcaacaatgttacta

SEQ ID NO: 225160 - DNA, 529 bp, Homo sapiens
aactatgtgtcaattaaatttctttcgtttataaattagccagtctcaggtacttcttcatagcagcatgaggatgaactaatacagtgtctgataggggcccactcctggtgcatggatggctgacttctctctgtgtcttcacatggcagaagggacaagacagctctctggggcctcttttataaggtcactgattccattcatgagggttccactctcatgacttaatcactttccaaaagctccaatttcaaatacgatcacactgggcatgaggatttaacatgtgaatttgggcaggggacataaatattcagtyttaacagtaaggtacaactctgtagcagtaaggctataatttttatgcatcctataaataacaaaaacaacaaaaaacacattttgattaacaatgctagaggaaagactaaattatctttccagtatctatatagaaaataataccataaaaatcttgttataaaaagtgattttaaaatgtgaagtcaaaaaatgtccaaaaaag

SEQ ID NO: 225161 - DNA, 584 bp, Homo sapiens
tataccataaagtcctgagacgacacaggattggcctttttcttcagcacctgccttggtacctgtcccagagcactgtcaataatttggtgtagctacttcctggatttttgtgtacatgtaaaatcataaatgcatacatacttttaagcaattgaatcttgctgtacagtgtcctgcaacttcatagctgcaattgaagagtctgctgcattttgcaattgagcccattatagatacagctggcttaaggctggtatctgctcaaagagaaaggaagcacagagcctcctgatggctggccaggctggccatctcggccattgtttctcagtccccaacaagacatccctaaagcaattttgtcctcccaactaatgatgactccamcactgctcatcagtaacagctgttgggccattggctgtcatccagattctgcccttgtgaaacctgcagagccatgctgggaggagaatggctcctgtgggggcagatgggcaatgtagggaaatgtctgggtatttaaggtagtatcagggaaaagaggaggaaatgactaagaaggaataaggaaaaaatat

SEQ ID NO: 225162 - DNA, 548 bp, Homo sapiens
ggagatcccgacattttcaggtgacatatattgtacatatggaaaggtcagggccccttttttcagtccagacgtagagctcactaaccctttcagcagaaaagagagattaatgaattcactcttattgtctctcatacccagagagtctttatagccattgctgccacataggtctctcaattttccacttagagctracacccttttgccatcagatcccccaaggagaataaagccctctcttttccacaccttgcttctccaggtaatgttatagctactgcagtgtcaagtccatatcgaaactttaggatgtagcgctcgaggaacaaaaataagaatgctatctaacatcattgttccttataccacaacagaaggccctatcagacttagggctttgcaacaagagtgccctctaaaaatgctctcttcctcctggatggtctatttccagattccccacccctacacccaattgtgtcccattccttaagtctctgtcctgtgcccccaactgcaatccttcccttggaaaatgcaat

SEQ ID NO: 225163 - DNA, 557 bp, Homo sapiens
agagataagcacacctcagctacagaagccataatgctgttctcggaaaaagcgtggtctaagatcacactaagttaaggataactctcctataaacctggcttttgtcttacccctttcagtaaaatgaggcttcattattaagctaagaagtagtaggcactttcctatctccctcatcccgcccaaatagyttattatgccagataaataagcaggttagtaagtaggtgggcaggtgaacagatatatcttcttttctgcttctgtctatgggaaaccagtctttccctttcttaatccatggattttgttgggtggaccaagtagattaacccttttgaacacaataatggagccagtggttctcgctccgtttctgtctctccctgtctctctctgtcttctctactaagattttaggcacaaaggatcacataagcctgaactgtcagggtccatctttccagaatgagcagaaagtcagtctgggaatgaagccagaacagatgaaagcacagataaaagatggagagagagagaaagagagctgatca

SEQ ID NO: 225164 - DNA, 542 bp, Homo sapiens
taagcacacctcagctacagaagccataatgctgttctcggaaaaagcgtggtctaagatcacactaagttaaggataactctcctataaacctggcttttgtcttacccctttcagtaaaatgaggcttcattattaagctaagaagtagtaggcactttcctatctccctcatcccgcccaaatagtttattatgccagataaataagcaggttagtaagtaggtgggcaggtgaacagatatatcttcttttctgcttctgtctatgggaaaccagtctttccctttcttaatccatggattttgttgggtggaccaagtagattaacccttttgaacacaataatggagccagtggttctcgctccgtttcwgtctctccctgtctctctctgtcttctctactaagattttaggcacaaaggatcacataagcctgaactgtcagggtccatctttccagaatgagcagaaagtcagtctgggaatgaagccagaacagatgaaagcacagataaaagatggagagagagagaaaga

SEQ ID NO: 225165 - DNA, 472 bp, Homo sapiens
attaatttataggtatctttttcaaggaggatgattagcaaggaaataatcatcgtttccactctcccaatgtgattatttgtttctatgacagaatctaatttctcacatctctccttgtttactgattgacaatctatagtcctagacttcatttctgcattttacgtttctgcacctgtgaaaagggcttgaaggcgaaagatgagcatctttagagacaatgggcttgrgggaaagaaaatggcttggtacaggttgttattttttgttcgctaactggagtgaatgctttttaaacagtatcttccccattgggacaattggaagaacagtgacattcattttatagtttttgcttgttgggtacttattcctttcgaaaagaaaggaaattccatactccaggagtccatctgttgttacatttcatgagaaataaatgcactggaaaatatagctaaacacactt

SEQ ID NO: 225166 - DNA, 478 bp, Homo sapiens
cgcatagtgtctcactagcatccagtggaatattaccagctgctatctcggaggaaattgggctccttgcttttctaaatgagccaagctgttgtgttggcaaccaacacacatgacaggcacttagccaagcagaaagcaacaggtttaaaacatgtgagtgtgtagataaaccatctccagcccttaaatccctgctaaagggaattcacagagccagatgaaaaagaaaactccccatactcctaatgctgtctgatagaaaaacatgtataaatctatgatgagatttactttctggctgagaaatarggcagagaggaatactttaaagcaaaggcattttttttttttgaggtaatacttgagataatattaggggaaaaactcttcaacaacttaagcccaggctatgtagaaaaagtaaatatagatgcagagcaggtgaatttgaacaatgtggagaactagactggat

SEQ ID NO: 225167 - DNA, 524 bp, Homo sapiens
ctgtcctttggctgcaatctggttggtcctccccaccccactccaaggcagttccccagctggcatttgggacttctctcttttgttctgctaggttgaattgactgttttctaaatcttgtattttcttcttttcttgctttttttttcatccacactttgtgtagtaaatccttaagaaaccttctaacaaacattgccttagaggaaaatgtttttagtcctccttgatttatatttggtttatagttctgttggataaagaattctatgtcaaaaatcattttccctcaaagcaatgaaaaccatgtcccagtgtcttcaggtgtccagggccagtgagccatcctacatgagcgtgattctcattcttttgcagatgagaatctctgtaagattttctytttttttttgagacgcggtctcgctctatcactcaggctggagtacagtggcatgatctcggatcactacaaaatctgtctcccgggttcatgtgattctcctgtctcagcctgccgagt

SEQ ID NO: 225168 - DNA, 524 bp, Homo sapiens
ctgtcctttggctgcaatctggttggtcctccccaccccactccaaggcagttccccagctggcatttgggacttctctcttttgttctgctaggttgaattgactgttttctaaatcttgtattttcttcttttcttgctttttttttcatccacactttgtgtagtaaatccttaagaaaccttctaacaaacattgccttagaggaaaatgtttttagtcctccttgatttatatttggtttatagttctgttggataaagaattctatgtcaaaaatcattttccctcaaagcaatgaaaaccatgtcccagtgtcttcaggtgtccagggccagtgagccatcctacatgagcgtgattctcattcttttgcagatgagaatctctgtaagattttctttttttttttgagacgcggtctcgctctrtcactcaggctggagtacagtggcatgatctcggatcactacaaaatctgtctcccgggttcatgtgattctcctgtctcagcctgccgagt

SEQ ID NO: 225169 - DNA, 524 bp, Homo sapiens
ctgtcctttggctgcaatctggttggtcctccccaccccactccaaggcagttccccagctggcatttgggacttctctcttttgttctgctaggttgaattgactgttttctaaatcttgtattttcttcttttcttgctttttttttcatccacactttgtgtagtaaatccttaagaaaccttctaacaaacattgccttagaggaaaatgtttttagtcctccttgatttatatttggtttatagttctgttggataaagaattctatgtcaaaaatcattttccctcaaagcaatgaaaaccatgtcccagtgtcttcaggtgtccagggccagtgagccatcctacatgagcgtgattctcattcttttgcagatgagaatctctgtaagattttctttttttttttgagacgcggtctcgctctatcactcaggctggagtacagtggcatgatctcggatcactacaaaatctgtctcccgggttcatgygattctcctgtctcagcctgccgagt

SEQ ID NO: 225170 - DNA, 510 bp, Homo sapiens
cgaattcaactaaaatagcgttctgactagttttcctgcccctaatcttgcctccatccaatgtgttctccattcaacagcgacagtgatctcttaaaagtacaaatttaatcttgttcttcttaaagcttttcactgggtgctctttgttgttagaataaaatctccaaagctctgcagcctcattgctctaagagctcagcrgcagcatatctataacagacttggtggtggggtgcagtggtcagaaaagaagtaatccctccagggctgtacttcccttggcgcattcttcttccatctccttatctggttaagtcctactaattattccatcaccattttatcaaaactttccttggtccatctagatcccactcctcctccaactactgatttctgttttttatggttaagagtcagtctgtctgggtttgaatttggctctattctttaccagctgtgtaactgcaggcaagcaacttggcctctctgtgcctgtttccttat

SEQ ID NO: 225171 - DNA, 583 bp, Homo sapiens
gtgagtgtactgtgataagataaggctagggtcattatttctcaaggagtaaagtcaaagtcatcataataggaagaataagtattcctcatggaaactagattggaagggactttagcagtcccagtgaacagrtgttcaagcacccacaaacctcctccttttgcagggcgtggacctgcaagctcccctgaacagagtcagtaggaagcccagtggcacccaggcgaagtgagagaatcagctactcaaaatgggaccaggaccgtggagaggtggcatgtccttcagaaggggcagggagggctgacagggagagttgcagagggacacagagagatagaaaaaaagggttatccttgtgtggtttaagggtcaagttcattacatgaggcccagccaccggctgtgagacttggcttcacaatgactccacccagcatgggtgcccataatgcagtttcatgtgtttctcccttaaccgcagagcatggttgaagatgaaacctgtggggttttcaaaaaggccagctctggttttcaacaaagagacttttaataaagccgtaaactgggtgaatca

SEQ ID NO: 225172 - DNA, 619 bp, Homo sapiens
ctgatcaacttcgttatgttgtatctttagtttctcttatttaaaaaatgcctgaaatatgtgtactctgattttttgaggtgttttaatgtatcaaaaggggcatttggttgtaattatcaatgttatttcagttttaatttaaaggaccttatcgcaactttattcgttatgtactataaacgctatctccacctctgccatttaatggagaatttttgattgatgactctcagatctctatctccatcccagatcactttcctcagactcatatgtaccaacaagagatgtagtacagtgattaaatgaaaaattttgaaaggcagactacttatgaagcccagctcctccattgactgcttatgaagcccagctcctccattgactgcttatgaagcccagctcctccatttactatgtgactttggataaattacttaatctctctgcctcagtttctaaatctataaaataggaataatacgatattgtattamttctaagagggacgttttaacatctttgaatcaagatgtgtcttacaatggatggtaccttagatttgatgaaataaactaacaatagctgttagggtggctgtgggaattaaattgat

SEQ ID NO: 225173 - DNA, 635 bp, Homo sapiens
ctctgccacacacacacaggaggcagccacttgattacggataatgctacagctgtaagccaaggaataccatggtttgctggtaaccaccagaaattaggaagaggccaaagaagattctcccctggagccttcgtagaaagcatgaccctgcagacaccacacatgtggctgtctagcctccagaactgtgaaagaatacatgtctgttgtttaaagtgacctagttggtgctgcttataattattattttttgaaacagggtcttactctgtcacccagactggagtgcagtggtgcaattgtggctcaccgcactgttgacctcccaggcttgatcctcctgcttcagcctcctgagtagctgggactaccagtacatgccactacgtctggctgattttttatttttattttttgtagagatggggtctcactacgttgcccagactggtcttgractcctgggctcaagccatcagcccaccttggcctcccaatgtgctgggattacaggcatgagccatagcgccaggtctctgtgctcctttgctatggcagccctaggaaatgaatgcaagtatcatgtcccagtgaggcgctttgagtcagaataggaaaatgggaaattgtca

SEQ ID NO: 225174 - DNA, 595 bp, Homo sapiens
ctgctttgggaaaaggttcaaggcaattgaagaaaattatctacttagcccaggtaaggaagatggcattaaattgtcattgaaaatagtacagtacactgacaaagctatcaatccataccaaacttggtattcttgtccccacccaaatctcatgttgaaatgtaattcccagtgttggaggtggagcctgagggcaggtgtttgggtcatgggggtggatccctcgtggcttggtgctattctcaggatgaggagtgagttcttgtgagatccggttgttgtaaagtgtggcacctcccctcccactctctctcttgctcctgctccccccatgtgatgtgcctgctcctgcttcatcttgcaccgtgagtaaatgctccaaggcctccccggaagccaagcagatgttggtgccaagctcccattaaagcmtgcagagacatgagccaattaaacctcttttctttacaaattaccgagtctcaagtatttctttatagtaatgcaagaatggcctaatatagtcggtgtcttattggttttatgaacagtgtcagttgttaggtgtatctatgtaaaaccattttccccc

SEQ ID NO: 225175 - DNA, 574 bp, Homo sapiens
gctcagccagatctggaattggtgaggctaagaacacatacagtaagaaaataaattatcagccttcctccttgcaagttgaaaagttgtcacatattgtaaaccaagaacctttcttggccctgaatttaaytgttacatccatagacctcgtcagtccatctctcaaaaccaaccttcaacatcctatcaccatattaagaagttttgactgttttcattggttgtagctgtttaatgatgataataataattcatgtcccattacatctttattgtagggtcctgattcagggtcctgatgagtacctctttggcctgtctgaacaggaaatgaacttgtatagacagtgtgatcacatccacataaatgccaaaattaaacaagtaaacaaacaaaaaaccttggaagagtaatgtaccaaaacgttaagtacaggtatctttgggaaatggaaagttttctatatttcttcagctacctatattattcatgctttttaaaaatggattttttaaaacacaaaatgaaataatattttaagtgataataataaatcattaaaatcttagg

SEQ ID NO: 225176 - DNA, 538 bp, Homo sapiens
tatttctttggggttttaattatatcagtctttttataaaaggattttgaggtagagcctagcacattccattcacgcactgcagtgattaattcctattgctgctcagtcacttgttactttatttttaggggcaaatttatagcaactcctggatcacatgtacactggtatttgaagtatctgcagctgcttacatagcaggagttccaagctacattcctgttgtgaatcataggtttataagracggtaccacgagtagcaagaaaaagaattagtcttatggaagtgtgcacgcacttatacatacatgcacaaatctccagaagattccgaatatacaaaattgagaacatcttttaagtgtcttatcaggaagatgtcaccttcaaagaatgctatttatatctagtcaagtatattcttgaattaagaatctctgatactattgaatacatatttacatacacacatacatgtatatctgcatgtctcatatacacatatgtgtattatatatgtaatatagatggcct

SEQ ID NO: 225177 - DNA, 618 bp, Homo sapiens
gaatccaatttaaattcctttgtatgataaattcttcagtgatgtaataatataatcctatttccaatgatatagaagttatggaaacacttttctaccatgtcttcccttttaaaaaaatcacttttccaaactttcacagcacattttctcaaatatagcatccttggatatttctttggggttttaattatatcagtctttttataaaaggattttgaggtagagcctagcacattccattcacgcactgcagtgattaattcctattgctgctcagtcacttgttactttatttttaggggcaaatttatagcaactcctggatcacatgtacactggtatttgaagtatctgcagctgcttacatagcaggagttccaagctacattcctgttgtgaatcataggtttataaggacggtaccaygagtagcaagaaaaagaattagtcttatggaagtgtgcacgcacttatacatacatgcacaaatctccagaagattccgaatatacaaaattgagaacatcttttaagtgtcttatcaggaagatgtcaccttcaaagaatgctatttatatctagtcaagtatattcttgaattaagaatctctgata

SEQ ID NO: 225178 - DNA, 602 bp, Homo sapiens
tggtcaatagtgaccttcaggaatgcagtcctattactgtggtaacagaacctatattaaatggggtcccatctgttaaaaatatagtctggatttctttttttgaaggtaccttggccatggcacactcacactcaactctcttttctacccactattttgagagataktcatcatttaactttataccaaccacttcagcattttactacttagtggagtctggtatttcccagtctaaaaatttcactgttccaacctggttcccgattacttatttaaaattctgagatgctctgtgttgttttagtaaatgttagtgtttgtgttagtaaatctctccatttcttagtatttggcccaatgccaatgtaattcaggttttgaaaatattcttttatataaaacctggtcaataactttcagtaatctaaatgaaagatccagctttcattttaatttcatcagatatgtgctcaatggggcagtggtgtctgtgcccagggggtgattccagccttccctattctttactccccatctatgaagaacattcctgtctcccaaagagcaaggacaaagccatcctatgggcatctgat

SEQ ID NO: 225179 - DNA, 518 bp, Homo sapiens
tttctttttttgaaggtaccttggccatggcacactcacactcaactctcttttctacccactattttgagagatattcatcatttaactttataccaaccacttcagcattttactacttagtggagtctggtatttcccagtctaaaaatttcactgttccaacctggttcccgattacttatttaaaattctgagatgctctgtgttgttttagtaaatgttagtgtttgtgttagtaaatctctccatttcttagtatttggcccaatgycaatgtaattcaggttttgaaaatattcttttatataaaacctggtcaataactttcagtaatctaaatgaaagatccagctttcattttaatttcatcagatatgtgctcaatggggcagtggtgtctgtgcccagggggtgattccagccttccctattctttactccccatctatgaagaacattcctgtctcccaaagagcaaggacaaagccatcctatgggcatctgataggaatgat

SEQ ID NO: 225180 - DNA, 549 bp, Homo sapiens
gataagacaatgtgatatttaagattccttctatrtgtgattcctatgtgcagataaaaaaatactaaaatgcaaaaattgagtaaattagcaaagtccactccagtcagtggagtagcaaagtattttaaaatccactatcaataaccctttggcacagattggctttgaactacggacctaactctacctaagtctttttagcaaaatacaatacaaaagttattcactgcaggataaaaggaataaaattgatgaaggtagcagtttctatcatatgtggaagaagtgattaatgagtgctttataataagaatcttgtgtttaacagaataaatcatcttgaatttaatgatatgtatttaatgataataatggcatgacatgagtacaaagttactgccaaattattgcattatataataaaattttaattttctaagcctacataaaatccagtgggtgaactcacttttaaaagtattattctgtaggttttccagatttcccttataagaaagaccctattctcctattctcgttttatta

SEQ ID NO: 225181 - DNA, 557 bp, Homo sapiens
tttattcactcagtcaagattactcagctagtggtagagattagttttgtctgactccaagctaggtgctttctctagcatatgacctagcytctcattctaagagactgcttgttcatggattaagtgattttgcttaaaattttccataacaatcttgttttcttcagaccttgcaacagctaagatcccttttcttaggttagtacatgcacacactcacgtcataaaggtgataaaagtcagctacttggtgattcccaagtttcctaggtatctttgatatgcttaataagtcaacttctgccaacgaatgcttttttaggcagagcaactggatgagaaatattttaaaacaatgttgataaccaacaatgataaggcttccattgaagctgtctaaattttaatattttatatatatgtatataatgcacattctttgaatttggaaaaccatatttctaagtggatgtgtagattctttaataagctggtcttagaaaaaaagaatagactattatttaattcacaaacataatttaaactttactatt

SEQ ID NO: 225182 - DNA, 496 bp, Homo sapiens
ttagctgtctcattagcagtctaaacctagctcacctaaagcagaactcaaaattcgccctcgctgctccccaccctcaacacctcctaactttttctctctcattttcttctttttagtaaatggaactatcaggcttccaggagctcaagagacaccccgagaaacatctttgattcatccattgttcacttcctcttattcaatctttcagtaaatcctgttgatttgacttctaacatccatcttgccatcacttctttccacctctggaatcagactacctggttcaaatctgagtactatcacttactatgttaccttgatttcaaatggtttcaaaatcagacttttcaaagggraaaaaatggcatcatttaaaaattctaaaatgtgcctttactatcaagagccaaagtataaggacagtgaggaaacgtgtgttcctagtctttttatgtcttctaaactggcttttttttttttgacagaggaa

SEQ ID NO: 225183 - DNA, 516 bp, Homo sapiens
ttttgagtaaatgcctgaattgtctgtgtaattgccttgattctatgcattgttttccttgtggttacctcaaggaaatggagtcacttcagtagctattttactgaaaataaaacgagattttcggagataatgttctttgaaaagtgttaaaggtacacttatttatggaaatacacgttttgttagcaatgtagctgctacatgtttgtygtacattttatttttacaattctcctaagtgatttaacaattatataatcattttatgattgttattgttatttttccctctttcttgaaactaatagactaagtgacaaaatactgcaggatgtagaattgctcagctttgcctataaagtcaggaggagagataacataatttaattattctattgcaattctgttgtctcttcttgcctcttgactcaaatggtctcaagaggggagagaggaaattatgggctctgttgttgatgtttgttgaacttcttcagtgactgtattttcggg

SEQ ID NO: 225184 - DNA, 609 bp, Homo sapiens
  misc_feature (1)...(609): n = A,T,C or G
actgtatatatattgtattactgtaataattttgtaaccaccttctatggctattgcagtgagctcaagcattgtataggcttaaaacactgtgtgrcactaattcagnttactagacagctgttcatctctctggtaaattgcttattgcagtgaaaactgatctctctcggctctggtatatttttcatagtatgtagtgcaacattgtaaaccttgactaacaccatgggaccccaatgtaatggcactagtgatgctggaagtggtcccaagaagcagagagatgtcatgacattacaagaaaaagtttaattgcttgatatgtaccattgacagaggtctgcagatatggtttcctgctatttcaaaataaatgaattttgcataaagaccattgtaaaagaaaaaggaaaccgtgaagccattgctgcagttacactagaaggtgagaaaaccttgtacttcttatgaaatcctttttatctcatatcaaaaatgcagcttttatgtggtgcaggattactgtaagaaaggcatacctacagattctactattgattgaagaaaaattgagatcattacgtgacaacttaaagaaaaaggaag

SEQ ID NO: 225185 - DNA, 574 bp, Homo sapiens
ctgtttggcagagttatgagaattaataatcatttatgttaaaaatctagtatagaacatattagtaattttcacctgagtgttttatagtttactagaatgtatttaatatcagaggcaattccttgattatattaagattactaagtatactgtaaaaaatagttattagaaatgtcagcttccaaacttttgatgcataaatgtaataactcattactaacataattctatgaarttagtatcccagcacagagaaaaacactcaccacttttattcaatgcataggagatttccatcagaattaggagataaaccttaatcctgagagggttgaaagtggaaatgtgagagatccaagttctttttcaggttgtgttcactatcaaataatcatgtataaaaatacctcatcttatgcagtttatggactagatgtgatcttgaagttgcttataaataaaattattttattttatttaattaatttttattattattatactttaagttttagggtacatgtgcacaacctgcaggtttgttacatatgtatacatgtgccatgttggt

SEQ ID NO: 225186 - DNA, 573 bp, Homo sapiens
tgattgcaaatgaaaatttgtaacatatacaatcataaaaatgcataacaataaacaatgtagtgtgaaagcactcagcaagcctaccatatgtgttattgcttgtttttgaactgtgtggtcgtaggaggtgctctggacaattttcaaattgcaaacatttattcactgatttcaccaccaccactgtgactgtgtcactcactgatgacccaaaaattgggtaaataattatcttccttgtctgtattaatctttcttaaatgtatgtatagctcacatttatttcagtgtttagtattagaagtgttttggttctttatttagaaatttggtgttgtttttgtgaccataaacataccatagcaacttaactcttgtttatataataactagtctatggtaaaattggttttgttacacagcgttttgcttaaagtcacagtttccaagaacctaytgatgacattgaggacttactgttaagtgcatattggacaaagctatatattcaatgagagattaaatatatctcacagtcaattaattcaaaggtgggagagtatatcctga

SEQ ID NO: 225187 - DNA, 588 bp, Homo sapiens
atatctgggggaaagcatgtggcttgtcagtggcctgggctgaggggccatcttcccaattgcctgcactttgctgtcactaacccagcagaggcaacacccctttttgttcagtccatccaaactatcctctcaattaaattgctgatgacctatgtacattcccttcccagagagaaaatagtaacaaggacatacccaaatgggctagtgatgctttagatggaagagatccctcatttctgtatgtggatgagaataacagaacaccctgggctaagatagcattcagacccattcctgctattaatgtaattcctttccaaggtcacccttgctgctggatggagagytaagtgccacgtggccagagcaaaggctgtgagaacaggcaggaggtcattgcagtggcccagagaaaaagtggcagtagcttggctcagatggtggtggcactgaggatgaagcgaaggacgggattttaagatgttattgagatccacagatagggtttaatgaaggagcagaggaggagagtcagataattgtattacttaggtctctcctataatgctgaataacaactcc

SEQ ID NO: 225188 - DNA, 434 bp, Homo sapiens
gaattcagtgcagctcagaatgtttaaggcaaataataaaataaagaacaaaraaagatattgataccgtatgttaagtggcagggttatctatttgaatgtttttggcttcaggtaatagatgacccctccaccccctgcaaatggcttaaattaggggttggcaaacttttttcttttttttttgtaaagggccagatagaaaatattttaggctttgcctttgtagcagctacacaactctgccactgtaacaaaggcagctatggtcaatcgtaaacaaatgagcatggctgtgttttaataaaactatttataaaaagagatagcaggcctatttggcccatacaccatagtttgctgactcttgactcaaacaatgagaaaacattattttgtaacaagaagtgaaagcggttaattcaatagatcga

SEQ ID NO: 225189 - DNA, 422 bp, Homo sapiens
agaattcagcagaaataaataagtcaggaaagatatctgttgttaagaaataagttcagttttaaacatatcaaatttgaggggacagtaagctatctacccgatcagaaatggacagctagcagacggagaaatgaaaatggcgcttcatggataattagtttgggaatattccaaatgggtgacagtggaagccttgggagtgaatgagatctctcaaggatggagcagggactgggagagagactgrtgagggaaccttggaaaaacccatatttggattataaaaggaagaaaaaccaactgaaagagaggatcaaaggattaatcaagcaggaatagtcttcccgaaggatgtttaaccaaacactagttctgtggggtgggtaacaggtaatatgggaaagaaaattggttctgta

SEQ ID NO: 225190 - DNA, 598 bp, Homo sapiens
tgcttttagttctttaagaaatcttcatactattttccataatggttgtgctgatttaccctcccaccagctgtgtacatgtttttcwccatatccatatcagcatctactgttttttgactttttaataatggcctttctggctgtgataaggtggtatctcactgtggctttaatttgcattttcctgatgattagtgatgttgagcattttttcttatatttattggccatgtgtatatcttcttttgagaaatgtctattcatgtcctttgcccactttttgatgggattatttgtgggttttttcttgttgatttctttgaattccttgtggattctagacactagtcctttgtcagatacaaagtttgcaaatattttctcccattctatgggctgtctgtttactctactacttatttcttttgctgtgcagaagctttttagtttagttaggtcccatgtatttatttttgtttttgttgcatttgcttttggggtcatcgtcataattctttgcctaggccaatgtccagaagagtttttcttaggttttcttctagaatttttatggtttcaggtcttagacttaagt

SEQ ID NO: 225191 - DNA, 598 bp, Homo sapiens
tgcttttagttctttaagaaatcttcatactattttccataatggttgtgctgatttaccctcccaccagctgtgtacatgtttttctccatatccatatcagcatctaytgttttttgactttttaataatggcctttctggctgtgataaggtggtatctcactgtggctttaatttgcattttcctgatgattagtgatgttgagcattttttcttatatttattggccatgtgtatatcttcttttgagaaatgtctattcatgtcctttgcccactttttgatgggattatttgtgggttttttcttgttgatttctttgaattccttgtggattctagacactagtcctttgtcagatacaaagtttgcaaatattttctcccattctatgggctgtctgtttactctactacttatttcttttgctgtgcagaagctttttagtttagttaggtcccatgtatttatttttgtttttgttgcatttgcttttggggtcatcgtcataattctttgcctaggccaatgtccagaagagtttttcttaggttttcttctagaatttttatggtttcaggtcttagacttaagt

SEQ ID NO: 225192 - DNA, 598 bp, Homo sapiens
tgcttttagttctttaagaaatcttcatactattttccataatggttgtgctgatttaccctcccaccagctgtgtacatgtttttctccatatccatatcagcatctactgttttttgactttttaataatggcctttctggctgtgataaggtggtatctcactgtggctttaatttgcattttcctgatgattagtgatgttgagcattttttcttatatttattggccatgtgtatatcttcttttgagaaatgtctattcatgtcctttgcccactttttgatgggattatttgtgggttttttcttsttgatttctttgaattccttgtggattctagacactagtcctttgtcagatacaaagtttgcaaatattttctcccattctatgggctgtctgtttactctactacttatttcttttgctgtgcagaagctttttagtttagttaggtcccatgtatttatttttgtttttgttgcatttgcttttggggtcatcgtcataattctttgcctaggccaatgtccagaagagtttttcttaggttttcttctagaatttttatggtttcaggtcttagacttaagt

SEQ ID NO: 225193 - DNA, 482 bp, Homo sapiens
tgggttttttcttgttgatttctttgaattccttgtggattctagacactagtcctttgtcagatacaaagtttgcaaatattttctcccattctatgggctgtctgtttactctactacttatttyttttgctgtgcagaagctttttagtttagttaggtcccatgtatttatttttgtttttgttgcatttgcttttggggtcatcgtcataattctttgcctaggccaatgtccagaagagtttttcttaggttttcttctagaatttttatggtttcaggtcttagacttaagtctttgatccggcttgagttgatttttgtataaagtgaaagatagagatctagtttcattcttctgcatgtggctatccagttttctcagcaccacttattgaatagggtatcatttccctgatttatgttgctgtatgctttgttgatgatcagttcaacaaagtatttggctgtatttctga

SEQ ID NO: 225194 - DNA, 536 bp, Homo sapiens
cacaggccagccacatccaaaaaggtaaagaacagattctcaactggaggggcaacaaaatcacactgcaaaggtaagaatatagggaggcctttaactgggrccactgatgcaatcaatttaccagaattagatttacccaaagcagaaatgtatgtcaaagaaagacaagggcttggaaccaatggacaacatttgaccctgtaggtacatggaagaatccattgccttctgagtcaatgtgaaataatgccatcatccctcccccctcagggtggtagggtgtgtcatcagctgtcacttggtcagtggctgtgccacgctttttaaatactggcattttttattatcattattattggtggacacaaggtctcagttgattcataggcagcgtttagtaaaaatactctggcaacaaatgctttaattagcaccactatctctaaagcataggactggccctaagaggtgaaaactggcctgtttgcacatggataaaggccctacgccctctagacagatccactgttgaa

SEQ ID NO: 225195 - DNA, 411 bp, Homo sapiens
aaagaaataagtacaattgcctatgtttgcagattatatgatcttatataaagtaaatcctaaagactccacagaaagaactgataaacaaattcagtaaagttgcaggattcaaaaacaacacacaaaaaatagatgatatttytatacactaacgatgaactattcaaaaaggaaattaagaaaacaatcccatttacaatagcaaaataaaaaaaatacttaggaataaacataaccaaagaggttaagatttgtacactgaaaactgtaaaaatttaatgcataaaattaaagacacagaccaatggaaagacaacccttgttcatgggttggaagaatttatgttgtaaaaatgtccaaggtgatccacaaattcaatgcatggcattctttacagaaaaaaaaaa

SEQ ID NO: 225196 - DNA, 282 bp, Homo sapiens
gaaaaatttcattagatgcacataaaaaggtctaaggtagcataaagggaaatgaaagcatgtgacagacatgacatctgaaatgcctctagaaagagtggtaatatttagaaggacaataccataagtgattaattcattttctactctccacagtttccccattaaggggttcaggcagtatctttgtatacccagctgttagtgcctagagcacaaaaaatgctgattaatgttgaattaagtaatgagatcatcwataaagtttgtaaacttaattta

SEQ ID NO: 225197 - DNA, 405 bp, Homo sapiens
tggaattctctcccattgttatacatawccagtgcttctctagcctggacatgaaggtaaagaaggaaaaacatggaaaatggtacatcttctgtaactctgaaagagaaaaaatatcctaggttactgccaggaaggactcagaaatgtcagctttctcttgaaattatggaaaacatgggaagttccaaaatcgccatttcaaaccgtttttctctgctcctcacagaagtcctctcctcacactctgccttctactcagggtgaccaacttgtcccagtttgcctgagactttcctggttttggtcctggaagtcccttaatggcgcacatacaaggaatgccatcttacaattaacatagaaaaacaggaaataagaaagaggaacatcaggccagcctcc

SEQ ID NO: 225198 - DNA, 597 bp, Homo sapiens
atagagcacgctcagaaaaacaactttaacagggccttagaaacaggatggtaaaatatcagcccactgtcaaggaggggagaacacattaaatacctccaaaataataactcataagctttattcacatgtattgcctaatttaatgcatttaacaacactcagattacataggtaatgatatcatttccatttaaagttgagaaaattgagactctaaagcaggtgggccactgggattccctgaccttctttaggctataaatcctcttatctccccactacccctaacccatttcattcagacaacacacaccaccaacgctgaaatgtagagctctccaacttctggggcagccaggacatttttaaagtccttgaagcccaggaagggtgtggtcatcccaactttgctctgcttctgttaaaatccaaatgctagaaaaatagtccrtggtaaattcagccagtttggagacctgagcatattgttcagagacccctcttgcatttattttaaagaaactatttttaaaaactaaaatgcaatatgggagttgtagtgtgtacagctcactgaagtattccttaaacatc

SEQ ID NO: 225199 - DNA, 521 bp, Homo sapiens
acttcaaaaaatataatggaaaatgaagaggttgtgaaaggaaaataaatcttgggaccccgaaatcactaagctgaagggaaaagtcaagctgggaactgcttagggmaaacctgcctcccattctattcaaggtcactcctctgctcactgagatgaatgcatatctgactggctcatttggagaggctaactagaaactcaaaagaaagcaacgatttgtctcttatctacctatgacctggaaaccccctcccaacttcaagttgccccgcctctgcctcgaattgtcccacctttctgaactgaaccaatgtacatcttaaacatagtgattgatgtctcgtgacttcctaaaatgtataaaaccaagctgtgctcctaccacctttggtacatgtcatcaggacctcctgaggctgtgtcacaggtacgtgtcctcaaccttagcaaaataaactttctaaattaactgagacctgtctcaggttttcagggttcacaaggtggagagaagacct

SEQ ID NO: 225200 - DNA, 521 bp, Homo sapiens
acttcaaaaaatataatggaaaatgaagaggttgtgaaaggaaaataaatcttgggaccccgaaatcactaagctgaagggaaaagtcaagctgggaactgcttagggcaaacctgcctcccattctattcaaggtcactcctctgctcactgagatgaatgcatatctgactggctcatttggagaggctaactagaaactcaaaagaaagcaacgatttgtctcttatctacctatgacctggaaaccccctyccaacttcaagttgccccgcctctgcctcgaattgtcccacctttctgaactgaaccaatgtacatcttaaacatagtgattgatgtctcgtgacttcctaaaatgtataaaaccaagctgtgctcctaccacctttggtacatgtcatcaggacctcctgaggctgtgtcacaggtacgtgtcctcaaccttagcaaaataaactttctaaattaactgagacctgtctcaggttttcagggttcacaaggtggagagaagacct

SEQ ID NO: 225201 - DNA, 639 bp, Homo sapiens
gcatccccacaaaatacacttcttggaaataggggctccgatctttttgttgtgcactagagaacaacttgcctttttcacatgaccgctgtgtcaaacaattcatgcctttttatttaattaaaggacaatcccccaatcatcctacaccacccccataagaccataagacttaaaggctcccaggaggcagattattaggttgtaacaaaaccaggcacattaataaataaaagtctaaaattcttgctttggctgggacttaaactcttgaataaaatgcatgcaaatatkttttaaatatatgcagtgcatggtgcctaatagatattcagttgatggctttgaataagggaaaaatgaatgaatacataaatgtatgaataaatacagtttattctcaatggcatgtacttattctattagagaaaacatgaatacttaaataggtaatccacaaaagtccaacctacacattttaactggtagcctcatgcttctcccagaagttcttaccagagaagcaaacaggcagtaaaaatgactggctcaagtttcatctcttcagcctgcctgcgcttggtgccttggaacttttaactaacagcaaaattccccaaatgcccttgtgacaccaag

SEQ ID NO: 225202 - DNA, 639 bp, Homo sapiens
gcatccccacaaaatacacttcttggaaataggggctccgatctttttgttgtgcactagagaacaacttgcctttttcacatgaccgctgtgtcaaacaattcatgcctttttatttaattaaaggacaatcccccaatcatcctacaccacccccataagaccataagacttaaaggctcccaggaggcagattattaggttgtaacaaaaccaggcacattaataaataaaagtctaaaattcttgctttggctgggacttaaactcttgaataaaatgcatgcaaatattttttaaatatatgcagtgcatggtgcctaatagatattcagttgatggctttgaataagggaaaaatgaatgaatacataaatgtatgaataaatacagtttattctcaatggcatgtacttattctattagagaaaacatgaatacttaaataggtaatccacaaaagtccaacctacacattttaactggtagcctcatgcttctcccagaagttcytaccagagaagcaaacaggcagtaaaaatgactggctcaagtttcatctcttcagcctgcctgcgcttggtgccttggaacttttaactaacagcaaaattccccaaatgcccttgtgacaccaag

SEQ ID NO: 225203 - DNA, 522 bp, Homo sapiens
aaggagcaaaataattctccagtaacagaatccaaagaaaagaacaaaattccagaaagggaatttaaaataatgaccttaagaaactcagtgagatacaagagaatacagccaatattcaatacaattcaatgaaattaggaaaacaacagagattgatatcatgagaagaaccaaacgaaaatcttgacactgatgartgccttgaatgaaataaaaatacaattgagagtttcaacaacagactaaatcaaacagaataaagaatttctgaactttaagatagttcttttgaaataactcagaggtaagacaaataagaataaaaagaatgaagaaatcctatgggacctacaggacatcattaagccaacaaatattcacattgtaacaatgccagagggagaagagatgaagataggcacagaaaacctatttaattaaataatagctgaaaacttcccaagtcttaggagagatataaacacccagattcaggaaactcaaaggtccctaattaga

SEQ ID NO: 225204 - DNA, 522 bp, Homo sapiens
aaggagcaaaataattctccagtaacagaatccaaagaaaagaacaaaattccagaaagggaatttaaaataatgaccttaagaaactcagtgagatacaagagaatacagccaatattcaatacaattcaatgaaattaggaaaacaacagagattgatatcatgagaagaaccaaacgaaaatcttgacactgatgaatgccttgaatgaaataaaaatacaattgagagtttcaacaacagactaaatcaaacagaataaagaatttctgaactttaagatagttcttttgaaataactcagaggtaagacaaataagaataaaaagaatgaagaaatcctatgggacctacaggacatcattaagccaacaaatattcayattgtaacaatgccagagggagaagagatgaagataggcacagaaaacctatttaattaaataatagctgaaaacttcccaagtcttaggagagatataaacacccagattcaggaaactcaaaggtccctaattaga

SEQ ID NO: 225205 - DNA, 572 bp, Homo sapiens
aatgttttgggttctgagacagcttctaaggtactccatcttcatttaattcaaagtgttcagtatgccaaagcaccattgtgtggggtatcattttcttagacccaacaccataaatactaagagtagtttagtggttaccagggatggcggaaagaagtaatcaagggttactgataatgagcataagttttcttttgggggtgacagaaatattctggaattagatcatggtgacatttgcacaactctgtgaatatacttaaaagccactgaattgtaccctttaaacggacgactagtgtatgtcagttatatctcaattaaaaacaaagtctagaacttgacatatcattccaaatactcaaattagaygagtctgcttctaaggtaaataagtggaaagtggtcacaagataagaacagaggctattaggagatgaggaaaatcaggaatgagaagtaggaagccaactcttcataattttttaggtgagcagcagagggagcccttgatagcaaagaaaattacaaaactaatgtttatacttctgatcataaagttaatacag

SEQ ID NO: 225206 - DNA, 602 bp, Homo sapiens
gagagcttggatttttctgtatcccttactggtgaagcaaacccactttttgcatgtatgcttaacaaagctgccaaaagtatttgtttaaacccatgagttgcattgctttacaaaagtttcttatagctcacatatgttcaagtcctttcttatttatatgtggcaatcataagcagaatttcatgaattaagaaacctaagcgtgggacatggattaaaggatttttatgtttgctgctggaaatagtggccttgaagrccaggtattttccccagatgatccatgaggtattataatcttcccatgaatagctaggtctattataataaaatattttgcagaaatctgaggatgacctaacctcaccagtttctcccaaaataagccatattccaaccaaaaataaagagtatttttagatcagtgtaaaagcagcagtcaataaactacgttggtgagcagaccatcctaccaagtttcctgacaagtaatttcttggacttctgaggagatggatctgagccagtactagattacccaaaagcaacacaagtgtttaggcccccaacaaggtgagaacactaaatgatgagaaaat

SEQ ID NO: 225207 - DNA, 589 bp, Homo sapiens
tgtcagtggttcttctttaagtccttagacatcaaacccacagagcccttaataccagatttagatgtgaagtggtggaattatagaacacaaacatcatgtggcaagtgaccatctgacagatgcatatttaaatctgtttgcaaaaatgtmccctgttgacttgttggcatcctaaggtgttggttaatagactttacatccccaacacaattgaagagcctggcccacgtctattaccaaggaaaacaaggtagggagatgtccagggattacaaaactctaataaatcctgtttcttattccacataatacttagtatactcacagtttctatttggtttacacccctgcagaaacctggataagttcagggtggccccaggaaacagggagaaaggaagactgcagggactggctgtcagtcaatgtcaatgtcagaggttgaagtaagggggagggagaatcagggatcctggaggagtctgcaggggagaacagactatgcagcagcctctatcaggacagttggtgtacacttggctgaactgtctcctttttgcatttttcttaggaaactataatggca

SEQ ID NO: 225208 - DNA, 529 bp, Homo sapiens
gggtggagggttgggagtgggacacagggtggggctgcaacctggaaaggagttcaaactcagcaaggcagacaaagggtgatgtggcaaagattatgtcagtaagatagttgyttcctgagctcttacataaattaaagtcattaaaattaattttactatgtgattttttttacactcctagtgaaaaagatgatacctggcaaattttcccaagagtgtctctatacttctttggataattgatatccaaggcagatgagattcaggagagacttttatccaatatagacaaaaacagccttgccttttgctttcacgtttgaggattaaaggacttcgattatttaagggggcttagtaagtgttgattgcaatgacttagaaaatcctttcagtgtcaaatgatgatgcaacgtaagctttcttgaagagtgaacttaactgttactgctctaaaggcaggtaatatagaggacatgaacaaagaaacagacctgctttggccactgaggagtctcaagtaaat

SEQ ID NO: 225209 - DNA, 352 bp, Homo sapiens
acacaaagtaaacttctgaaacactccattttttaaaagacaggcggaaaggaaagaaacacgaaaaagagagaaagaatgaggaaagaaacgaaggaaagaagggaaaaagaaacagagaggaaagaaaaaagaaggaaasacagggaacgaaagagaaataaagcacgaaggaaaaaaggacagaaagagagaaagaaggaaaggaagagaggaagaaaaacctaaagaaggagagaaaggaagaaaggaaggaagaaaaacacgaaggagaggaagaaaggaaacagagataactacgtacgctcgttcatttacacacataaatacgacgcttttcatacgtaaaata

SEQ ID NO: 225210 - DNA, 200 bp, Homo sapiens
aggtttcacaccacggggaggcgcgcgccgcccacgcgggggcgagcgcggacaccaccccacaggcgcccgggggttcccgcccccacggcgcggggcgcacgccacacgcgcggcaggcgcgcgacggccgccgggtaaagcccccacccgacggccgccgcggcgtcggcggcggsgcggccccggccggggagcgg

SEQ ID NO: 225211 - DNA, 565 bp, Homo sapiens
atttacacacataaatacgacgcttttcatacgtaaaataaacgtctttatcgacgatcccttctttatagagcgatgtgtatttatttgtataacacaaacacctacatctatcatacagaagtctatttccatacaaccgatacgtatttaccatacgcaagagtattcaatgcagagatacacgttgtcgttgtttgcatataagcgtacagaaacgtttacattamtacatataagtaaacgcgtggaaacgaaagaaataaaaaagcgaaatgagtcaacaggccgggcacggtggctcacgcccgtcatcccagcacttcgagaggccgaggtgggcgcatcacaggaggtcgggagttggagaccagcctgagcaacatggagagacacggcgtgcctactaaaaacacaaacatcagccaagccaggcgtgggggtgcctccctgtcatccccgctaatcgggaggctgaggcaggagaagcgctcgaacccgggaggcggaaggtgcggtgagccaagatcgcgccattgcactctagccgtggaaacaagagtga

SEQ ID NO: 225212 - DNA, 533 bp, Homo sapiens
ggggagcacgggacgtgcgctcaccgagagcaggcgggcgcccttccccgcgtgggaggggcgcgtctcgtctcgtctcactcaaaccgcctcgaaccccacaccgacgagctccctcaggacccacgcgcggacaccgcggcggcgaccggaggagggggcgccgggggcgggaacgacacaccaccgttcggcctcgggcacctgagggacaacccggagcgctccaggagcaccgcaagggcccaggcggagccgacgctcgcgcaaacccccccgagagggcagcacgacgggccggcgggacggcacccccaccgccgcggaggggggccgcccgcaagtcgacaaccactggaggcgacagcgagggctgtctgccgcgtcrgaggaccccgccggcccgccccgcgacgcagaaggcggcgggcgggacggcgaggtcgggccggggtccgcaccccacgccttcccacacgcaccgccggcgggcggggagaggagagacgaggggacccccgcggggcggagcg

SEQ ID NO: 225213 - DNA, 453 bp, Homo sapiens
tcaccctggctgggtctcggtcaccttttatcacgatgttttagtttctccgccctccggccagcagagtttcacaatgcgaagggcgccacggctctagtctgggccttctcagtacttgcccaaaatagaaacgctttctgaaaactaataactttgctcacttaagatttccagggacggcgccttggcccgtgtttgttggcttgttttgtttcgttctgttttgttttgttcgtgtttttcctttctcgtatgtctttcttttcaggtgaagtagaaatccccagttttcaggmagacgtctattttccccaagacacgttagctgccgttttttcctgttgtgaactagtgcttttgtgactctctcaacgtgcagtgagagccggttgatgtttactatccttcatcatgacatcttattttctagaaatccgtaggcgaatgctg

SEQ ID NO: 225214 - DNA, 453 bp, Homo sapiens
tcaccctggctgggtctcggtcaccttttatcacgatgttttagtttctccgccctccggccagcagagtttcacaatgcgaagggcgccacggctctagtctgggccttctcagtacttgcccaaaatagaaacgctttctgaaaactaataactttgctcacttaagatttccagggacggcgccttggcccgtgtttgttggcttgttttgtttcgttctgttttgttttgttcgtgtttttcctttctcgtatgtctttcttttcaggtgaagtagaaatccccagttttcaggaagacgtctattttccccaagacacgttagctgccgttttttcctgttgtgaactagygcttttgtgactctctcaacgtgcagtgagagccggttgatgtttactatccttcatcatgacatcttattttctagaaatccgtaggcgaatgctg

SEQ ID NO: 225215 - DNA, 575 bp, Homo sapiens
acaatatgacctaggtagtaatttcctatgtgcctacttatacacgagtacaaaagagtaaaacagagagactgctaaatkaaagggtacgtgaagttcttcatagtaactccgtaaactggaacactgtcaaaaagcagcagctagtgaattgtttccatgtatttttctattatccaataagtgaactatgctattcctttccagtctcccaagcacttcttgtccccatcaccacttcggtgctcgaagaaaaagtaacaaatcaaggaacacaactaaagaaacacacacacaaaccaaagacaactacagcgtctgcaaaagtttgctagaagactgaaactgttgagtataaggatctggtattctacgatcatgagttcacttcagagtttgttcaagacatacgtttcgtaaggaaacatcttagttagaagttattcagcagtaggtaccatccctaagtatttttcaccaaattcgtgacaataaagagctatctaaccagaaaaattagcgagtaccggcaccatccatagggctttgtctttacgcttcattagcacttacca

SEQ ID NO: 225216 - DNA, 455 bp, Homo sapiens
gatgatttcatcacccgggtagtcagtgctgtgtccgacagtattcgtgttttgttttcttcctgaagctgtctctccttccacccctcctccctcaagcaggcttccgcgtccccggtccccctcgttctgcccatgcaagaactgtcatctgtaagttcccacttctagatgagaacacgcggtatttagccgatcyttgctgtcatcttcggtggtggtggtggtggtgaaagaggcatgacactaaatcgacccttaggacgctcccctccgtccccaccccgcaccccctccccacacacaccctcattcccgcaccccctcctcaaacgcaagaaaggaagaaatgaaagtaagaggtgagcctgcaaggcggtggaggcgggggatctcagagggcgagcaagcgatggcggtcgggggatgtgtcggctgaggtatcaaaaataggg

SEQ ID NO: 225217 - DNA, 536 bp, Homo sapiens
gtaaacttgtgacgggggtgttcagtgtgcagatgatttcatcacccgggtagtcagtgctgtgtccgacagtattcgtgttttgttttttcctgaagctgtctctccttccacccctcctccctcaagcaggcttccgcgtccccggtccccctcgttctgcccatgcaagaactgtcatytgtaagttcccacttctagatgagaacacgcggtatttagccgatccttgctgtcatcttcggtggtggtggtggtgaaagaggcatgacactaaatcgacccttaggacgctcccctccgtccccaccccgcaccccctccccacacacaccctcattcccgcaccccctcctcaaacgcaagaaaggaagaaatgaaagtaagagatgagcctgcaaggcggtggaggcgggggatctcagagggcgagcaagcgatggcggtcgggggatgtgtcggctgaggtatcaaaaataggggacccagttttcagccccaacacaccccctaatcctcagccgcagccagcctct

SEQ ID NO: 225218 - DNA, 551 bp, Homo sapiens
acgggggtgttcagtgtgcagatgatttcatcacccgggtagtcagtgctgtgtccgacagtattcgtgttttgttttttcctgaagctgtctctccttccacccctcctccctcaagcaggcttccgcgtccccggtccccctcgttctgcccatgcaagaactgtcatttgtaagttcccacttctagatgagaacacgcggtatttagccgatccttgctgtcatcttcggtggtggtggtggtgaaagaggcatgacactaaatcgacccttaggacgctcccctccgtccccaccccgcaccccctccccacacacaccctcattcccgcaccccctcctcaaacgcaagaaaggaagaaatgaaagtaagagrtgagcctgcaaggcggtggaggcgggggatctcagagggcgagcaagcgatggcggtcgggggatgtgtcggctgaggtatcaaaaataggggacccagttttcagccccaacacaccccctaatcctcagccgcagccagcctctgggtggggttgcgcctgtcaaagctt

SEQ ID NO: 225219 - DNA, 311 bp, Homo sapiens
agcttggctgagtgggttttcggtgccgaaacctcccgagggcctccttccctctcccccttgtccccgcttctcccccagccgaggctcccaccgccgccctggcattttccataggagaggtatgggagaggactgacacgccttccagatctatatcctgccggacgtctctggctcggcgtgccccaccggctacctgccaccttccagggagctctgaggcggatgcgacccccacccccccgtcacgtcccgctaccctcccccrgctggcctttgccgggcgaccccaggggaaccgcgttgat

SEQ ID NO: 225220 - DNA, 427 bp, Homo sapiens
gttgaggaactccataatttctctctctctctcttttttttttttttttttttttttttttttttttttttttgagacagggtctcactctgttgcccaggctggagtgcagtggcatggtcagctcactgcaacctccacctcccaggttcaaacacttctcatgcctcagttttctgactagctgggattacaggcgtgcaccaccatgcctggctaatttttgtatttttagtagagacaaggtttcaccatgttggccaggctggtcttgaactcctgacstcaagtgatccgcccacctcagcctcccaatgtgttggaattacaggcatgagccaccatgcctggccctcttgttcttttcaatagcaacacacttgatacatttatagaaactactacttctaagttttgtttcactcca

SEQ ID NO: 225221 - DNA, 421 bp, Homo sapiens
taggaaactaaaggaataaaagaacggtgacyccataggccgagcagcagcttaagctgctcggctaaggatacttattgttacttgtcaattgtattctaaacaaggggtggattattcatgagttttctgggaaaggggagggcaattcctggaactgaagattcctcccccttttagacaatatagggtaacttccagaggttaccgtggcatttgtaaactgtcatggcactggtgggagtgtcttctagcatgctaatacattataattagcatgtaatgagcagtgaggacaaccagaggtcacttttgtcaccttttggtgtgttttggctggcttctttacctcatgctgttttatcagcaaggtctgtgtgacctgtccattatactgacctcttatctcatcctgtgactt

SEQ ID NO: 225222 - DNA, 602 bp, Homo sapiens
aagctttaatccttgtctttcggcagaaaatgagtagcttgcacttaaaatgcaggctggagaactttttcctcgaagtctgtccctctctgattgacagtctctagttgtcacagcagggrttaaaaataagctacttccttcctccctctttggagttttggtttttaactatttaatctccactatatgtgaaccatagtctgactaaatattttgcctaaggtatagctgattaatagataagtagatcttttctctttccatgtatatcctagtagtcaacactgtctcgaaataatgtacacaaaaatcaaaggactagaaaaatataaagtagtgagtagataattcaaagttaaagacgacaaccaataaaagttgagatttaaccgccttaagttattttttcctcatcgctttgaataaaaagctaaactgtagattccagccgagttccatctcactgggttctgcctttttcttgggtggctttgtacatggaaaaccgatagaggccttctcctaacaagggccacatcacctgtaattaatttccaggcttccaaccatgagcacagggaacacccacaccttccctc

SEQ ID NO: 225223 - DNA, 556 bp, Homo sapiens
tcgttttctgactaatgcagaagaaatcctcttataacgacttaagtaagctgtcagtcaagcagtatttattgagagccaccttcaggatattcaggarggaaactaatgctggagacaatagaggaagccagtgccaagggcgtcagatgcccctgaagggtctaagtaaaattgcaaagtgggagaactttacctgccttcttcctttctttttttttatttatttcttttcttttcttttttattttttttaagaggtggagtctcactgtgttgtccaggctggcctcagactcctgagctcaaaggatcctcctgccttagcctcccaagtagctggaactacaggtacacagcaccatgaccagcccctctttccctcatggtttcttgctctctctgcacctattccttttctaatataatcaatcttttcatgctgtcccactcccactcctagccctgccattcattcattcctaaaggcacacatttattcattcagaaaatatatatattggctatccactgtgttctaggcactgttctagtc

SEQ ID NO: 225224 - DNA, 523 bp, Homo sapiens
aatcaatattctaaagttcccccttaagacactggaaaaagtagaggaaaccaaacctaaaaagtagagcaagcagaaggaaggaaataataaagattaaagaagaaattagtgaaatattaaatacaaaaacaatagagaaagtcaatgaaaccaaaggatggctccttgaaaagactaagaaattgacaaaacttaagctacattaaccaagaaaacagagaggagaattaaattaccagaaccagaagtggaaaaggggagattacaatcaatcttatacaaataaaaggttcataaagaatactataaccaattgtatgccactaaattggataacttagatgagatggacaaattcctaggaagacacaaactactgaaactgacttaagaaatagacaatctgagtagacacataacaaataaagagattgaatttacaattttttaaaaaactaagactatgytttcagggatcatttctatggtttgttactagagaagtttatctgaatgtgtg

SEQ ID NO: 225225 - DNA, 396 bp, Homo sapiens
ctgtgtgtctatggccacatgatttttgaaaaacgtaaaacaccattcaatggggaaaacatagtctttccaacaaatgacactgggaccactgggtaaacatatatgcaaaagaatgaaactgaactcttatctcacaccatacacaaaaattaactcaaaatgaatgacagtcataaatattataagagttttacagctaagaaaactgaggggtcttcatgacctcagatttgacaacggattcttatatgtgacacaaaggcaacaaagaaaatatacgtaaattggagttcataaatattaaaaacttgcacttcaaaggatgcaaytaagaaactgaaaatacaatgtcttccacagcatggaagaaaatatttgcaaatcatatatttg

SEQ ID NO: 225226 - DNA, 466 bp, Homo sapiens
actgaattagctcaacccaatctcaacccaatccttttagaccgaaagtgggggaagggtagtttcctaaagaagggagaatggttattaggctttcaataaaaacagatgtctatttcagctctacattttggttatatgaacccctgttaaatatttttctaattcccattagaaatgggaatcccattttcctaattctaatgtcagtgtcttcaatagcttgctctacggttttggttaaatcatttaacccctctgagttaatttactcactaaaatgaaggagagaagaaagtgaaataatcctaaagctcttttcactctcaattccctcattttgtgatatatgtgttaagtgagtggagggaaacaagatttaaatgtattctcaattgaaaacaatgatcatattaaaattcctgtggctayagggtttttcaagtgtgctagctccctgggaatc

SEQ ID NO: 225227 - DNA, 545 bp, Homo sapiens
aagatttctttacatttgttttacattggaaagctcagcatcctactgytcaaggtcattgccaaggtctgatttttcaaattccaaaaatagcaacctcaggcatatatgggttaatatgtcaatacattatgcatttataataaaaaataaaataccattttatacccaccacattagcaaacatcatacagtatcaaatgctgtcataaagaaaactcttggtgttgacaggtgtgggtattactacacccattcagaaaatggtttggcattttattgtaaggtcaaggaggtgaatgaatgccctattaactagactcctagattcatatcctagaacagggtttcctaatatgatatccaatgaagctcatagttaaatttcacaaatccattaatgtggatggttagaaagacattacatgtttgacactcagcatttttttttcaattacaaatttgtcaatacaggcaagtagtcacaatgttgagagcaataactgaccctatccacaaaatgtcacaatattttatattatatt

SEQ ID NO: 225228 - DNA, 547 bp, Homo sapiens
ctcagtgtggcaatcgatgtaatcagtcaagtagctgtgagaagacactggcattatgaagggcctgtctgcaggccaattctgtctctggccctgaacttagactattactgagggtctctggtgcctgtgtccttattgataaactggaataatattataatatatacttaaatatatataatataatatatacttaaatatatataatatatactwacttaaatatatataaataatataatatatacttaaaatatatattatatacttaaaaatgacttctttttgttattgtttaagtctggtacctttctaataataatatagtagtagacctaccttcaagttttatactgctactttctaactacgttgcatcattctttctggttttatcatttgttaaatggagaaaatcacatctccttgcacagtgtgtgtgaagggggagatgtaggacttaaatgggaaaatgtgtgaaagtgatttgaaaattgaagcactattcatatagttatctgaaattgtgcgactttttataatc

SEQ ID NO: 225229 - DNA, 547 bp, Homo sapiens
ctcagtgtggcaatcgatgtaatcagtcaagtagctgtgagaagacactggcattatgaagggcctgtctgcaggccaattctgtctctggccctgaacttagactattactgagggtctctggtgcctgtgtccttattgataaactggaataatattataatatatacttaaatatatataatataatatatacttaaatatatataatatatacttacttaaatatatataaataatataatatatacttaaaatatatattatatacttaaaaatgacttctttttgttattgtttaagtctggtacctttctaataataatatagtagtagacctaccttcaagttttatactgctactttctaactasgttgcatcattctttctggttttatcatttgttaaatggagaaaatcacatctccttgcacagtgtgtgtgaagggggagatgtaggacttaaatgggaaaatgtgtgaaagtgatttgaaaattgaagcactattcatatagttatctgaaattgtgcgactttttataatc

SEQ ID NO: 225230 - DNA, 584 bp, Homo sapiens
cttccttttttcctgttcctgacacactttgcactcttttgcttagattactgaagtattttcttgaattatcttccyctcctgtcttttctcctttaagtccacacccttaaaagccactagggtatctgaaatgtaaatctgatcatgttaatgtgcttcttaaatacccctagttccagtcctgcttaacctaggcataaatggtgggaagattttgtactcataggtatcttgtttagagtgcgctgttttttggttacttgaaaatctttaggcctgtgcttgtactcctcaagtttgccatccacatccttttccttacccctaatcatggcaattttctaactggccctgaaggagtttagactcataacctctggactgtatatagagtcccagccttccaatgacgctttaaggcccttttccagctgacccttactgacccctccagcctcatctctcatactttaatgcttcaaaaaaccaggttgagttttcgcctcatcacgtctttgcttattaactcggttcagaactcagttcctcctggaaggggctgtattagaacctatcctttc

SEQ ID NO: 225231 - DNA, 568 bp, Homo sapiens
gaattcaagatctatgtgtgaagcacatagtatcaggtgcatagtaagtaataagtaagtcaatatattagttattactattaatgtctttggcaatcttgccaaaatctcttagttctaaagtttgtttattctgttgttttttcttgggcatatgattatattatctgtgagtaattcaatgattatttagaataatcttttaattattttgttctttgtatcattgtggctttccattatmataatagttcagtatcattaaatactaacaattatagcaagcattcttttcttattccaattttaataggaacacacttacacttcccacattagtataatggttttgtatatgagatttggccattaagtgtaaaatttttggcatgtaacatttatgatgaagaagttctctcctatgcctagtttgctaagagcacattttagaaatccataaataggtgttaaactttgtcaaatgtttcaggattatatgattgttctcatctagtgtattactgtagtgactaatactgatagattttccaatggtaaaagatttctg

SEQ ID NO: 225232 - DNA, 626 bp, Homo sapiens
ccttcccaactgtatacagggaagtacagcccaaagtagtgaacagcagtgctgctaggtttaggaaacaaagatgggtgagyggggctcctgcaacaagtaaaatttgaggtaggataccagaagggagtatatgagcagttaaggagctcagaaatagacatggtgtccacttgagtctttagctgaattctaaacttcatttgtgcaaacactcaacaataccaggcagacaataactactggggggctgtgagcttaatgaagattctggtagttccacagtgttgagagacattgaaattctgacttgtcaaaatgaagggaattcagtgaatatgcagagcattcagttgagacccaagaaaggccaagctttaagagtagagctaccctaacactagagtcatggcaactctagaactgacttactaagctcaggaccaggatcaagctgccaataaattaactgcccgccagaacaagattcaacactctttcaattaaaagagcataatctagactcttagcagtgtagcacgcacaatatacagcacacaatcaatttgatagatgaagaagcagaaaatgtgaccataacttgagaaaatagtcaatagaaatag

SEQ ID NO: 225233 - DNA, 626 bp, Homo sapiens
ccttcccaactgtatacagggaagtacagcccaaagtagtgaacagcagtgctgctaggtttaggaaacaaagatgggtgagtggggctcctgcaacaagtaaaatttgaggtaggataccagaagggagtatatgagcagttaaggagctcagaaatagacatggtgtccacttgagtctttagctgaattctaaacttcatttgtgcaaacactcaacaataccaggcagacaataactactggggggctgtgagcttaatgaagattctggtagttccacagtgttgagagacattgaaattctgacttgtcaaaatgaagggaattcagtgaatatgcagagcattcagttgagacccaagaaaggccaagctttaagagtagagctaccctaacactagagtcatggcaactctagaactgacttactaagctcaggaccaggatcaagctgccaataaattaactgcccgccagaacaagattcaacmctctttcaattaaaagagcataatctagactcttagcagtgtagcacgcacaatatacagcacacaatcaatttgatagatgaagaagcagaaaatgtgaccataacttgagaaaatagtcaatagaaatag

SEQ ID NO: 225234 - DNA, 626 bp, Homo sapiens
ccttcccaactgtatacagggaagtacagcccaaagtagtgaacagcagtgctgctaggtttaggaaacaaagatgggtgagtggggctcctgcaacaagtaaaatttgaggtaggataccagaagggagtatatgagcagttaaggagctcagaaatagacatggtgtccacttgagtctttagctgaattctaaacttcatttgtgcaaacactcaacaataccaggcagacaataactactggggggctgtgagcttaatgaagattctggtagttccacagtgttgagagacattgaaattctgacttgtcaaaatgaagggaattcagtgaatatgcagagcattcagttgagacccaagaaaggccaagctttaagagtagagctaccctaacactagagtcatggcaactctagaactgacttactaagctcaggaccaggatcaagctgccaataaattaactgcccgccagaacaagattcaacactctttcaattaaaagagcataatctagactcttagcagtgtagcacgcacaatatacagcacacaatcaatttgatagatgaagaagcagaaaatgtgacmataacttgagaaaatagtcaatagaaatag

SEQ ID NO: 225235 - DNA, 605 bp, Homo sapiens
taaaaacattgacagcaataaatgtaagaaaaaatgtgagaaaccagaacatttataccttgtcgggaatgtaaaatgatacaatccatttgataaactgtttaccatcttaaaataaatgtatacatatgtcaaacactgacatactaattcaactcctgaatattgatccaagtgaaatgaaaacataagtccaaaaaaggatttgtacaagcatgtccttatcagcttgagtcaccatatcaaaaaactccaataaacccatatgtccaataggagaatgggtagacaaagtgtggtatctccatacaatggaattaatactcagaaacatagatagaaatagaatagtgttatatgcaataacatggatataacttaaaaacattaygctgagcaaaagaagccggtgtcaaaagataaatactatatggttccaattttatgaagttctagaacaggcaaagctagtctattgtgatggaaatgtgaacagtgattgcctctttgagggtgaggaaattgaatgaaaatggcctgaagtatcttctgggtaacagaaatatttgataccttgttaggggtgtgggtcatactaaagtatg

SEQ ID NO: 225236 - DNA, 570 bp, Homo sapiens
actggccacaatcttgcaagacagaaagtattatctccgttctacagctgaggaaacagagactcagagatgaaaagtaacttcatagttgatcagtccatctgatttctgaaacctatgtagtcccaactaccactgttcttcaaccctagtgaaacattagaaatatgtaaggagctttaaaattgtaaagtacctggaccccamcctcatacgtcctagttttattgattaggatggatcctgagcatgggtatttttaaaagcttcccaagtgatgctatgtgcagccaagattgaggaccattaagccatatgatgttgcttcctcactgcaccccacagagtagcagagctgagagtgctgccccatttccactggttactgctgggaggcggagttgtggaggggaaggcagtaattgtaaagaaatgatatgctggactgttagagctggaaaacatgtctacctgaaaccatgccttgatgagtgaaccagatgacatccctaaaatatgaaccctattcattcccaagttatagccacatcctaatgaacatgaacctag

SEQ ID NO: 225237 - DNA, 547 bp, Homo sapiens
cctaggtaactctgagcaagttgttttgtgtctgtgagcctctgtttctccatctataaaaaggggagggtaaatcatacctcacaaggcctatcacaatgattagacgcaacagaagagtgaaagtatcaagctcatgtctggaacagaaaaggatccttgataaaattccatcagcaaacactaytgattcttattttaaagttgactgtcatggaaaaaagcaatttaacatgcaccatgcttttgttatttttaattgctgagaaaaaatgtgaagaatgttaaggccactcaaatgttaagtcaatgcaaggggtgaagatgggggcaggactgtggcacagctggctcactaatgcaatggagcctgtgtactgatcctcaggatggcaggcaaagtcctaaacaacagagctgaaatggggtgacaactgcaaggtacagactgggctggctgaggtaacagttccctccctctaatactgccattcaggctactggccagtaccaggagcaaacaactaccagttatagcacagggtca

SEQ ID NO: 225238 - DNA, 498 bp, Homo sapiens
cagcctggcaaacatcatgaaaccccatctctacaaaaatccaaaaattagccaggcatggtggcgtgcacctgtaatcccagctgtttgggaggttgagtcaggagaatctcttgaacccaggaggtggaggctgcagtgagctgagatcacaccactgcactccaacctgggcaacagagcgagactctgtcaaaaaaaaaagaaagaaagaaagagagagagagaaagaaaggaaggaaggaaggaaggaaggaaggaaggaaggaaggaaggaaggaaggaaggaagraagaaagaaagaaaatacttgaacaatccctgaaaattacactgaatttcacacagttcaccatagctacagttttagctaatccatcttagatatttacttatgtaacacctggggcatttttatgataaagcaagagaccaggaaagtgttttcctcatggctatgtacctgtctaatgggcattataaaatttaaatgttcct

SEQ ID NO: 225239 - DNA, 519 bp, Homo sapiens
tcaagctcagccagaatccccaagatcaaaaaaaaattgcactatacaaataataacttgaaatatacatacacacgctctcatacacacttcttacagaactgtgcttggggaagctccatttgttgagtgccactgaaggcatattttgctaaactgcttctccaagtattttgttttggaaaatctatcacagtagggcacagctgtttactggatgagcagaaaaaggragatatgcttgtggcaaccaaaaagttttaaggtctttcaagttgtataaaatggacctacagaaacgtttaagtgttctcaggatgcaaaattgaagctgaaatgtgttgtcaaaccagttgcaaaaagtgtacagcaggcatctcttgaggttaaacctggtacccagatacataacaaagcttcaggacacatggcttgttggccttgtcccataccgttgcataatctgatcatgtgtgaatttcacaaaagattcattcatattgttctgctagtttggta

SEQ ID NO: 225240 - DNA, 594 bp, Homo sapiens
gtcctctaatacatttattgtattaatgcagtacagttccagaagaggggatttggcagtacctaacaaatctacacattcagttatcctttgacccagcaaaacagcgtaaaacagggtatatgatatgttagctttttttttaaggcgtatactctaaagatacacctccaccaatacaaacaacacatgcacaagatttctcattgcagcacaattttcaaaagcaaaagattggaaacaacacaartatctgaaaataggggactagtcgagtaaataagggtgtattcaacagtgtagtattatgcagtaatttaagaaaagaatgaggaagatctctatgaactttgttttgtggtgattttctgggatatattacaattttccagcacgtaaaacaaacatcataaaaaatctctggctgtaaaacaaggtttataatatgctagcttttcttttgtaagaaaaaagaggaaaataagaatatgtaagaatacacacacatttaaaaaaatttgtcaaatgaagcatacactaagataaatttaaaaaaaactaatgactccaaaagttaaatgtagagttgccata

SEQ ID NO: 225241 - DNA, 635 bp, Homo sapiens
aaaaaaagatgaagaatggcattatataatggtaaaaagctcaattgaacaggaagatttcactatcataaataaatatgcaccaaacattggagcacccagatttataaaacaattactactagatccaaaaaaagactgacactcacacattaaaagaggggaacttcaacatggcaccatcagcatttgatagatcatcaaggaagagaactcacaaagaaattctgagcataaacttgacagctgacaaattggagttaatagaaatctacagaacactctaccccaaaaccataraatatacaaaattatcatatacatgtagaagataccctaacacattcaaaaatattaaaatcatatgaagcatactctcagactatggtggaataaaaacagaaactcatatcaaggtgaactttcaaaaccataaaaatacatggaaacaatacaatttgctcctgaatgacttttgggttaacaatgaaattgaggcagaaattttcaaaactatttgaaataaatgaaacgagtgacacaatgtaccaaagtctctgagatatgaaaaaaacagtgttaagaggaaagtttatactgctaaacacctacatcaaaaagatggaaatatctca

SEQ ID NO: 225242 - DNA, 570 bp, Homo sapiens
aaccccagtccttgctcatcttatctgaactttttgagtttcagtttctacatatgtgaaatgagaatacagtatctctcttatagtgttatagtgagtattaaatgagaaagcacagggagagtaacataattcctgaactcttctacacagtgcctctgggaagggtagttattagattagaattagcaaatgtgtaattaaacatagttgccacctcatccttagaagggcatcaggcatttgcatatcatcacctagaaaatccttgaaatacatgtattttaattgagggcagtagacaaaggcccaaagtttttatctggaaagatagggaagtgtgagatggtgtaagataccagggagcaggtaaataacttgaaatcactattttttttttcgaaagmcaaaaaaaaaaaaaaaaagaagaagaagaatagtgctatagtaaatgatgtgttccttcccaacttttcaagtggtcatgcaggaagtaattgggggtgttatttaacctctctctgccttgtttaaactggagattatagtatatccatttctaaaagttgt

SEQ ID NO: 225243 - DNA, 570 bp, Homo sapiens
aatggatttggaaatttatttggtgttatactgcaggaayagtctattaattgatattctgactttctattaggaataaagtaaaatgtgaaggtaaattgtagagagacctattctcaggatgattttatccatataccatatcacttgattggtgaaaattcattgggtgtttaattgtatgaaactggagtttaattgaccatttatttatttatttattcatgtagggcagtggcataggtaatccataaggcatgtttagtttttgaagtaaattttaatggaacttctggtggtgaaaacctgatgcatccatttatgtttcccatcaaacttttgcttaatgggacttgctttatcatatggtttatcatacaaatgaggaaactttcaaaggagaatgaagacagtaacattaactaaaattatgtaaataagaatatttatatattgccctactagttggttttatgttattggtggatttatatagtttttccattcaaaaattatatcaaaaatgaaattatttctaaaaactgtaagtaaattaaataaagaaaatat

SEQ ID NO: 225244 - DNA, 388 bp, Homo sapiens
caatttatcttcccttggatatgtatacagtaatgggattgcagaggcaaatgttaattatattttttattctttgaaaaatctccaaactcctttccataggggctgaactaatatacaatcccacaaacagtgtattagcatgccctattctctgcaacctcaccaacatctgtaatttttgactttttaaaaatagccattctgactgatgtgaggtggtatcacatcgtgrttttgatttgcatttctctaataattagtgatgttgagcattttaaaatttgtttgttggccacttgcatgtcttcttttgagaggtgtctgttcatgtccttttcccacgttttaaaggggctattggatttaggatatcagtcctttcaga

SEQ ID NO: 225245 - DNA, 636 bp, Homo sapiens
ataatttgctaaggaataggttaaaactattaagaaaatgaacaatatctagaagtcagacacaagaagagttcacaatgcacattataatctgaaaatgagaaaaatcagaggtatattggttgtgcaggcctgggagagggcagcagataccaatctctcttttctgtggaacaaaagcattacaatacttggagaatgttagcaaaccttttcgctactaaagaactggtgaagatccatagcagaatgaaaagagaacaacaacaaaaacaaaccctacaacctttgaggcaggtgagagaactttctgaccctgacaattagaaatctactgtggatggaggaggagcaggaacactaaagcatccccatcctcaagaccctggaacacagggcctgcttaagactcggcctgattcaggaaacagagaacartaaccccacaccaccatccaaacaggttagcaaaagtcgagttaccagtaacagatgtctaccactaagtatatacaagagtatgaagagaaactctctgtgagaattaggttcctacaaatctatgaatttctaaatgatttcacagcagatttagctatgacacagatatcagaactattagataggtaattgaaa

SEQ ID NO: 225246 - DNA, 540 bp, Homo sapiens
agtctgtgtaggggctcccaccccacatttcccttctgtactgccctagcaggggttctccatgagtgctccaaccctgcagcaaacttcttcctggacatccaggcatttccatacatcctctgaaatcttggcagaggtttccaaacctcaattcttgacttctgtgcacctgcactcccaacaccatgtggaagccaccaagacttggggcttgcaccctctgaagaaacagccytaactctacattggctccttttagtcacagctgggatacagggtgccaagttccaagactacataaagcagctaggccttgggcccaacccacaaaacaattttttcctcctagatctctgggcctgtgatgggacgggaggccatgaagacctctcacatgccctggagatattttccccattgtcttggcaattaacatttggctcctcattacttatgcaaatttatgcagctggcttgaatttctcctcagaaaatgggttttacttttctatagcatcaccaggctgcaaatttttc

SEQ ID NO: 225247 - DNA, 448 bp, Homo sapiens
gaggtggtgctggtagcaccctctgkgggggtcttgccataatcaacaacctgcctggggaacctcattatcttcaccaatcctgagactctactcccctctttagagataccagggatttaggtgattcaggaaagggagatcccacgattaaaagtactcagacctggaagcactctttgttctacaggtctgtgaagtcctgtcatcagctaaagactggcccaaagtgtctgagccagaaagtacttttcatccccccaggctggagaatcctttatcccacctagaaaaaccacataatcaggtgactggatggcattgttagtgagaccacaccaaagtaagtttaaggcctggaagcactatttatccatgggaaaataatccctttatccacctagagatataaagtagccatacaactctaaaaagtgggatttgtcac

SEQ ID NO: 225248 - DNA, 557 bp, Homo sapiens
gctaaaatatggatagataccagtagactgagataagtcaactatgcatatcgtaatacccagagcaacctcttaaaaaatacaaagatataccctcaaaacattataaataaatcaaaactgaattctaaaaagagtttgaagagcctacaggaatttagaaaacagaaatagaattgagaaacactgaaaacaaacaatacaaataataaaatgacaaacttaagctctaacatatcaaattatcttatatgtagagtctaaatataccatttaaaagaaaattactaccagagctaataaaagtaagaaaaataacactaaataaygcaatgctgcttttaagatactggcatcaaattcaataaaatcaacattgaaataattaaaagggtggataaacatataccatgcaaactttattttaaaaaagcaggagtgaccatattaatataaaataaataaactccagagcaaagaaattgatgagagacaaaggaaaaaatcacataatgataaaaaaatccaccagaaaaatataaatatcataatgtata

SEQ ID NO: 225249 - DNA, 387 bp, Homo sapiens
ctgaaaaggactgtatctttccttcatataagatacttagtttcactggatacaaaattcttggctgataatcgttttgtttgaggaggctgaaaatagggccccaatcccttctagtttgtagtgtttctgctgagaaatctgctgtcaatctcataggttttcctgtatagattacctgktgcttctgtctcacagctcttaagattctctccttcgtcttaactttggataacctgatgataatatgcctaggtgaatatctttttgtgatgaattttccagatattctttgtatttcacgtatttggatgtctaggtctctagcaaggctggggaaattttcctctattacttccccaaatttgttttacaagcttttagaat

SEQ ID NO: 225250 - DNA, 648 bp, Homo sapiens
ggttgggttacagcttggttttatatattgtagggaggcatgagacatcaatcaaatacatttaagtagtacatcattggtttggttcagaaaggtgggacaactcaaagcgggggcttccagggtacaggtaaattaaaacattttctggttgacaattggttgagtttwtctgaagacctgggatgaaaggaaatgttcaggttaggataaagaattgtggagaccaagttttattgtgcagaggaagctgtcagatagcagacttcagagagagcaggttgtaaaatgtttcttttcggacttgaaggggtgcctggctcttagttgattatctcctggatctggaaaggaaggaaggaaaataaaggggaaggggattctctatagaatgtaaatttttcccacaagagactttgcagggaaattccaaggtatggcaagaaaatatatttggggataaaacatattgatttttttctcttgtatgccagagatagattggaaagcaaatcatgatatacagggttaaataaaacccatctgatgagaatttatggtttgtagggcatgactccccagaccccttagaaaggagtttgggcaagattaaaaaaaaaaaatcagagcttagtcctcacttacatg

SEQ ID NO: 225251 - DNA, 581 bp, Homo sapiens
gatgcttgtgtgaatttactggtaactcacttatatttaaattattgtcatatattttcgtatctttttgttcatactttagatcattttgtaaaatgtaacagaagtagagaatcatataataaataacatgtgatggttaatttgaatgtgtcaacttgactgggctaagagatgcccagataactggtaaaatattatttgtaatttcatctgtgtggatgtttccagagagattagaatttgaataggtagactgagcaaagaagatccaccctcacagtgtgagcaggtgtcattcaaatcactgagagtctgagtggaagaaaaggagtagcatagaaagggtatatttgctctctgtgtttaagctgggatccatcttctcctgccctctcagactggtgttctcagttcttgagcctttggactcggactaaattacaccaccagctttcctgggactccagcttacagaccattgatcatgtgactcctcagtcttcatatgcmtgtgttggctcacatgatatgtaattctattgcttctatctctctggagaaccctgatgaataccccc

SEQ ID NO: 225252 - DNA, 567 bp, Homo sapiens
aaatagtcttgaggtgttgcagtttcacagttttaccccttgaatctacaatgtcagatttcaaatattagaactggatgggataaaatggaatgtattaacggcattcaccatgacctggataagattagagactattattctaagtgaagtaactgaggaatggaaaaccaaacatcgtatgttgtcactgatatgtcggagctaagctatgaggatgcaaaggcataagaatgatacaacagactttggggacttctggggaagagtgaggggaggcgagggataaaagactacacatagggtgcagtgtatactgcttgggtgatgggtgcaacaggttctcacaaatctccgctaaagaacttactcatgtaaccaaataccacctgtacccycaataacttatggaaaaataaaattaaaaaaagaaaaacaactggatgggaacttagaggtcacatgacaaactcttcagtcgaaaaagtagattgacttgatgacaagttattggggaagtgaagccaacacctaaaggtgtagcataagcacacactgatgagtccc

SEQ ID NO: 225253 - DNA, 585 bp, Homo sapiens
aaaaaccatcaggacagaaaacagattagtaattatcaaggcctggggtctaaggaagggatgggtacaagggagcatgagggamcctgtgaacttgtccaaactcatagaaccatacactaacaagagtgaatcttactgtatgtatatctgcataaacctgactttaaacaaactaaatagcaaacaataacgatgacaataaaatgtatgcccaatagaagaacccagtaagagtggctgtctcttagatggtgaacaggaagacttggcacaagggtgccattttggaacttcttggattttatgccatccatatattcttctcactcaaaaatgtgaaagtaacaaaaattgtgtgtgtgtatacacgatactctactgattctaaatgcaagctttttcatattttaatatctctaaactcagagtgcatctgagtaccatgtcacaggtttttaatttcttagcggtacacacaacactgatgtgttttagattttttttaaaaaatagcctattttccaggattgcctgctagttctctgttagacagtggagttgtcaaaactaacaaggtagcta

SEQ ID NO: 225254 - DNA, 536 bp, Homo sapiens
ccccccaacaagcccccaaataaagtgaatttccaacatggtgtttgcattgctaattgatgtctacctgcaagattttccaagtggaaggtacaaagggagacggcaggtctccaaaaacagatcagggctccctagcctttgtgygtcacctgtttctaaacagcacaattagagcaataaatgctgcagccccgtgtttggcctgacgggatgatgaccctgcggctcagcaaggccacgtatgacagactaactacttgaaaaaggactctcttgagggttacttaacacagtcacctgttgatttatgaacacgcacactcacacataccttgtctcacccttttaatcatatcaatttgctgcatctcagcaaaagaaaaaaaaaccgaaaccactaattactcacaaataagtcaatggcaaagctccacatctgctcaatctggatggatgaagtttgtaaaccactaacacttcattttcccctattttgtaatgaatttttaattacataagaaataagtgaattc

SEQ ID NO: 225255 - DNA, 516 bp, Homo sapiens
gaattcttagctaaattattcacttacctgaccacccccccccaacaagcccccaaataaagtgaatttccaacatggtgtttgcattgctaattgatgtctacctgcaagattttccaagtggaaggtacaaagggagacggcaggtctccaaaaacagatcagggctccctagcctttgtgtstcacctgtttctaaacagcacaattagagcaataaatgctgcagccccgtgtttggcctgacgggatgatgaccctgcggctcagcaaggccacgtatgacagactaactacttgaaaaaggactctcttgagggttacttaacacagtcacctgttgatttatgaacacgcacactcacacataccttgtctcacccttttaatcatatcaatttgctgcatctcagcaaaagaaaaaaaaaccgaaaccactaattactcacaaataagtcaatggcaaagctccacatctgctcaatctggatggatgaagtttgtaaaccactaaca

SEQ ID NO: 225256 - DNA, 592 bp, Homo sapiens
cctaggcattcaagtatgaggcaaagggratcatcatttgtattaaaagagaaatccccaaatcagaactggtttaattccaacctaattttggctacttaaggagagtaagaattaaagaagtaacaaccagtttttagtggatctgagaatgaaaaagttaaccgtttgatttcattggggcctattccacattagtttatttgaatcttgtattccagcaaaggcaataagttcctatgaaaccagttcttagtattaagctcatccatttggtgcctctgccaactgtatggagttgtctcatgaagtctgagtgagatgttgtctattgaagtgctttagtgtattgcatgatacaaaattgcagctcaataaaaattgatcttatcaaaatttgaaaatcaaacttaatgcttttaagagagcagtcatttcatctgagcctcaccacaaacctgtaagtagaatcattcccattttactgatgaagaaacagtctcaggtttgaggtaattcccagtaatcacagcatgacaacacagataagaagaccaagctgctaaaatgcactggctgtggtttgcttgct

SEQ ID NO: 225257 - DNA, 554 bp, Homo sapiens
atcagtgcccttataaaaaaggccccagagagctgccttgcccttcccaccatatgaggacacagggaaaaggcaccttctatacaaaccaggaaacagaccctcaccagatgctgaatctgctggtgccttgctcttgagcttcccagcccccagaactgtgggaacaaacatctgttgcttattagccacccagtgtatggtatcctgttagagcagcctcagatgactaaggcggcaactttccatccccatgtctgcaggcctcagcccccctcccacgagcattctcttccttcttcatgaacatgggattttgtsggtcccccatagtccccaatccctctagcactttggtttcataatgaaagacataagaggaaagaaagatcgcagagaagcagcacatggaaaccatcctgtctggagcagaggagcgaagagagaggacagtctggggtaagatgttgctgaggaaacccaattgggctgaggagtggctgggctcaccatcttcccttcttctgtctccccctccgtgggacagtgctgct

SEQ ID NO: 225258 - DNA, 554 bp, Homo sapiens
atcagtgcccttataaaaaaggccccagagagctgccttgcccttcccaccatatgaggacacagggaaaaggcaccttctatacaaaccaggaaacagaccctcaccagatgctgaatctgctggtgccttgctcttgagcttcccagcccccagaactgtgggaacaaacatctgttgcttattagccacccagtgtatggtatcctgttagagcagcctcagatgactaaggcggcaactttccatccccatgtctgcaggcctcagcccccctcccacgagcattctcttccttcttcatgaacatgggattttgtcggtcccccatagtycccaatccctctagcactttggtttcataatgaaagacataagaggaaagaaagatcgcagagaagcagcacatggaaaccatcctgtctggagcagaggagcgaagagagaggacagtctggggtaagatgttgctgaggaaacccaattgggctgaggagtggctgggctcaccatcttcccttcttctgtctccccctccgtgggacagtgctgct

SEQ ID NO: 225259 - DNA, 554 bp, Homo sapiens
atcagtgcccttataaaaaaggccccagagagctgccttgcccttcccaccatatgaggacacagggaaaaggcaccttctatacaaaccaggaaacagaccctcaccagatgctgaatctgctggtgccttgctcttgagcttcccagcccccagaactgtgggaacaaacatctgttgcttattagccacccagtgtatggtatcctgttagagcagcctcagatgactaaggcggcaactttccatccccatgtctgcaggcctcagcccccctcccacgagcattctcttccttcttcatgaacatgggattttgtcggtcccccatagtccccratccctctagcactttggtttcataatgaaagacataagaggaaagaaagatcgcagagaagcagcacatggaaaccatcctgtctggagcagaggagcgaagagagaggacagtctggggtaagatgttgctgaggaaacccaattgggctgaggagtggctgggctcaccatcttcccttcttctgtctccccctccgtgggacagtgctgct

SEQ ID NO: 225260 - DNA, 592 bp, Homo sapiens
cctaggcattcaagtatgaggcaaaggggatcatcatttgtattaaaagagaaatccccaaatcagaactggtttaattccaacctaattttggctacttaaggagagtaagaattaaagaagtaacaaccagtttttagtggatctgagaatgaaaaagttaaccgtttgatttcattggggcctattccacattagtttatttgaatcttgtattccagcaaaggcaataagttcctatgaaaccagttcttagtattaagctcatccatttggtgcctctgccaactgtatggagttgtctcatgaagtctgagtgagatgttgtctattgaagtgctttagtgtattgcatgatacaaaattgcagctcaataaaaattgatcttatcaaaatttgaaaatcaaacttaatgcttttaagagagcagtcrtttcatctgagcctcaccacaaacctgtaagtagaatcattcccattttactgatgaagaaacagtctcaggtttgaggtaattcccagtaatcacagcatgacaacacagataagaagaccaagctgctaaaatgcactggctgtggtttgcttgct

SEQ ID NO: 225261 - DNA, 495 bp, Homo sapiens
gttctggcattcttactgaccctcaagcctgatcaaacctgagcacccctactcaactggcacttcaggttacaagccaacctttcttcccatccctaagagagtctacattcccctagttaccactcactggttccatagctaatcgggttctaagttcattaagggcraaaactatgccctatacatccatattctaagttcttaataaaaatgtgtatatgtacatgtccatatgtttttgcccacatagaaaaggtattttttgtaaattagaaacacaagcacaacacacacacacaacatacacacatacaacacatacacacaacacacatatatacaaaatacacacatgcataccactctattcacactgagcattaaaaattggacctgttccaaagtgtatgtagacagttaacacaggcatcatatctaaactgagatcttttaaggacccaacaataaactagtttaatcaccatattaatc

SEQ ID NO: 225262 - DNA, 487 bp, Homo sapiens
cttgccacacccactggctctcaggatgcaggtgagttcttcctggggagaagcaagctcgtgaacagctccacacactctgaccaccttctctgtgcctcaccatggaaaaggtcccactctggaagatgcactcagagccagaaaacttcctttcttttttgtgtgtgtgtttatcctttagggatacacaaagtagtgtcacacagagtttttaatcagaggcacttttttaattttgtacataatgtgtgcttttttgtcggctccagatgagagtccaaaggactgggcctggggcagaaataagtgacagacagcactgtaccagcatagcctgtagcctgaactgagcctctgccatcagggcaaacagacgtccaacaggcttatcatgttagctcatctggaaagcctgamaagtaaaatttgcagctgtcatccaagcagatcccttactccacactacttacggggacatataagt

SEQ ID NO: 225263 - DNA, 473 bp, Homo sapiens
cctagctaatttttttgtattttcagtagagayggggtttcaccatattggtcaggctggtcccaaactcctgacctcaggtgatgcacctgcctcagcctcccaaaatgctggattacaggcatgagccaccatgcccagccagtttctaatgccattttacaatgaaaggaatcagggttcctcgtagaaaataggattctaggactggggcaggaaatacaagatgagcccggagtatcctgtagtgtcagaaaggaaagaggcactcaaacccaaataagctggtatatacactgggtgtatgtcaaaggagcacaaggaaccactcaaattcccagtggccaaaatgagaacaatttgaaaaaaaaattagtactgtagtataacaaaggataaaataacaatggtccacactgatataaatgattgaatacatgggggagaagaaacaaatctcccatgcagaattc

SEQ ID NO: 225264 - DNA, 473 bp, Homo sapiens
cctagctaatttttttgtattttcagtagagatggggtttcaccatattggtcaggctggtcccaaactcctgacctcaggtgatscacctgcctcagcctcccaaaatgctggattacaggcatgagccaccatgcccagccagtttctaatgccattttacaatgaaaggaatcagggttcctcgtagaaaataggattctaggactggggcaggaaatacaagatgagcccggagtatcctgtagtgtcagaaaggaaagaggcactcaaacccaaataagctggtatatacactgggtgtatgtcaaaggagcacaaggaaccactcaaattcccagtggccaaaatgagaacaatttgaaaaaaaaattagtactgtagtataacaaaggataaaataacaatggtccacactgatataaatgattgaatacatgggggagaagaaacaaatctcccatgcagaattc

SEQ ID NO: 225265 - DNA, 596 bp, Homo sapiens
ctatggtggctgggaggatacatcctcctcctgccctctttccaagatgggcttgtctgtttcatccttccctccacattcccctcctaggtcagaagataagaactttcggaatcattctccccrtttaagaatgggggcttggcaaggaagagatccaatcactaattttaatgtgatattgggatattttactgtaactcccaaatctgaaaagcatcctatcaatgagtgtttgtgttatctactattttaactgataagggctgaattctgtctccccaaaattcatacgttgaagtcctaacccccagtacctcagtatttggagacagcacctttatagaggtcattaagtccaaatgaggccagttaggatgtgtcctgatccaatatgacttgtgaatttataaggaaaggagatcaggacacacagagggatgccagaaatgcacacagagaaaagaccatatgaggtcccagggagaaggtggccatctgcaagccaagaagggaggcttcaggagaaaccaaccctgccagcaccttgatcttgaacttccagactctagaatagtgagaaaataaatttctgt

SEQ ID NO: 225266 - DNA, 297 bp, Homo sapiens
tttcattctaggtcccaccccctggcaaaacactatccattggtaaacctggctgttgcaaaccgacagccatttccacttgtactygaccatgaaaaattcttggttattttggaagagaaaacagtagtgtggaaagttctatgtgagtgagggttggctactttcctgccacctggttataataaaaccaagtcacagattcaacaccaccacgtatttagacatttttatacgtaatcgtttattagcaggcagatggggagggttctgcaagcttcgtggagactgagctcc

SEQ ID NO: 225267 - DNA, 471 bp, Homo sapiens
atggcgaaatcccatctctactaaaaatacaaaamttagccaagcatgatggcacacacctgtagtcccagctactggggaggctgaggtgggagaattgcttgagcccaggagtcagaggttgcagtgagccgggatcattccactgcactccagcctggatgacggagtgagactctgtctcaaaaaaaaataaaaatagaaattgaaattttaaaaaaaaactaaaaagtagatcaggaagagtagtagttattatttttaagaaaagaatattaacatattggaaatctgaagcctatccacaggtagaattggcagctggataatttcatactggtaagagagaatattgtgtgaccctctgtctgcagcagaaagggcgctgggcttgagaacatcctctctttaattattgaagtctccaacatcaggaccagcatgtttgcatattttctgcaatttcactac

SEQ ID NO: 225268 - DNA, 411 bp, Homo sapiens
tcacctgggtctaagtccagccctgccttgcacctgccactctgttctctctctctctcatcgaccccatctgcaggtgcggatgataatagcagggctatttcatcaagagtgttgcaggacttaaatgagaatccaagtaagctcttgttacataaatatgcacagaatggccatggcctatttttagtccaaaagggattcaggacacaaaatgttcagagcagcagaggagayggcaggtcatggcgttgtgcagcacacaacgaggctgtccctgaaacaagtgcttagcggcaggtggtgttttgcagagcatattggaggaaggaaacctacttaaaaatacaaatgacgatgattatgtgtgagattccctttgcgtatataggctgagagtgggaactttga

SEQ ID NO: 225269 - DNA, 422 bp, Homo sapiens
aaataatctaaattaaaaactcattaaccccttaaaaaggaaggacgttttgacacatactacaatgtggaagaacctggaggacattaggytcagtaaaatcagccagtcccaaaaggatgactatagcaccattgtatgagatccatagaatagccaaattcatagacagaaagtagaagggagcttgccagggactgggggaagagagaacagggagttattcttttaatggggaaaaagtttctgtttggaatgatgcaaaagtgctgcagatggatgatggtgacgattgcacagcaatgtgaatgtagctaacgccattgaactgtacacttaaggatggttaacatggtacattttatgttatgtgtattattaccacaatttttaaaaattaaaaaaaaaactcattaacccag

SEQ ID NO: 225270 - DNA, 576 bp, Homo sapiens
aatcgcttgaacctgggaggtggaggttgcaatgagctgagatcatgccgttgcactccagcctgggaaacagagcgaaactcctgaaaaaaaaaaaaaaaaaaaaagaaagaaactaataccaatcttttgaaactgttccaaaaaattgagaaggttggaattcttccaaactcattttgtgagaacagcattacccgataccaaaaccagaaaaggacagacacaaataaaggaaactacaggccaatctccctgatgaacatagatgcaaaaatcctcaacaaaatattagctaaccaaatccaasagttcattaaaaaggtcagaacagatcagaaaaaaaaaagtcgtacatattgagaaagaaagacaaaagagtaacgacaatatttagggaatttggttgaattctttgtactattctttcaacttttaagcctgaaattatgtcaaaattaacacatttgaaacgaatggaagatttttaacgcttcaaattgtttaaaaatatttaactatatagtacatgagagttattctgtaattttaaaaaatagaaacagtatggcccag

SEQ ID NO: 225271 - DNA, 576 bp, Homo sapiens
aatcgcttgaacctgggaggtggaggttgcaatgagctgagatcatgccgttgcactccagcctgggaaacagagcgaaactcctgaaaaaaaaaaaaaaaaaaaaagaaagaaactaataccaatcttttgaaactgttccaaaaaattgagaaggttggaattcttccaaactcattttgtgagaacagcattacccgataccaaaaccagaaaaggacagacacaaataaaggaaactacaggccaatctccctgatgaacatagatgcaaaaatcctcaacaaaatattagctaaccaaatccaagagttcattaaaaaggtcagaacagatcagaaaaaaaaaagtcgtacatattgagaaagaaagacaaaagagtaacgacaatatttagggaatttggttgaattctttgtactattctttcaacttttaagcctgaaattatgtcaaaattaacacatttgaaacgaatggaagatttttaacgcttcaaattgtttaaaaatatttaactatatagtacatgagagttattctgtaatttwaaaaaatagaaacagtatggcccag

SEQ ID NO: 225272 - DNA, 511 bp, Homo sapiens
aagctgcttgtgctgggtgtgtttgtragctgggtaaggttttctgtgtcgctgggcacgtaaggaaagttacgtggctggggggtggggtggggggcattagaagggagtatgggtgtctgtgggcgctcgcgtgtgcgtgtatgtgtgtgtgtgtgtgtgagagagagagagagaaggtaaaattaactttgtcctatatgttggtttctctgctagagtcttaaggaacttgcagctgcatttttattgtttcaattacagcattctctctaggattgttggtgttatttgggtgatgatgaaggcaaggattaagaacagaactggacaagtgaaaattgaatttggattaaccacagtttgattaatttattcataagattgtgactatatgaatttttttcaacaacatatccttagttatcaggtgtccactcaattttaattgacaatataagattcctatggtaaccctgtgtacagattgcctaggggctctgcagggatt

SEQ ID NO: 225273 - DNA, 569 bp, Homo sapiens
gtcaacctaggcaaaagcgctgtgaaatgaaatttatgggaggccacagtttttgactgaactcatgcactaatccccagcagaccagaccagaccaaaccagaatggagtcactcatgctgagtgccatgtaatgaagctgaacttatatatgggacattttcctaaacaacaagattcacagcaatcaatccaaagggtcctggtcagcctgaggcagcatgataatgaattcccatctgccttaaccctacaaggaaaataattttaaaatgaacaatctgttttttgttccttgtttttgctttcttccgtcatttgctctccataaagccaacttcctctgctcagctcattagagcacctttctatttcataaatgggatgctgcccaattcatgaattgctaataaaagccagttagataattaaactcaatttgttgaaattttattgcttgacagtgcttagacaggcacctggcacttggaagtctttcartaaatcctaacttgtttacatgaaagaaaaataaaaaattcaggaccccaaactatgccaaagggaaa

SEQ ID NO: 225274 - DNA, 622 bp, Homo sapiens
tgcacatacacacacacatacacacacatccctccagctaaaatatgttttaagaacatgatattgtgattcataattaaaaaatgtatattttagtctttttccctatttcctggcacagagctcctaaagccttgtaatttcctcagctatagaggtgctagtaacatcttttgttctaatacttggtctttgaccccaatttctgacacagaactcttaatccctttgagtttcttgggtgataaaagcatcttttgttctagtgaggtgactgtcagtgggcttctggttgggggctggtcaccagaagaccaagttgtgattagaatcttggaattgtcagtcccacccycgacctcatcctttgggatgggaagaggacctggagcttgagtttgtaaccagtcattcctgtgtgatgaagtcttcataaaaatccctgaactatagggattgcagagcttcccagttgaggactacatgcatgtgtcagcagggtggcacaccccaactctttcagaccctgccatgtgtacttcatcatctggctgttcatctgtaacccatataataaactagtaaacataggtgtttcctaagttctgtgagccaatttagc

SEQ ID NO: 225275 - DNA, 560 bp, Homo sapiens
gctgtgcttctagttttatggccaggaccgattatgcaataatgtttagccacccatgatgagtggagatcaggggcagcttatgatgggcagatgggatgaggaaagaaaggaatgtataaaattggctccaggataaaatcagggtcacactggggaagcttggagagataacatagctggcttccatcccatttctaagacaacttcctgcaaatttctggaatgaatgctggagagcacaataaaactgaagctccactgggatagactaaaagatggrgagaggatcatggtggggaattcttctgcactgtcctaaattctcatttaacctatagatatgaccttccaaactacttattttaatttatttaatattcacttttagtagctaagctgtttgtttctatagttaccttcccattctttgccctctacattctaggatagaacatgtcatccacgtgaaattttaaactttaaaaccctggaagccccgatcatgttggtaaccctgagcaagtcacttaggctctgtccaccccacctgttacctc

SEQ ID NO: 225276 - DNA, 194 bp, Homo sapiens
gtgcataggttatgtgcaaatactatgccattttatttcggaggttcaagcatctgcagattttagtatccacaggaggtcctagcaccaaccctcatgctattgaagaataactgtattttaaatgtacattttgataagttttgacataaaaacacacacagasacacacacacacacacacacacacatat

SEQ ID NO: 225277 - DNA, 575 bp, Homo sapiens
gactgggtgaaagtcaatattgccctgctcaggaccaagagacattgctaccattggcactgcttggatgttcctgatgctcccagaacctctgtcacttaggaaattacaagggtttagayactttgtaccagaaatgaggtaaaagccaaatatatatttatttctccttatatatatatagagagagagagatggggtcttgcttgttgctcagggtggtcttgaactactcctggcctcaagcaatcctcctcttggcctcccaaagtgcagagattcatatagatagatagatagatagatagatagatataatacataagaaatatatctattttttcttgttttgtattataatctcctattatttttatctgacccatcaaattctgctggaaggatctggtatcataccttagtatggacttatccagtgagtccctctgttatttctctggaggtatcttcaccctcagcaatcctcctgaaagatgctcatcctgattgcagcactattcacaatagcaaagacgtggaaccaacccaaattcccatcaatgatagactggata

SEQ ID NO: 225278 - DNA, 379 bp, Homo sapiens
ctgcaggtacgctcaggagatatacctaggggagtgaagacggcaggactgggcagagggagaagycacccttccctgcagttgcaactaaggcctcaggtgatcctttatggagttctgcatcagctgattgttggccacagaataccccaggaggggatgtaaccctgggtgaagctgtttcctgtggctgggagggatgcaactgtgagctgtcacccactgacattcttggcctctggggaatagacagttacataggccttgaagttgggatccggaatgaaaaccagtatcccacatacagctctactatgaaagggtgcttggcagacaaaacaaatagatgtccactctaaccttaaagaatggatagccc

SEQ ID NO: 225279 - DNA, 379 bp, Homo sapiens
ctgcaggtacgctcaggagatatacctaggggagtgaagacggcaggactgggcagagggagaagccacccttccctgcagttgcaactaaggcctcaggtgatcctttatggagttctgcatcagctgattgttggccacagaataccccaggaggggatgtaaccctgggtgaagctgtttcctgtggctgggagggatgcaactgtgagctgtcacccactgacattcttggcctctggggaatagacagttacataggccttgaagttgggatccggratgaaaaccagtatcccacatacagctctactatgaaagggtgcttggcagacaaaacaaatagatgtccactctaaccttaaagaatggatagccc

SEQ ID NO: 225280 - DNA, 605 bp, Homo sapiens
attttggtcaccgagacatggcacactacgttcccacttttgtttaaaaacgacaataacaacacacacacacgtatacatccatacacgcacacacacacacgcaccacacacacgcacagagaaagatccgggaagatacacaccaagtctctgycagcattttgtggtttgttctggggaccgagactgcgggagcaccttttccttcccctctctttccttttagttccctatcccactctccttccttccttccctttcttttgctcattggctcttcacgtttctataacatactttcttgcttgtaaaaagtctttgggtttttttgccaaataaagaaacatggcagttgacttttaccgggatatatctctaaattcatctcaaagcagaaaaaagttgaattttcagtgatgatcatgatgtgtaaaagaaattccttagtgagctagaaaatcaagtgtcttgttttgactgcttttttttttttctttttctattaacattgtatcagttctccaaaacaccaccaagtgtcctcttgtggaaactttatgatttcactttttttccctgtggaaaggcctcccttgaggacc

SEQ ID NO: 225281 - DNA, 605 bp, Homo sapiens
attttggtcaccgagacatggcacactacgttcccacttttgtttaaaaacgacaataacaacacacacacacgtatacatccatacacgcacacacacacacgcaccacacacacgcacagagaaagatccgggaagatacacaccaagtctctgtcagcattttgtggtttgttctggggaccgagactgcgggagcaccttttcyttcccctctctttccttttagttccctatcccactctccttccttccttccctttcttttgctcattggctcttcacgtttctataacatactttcttgcttgtaaaaagtctttgggtttttttgccaaataaagaaacatggcagttgacttttaccgggatatatctctaaattcatctcaaagcagaaaaaagttgaattttcagtgatgatcatgatgtgtaaaagaaattccttagtgagctagaaaatcaagtgtcttgttttgactgcttttttttttttctttttctattaacattgtatcagttctccaaaacaccaccaagtgtcctcttgtggaaactttatgatttcactttttttccctgtggaaaggcctcccttgaggacc

SEQ ID NO: 225282 - DNA, 605 bp, Homo sapiens
attttggtcaccgagacatggcacactacgttcccacttttgtttaaaaacgacaataacaacacacacacacgtatacatccatacacgcacacacacacacgcaccacacacacgcacagagaaagatccgggaagatacacaccaagtctctgtcagcattttgtggtttgttctggggaccgagactgcgggagcaccttttccttcccctctctttccttttagttccctatcccactctcmttccttccttccctttcttttgctcattggctcttcacgtttctataacatactttcttgcttgtaaaaagtctttgggtttttttgccaaataaagaaacatggcagttgacttttaccgggatatatctctaaattcatctcaaagcagaaaaaagttgaattttcagtgatgatcatgatgtgtaaaagaaattccttagtgagctagaaaatcaagtgtcttgttttgactgcttttttttttttctttttctattaacattgtatcagttctccaaaacaccaccaagtgtcctcttgtggaaactttatgatttcactttttttccctgtggaaaggcctcccttgaggacc

SEQ ID NO: 225283 - DNA, 532 bp, Homo sapiens
  misc_feature (1)...(532): n = A,T,C or G
ggttagcaccatgtgtggggcacactttgactgcaatgtgtggcacaagctagaagggcaagactttcangcaaagaagtattggagtggatcctcagcgatcctacaggtaacacggctagtctgtgggttgcactggtaggaggagagagggcagcaccttccttaygtggaattgagccatactttgctggttgctcttgtcagattcctgtatgccatgggcacagggctttcagttttccaaatgtgtcactgtatcatgctccttactaaatccctgggggattggctgggcagaattcaaaactgagggcaagggtcctatgaagtcatacacctaatcagggcagacgagggagacaagggagccatggttcacttccagtcttcagtcacctcatccaggtctctggcccattctgtcctgccactggaagtcagacccctccttgttgaatatgcctgtgtgtgtgtgtgtgtgtgtgtgtgtgtgtgtgtgacccataaaagatggaatgctagtatttag

SEQ ID NO: 225284 - DNA, 575 bp, Homo sapiens
ggagccatgcacactgtagatgtgggctgcatctccacaggatagcctgatgcatttccacagacaggggcttgtcctgtgtggatacaggtggaagttccttgagaagcctcattttgtgtgcaagctatgtggttctgtgtagacgctgcctggttatctgcagatgcaaactcaatctcagtaaacatagcctccttctgtgcttacacagccttcttggtgacagataaaacctcatcttgggtagacacagcstcattttgggcaggtgcagcttcatcttgggaatgtcccaccttgtcctgggcagccatagtttggttctgtgcagacacagcctgtgatgacacacagagtttttgctcatgtagacacagtttatggcctgttgcagggcagctgttgacacagccaacatcctcttgtggagtctgtgctgtgtagatgaggcttgagcttgcttactgaactgtgttctttgtagagacagtttgtatctgggtataaagtcacctcctgtgtggccatggcctgcagaagcctgccgaggctcatcttgtttagatgttgtc

SEQ ID NO: 225285 - DNA, 620 bp, Homo sapiens
attggagcccaagccctgttttgaactgcacatgtgagggatctgggttgcatgctccttatgagaatctaatgcctgatgatctgaggtggaatggttccccaacttccatggaaaaactgtcttccatgaaaccagtccctggtgccaaaaggttggggactactgttattkcaatgaatacattactaaaaactactaccaataattttttgacctgaaaaacactggtgaactcaaaagtgaaatagtgtgtttttagtggtatccacttacgatagtcttccaatatgtcattatgatgacaagttaaaagaaagaaaagaaaagcaccagtgaaatcaaattgaaagcaatcctttgatggaaataagatttgggactgccagatacttacaaaattataaaaattattaaaattacaattttttatatgtcagctctgattgtctagatctaaagaattggacaaaagaagaaattaaacttttcacaaaaactcaatctcctgttggaacaaaagtttccttgttaccagaatagatgaatatgcaatgtatttgttgaatgcaagtatgtgttcattgagtgcacgagtgattcaatgaatgaatgagata

SEQ ID NO: 225286 - DNA, 448 bp, Homo sapiens
tttgaacaacataataaaactccttcctctggctcatgaagtccccatgatgtggcccctgccttgctgtctcccttccccaactaacactccacaatgggcttctttctgtttctcaaatatgcccagttttttctcaccccagggtctttgcacttgctgttscctctatctcgatgctcttccctctgattttcagatggctggttccctgttatcactgaggtcctagctaaacatcccttccttggaggggccatcctgaccacccaataagagcagccacccagtcactcaatgccatgcaaccctggattctactggaagtagttgccatgggaacaggggtcttttctaccttcttccttgctgtatccccagctcctagaacagagtctgacctgcaaaggtcctccagagatactggttgagtgaatgtgagtgaatg

SEQ ID NO: 225287 - DNA, 448 bp, Homo sapiens
tttgaacaacataataaaactccttcctctggctcatgaagtccccatgatgtggcccctgccttgctgtctcccttccccaactaacactccacaatgggcttctttctgtttctcaaatatgcccagttttttctcaccccagggtctttgcacttgctgttccctctatctcgatgctcttccctctgattttcagatggctggttccctgttatcactgaggtcctagctaaacatcccttccttggaggggccatcctgaccacccaataagagcagccacccagtcactcaatgccatgcaaccctggattctactggaagtagttgccatgggaacaggggtcttttctaccttcttccttgctgtatccccagytcctagaacagagtctgacctgcaaaggtcctccagagatactggttgagtgaatgtgagtgaatg

SEQ ID NO: 225288 - DNA, 574 bp, Homo sapiens
tgtctctgcctactctctgggtagagccccctactagctcaaatgtccatggggaatgtggagtcccctgtagcgaggatcccagaagtacatggtaagagtgagctgtgactcaatcccttcattcaccccttccccaggagccgtttggggttgggaactagtcttagcattcaaatactccattcagtgtttccagcttcctccctcttcagctccagagtctgcattgcctctccatccactctcagtgttttctctccgaatacctgctcaaattatgttggtttactcaatatttttgtctccctcagtgagagcagcacttcctggctgcctctagtcagccatcttgtccccttcccctcaacattgatttttattcaaggttagaatctgaaggagagsctcctatcaaggattggccaactcatagtagaagaaaaagagagatgatggagccacataacggatcttaaagtttctgctagaaagtgcttatgtccctttaatttacatctcattgacagaagtcacatgaacttccaagtctaatttcaatgaggtgaaatag

SEQ ID NO: 225289 - DNA, 601 bp, Homo sapiens
atagttacagctcttacatcctgtctatgactgttccaagttaatattttgtatatggtaggaggccagggtcaatgttttttgttttttgtaactcaaattttcctgcatcatttcttgaaaagattatctttttccattgaattgccttgrcatttttgtcaaaaatcaattgcatatatacgtgtgggtctatttctggactgtcttttctgtttattgacttatttatctagttttatgccaatactaaaatgtcttgattactgtagagttttaaaagatctcaaaatcagatactgcctgtcctccaactttggaaactgatccttttgaggctttttgttttgttttgttttgtttaaaatgtttagaacacagtaaactttaatgtatggctgttgttttttggcagatttctgaggcaatctcctgactatgccaccctacaccctgtgaattagtatgtttcctactgtgattagtgagcacacagactgttcacacccctatagatctatacatttttcctctcttcttttggggtagttctcctgagcataggtagtgtcctcatatacatgtgttgagtcagctgaag

SEQ ID NO: 225290 - DNA, 556 bp, Homo sapiens
tgtacagtttcgaagttgtgcctgctccaccagatgcgcaatcaayatagggacacacacaaaaacatgaaaaagtcagaaaacatgacaccactgaaggaacacaataattttccagtaattgatcccaaagaaacagaaatctatgaattgtctgaagaaaactgaaaataatgatcttaaggaaactcagtgtgatataggagaatacagagagacatttcaatgaaattagaaaaataatttataatctaaatgagaaattcggagaacagatagatataaaaaagaatatgacagaaatcttgcatttgaataggtcaatcaataagctaaaaaaatgcaatggagagcttcaacagctgaccagattaagcagaagtaagaatcagtgaacttgaagacagggtttttttgtttgtttgtttgtttttaaatcttgctctattgcataggctggagtgtagtgtttcttactcttggctcactgcaacctctgcctcccaggttcaagtgattctcctgcctcagcacccgagtagctgggattacaggc

SEQ ID NO: 225291 - DNA, 556 bp, Homo sapiens
tgtacagtttcgaagttgtgcctgctccaccagatgcgcaatcaatatagggacacacacaaaaacatgaaaaagtcagaaaacatgacaccactgaaggaacacaataattttccagtaattgatcccaaagaaacagaaatctatgaattgtctgaagaaaactgaaartaatgatcttaaggaaactcagtgtgatataggagaatacagagagacatttcaatgaaattagaaaaataatttataatctaaatgagaaattcggagaacagatagatataaaaaagaatatgacagaaatcttgcatttgaataggtcaatcaataagctaaaaaaatgcaatggagagcttcaacagctgaccagattaagcagaagtaagaatcagtgaacttgaagacagggtttttttgtttgtttgtttgtttttaaatcttgctctattgcataggctggagtgtagtgtttcttactcttggctcactgcaacctctgcctcccaggttcaagtgattctcctgcctcagcacccgagtagctgggattacaggc

SEQ ID NO: 225292 - DNA, 556 bp, Homo sapiens
tgtacagtttcgaagttgtgcctgctccaccagatgcgcaatcaatatagggacacacacaaaaacatgaaaaagtcagaaaacatgacaccactgaaggaacacaataattttccagtaattgatcccaaagaaacagaaatctatgaattgtctgaagaaaactgaaaataatgatcttaaggaaactcagtgtgatataggagaatacagagagacatttcaatgaaattagaaaaataatttataatctaaatgagaaattcrgagaacagatagatataaaaaagaatatgacagaaatcttgcatttgaataggtcaatcaataagctaaaaaaatgcaatggagagcttcaacagctgaccagattaagcagaagtaagaatcagtgaacttgaagacagggtttttttgtttgtttgtttgtttttaaatcttgctctattgcataggctggagtgtagtgtttcttactcttggctcactgcaacctctgcctcccaggttcaagtgattctcctgcctcagcacccgagtagctgggattacaggc

SEQ ID NO: 225293 - DNA, 582 bp, Homo sapiens
acagggtttttttgtttgtttgtttgtttttaaatcttgctctattgcataggctggagtgtagtgtttcttactcttggctcactgcaacctctgcctcccaggttcaagtgattctcctgcctcagcacccgagtagctgggattacaggcatgtaccactacgcatggctaatttttctatttctaatagagagggggtttcaccatatwggccaggctggtctcgaactcctggcctcaagtgatctgcttgctttggcctcccaaagtgctgagattacaggcatgaactactgtgcccaaaggcaggtctttttaaatgactcagttggaggaaaaaaaaagaaggaaaaagagtaaagacaacctatgcagcttatgagacaccattaagcaaacaaatatttgtattattggagttccaaaaggagaaaagacactgaaagggacataaacatatataatgaaataatttttgaaaaaattcccatgtattggaagatatatggacatcaaaatccatgaagtttaaaggtccccaaagagattcaacccaagaaaaattctccaaggcacatt

SEQ ID NO: 225294 - DNA, 593 bp, Homo sapiens
tggcttacactcaagaaatagtttccaactgaagatgtgctgtgtagcttgaatgtacagtaatttcctttttcaatagctttctatgtgaccttgagcaatttatttaatctcgctatgagataactttcccttttgtgaaatgagaatactgccacttgcctcctacctacttcacagagatagtatttccacacctaacataatggctakaagtcatttgaagctcattggaataaagcgccgtttaattacaattgttattactttttagagagagttaatgatgatgagaggaggaaaatatgccatccaagatatgtataaatgcatctaggctagaatcaaaacacacaagcaaaatgagaaaaagagaataaaactaaaattcctactaaaataaagcaaactaaattatttctgctttggaattaccaaaaactaatatttttttttttctaaagcagcaaagagaaaatgataacataaaaaagttgagaataagaaatagtttttgttatttttatctgaaaaagtataaacaataaaataataggaaaaattggcaagaatgaaaagttttaataagattt

SEQ ID NO: 225295 - DNA, 593 bp, Homo sapiens
tggcttacactcaagaaatagtttccaactgaagatgtgctgtgtagcttgaatgtacagtaatttcctttttcaatagctttctatgtgaccttgagcaatttatttaatctcgctatgagataactttcccttttgtgaaatgagaatactgccacttgcctcctacctacttcacagagatagtatttccacacctaacataatggctagaagtcatttgaagctcattggaataaagcrccgtttaattacaattgttattactttttagagagagttaatgatgatgagaggaggaaaatatgccatccaagatatgtataaatgcatctaggctagaatcaaaacacacaagcaaaatgagaaaaagagaataaaactaaaattcctactaaaataaagcaaactaaattatttctgctttggaattaccaaaaactaatatttttttttttctaaagcagcaaagagaaaatgataacataaaaaagttgagaataagaaatagtttttgttatttttatctgaaaaagtataaacaataaaataataggaaaaattggcaagaatgaaaagttttaataagattt

SEQ ID NO: 225296 - DNA, 593 bp, Homo sapiens
tggcttacactcaagaaatagtttccaactgaagatgtgctgtgtagcttgaatgtacagtaatttcctttttcaatagctttctatgtgaccttgagcaatttatttaatctcgctatgagataactttcccttttgtgaaatgagaatactgccacttgcctcctacctacttcacagagatagtatttccacacctaacataatggctagaagtcatttgaagctcattggaataaagcgccgtttaattacaattgttattacyttttagagagagttaatgatgatgagaggaggaaaatatgccatccaagatatgtataaatgcatctaggctagaatcaaaacacacaagcaaaatgagaaaaagagaataaaactaaaattcctactaaaataaagcaaactaaattatttctgctttggaattaccaaaaactaatatttttttttttctaaagcagcaaagagaaaatgataacataaaaaagttgagaataagaaatagtttttgttatttttatctgaaaaagtataaacaataaaataataggaaaaattggcaagaatgaaaagttttaataagattt

SEQ ID NO: 225297 - DNA, 647 bp, Homo sapiens
atcaattttctttttaattttttcattgacccaatggtcatctaggagcatgttttttaatttccatggtttgtatagtttctgaaattcttcctgttattggtttttggttttattccattgtggtaagagaagatggttgatattaactcaatttttttttggaatgttttaacacttgttttgctacctaacatatgatctctccttgagartgatctatgtgctgaagagaagaatgtgcattctgcagctgttggattaaattttctgtaaatatctattaggtccatttattttatagtgctaattgaattcaatatttcatcattaattttctgcctggaagatctgtccaatgtttaaaatggggtataaaatctccagatattattaataatgatattattaaaataataatatgcaccagtgttgggtgcatatgtttacaattgttatatcatcttgctgaattgacccctttgtcattatataacaacctatttttctcttcttactgttcttgtcttgaaatttattttgtctgatataaatttagctactcctgatctttttaggtttctgttggcatggaatatctttttccatccctttgttttcattctatgtatgtctttatagatgaa

SEQ ID NO: 225298 - DNA, 653 bp, Homo sapiens
ttacagtaagctgagattgcaccactacactccagcctgggtgacagagtgagaccccatctgaataaaaaataaaaaaaaaaaataagagtttggcctagtgttctttttaattaatagctttgattttttttttttaaatctacctgttttaaagaagggctaaggtgtttcagtgatttgaagtggcaaagctggagccacagcttctaagtgtacaacacacatttctgagacatagcccttcaagtaaagtagcgccacagcatcacagctctggatcccatcgcygggtgcctcttggaggaaaagggtaaattgcacaagcaatttctggggaaaaaatggcccccaccaacaaattttttttttttttttaaagcaaacttgcctgtggaggaatttaatactgggccctttgaccttagtctactgatacaaatggatctgcaatggtaatggggattttatggctatgaggcatggaaaagaaaccaacctccagtgtgaattgaaggaagaagttccatatttatatgctctttgaagaaatgaaaagtctgtcaactagctgatcttgcccacctatgattattaatacctttcaagatttctgagcttgccagtatattgttcccaacatttcatattat

SEQ ID NO: 225299 - DNA, 573 bp, Homo sapiens
acaatgctgtgggtgacagtgaagggtggggtaggagcaaaaagaaaaataaatcatttgcatcaaaaggctaaagaaatttttccagaagctcttggtaataaggaaaatgctctgaataagagaacagtagccagagacagaggaagaaacttgcaaatttaaatcaggggtctaaaatattttcaggcaaatacttatcatagcacctgttattacatgattttaactatgccatcttcttttatataaagaagtaaaatgtaatgaaaattctaagaaagagatkgcttaggaaaaatcacttgcttttttagactttgcttcttttattacattcattatttgtgcaacaaaaatagagatttgccatttcccccatagatatagttataattctgtgctgcattctttcaaggtcagtttcctcttccatgcttctaaaaagcaatttttttggtaatagagtcacccatgcataaaaagtatacaatactatagttatttcaaaataaaacttaatttctgtaagtatagaataaatgctcaaatcaaaacttaaagttagacaaa

SEQ ID NO: 225300 - DNA, 499 bp, Homo sapiens
acaagacttctgtagaaaaagttcaaaggaagttacaagagaatgaggaaaggaagatatgaaaaatattattcttgaaaattgaaggttctgaaatgaccataactccatacaattaaaaattaagaggttgggcgcagtggctcatgcctgtaaccccaacatgttrggaggttgaggcaggaggattgcttgagcccaggagttcaagcctagcctgggtgacatagcaagaccccatctccacacacaaaaaataacaataattagccattgtggtggcctgcattgtgatcccagctactgaggaggctgaggtgggaagattgcttgagccaggaggtagaggctgccgtgagtcgtgttcgcacaactgcactgcactccagtctggaaaacagagcaagacactgcctcaagaaaataaaataaaaaagaggagtgtgcttttattcaaacatttctctaattttattctagctataaaccagtcaaggtt

SEQ ID NO: 225301 - DNA, 567 bp, Homo sapiens
aaatgtattttttaaccttgaaatttgcagatctaggagagtaaaaaagttcttaatatccttggaatatctgtgtttctctctccacaatgtttcgcatcatcctaacatgtcgttacctaagacaatcaacccagtctatcttctgtcgctttctctctgctagttggtgcatggttctctgggctgtttcagggtggctccagggtttgcagaccaaccctgaagtctgttagttgcactctgtgaatttttcagatcaacggggacaagaaatatttataaaaggggctgaaatacttatacaagggtttaaatttccctgattctcggtaatatgactataaatttctttgtattttaggctcacaattatgcagcccactacacttttctaacggctcttttttttwaaaaaaaggtagttttagtttcatagcaaaggtgagaggaaggtgtagggatatccccaatgtatactcttttattggttgtcatctcatgaatccacatatttagccgctttccataactttatcacacaccatagatgttaccttagtcctt

SEQ ID NO: 225302 - DNA, 567 bp, Homo sapiens
aaatgtattttttaaccttgaaatttgcagatctaggagagtaaaaaagttcttaatatccttggaatatctgtgtttctctctccacaatgtttcgcatcatcctaacatgtcgttacctaagacaatcaacccagtctatcttctgtcgctttctctctgctagttggtgcatggttctctgggctgtttcagggtggctccagggtttgcagaccaaccctgaagtctgttagttgcactctgtgaatttttcagatcaacggggacaagaaatatttataaaaggggctgaaatacttatacaagggtttaaatttccctgattctcggtaatatgactataaatttctttgtattttaggctcacaattatgcagcccactacacttttctaacggctcttttttttawaaaaaaggtagttttagtttcatagcaaaggtgagaggaaggtgtagggatatccccaatgtatactcttttattggttgtcatctcatgaatccacatatttagccgctttccataactttatcacacaccatagatgttaccttagtcctt

SEQ ID NO: 225303 - DNA, 622 bp, Homo sapiens
tatacagctagttactgtggatttgtcaatttctctttttatgttagtcaaggtttgttttgtatattttccagctatatttaaggagcatacatgtttagaattattatggtcatttagtacatatatagaaatatttaatattatattcaccccctttatctctaatgatttttctttgcctgaaaacttacttgaatttataagagttatttatacattctggagacaagtcctttgtcagggatgtgtattataaatattccttaccacttacgtgacttatcttctcagtttcttaaagrtgtcttgatgagcagaaattttaaattttgataaagttcagtttataatgtttctttcttcttagagtcagtgctttccaagtcctgtctaagaaactttcgtccacctcaagatcaagaatatcttctcctgtgtttttttctacaattttcactgttttagctttttatttaggtttattatccatcctggaattattttgtgtatcatataagttgcttttcctcaaaagtcatatcgtttgctttacttttgtttgctcttcagtggccttcaagtagctgttttgttggtttatttgctttttcatattgtc

SEQ ID NO: 225304 - DNA, 469 bp, Homo sapiens
aaatattccttaccacttacgtgacttatcttctcagtttcttaaagatgtcttgatgagcagaaattttaaattttgataaagttcagtttataatgtttctttcttcttagagtcagtgctttccaagtcctgtctaagaaactttcgtccacctcaagatcaagaatatcttctcctgtgtttttttctacaattttcactgttttagctttttatttaggtttattatccatcctggaattattttgtgtatcatataagttgcttttcctcaaaagtcatatcgtttgctttacttttgtttgctcttcagtggccttcaagtagctgttttgttggtttatttgctttttcatattgtctggtctataattattatccctggtagggttaatccaattcaatctaytttgccattactgaagctattccaaacacaaccaacctcttcatgtcctggaagcat

SEQ ID NO: 225305 - DNA, 444 bp, Homo sapiens
cttttggactcttggaccttcaccagtggtttgccaggggctttcaggcctttggcyaccgactgaaggctgcaatattggcttccctacttttgaggtcttgggactcgtactgacttcctggctcctcagcttgcagacgccctgttgcgggacttcactgtgtgattgtgtgagtcaatttgcctaataaactccccttcatatattcatctatccagttagttcggtccctttaaagaaccctgagtaatacacttgggagtcaggattgggtcatattttgtcatgcatccctctcaggccctactgctgagagtagatattagatgaaaatgtgatttatttgttaactgattagttaaaacagctaacatttattgtgtacttacaatcttcaaggcacaattctaacccaattaaccctcagaaaactctatgagt

SEQ ID NO: 225306 - DNA, 434 bp, Homo sapiens
gaattcagtggaggaccatgtcatggggacacaaaagttctgtgccacttatattgtgtgccttgatataatgctgaggttggaatgctaaaattatttttcccagagccccctgcagctagcattcttgatgtgaattaaattccatcaatcagatatatttctgtgagtcttgactacagaaccagattagtttggaaaagaggtggagtcagtaatatcgattttgtttatgcagattatgtcaactgtaacaaccaatttctcaatctccttgtcagctttctgattctacagcttcctagtcaaggcaaaatgttcatggcagctcagtttgtcagtgttcttcctggaagttcagtctaaaacctgtttctcyggtccttttaacaatccttttgctgtttactacactagaataaatcctttctgct

SEQ ID NO: 225307 - DNA, 570 bp, Homo sapiens
aagtgtttctctggtcatctaaagaacctgtccatctgtgtggtgaccctaatgacctttataagactgaagagtttgctttagagctcaatatccaggtgggaataaaaagatgtgacatccaaatgtagctttcttacttacactatccagacagtgagtttgattcagtgatttaacttatccaagagcctattttcccayttctatactacatcatgtcatattatagcccattataaaatatatacatatataaagttcaaatcattttgattactcatatgctatattatatacattcaatgtattatcctccaaaaaagacccaaggctaccaactggctaatatccatcaaatacatcaaattactagattagtcttattctatcttctacttacaggttttctaattatttgtaataaattttttattattctgataataaaattaatgtatactccctgtgggaaaagttcaaagagaataaaggagaaaaatgtccttaagcttagtaccaagcaataaccaatgttagcaaagactttcactgattatatttaagctg

SEQ ID NO: 225308 - DNA, 570 bp, Homo sapiens
aagtgtttctctggtcatctaaagaacctgtccatctgtgtggtgaccctaatgacctttataagactgaagagtttgctttagagctcaatatccaggtgggaataaaaagatgtgacatccaaatgtagctttcttacttacactatccagacagtgagtttgattcagtgatttaacttatccaagagcctattttcccacttctatactacatcatgtcatattatagcccattataaaatatatacatatataaagttcaaatcattttgattactyatatgctatattatatacattcaatgtattatcctccaaaaaagacccaaggctaccaactggctaatatccatcaaatacatcaaattactagattagtcttattctatcttctacttacaggttttctaattatttgtaataaattttttattattctgataataaaattaatgtatactccctgtgggaaaagttcaaagagaataaaggagaaaaatgtccttaagcttagtaccaagcaataaccaatgttagcaaagactttcactgattatatttaagctg

SEQ ID NO: 225309 - DNA, 570 bp, Homo sapiens
aagtgtttctctggtcatctaaagaacctgtccatctgtgtggtgaccctaatgacctttataagactgaagagtttgctttagagctcaatatccaggtgggaataaaaagatgtgacatccaaatgtagctttcttacttacactatccagacagtgagtttgattcagtgatttaacttatccaagagcctattttcccacttctatactacatcatgtcatattatagcccattataaaatatatacatatataaagttcaaatcattttgattactcatatgctatattatatacattcaatgtattatcctccaaaaaagacccaaggctaccaactggctaatatccatcaaatacatcaaattactagattagtcttattctatcttctacttacaggttttctaattatttgtaataaattttttattattctgataataaaattaatgtatactccctgtgggaaaagttcaaagagaataaagragaaaaatgtccttaagcttagtaccaagcaataaccaatgttagcaaagactttcactgattatatttaagctg

SEQ ID NO: 225310 - DNA, 483 bp, Homo sapiens
ttttttttctccagcagatttgcaagggaggttcctagttatatttttgtaggctaaaacttgaataagtttgcattcttaaaaagtacacatgaattaggtgggtggttgtgaagggaggtaaaaatagaggattcttgtctggaagtccacagacattttyggaaaaggcctcccaacaagattaaagattcatcatgagtaagtcacaggcaaatgtatgtataagtacccgaggcttctgttgaatatatcccaccttcacttctcccctgccttatacacccttacttcatacacacccaccctttccctcagaatagggctgatatttagcatgtatgtatcagcatggccatacagattgttaatattaatattggttgatatatagcttcttcccttatgtgttatttactcttgtacagcccctctacaatgttgctctaggatccagcaactaaagggttaatgactcatgga

SEQ ID NO: 225311 - DNA, 483 bp, Homo sapiens
ttttttttctccagcagatttgcaagggaggttcctagttatatttttgtaggctaaaacttgaataagtttgcattcttaaaaagtacacatgaattaggtgggtggttgtgaagggaggtaaaaatagaggattcttgtctggaagtccacagacatttttggaaaaggcctcccaacaagattaaagattcatcatgagtaagtcacaggcaaatgtatrtataagtacccgaggcttctgttgaatatatcccaccttcacttctcccctgccttatacacccttacttcatacacacccaccctttccctcagaatagggctgatatttagcatgtatgtatcagcatggccatacagattgttaatattaatattggttgatatatagcttcttcccttatgtgttatttactcttgtacagcccctctacaatgttgctctaggatccagcaactaaagggttaatgactcatgga

SEQ ID NO: 225312 - DNA, 483 bp, Homo sapiens
ttttttttctccagcagatttgcaagggaggttcctagttatatttttgtaggctaaaacttgaataagtttgcattcttaaaaagtacacatgaattaggtgggtggttgtgaagggaggtaaaaatagaggattcttgtctggaagtccacagacatttttggaaaaggcctcccaacaagattaaagattcatcatgagtaagtcacaggcaaatgtatgtataagtacccgaggcttctgttgaatayatcccaccttcacttctcccctgccttatacacccttacttcatacacacccaccctttccctcagaatagggctgatatttagcatgtatgtatcagcatggccatacagattgttaatattaatattggttgatatatagcttcttcccttatgtgttatttactcttgtacagcccctctacaatgttgctctaggatccagcaactaaagggttaatgactcatgga

SEQ ID NO: 225313 - DNA, 483 bp, Homo sapiens
ttttttttctccagcagatttgcaagggaggttcctagttatatttttgtaggctaaaacttgaataagtttgcattcttaaaaagtacacatgaattaggtgggtggttgtgaagggaggtaaaaatagaggattcttgtctggaagtccacagacatttttggaaaaggcctcccaacaagattaaagattcatcatgagtaagtcacaggcaaatgtatgtataagtacccgaggcttctgttgaatatatcccaccttcacttctcccctgccttatacacccttacttcatacacacccaccctttccctcagaatagggctgatatttagcatgtatgtatcagsatggccatacagattgttaatattaatattggttgatatatagcttcttcccttatgtgttatttactcttgtacagcccctctacaatgttgctctaggatccagcaactaaagggttaatgactcatgga

SEQ ID NO: 225314 - DNA, 576 bp, Homo sapiens
gagctacatctatacttgacaacataatgctgagcaaaagagccaggcacaaatgaatatgtagtacataactgtgtttaaatagcatcgaaaaccaggcaaaactcatctaggatattaaaagccagagaaagagttatcaagggaggggattgggcactgtgaatggacagaggcttggggaggcttctgaaacacaggtgacattctctttattgatttggaacaatacgtatgtgttcatttttgataattaactgagttacattcacgttcactttgtgataagtaactgagttacactgtgttcattttgtgataattarctgaatcagacacattatctgtgtactttactcaatataaattatgctttattaacaaaattaacttatttatttcccctgtgaatctccataccctaaccctaactaggaacaagtggccctccaggatgcaggatgaaaggtgagagtctccttggtctcccctttgatatacatccctgagattttattagtcatgttctgaattcagttattttcaaggagctgtttgtgacagctttagatagtc

SEQ ID NO: 225315 - DNA, 576 bp, Homo sapiens
gagctacatctatacttgacaacataatgctgagcaaaagagccaggcacaaatgaatatgtagtacataactgtgtttaaatagcatcgaaaaccaggcaaaactcatctaggatattaaaagccagagaaagagttatcaagggaggggattgggcactgtgaatggacagaggcttggggaggcttctgaaacacaggtgacattctctttattgatttggaacaatacgtatgtgttcatttttgataattaactgagttacattcacgttcactttgtgataagtaactgagttacactgtgttcattttgtgataattagctgaatcagacacattatctgtgtactttactcaatataaattatgctttattaacaaaattaacttatttatttcccstgtgaatctccataccctaaccctaactaggaacaagtggccctccaggatgcaggatgaaaggtgagagtctccttggtctcccctttgatatacatccctgagattttattagtcatgttctgaattcagttattttcaaggagctgtttgtgacagctttagatagtc

SEQ ID NO: 225316 - DNA, 571 bp, Homo sapiens
gcaaagcttctttctccagggtacgtggtgtccttgcatgcctgctcacagctatgagaaggagctttcagaaaagaggcaaagccaaagcccagcactgtcctagggctctggtgatgcccaactgcgaagccttgattgttgcccctattactgtagatggaactaattgctcactctgtcatgaggcatgttggatactcttaggaccatcatttgggttctcctcagtaactacttggtaatcctgataagacatgattggggttttttcacctmcccaactctcccctcctgccaaccatgagctttctacccatcatagctccattaatcagatctcccttcttgggcaggtttttgtttgacaacaaacaaagtcatgctccctaggagaagctaacaccttcccctacactgtttgtggccataggaatcttgggaattcctaccttgcaccatgaggcagtctttactttcttccacctcaatctgttactgcccactttctgttgcccttccctgttgccctcctgttctacctggatctggggttctgctaaacagcaaa

SEQ ID NO: 225317 - DNA, 624 bp, Homo sapiens
taaataataatagacttttttaaaatggatgtaaaatgaatgttttcaaggaatatctgtttcaggttcctggaggttagggtgtgcrtgggaaaatgatagtctgcggcctatactcagaggcatcttttaaattataaaaaactattgtatcatttacaaacttacctgatatacatttctgcagctacaaaaaaaaagcatttatttacttatttttgaaatagagtttccctcttgttgcccaagctggagtgcaatggcgtgatcttggctcactgcaacctccgcctcccgggttcaagcaattctcctgcctcagcctcccaagtagctgggattacaggcacgagccaccacgcctggcattttgtttgtacttttagtagaaacagggtttcaccacattaaccaggctggtctcaaactcctggcctcaggtgatctgcctacctcagcctcccaaagtgctgggattacaggtgtgagccaccgtgcccggccaaaaaaagagtatttaagtttactttatgctacaggaacaataagtcgactggataggttatgtccaatggaatttattcattaggctgatgtcaaaagtcagaagcatctcagagttaa

SEQ ID NO: 225318 - DNA, 644 bp, Homo sapiens
atttgtcatttgagattttcttttgttgagacaatgctattaatttcttagtctttattgtagttaaattaatgactttattagggcattttcaaaggccaatcacaaaattaagcaaaaatcagatataattgctcaaaagctctgagaaatcacgaaaggctggattcatgcactcaaatgtgttgtcatcaagtctttgaaattctgtctgtctctctctctctctcatacacacacacagacacacacacaagagatctacctatatttctattgaagttattcttaggaaaactttcccagggtggccaggctagctagcaaagtatattctgcagaacaaattccagatattattaagagtcawatcagtttgggacatggtgggttaatcaatgtttatttcctttacttcagatttccctgagtctttaatgcagtgatgcatttatgaatctccaagaggggtagaaatcataccatgcagcaattgccaaaattaattgcccacagaatctttttctttttcttttattgaggcagatcccctggcaagaatgtgatgaaaaaataaataagggaatccataataaatgacctcatcagagtcactctggacctcagttccatcatgcccctat

SEQ ID NO: 225319 - DNA, 535 bp, Homo sapiens
cataagtgtgtttgcaattcaccctggaaaaggtaggacaagaaagcagtaacttgggttcacatgacatttattcttctgtattgatatctaaggtattacacaaaatgacctaattccccattctaatattcttgtgaaattaaaggggaaaggaacatttttctttytttttttttcgacaggatctcaccgttgcccaagctggagtgcagtggcatggtcacagctcattgcagccttgaactcctgggctccagcaatcctcctgcctcagcccaagaagtgctgggaacaggagctagctactgtgcccagcccctgtactcaccccatccgccttttataatgcagggcgagtctgaatctgttccctttttcagtgttgtcctcaatcaggtgagttgtataccgtctttccctatatggtttacctatttcacaggtgttaaccaatgaaaccattccaagggacttgatttctttaaataaattttttgtcttcactcgttgcaacttcttaacacaggacatt

SEQ ID NO: 225320 - DNA, 535 bp, Homo sapiens
cataagtgtgtttgcaattcaccctggaaaaggtaggacaagaaagcagtaacttgggttcacatgacatttattcttctgtattgatatctaaggtattacacaaaatgacctaattccccattctaatattcttgtgaaattaaaggggaaaggaacatttttctttctttttttttcgacaggatctcaccgttgcccaagctggagtgcagtggcatggtcacagctcattgcagccttgaactcctgggctccagcaatcctcctgcctcagcccaagaagtgctgggaacaggagctagctactgtgcccagcccctgtactcaccccatccsccttttataatgcagggcgagtctgaatctgttccctttttcagtgttgtcctcaatcaggtgagttgtataccgtctttccctatatggtttacctatttcacaggtgttaaccaatgaaaccattccaagggacttgatttctttaaataaattttttgtcttcactcgttgcaacttcttaacacaggacatt

SEQ ID NO: 225321 - DNA, 535 bp, Homo sapiens
cataagtgtgtttgcaattcaccctggaaaaggtaggacaagaaagcagtaacttgggttcacatgacatttattcttctgtattgatatctaaggtattacacaaaatgacctaattccccattctaatattcttgtgaaattaaaggggaaaggaacatttttctttctttttttttcgacaggatctcaccgttgcccaagctggagtgcagtggcatggtcacagctcattgcagccttgaactcctgggctccagcaatcctcctgcctcagcccaagaagtgctgggaacaggagctagctactgtgcccagcccctgtactcaccccatccgccttttataatgcagggcgagtctgaatctgttccctttttcagtgttgtcctcaatcaggtgagttgtataccgtctttccctatatggtttacctatttcacaggtgttaaccaatgaaaccattccaagggacttgatttctttaaataaattttttgtcttsactcgttgcaacttcttaacacaggacatt

SEQ ID NO: 225322 - DNA, 500 bp, Homo sapiens
cttaataatacatggtcacgcttttccttctataggcactccagaattgagtattaaccagaattgagtattaaattcaatcaacacaattagctttaatgaactacactcttataggggttgatgcttcactttgtccagttttttttttttacaaggtaaataggataattcacctaacatttctaaaatttggagtggaactagggaaggtgaaggggttggcagttagcaagtacagcaccattcttttcactccttaacggaggtttgaagttcagccagaggtcttggataataggagtttttagaggatatttagtgaggtccctattggaacgttatctgtattgcaaacaactgtacatcatttagtaatcacgggcaagttttggcttgggaaagacctsatgctaattagctttatgtaaagtggaaatgtcacaattttgaggatgccaacataattctatcccatcaaatcccacatgtcaggcagg

SEQ ID NO: 225323 - DNA, 519 bp, Homo sapiens
acttatgcccctacttaccccaaytggatgtgagactgactccctccttgctcctaggtaatttcttcttcttttttttaattatttctaattcttggaaatagtaaaaaaaaatgcctaaatactaataacaaatttttgatattgctctcatgtgcaacaaaactacccacattatattaaaaagcaataatcaggaatgtttatttctgatcaatttattatttcactgaatatccattcgatttttttatgttaacaagacttttttccaggtttattgagatataattgacaaatagaaattgtatatatttaagttgcacaacttgatgtttatatgtatatatatgcattgtgaaatgataaatgatgccaagaatcaaaatagttggatttattttcaacaaaattgtttttaacctaattatcacttattcctttgtgatcccactagatcctacatgtgtttttatatagcctctccaaacttttatttctgtacttgtatcctagact

SEQ ID NO: 225324 - DNA, 615 bp, Homo sapiens
ataagtgagcatttctaacttgtgtattagtttcctttaaaaaagaccaagttatatgtaagacttggtggagggcacggttgtttgcagagcatgggcatgaaggggcatgattttttaattatattagtagagaagtgaagctatgagaaaaagtttaacatatttctttattacccctggttctattgtgctgttgttagtggtttttaaaacaaattctatttttatttccccgaccctgtacatgaaatatacaaattgaccaggacaagaaataaacatagacttgtgattgtttaaactttatgaaacaatttrccttaattaaaaattatccttttctggctatttatggctgcacagcctattttacaggaatcagtagcttcggcccttaaaagctctcctgcaagacatttgctatgtgagagagaatttatgtgctgagaatagtttcattcttcagttaggccttaggtttgaccctataaaattttttactcaggaaggtacaaaaatttcttctctttaaatacttcgggaaaaacataaccattttactaaataaacttggccatttgatagcataaattagggcagtgataaaatgtg

SEQ ID NO: 225325 - DNA, 610 bp, Homo sapiens
gcacacggggtcacccactttgcaaagggaggcatggaaaacaccaccaaaatatactcaaatattaagaagcaataagcagatggatatcattagatctgcctgtcctttttaatctggcttattccctgatggatttctctgatgaatgagggatgtgctctccttagagagccagatgtagrttaggcaagctgtagggaatcttggcttgttcagattttccaggcctgtccattgacctgacaatcttgtaaaaatagatacagacacatgatttcactttttccatatccgagtccagtttcaaccaaggagttcaaatttttgtgcttaggagaacataatggacataagccaaatgaacggtgatactcccagcttgcactgttggtcctattcgaatttatgcagcactgctcctctgagattttgttttctctcccttatctcagaatgagatatgcagaaaaatctccatagtaatgaagtaagtagaatatacactaaaggtcttggtcacttctttcctcaaccatagcagagagaacagaaatgaccccagggctccagaaaagctccccactggggacactaatcagtccaaagg

SEQ ID NO: 225326 - DNA, 574 bp, Homo sapiens
ggcttattccctgatggatttctctgatgaatgagggatgtgctctccttagagagccagatgtaggttaggcaagctgtagggaatcttggcttgttcagattttccaggcctgtccattgacctgacaatcttgtaaaaatagatacagacacatgatttcactttttccatatccgagtccagtttcaaccaaggagttcaaatttttgtgcttaggagaacataatggacataagccaaatgaayggtgatactcccagcttgcactgttggtcctattcgaatttatgcagcactgctcctctgagattttgttttctctcccttatctcagaatgagatatgcagaaaaatctccatagtaatgaagtaagtagaatatacactaaaggtcttggtcacttctttcctcaaccatagcagagagaacagaaatgaccccagggctccagaaaagctccccactggggacactaatcagtccaaaggcacatcgtttactttccttgtgttctggtcattcaggagtatgagaaaccagctttgtaaaattgtgactgagacagtgaaa

SEQ ID NO: 225327 - DNA, 574 bp, Homo sapiens
ggcttattccctgatggatttctctgatgaatgagggatgtgctctccttagagagccagatgtaggttaggcaagctgtagggaatcttggcttgttcagattttccaggcctgtccattgacctgacaatcttgtaaaaatagatacagacacatgatttcactttttccatatccgagtccagtttcaaccaaggagttcaaatttttgtgcttaggagaacataatggacataagccaaatgaacggtgatactcccagcttgcactgttggtcctaytcgaatttatgcagcactgctcctctgagattttgttttctctcccttatctcagaatgagatatgcagaaaaatctccatagtaatgaagtaagtagaatatacactaaaggtcttggtcacttctttcctcaaccatagcagagagaacagaaatgaccccagggctccagaaaagctccccactggggacactaatcagtccaaaggcacatcgtttactttccttgtgttctggtcattcaggagtatgagaaaccagctttgtaaaattgtgactgagacagtgaaa

SEQ ID NO: 225328 - DNA, 574 bp, Homo sapiens
ggcttattccctgatggatttctctgatgaatgagggatgtgctctccttagagagccagatgtaggttaggcaagctgtagggaatcttggcttgttcagattttccaggcctgtccattgacctgacaatcttgtaaaaatagatacagacacatgatttcactttttccatatccgagtccagtttcaaccaaggagttcaaatttttgtgcttaggagaacataatggacataagccaaatgaacggtgatactcccagcttgcactgttggtcctattcgaatttatgcagcactgctcctctgagattttgttttctctcccttatctcagaatgagatatgcagaaaaatctccatagtaatgaagtaagtagaatatacactaaaggtcttggtcacttctttcctcaaccatagcagagagaacagaaatgaccccagggctccagaaaagctccccactggggacactaatcagtccaaaggcacatcgtttacwttccttgtgttctggtcattcaggagtatgagaaaccagctttgtaaaattgtgactgagacagtgaaa

SEQ ID NO: 225329 - DNA, 574 bp, Homo sapiens
ggcttattccctgatggatttctctgatgaatgagggatgtgctctccttagagagccagatgtaggttaggcaagctgtagggaatcttggcttgttcagattttccaggcctgtccattgacctgacaatcttgtaaaaatagatacagacacatgatttcactttttccatatccgagtccagtttcaaccaaggagttcaaatttttgtgcttaggagaacataatggacataagccaaatgaacggtgatactcccagcttgcactgttggtcctattcgaatttatgcagcactgctcctctgagattttgttttctctcccttatctcagaatgagatatgcagaaaaatctccatagtaatgaagtaagtagaatatacactaaaggtcttggtcacttctttcctcaaccatagcagagagaacagaaatgaccccagggctccagaaaagctccccactggggacactaatcagtccaaaggcacatcgtttactttccttgtgttctggtcaytcaggagtatgagaaaccagctttgtaaaattgtgactgagacagtgaaa

SEQ ID NO: 225330 - DNA, 490 bp, Homo sapiens
gtgtggggacgggggagggatagcattaggagatatacctaatgttaaatgacgagttaatgggtgcagcataccaacatggcacatgtatacatatgtaacaaacctgcacattgtgcacatgtaccctaaaacttaaagtataataataataaaattttwaaaaaatcagaaaaaaaaagaaatacactctctgttattttctgtcacatgcagaaaattctcatcatgccatgctctttaacctgtcatccaaactctgtaaataatgttacaccctaagaagagttaaagtagtaaaatcaacataagacggataagattttttctctgcagatattatctcaagacatgaagttgaaaatggaatgaaagggaccaagacatctgcatagggcataactaaacataacaatcatatttctcattctaaattaattcatttggcattatagtatatatatatatatataagtgtatatatatatca

SEQ ID NO: 225331 - DNA, 477 bp, Homo sapiens
attttgaatttcttcatgagtcagtcttggtagattgttactatgaactggtccatttctttcttttaggctatccaattttttggcatattattgctcatagtagtcacttatgattatttgtgtttctgtggtatcagttgtaacatctccacactgatttataattttattaatttgattttctctttttttcttagtaagtctagctaacactttatccattttatcttttcaaaaaaccaactcttagtttcatatttttttttatttttctatcatctatttcattatttttttctctaatatttattrtttacttccttttgttgacttcaggctttgttctttttctactcccacaggtataaagttaggttgtttgatgtctttattttttcttaaggtaggtgtttattgctacaaaattcccttttaaaaccgtgtttgctacatcctgtaagttttggtacattg

SEQ ID NO: 225332 - DNA, 383 bp, Homo sapiens
aataacacttttccttctatccaagccctcatattatgctctgacaataaattgggcttttccatctgacttgtccagtgaatggacaatggaaaatgtgatgcaaatatccattggttcttccctttttgggagaaattgtgaagaggtctggagctaccctgttggagacacagggcctagccaagagtcaccacaaaccaccagattktgaaggaaactatcttaaaccaaccaggctcagtcaaagcaccaggtgactaaagcctttttgtgatccaggcaacacaaatatatcaactacccaggtgaatccaccacaccaaaatgcagatccacagaacttcaaacaaataaaatggtggttgttttttataagccag

SEQ ID NO: 225333 - DNA, 383 bp, Homo sapiens
aataacacttttccttctatccaagccctcatattatgctctgacaataaattgggcttttccatctgacttgtccagtgaatggacaatggaaaatgtgatgcaaatatccattggttcttccctttttgggagaaattgtgaagaggtctggagctaccctgttggagacacagggcctagccaagagtcaccacaaaccaccagattgtgaaggaaactatcttaaaccaaccaggctcagtcaaagcaccaggtgactaaagcctttttgtgatccaggcaacacaaatatatcaactacccaggtgaayccaccacaccaaaatgcagatccacagaacttcaaacaaataaaatggtggttgttttttataagccag

SEQ ID NO: 225334 - DNA, 415 bp, Homo sapiens
ttggcattgcctgcctgaagataggggccgacrttaatggatctctttaagtaaccttatcttctaagatctgtggcctacatttatgagagaaaatggttgctttctgggatgatatagaatcatggattcaactcctctcccagtggggatatggcttgtttggttatgaattatagtccagtgaaagcaaattgttagtttctcttgctctagactccatttgccattcagcaagtatcgatctagcagaatggatgccaggcaatagggataaagctgtaaacaaaacagagaaggatctctatgctggtggagggaggatggacaaaaatcatgataaataattgcaggatgatctattttagaagatgatgagagtggtgggaaaaactaagcaggggaaggagcttcc

SEQ ID NO: 225335 - DNA, 588 bp, Homo sapiens
ggcctacatttatgagagaaaatggttgctttctgggatgatatagaatcatggattcaactcctctcccagtggggatatggcttgtttggttatgaattatagtccagtgaaagcaaattgttagtttctcttgctctagactccatttgccattcarcaagtatcgatctagcagaatggatgccaggcaatagggataaagctgtaaacaaaacagagaaggatctctatgctggtggagggaggatggacaaaaatcatgataaataattgcaggatgatctattttagaagatgatgagagtggtgggaaaaactaagcaggggaaggagcttccagaatatggaggtggggtgcaattgtaagtagggagctgggtaggtcttactaagaagatgacatttcagccaagattggaaggagggagccatttggccacctggcagaagatacctcctggtagagggctgagctagtgcaaaagccccagtgcaggagtgctgcatatgtttgaggaaaagtgaggttagtggggctggagagggttggggtggagtggggtgaggggcggccgaggagggaag

SEQ ID NO: 225336 - DNA, 553 bp, Homo sapiens
agtgttttgtaatttttcttgtagagctcttttaccgccttggttaagtatatttgtaattattttattttatttttgcagctgttgtaaaagggattgtgttcttaaattgattctcagtttggtcgttgtcagtgtatagcagtactactgatttgtgtacattgatttttgtatgctgaaatttttctgaatgtatttatcagatctgggrggtttttagatgagtctttagggttttctaggtattagtttatatctgggtgaacagcaacagtttaacttcctcttttccaatttggatgccctttatttccttctcttatctgattgctctggctagaatttccagtactatgttgaatataagtggtaaaagtgggcatccttgtcttgatccagtcctcagggggaacactttcaacttttttccatttggtatgatattggctttgggtttctcataggtggcttttattcctttgagatatatgtcctctatgccaaatttgttaaggatttttatcataaaggaatactggatgttgtcaaa

SEQ ID NO: 225337 - DNA, 535 bp, Homo sapiens
gcattttctaattcgcagtacagagcaatagagcaagagcacagaaaaacgggttttctgggcaaataatttcagagacatcgtggcaattgggccttgtggcaggttggtgatccccaaagaggccacagagaaatagttgcaaaattggaataaaattttccttaattatttaacttatttctttcttttctttttctttttttttaagaaatctcgctctgtcgcccaggctggagtgagtgcagtggtgtgatcttggttcactgcaaccttcgtctccasgttcaagcaattcttctgcctctgcctcccaagtagctgggactacaggtacactccgctgtgcccggggtgtacctgtaatgtacaaaaatgtttgtattttagtagagatggggtttcaccatgttgcccaggctggttttgaactcctgagctcaggcaatctgcccgccccggcctcccaaagtgctaggattacatgtgtgagctaccacgcctggccttatttatttctaagctatgcatttat

SEQ ID NO: 225338 - DNA, 535 bp, Homo sapiens
gcattttctaattcgcagtacagagcaatagagcaagagcacagaaaaacgggttttctgggcaaataatttcagagacatcgtggcaattgggccttgtggcaggttggtgatccccaaagaggccacagagaaatagttgcaaaattggaataaaattttccttaattatttaacttatttctttcttttctttttctttttttttaagaaatctcgctctgtcgcccaggctggagtgagtgcagtggtgtgatcttggttcactgcaaccttcgtctccaggttcaagcaattcttctgcctcwgcctcccaagtagctgggactacaggtacactccgctgtgcccggggtgtacctgtaatgtacaaaaatgtttgtattttagtagagatggggtttcaccatgttgcccaggctggttttgaactcctgagctcaggcaatctgcccgccccggcctcccaaagtgctaggattacatgtgtgagctaccacgcctggccttatttatttctaagctatgcatttat

SEQ ID NO: 225339 - DNA, 457 bp, Homo sapiens
gatcacgtgggtttcataccaaggataagggaatagtttaacatacacaagtcaataaatgagctacaccacataaatagaagtaaaaaaaaataagaccatatcaatagacacagaataaaaatttgacaaaattcagtacccktatatattaaaaccatcagcaaaatcagcatagaagagacatatcttaaggtaataaaagccacatatgatactgaataggaaaaagatgaaagctttttctgtgagaactggaaaaagacaaggatgtctgctttcaccacttttattcaacaaagttctgtatgtcctagacagagcaatcaagaaagagaaaggaaataaagtgcatttaagtcgtaaaaagaaagtcaaactatcattgttcactgaaaatatgattgtatatcttgaaaaccctaaggactcattcaaaaagcttctagatatgata

SEQ ID NO: 225340 - DNA, 457 bp, Homo sapiens
gatcacgtgggtttcataccaaggataagggaatagtttaacatacacaagtcaataaatgagctacaccacataaatagaagtaaaaaaaaataagaccatatcaatagacacagaataaaaatttgacaaaattcagtacccgtatatattaaaaccatcagcaaaatcagcatagaagagacatatcttaaggtaataaaagccacatatgatactgaataggaaaaagatgaaagctttttctgtgagaactggaaaaagacaaggatgtctgctttcaccacttttattcaacaaagttctgtatgtcctagacagagcaatcaagaaasagaaaggaaataaagtgcatttaagtcgtaaaaagaaagtcaaactatcattgttcactgaaaatatgattgtatatcttgaaaaccctaaggactcattcaaaaagcttctagatatgata

SEQ ID NO: 225341 - DNA, 589 bp, Homo sapiens
atagaccaatggaacagaatagagaacccggaaataaagccacaaatctacagatctttgacaaagttgacaaaaataagcaatggggaaagaattctctattcaataagtggtgctgggatagctggctaagccatatgcagaagaatgaaactggactcctacctttcactgtatacaaaaattaactcaagatagattaaagatttaaatttaagatctcaaactgtaagaaacctaaaagaaaatctaggaaatacctttcacaacattggtcttggcaaagaatttttggctatttccctgatatggtttggctctgtgtcttcactcaaatctcatctcaaattgtaattttcttaatctccacatgtcaagagcataacctggtggggggtgattgaatcatgggagtggcttcctccatgctgttcttgtgatggtaagttctcgtgaaatctgatggttttataagtgtttgacagttcctcctrcactctctctttctcctgccgcctgatgaagaagttgcctgcttccctttctgttataattgtaagtttcttgaggcctccccggacatgtggaa

SEQ ID NO: 225342 - DNA, 599 bp, Homo sapiens
caggtggaacttgggtttttgcaagcctcaccaccatgagttaaagcagtctgktgctctaaataaacttgaaagtcagtctaggtcacaaggactgcaactcctaggaaagtcctagtgctgaactaggcccagagccagtagacttagggggttgagatggggtatgtgacctactgagacactagctgaggtggctaagaaagtgctgtcgtcaccactcacctaaccccaggtggcatggctcacaaattcaaaacagaccccttcctttcacttgaggagaggagacggaatagtggagataaatttgtcttgcattttggataccaactcagccacagcaaaataagccatcagagtcacaaggtcccatttccaggccctagttctcagatgaaatttctagaaacactcagggccagaaggtaacatgctgccctgaagggaaggacccagtcctggcaggatgcatcacctgctaactgaagagcccttgggccccgaaaaaccaccagagatgcccaggtactacgttgagggctttgggtgcgactctgagatgtggtgccatcagcacatttcaagctatggtagat

SEQ ID NO: 225343 - DNA, 599 bp, Homo sapiens
caggtggaacttgggtttttgcaagcctcaccaccatgagttaaagcagtctgttgctctaaataaacttgaaagtcagtctaggtcacaaggactgcaactcctaggaragtcctagtgctgaactaggcccagagccagtagacttagggggttgagatggggtatgtgacctactgagacactagctgaggtggctaagaaagtgctgtcgtcaccactcacctaaccccaggtggcatggctcacaaattcaaaacagaccccttcctttcacttgaggagaggagacggaatagtggagataaatttgtcttgcattttggataccaactcagccacagcaaaataagccatcagagtcacaaggtcccatttccaggccctagttctcagatgaaatttctagaaacactcagggccagaaggtaacatgctgccctgaagggaaggacccagtcctggcaggatgcatcacctgctaactgaagagcccttgggccccgaaaaaccaccagagatgcccaggtactacgttgagggctttgggtgcgactctgagatgtggtgccatcagcacatttcaagctatggtagat

SEQ ID NO: 225344 - DNA, 465 bp, Homo sapiens
agagaaggacacaggcctggctgtcattgacactaattgtagtgctaattgtagagccccagggccttaagaaaacataaacagtagccagggagtggtttcagcagaccttgggtgagacccagtgctgtgctggctttatatttgacccagtacagtaattgtggtggtggccacaggggtgtttgtgtcactccagccccagtttcacatggctcagaacagagagagagagagagagactgttttaaagaaagtaagtgaagagaatgaaagtctctgcctggtaattcaaagatttatcttggatcttgtccaagtccatcargatgatacctccataagtctacagtgttattggactttgagtgtcccctaaagcagttacatcttaggtcacagtacccaagtcctcttgaatatctggaaagctttcccaagaagaaatagttcaaacaagcccag

SEQ ID NO: 225345 - DNA, 428 bp, Homo sapiens
caaacaaaagctgagtcattttatcaatatctyacctatcctacaagaaatgctaaagggagtactttaatcagaaattaaaataagtaaatgaacaataagtaatcacctgatagtacaaaactcacaggtaatagtaagtaaacagaaaaacacagaatattataacactttaagtgtggtatgtaaattactcttatactaattagaaataaaccatgaatcagtcaaaaataataactacagcaacttttccagacatacacagtacaagaagacatgaactcaaataacagttaaaaagcagaagacaaagttaaggcatagattttttgatagttttctttttgcttgttggtttcttttgcaaacaatgttaagatgttataagcttaaaataatggcttatttagcatttgcaaactcat

SEQ ID NO: 225346 - DNA, 586 bp, Homo sapiens
tggaaagaaaatcaaattatccttgtttgcagatgatatcatcttacatttggaaaaaccttaatacaccacaaaaaacttttagaactgagaaacaaattctgtaaagtttcaggatacaatattaatatacaaaaatcaatagcatttctatatgctaatagtaaacaacctgcaaaataaattaaaaagtaattacatatacaataaccacacataaaaytaggtacctaggaattaaccaaagaagtgaaagatctctattatgaaaactaaaatcctctgataaaagaaattgaagaagacagcaaaaaaaaaaaaaaaaacaaaattcaatctttatgaattagaaaaatcaatattgttaaaatatccatactatccatagcaatctacagattcaattcaattcatttcaaaataccagtaacattctttacagaaatagaaaaaaaatcctaaaatttacacagaaccacaaaacacccagaatagctaacgctagattaagcaagaagaacaaaaacagaagaatcacattacctggcttcagattacaccacaaagctatggtaatcaaaacagc

SEQ ID NO: 225347 - DNA, 586 bp, Homo sapiens
tggaaagaaaatcaaattatccttgtttgcagatgatatcatcttacatttggaaaaaccttaatacaccacaaaaaacttttagaactgagaaacaaattctgtaaagtttcaggatacaatattaatatacaaaaatcaatagcatttctatatgctaatagtaaacaacctgcaaaataaattaaaaagtaattacatatacaataaccacacataaaactaggtacctaggaattaaccaaagaagtgaaagatctctattatgaaaactaaaatcctctgataaaagaaattgaagargacagcaaaaaaaaaaaaaaaaacaaaattcaatctttatgaattagaaaaatcaatattgttaaaatatccatactatccatagcaatctacagattcaattcaattcatttcaaaataccagtaacattctttacagaaatagaaaaaaaatcctaaaatttacacagaaccacaaaacacccagaatagctaacgctagattaagcaagaagaacaaaaacagaagaatcacattacctggcttcagattacaccacaaagctatggtaatcaaaacagc

SEQ ID NO: 225348 - DNA, 589 bp, Homo sapiens
tgtaggtgtacatattatggggtacatgtactattttgatacaggcatgcaatgtgaaataaacacatcatgaagaatggggtatccatcctattgagcatgtatctattaagtttaaacattccaattactctctttattttaaaatacatagttattattaactatagtcactccattgtgctatcaatagtaggttgtcttcattctttctaactttttgtacccattagccattcacacctcctgcccagccccctactattcttcctagcttctggtagccattctcctactttctatgtccattagtttaattgtttttatttgtagattcaaaaaataagtaagaaagtgtgatgtttgcctttctgtgcctggcttatttcatgtaacacaatgatctccagttccatccatgttgcggcaaatgactggattgcattcttttcttatggctgtatgaatagtaaaccattgtgtatatgaaccgcattttctttatccrgtcttctgttgatggacacttagtttgcttccaaatcttagctactgtgaatagtactgcaacaaacatagaagtgcagat

SEQ ID NO: 225349 - DNA, 533 bp, Homo sapiens
aaagagaatgggaaggaaggagggagagaggatatgtgtccaccagtggaagtggctacagtgtcgtggcattgaaggagttgagtaagaaacagtgaggtgtggatccacgcaggcagggaggaaaagatggtagaaacagcgctttggttccctttaccaattattcattatttgcgttcctcccccagcctccaggtggcacaactgacccagcatatcctgcttgagaacggaaaggtaggacaaaggccagggcaagtcttaggaataaaatgaagaaacagaaggcactgttgccaggcaggattgggaatgggagggaatgttgccttgtagcaccctcaatggtgggtactcagtacatgcttagaaacttttccactgcatccctgataytattgtttgagagtctgacactctcaaaactctaatggaaatctttcatgcttcagtttaagctctttttctcttttcaagtcccaataaaaatattcccatttgcatagcacactgcaatttgtatcaactcc

SEQ ID NO: 225350 - DNA, 549 bp, Homo sapiens
gacatcagctgttctcagggttcctgaatgtcaatagcctcctttatcttggtatttggaaatggtttcacsatcctttttgcctgtttgtctcttatactattgaatttcaatagaatttactgaccagtggttagagatgccagagcttcagccttgactcaactttttcttccttccttccttttccttcttttctttcttccttttcatttttttctcctcatgtctccgatttaaggaattaaatgcttggatgccctacatactgatctatttttaacattttaatatcatgtgaaaaactcacattaaaatgagtgtgcttggatatcacttatttatttatatggaccatagactctctaaggaagaattttagaattacatcagatgtgagatgttataaacaatatcatggcaggtacttcatcactcccttctcatattttcctaaattagaataagtgtaaaatttacaaacaaaattagtttcattattagaaacagtaaagcaaggccgggtgaagtggctcacgcctgtaatcc

SEQ ID NO: 225351 - DNA, 611 bp, Homo sapiens
attacaggcatgagccaacgtgcccagccaagattgttaattgtatctgcaaagactttttttccaaataagtcacattcacaggtktattagtccattttcacactgctgtaaagagttacctgagactgggtaatttatgaagaagagagggtttttttgttttttgttttgagatggagtctcactctggtcatgcaggctggagtgcagtggcgtgatctcagcttactgcaacctccacctcctgggtttaagcaattctctttcctcagcctcccaagtaactgggattacaggcatgcatcaccacgcccgggtaatttttatatttttagtagagatggggtttcatcatgttggccaggctggtcttgaactcctgacctcaggtgatccacccacctcggcctcccacagtgctaggattacaggcattagccaccatgctcagccagaagagaggtttaattgactcacagttccacaagcttaacaggaagcatgactgggaggcctcgggaaacttacaatcatggcaagggaaatggaaggcaaagagaaagcaagcaccttcaaaacattgtattcctttttcagaaagaaaattt

SEQ ID NO: 225352 - DNA, 449 bp, Homo sapiens
gaaagaattagaagatttctccttccttaccacatcttggctctcagtggattttatttgctttaaggttttaggattccagcatgccaccagcatgayttctaccagagaagttaaaaattatatttttcatcacctagtatccaatcatcaatctgagtcacacaacaaactagtggagtcacttcttctggcatgaaatatgaaatgtgccgcaggaacttggtaacacctccattcacaaaaccactgaagccaggagttctgaccctagccatgaattgtctagtttggctgctcagagtcacgtgtcagccttctccccgatcatgaacttggaggttggccagccaagcaatactccaaagatttccaggcatgaacaggaagaaaattgtattttacattccgtttctttcaactcatgttgtaattctgggaagcccggg

SEQ ID NO: 225353 - DNA, 426 bp, Homo sapiens
tctccttccttaccacatcttggctctcagtggattttatttgctttaaggttttaggattccagcatgccaccagcatgatttctaccagagaagttaaaaattatatttttcatcacctagtatccaatcatcaatctgagtcacacaacaaactagtggagtcacttcttctggcatgaaatatgaaatgtgccgcaggaacttggtaacacctccattcacaaaaccactgaagccaggagttctgaccctagccatgaattgtctagtttggctgctcagagtcaygtgtcagccttctccccgatcatgaacttggaggttggccagccaagcaatactccaaagatttccaggcatgaacaggaagaaaattgtattttacattccgtttctttcaactcatgttgtaattctgggaag

SEQ ID NO: 225354 - DNA, 625 bp, Homo sapiens
actgtctcaaaaaaggctgggtgtggtggctcacgcctgtaatcccaacattttgggaggccaatgtgggtggatcacttgaggtcaggagtttgagaccagcctgaccaacatggtgaaaccctgtctccactaaaaatacaaaagttggccaggcatggtggtgtacacctgtaatcctagctatttggcaagagaatctcttgaacccggagagcagaagttggagcattccagcctgggtgaggaagtgaggcttggtmtcaaaaagaaaaaaaaaaaagaagcccgcacggtggctcacccctgtaatcccagcactttgggaggctaaggcaggcagatcacctgaggtgaggtcaggagttcgacaccagcctggccaacatggtgaaaccccatctctactgaaaatacaaaaaattagccaggcgtggtggcaggtgcctctgtaatcccagctgcttgagaggccgaggcaggagaattgcttgaacctgggaggaggaagttgcagtgagccgagatcatgccacggcactccagcctggtcaataagagtgaaactccatcacacacacacacacacacacacacacacacacacacacgctagttacttgtt

SEQ ID NO: 225355 - DNA, 481 bp, Homo sapiens
attcctatatcatctcattatttgcatgatattagcatgctgtgttaccaaatccattgtcattcccctcagcaactaccaccacccataccccttattttyatgctattcagttgcctccttaaagggagaagtacagaagcctcatcaggaaaacagaaaaagaacagaaaaacaaaatcagccaagtgaaatctgctggagactttgtcctccttaatccatcatgaaagtttacttaactaagatacaaatcccaaaaggattacacattccatgttctgtcattctatctgccccaagttctactgatattcaaaattatcttaccaaaaaaaaaaaaaaaaagagtttggaacataagcaaatacaactctaaacccaatctgggaaattcttacttgctaaatgctcacttgcctaaaagccacacaaattgtatttcaatcactgcagcctcgtcattattcttaaaagattt

SEQ ID NO: 225356 - DNA, 584 bp, Homo sapiens
tataatggaactgaaaaattcctattgcccagtaatgttatagccattgtaacactgtagtgcaacatattcctcatatgtttgtagtgatgctggaataaaactctataaaagtacagaaaataaaattgtgtacagtatataatacttgataataaasaattatgttattggtttatatacatactatacttttattatatagtatatactatactatactttttattgttattttagagtgtactcctacttgtttttttttttcttaaaacttaaccgtaaaacagcttcaagcaggtccttcaggaggtattccataagaaagtattgtcattataggagatgacagcttcatgcatgtttactgtccctgaagaccttccagtgggacaagatgtagaagtagaagacagtgatattgacaatcctgaccttgtgtaggcctaggctaacgtgtgtatgtgtcttagtttttaacaaaaaactaaaagttgaaaaaagtttaatagaaaaaagtttacagaataaggctacgaagaaaaaatatttttgaacagcttgtaaacaaaaatattttctac

SEQ ID NO: 225357 - DNA, 636 bp, Homo sapiens
ctgtttaatctaacataaacaattgagttacatataaaatttagaaataaagttatgttgtatttattgtcccatatgatgaagtacttttgttcaaactcttcatatttaattgggatccctttggaataatttgtctttctaagatagttgttcagggtgacagctattaggaatatgagtgactttataagtcttgagatgtaaggggactccttttttctgaaaaataatttttgagggstaaaaccctcatctgatatcggaacatacataataattccttataccttttatttttgatatttagaagtatttcttgattgtgagaagtcagagtcttagcttattcttattgagtaaatgagtaagtttttagttgttaatgtggattttgtcttttcctttttttctttgaggggttggacataattgccttatttcatttcagggatccttctaaagtaaatattctggtacctggtgctggactaggaagactggcctgggaaatagctatgctaggttatgcttgtcaaggaaatgaatggagtttttttatgctcttttcttccaactttgtactcaacaggtatttaatttattttttgctggaaatagtaatttctcagaatc

SEQ ID NO: 225358 - DNA, 578 bp, Homo sapiens
cttccttctaaccgcatcatagatgaaacrtacaagttcttgctaagatattcaataccacctctgaagaaatggctatagataagctacgaaaaactgaaatttagacactcctacaattattactcattgttacaaagtactcaccaatctgctatttactatgttcttaagtcaaagaccattaatatcctcctaaagaagttacagacttcaacaatgctctgcaatttcctgtaggacaggaccctatgagtccgtggcctgttatgaacccagccacacagagcagcaggcgagcgagcattaccacctgagttctgcctcctgtcagatcagcagcggcattagattctcataggggtgcaaaccctactctgaactgtgcatgtgaggggtctaagttgcgctcattatgagaatctaactaataatgcctgatggtctgaggtggaacagtttcatcctgaaaccatcccccaaccaacccaattctgtggaaacattgtcttccacgaaaccagtccctagtgctaaaaaagtttgggagttgctactgtagagtatcttaaggatct

SEQ ID NO: 225359 - DNA, 554 bp, Homo sapiens
atcttttctttggcatctctcttccttctaaccgcatcatagatgaaacatacaagttcttgctaagatattcaataccacctctgaagaaatggctatagataagctacgaaaaactgaaatttagacaytcctacaattattactcattgttacaaagtactcaccaatctgctatttactatgttcttaagtcaaagaccattaatatcctcctaaagaagttacagacttcaacaatgctctgcaatttcctgtaggacaggaccctatgagtccgtggcctgttatgaacccagccacacagagcagcaggcgagcgagcattaccacctgagttctgcctcctgtcagatcagcagcggcattagattctcataggggtgcaaaccctactctgaactgtgcatgtgaggggtctaagttgcgctcattatgagaatctaactaataatgcctgatggtctgaggtggaacagtttcatcctgaaaccatcccccaaccaacccaattctgtggaaacattgtcttccacgaaaccagtccctagtgc

SEQ ID NO: 225360 - DNA, 578 bp, Homo sapiens
cttccttctaaccgcatcatagatgaaacatacaagttcttgctaagatattcaataccacctctgaagaaatggctatagataagctacgaaaaactgaaatttagacactcctacaattattactcattgttacaaagtactcaccaatctgctatttactatgttcttaagtcaaagaccattaayatcctcctaaagaagttacagacttcaacaatgctctgcaatttcctgtaggacaggaccctatgagtccgtggcctgttatgaacccagccacacagagcagcaggcgagcgagcattaccacctgagttctgcctcctgtcagatcagcagcggcattagattctcataggggtgcaaaccctactctgaactgtgcatgtgaggggtctaagttgcgctcattatgagaatctaactaataatgcctgatggtctgaggtggaacagtttcatcctgaaaccatcccccaaccaacccaattctgtggaaacattgtcttccacgaaaccagtccctagtgctaaaaaagtttgggagttgctactgtagagtatcttaaggatct

SEQ ID NO: 225361 - DNA, 554 bp, Homo sapiens
atcttttctttggcatctctcttccttctaaccgcatcatagatgaaacatacaagttcttgctaagatattcaataccacctctgaagaaatggctatagataagctacgaaaaactgaaatttagacactcctacaattattactcattgttacaaagtactcaccaatctgctatttactatgttcttaagtcaaagaccattaatatcctcctaaagaagttacagacttcaacaatgctctgcaatttcctgtaggacaggaccctatgagtccrtggcctgttatgaacccagccacacagagcagcaggcgagcgagcattaccacctgagttctgcctcctgtcagatcagcagcggcattagattctcataggggtgcaaaccctactctgaactgtgcatgtgaggggtctaagttgcgctcattatgagaatctaactaataatgcctgatggtctgaggtggaacagtttcatcctgaaaccatcccccaaccaacccaattctgtggaaacattgtcttccacgaaaccagtccctagtgc

SEQ ID NO: 225362 - DNA, 578 bp, Homo sapiens
cttccttctaaccgcatcatagatgaaacatacaagttcttgctaagatattcaataccacctctgaagaaatggctatagataagctacgaaaaactgaaatttagacactcctacaattattactcattgttacaaagtactcaccaatctgctatttactatgttcttaagtcaaagaccattaatatcctcctaaagaagttacagacttcaacaatgctctgcaatttcctgtaggacaggaccctatgagtccgtggcctgttatgaacccagccacacagagcagcaggcgagcgagcattaccacctgagttctgcctcctgtcagatcagcagcggcattagattctcataggggtgcaaaccctactctgaactgygcatgtgaggggtctaagttgcgctcattatgagaatctaactaataatgcctgatggtctgaggtggaacagtttcatcctgaaaccatcccccaaccaacccaattctgtggaaacattgtcttccacgaaaccagtccctagtgctaaaaaagtttgggagttgctactgtagagtatcttaaggatct

SEQ ID NO: 225363 - DNA, 298 bp, Homo sapiens
atggtttcaagatgagtctgtaggtacaagactaaagtcatgccacatgcaagaaaaagttgatataktggacttcactaaaattaaaaacctctgctctgcaaaagacactggtaagtgaatgaaaagataagccacagattggaagaaagtatctgcaacaatcttatctgataaagaacttaagaacatagaaagcgcccttacaagtcactaatacaacaacccaattaaaaaatgggcaaatgatctgagaaaagggagagatggagagtgacagttaatggaaagatatagg

SEQ ID NO: 225364 - DNA, 298 bp, Homo sapiens
atggtttcaagatgagtctgtaggtacaagactaaagtcatgccacatgcaagaaaaagttgatatagtggacttcactaaaattaaaaacctctgctctgcaaaagacactggtaagtgaatgaaaagataagccacagattggaagaaagtatctgcaacaatcttatctgataaagaacttaagaacatagaaagcgcccttacaagtcactaatacaacaamccaattaaaaaatgggcaaatgatctgagaaaagggagagatggagagtgacagttaatggaaagatatagg

SEQ ID NO: 225365 - DNA, 517 bp, Homo sapiens
gaattctgtgaggttaagatatcaagactagcgtgactagtgtcacgtggttatggacaggtgtgagagcagtgcagtgtctttcaagagtgggagttgtttagagatggaggaaacaggatttccaccctctgcctgcttacctcttacccctagacctccccacaagctctcctttgaagtggcctcctgtctccccttggtcttctcaaagctgrtccaggcattccactgtcacagactctagtggtttctggagataatgacatcaccagatccagctcattctggcgggtggatcaagcactgtttctggctatgctccgtcctgtctgggcttttctgcctctgctgggaagctctggagagtggtaaggtcagaggggtgttctctttctaggaaagattcctgttcccagtggccccctgcttcctaattcacaagagctgctttgctctacagtgaaattatttcttgggagctgggaccagggcctgggaaacaaattttagggac

SEQ ID NO: 225366 - DNA, 501 bp, Homo sapiens
actagtgtcacgtggttatggacaggtgtgagagcagtgcagtgtctttcaagagtgggagttgtttagagatggaggaaacaggatttccaccctctgcctgcttacctcttacccctagacctccccacaagctctcctttgaagtggcctcctgtctccccttggtcttctcaaagctggtccaggcattccactgtcacagactctagtggtttstggagataatgacatcaccagatccagctcattctggcgggtggatcaagcactgtttctggctatgctccgtcctgtctgggcttttctgcctctgctgggaagctctggagagtggtaaggtcagaggggtgttctctttctaggaaagattcctgttcccagtggccccctgcttcctaattcacaagagctgctttgctctacagtgaaattatttcttgggagctgggaccagggcctgggaaacaaattttagggacacaaacctggccctctgga

SEQ ID NO: 225367 - DNA, 519 bp, Homo sapiens
tggaattctgtgaggttaagatatcaagactagcgtgactagtgtcacgtggttatggacaggtgtgagagcagtgcagtgtctttcaagagtgggagttgtttagagatggaggaaacaggatttccaccctctgcctgcttacctcttacccctagacctccccacaagctctcctttgaagtggcctcctgtctccccttggtcttctcaaagctggtccaggcattccactgtcacagactctagtggtttctggagataatgacatcaccagatccagctcattctggcgggtggatcaagcactgtttctggctatgctccgtcctgtctsggcttttctgcctctgctgggaagctctggagagtggtaaggtcagaggggtgttctctttctaggaaagattcctgttcccagtggccccctgcttcctaattcacaagagctgctttgctctacagtgaaattatttcttgggagctgggaccagggcctgggaaacaaattttagggac

SEQ ID NO: 225368 - DNA, 493 bp, Homo sapiens
ataaaatgctgtatgcatgtgcactgctctgagaaggagtctatagttcttaccagattcttgaaaggattctgtgaactcttctcccctaaagcttagaatcactgttctggatggtaccaaaaaccacacagtagaacactttrtacttttgtctcccacctctgataataaatgcagaatttggcatagtcaaaatgttacaaaaggtttgtacagcatcaaaagaccttggattgcaaattttacaggtaagaggcaatgaccaggttagcaaccagtcaagaacattcatgagcaaatgctggtctagtctgaagggccatcttgggtacacttgggcacaactggtgctgggctgaacatgccactcaggagtttttactggaacacaggcatgtagaaacacatctagaaggatataggtgtcaacatccagaaggatacaggtgtcaacagataagattatgctcataattagaaaatagaattc

SEQ ID NO: 225369 - DNA, 279 bp, Homo sapiens
gaccatccttatgaaaagctgctgatatgccacgaaatctgaggccagaggattgtccactggatttagtagcaagraggttactggtgccctgaactggagctgtttagatggagaggtggaggtgaacactgggaggtctggatttaagtgagaatgagatgaggcagcaggagtgttgactccttcaaggagttttgctgtaaagaggaatagaaaatggagtagtagatgagggagattgtgggcttggaaggggatacttttagagatatgaca

SEQ ID NO: 225370 - DNA, 583 bp, Homo sapiens
aagggcaccaggcatcaaaggcttttatttcaaacaaggttattatatattaaaccacgcattggtatgaaagaaggagatacagtatgggattcttacaaagtattctttgccactaaatgttctcttgaagcaaygtgatggaactggaggttattatgttaagtaaaattatccaggcacagaaaggcatatcttgcattttctcactcatacgtgggagctaaaaaagttaatctcatggaggtagagattagaatgatggttactagaagctgggaagggtgtgtatgagggtaggtggggataaagagtggttggcgaataggcgcaaacatacagatagatagaacacgttatgttcaatagcagaataggtcacttatggttaacagcaatgtattgtatatttcaaaatagctagaaagaggacttgaaatgttcccaaaacatagaaactataaatgcttgaggtgatagacttcttaaatacccagatttgatcattaggttttctatacatgtactcaaaatatcacatgtgccctataaatatgtactcatcaaaaaaaattaaagatgg

SEQ ID NO: 225371 - DNA, 583 bp, Homo sapiens
aagggcaccaggcatcaaaggcttttatttcaaacaaggttattatatattaaaccacgcattggtatgaaagaaggagatacagtatgggattcttacaaagtattctttgccactaaatgttctcttgaagcaatgtgatggaactggaggttattatgttaagtaaaattatccaggcacagaaaggcatatcttgcattttctcactcatacgtgggagctaaaaaagttaatctcatggaggtagagattagaatgatrgttactagaagctgggaagggtgtgtatgagggtaggtggggataaagagtggttggcgaataggcgcaaacatacagatagatagaacacgttatgttcaatagcagaataggtcacttatggttaacagcaatgtattgtatatttcaaaatagctagaaagaggacttgaaatgttcccaaaacatagaaactataaatgcttgaggtgatagacttcttaaatacccagatttgatcattaggttttctatacatgtactcaaaatatcacatgtgccctataaatatgtactcatcaaaaaaaattaaagatgg

SEQ ID NO: 225372 - DNA, 523 bp, Homo sapiens
tcatataaacctatgtagttcccaaagaggtcttcaaagtgttttaggtccctgggaagtttttgatcttttgaatttctcattttctttttacataattatgtctccaaaatggctcctcttttggcaataaactttgatcagtggaagactagtgacacctggattctaggtctaagtttccacttttaatttaaatatttgtctatttaacaccctggaactttccaatgaaattccatcctagagtataagaaaagtctttattaatctagatgtgtagggcagtatagatattcacctttaaattaattgatcgattatcctcactgaattgccaccccagacccacagaagggattatyggagctggcaatgtcttgaaatggcaatgtccacatggaagtggcattaatacagcagcctttgtgctttgtcattgcaacccaggccaatgtaagtcactcactgtgaggcaggaaaaaaaccctaagttattataaaggggcaaaagctactttta

SEQ ID NO: 225373 - DNA, 454 bp, Homo sapiens
acagtcatcatagttattactttcaattcaggctcctattgtctcttgactatactcttataatagtctccttgcctgcagtcttcacacagcaacccattctcagtaaagtatccccagtgagctttccaaaacatcttcctcttttacaccctcaagtggctccctgtcacctgcaggggaacatctgacatgctgaactagacccaacctggagcttatctcatctccccagggccatctcccacccccctccatcttgtacatccttctccaaaacagggtgtctcccagaactctaaacacactgcgctcttttacacctcctggcctttgcacagcttgttctctctgmctatatactacctcccccctagcccccattgagagcctatgcatccttgaagttcagttcttatttcatctcctctgagatgccttcctggacccttct

SEQ ID NO: 225374 - DNA, 535 bp, Homo sapiens
cactattcacccaggtacagtcatcatagttattactttcaattcaggctcctattgtctcttgactatactcttataatagtctccttgcctgcagtcttcacacagcaacccattctcagtaaagtatccccagtgagctttccaaaacatcttcctcttttacaccctcaagtggctccctgtcacctgcaggggaacatctgacatgctgaactagacccaacctggagcttatctcatctccccagggccatctcccacccccctccatcttgtacatccttctccaaaacagggtgtctcccagaactctaaacacactgcgctcttttacacctcctggcctttgcacagcttgttctctctgcctatatactacctccccyctagcccccattgagagcctatgcatccttgaagttcagttcttatttcatctcctctgagatgccttcctggacccttctctggcagttcccctagatcccaagaactgcctccttatccttactgattcttgagctcacccctg

SEQ ID NO: 225375 - DNA, 526 bp, Homo sapiens
ggtacagtcatcatagttattactttcaattcaggctcctattgtctcttgactatactcttataatagtctccttgcctgcagtcttcacacagcaacccattctcagtaaagtatccccagtgagctttccaaaacatcttcctcttttacaccctcaagtggctccctgtcacctgcaggggaacatctgacatgctgaactagacccaacctggagcttatctcatctccccagggccatctcccacccccctccatcttgtacatccttctccaaaacagggtgtctcccagaactctaaacacactgcgctcttttacacctcctggcctttgcacagcttgttctctctgcctatatactacctcccccctagcccccattgasagcctatgcatccttgaagttcagttcttatttcatctcctctgagatgccttcctggacccttctctggcagttcccctagatcccaagaactgcctccttatccttactgattcttgagctcacccctgtcat

SEQ ID NO: 225376 - DNA, 540 bp, Homo sapiens
ttgttagtgagaatatagagaaagggtactcacatatattgatgaagggtcataattttctacaactttctataggacaatttggcagtagagatcaaaattgcaaagagcttatcatctgggtgcagtggctcacacctagaatcccagcactttggaagactaaggcgggaggatcaaaactttgtagtacaatgtttaaggattgatgccatttctttttataactcaaatatctgtgattataattatctaacagaaaaacattaaattacgtaatataaagatgataagtgatacacagaaacactcctatacaatggatcaggacggagtgagaggtgactatgacataaaaattttacttagtattgattgattttttgaatcttattttttaggaaacatcatatattacttctataattttwaaaaaatagggaaagcattcatatttcactaattttaaccatactttgtggccctgacattcaaagccttcaagtagaaggggtcatagatagaatgtagcccacttgt

SEQ ID NO: 225377 - DNA, 434 bp, Homo sapiens
acctgtttccacttcacatgctggaaccaaggatttctgagtgtgagtgcacgcatgcatcacctttcccccaatacagacccaaatctgagaacaatttgaggaggtgatagctctttccttttctccttctttcctctccttccattgtttttttgttttgttttgttttgttttgttttgttttaggaagtcattctgggactctggatagaagaagaaaagataaccagagctggagcagatggccagaggtaagcaaaatcctctgtggtggccgcagcaagctccaagagcctccttatcagtaaactaaccacatgccacaatttgccatgtgcacrggactctcaatgctctctctctctacatctgtctctcattatagttcccaaccccacctttttgcaccattcacacatttcaaccagtag

SEQ ID NO: 225378 - DNA, 587 bp, Homo sapiens
gaaataaaataacacattctttctatgcataaagttaactctatttcccagattccaacaattgtggtggtggctttaaaagtttgaagtaatagcatgtgttacagaaagttttttccatcttcccaaagagctgtcaggcacacacaagagcacacacaaggttctctatatgaaayacatgcatatgtagttccaaaacatctggtgaatccagtacccaaattagtcaaactgatgatttggcatcctatagaccaagtatctaaacaatcaacaaaacagattgaaattactggggtttaggatgtaatgtgaaaagaccaactgggctaggaatggttggttgacaggttgtagctggctggctggctgcctgaaacatatgggggcctcactagtgtatggccttcttctcaaaggcaatagtgcatgcagtggctgtggacagaggcctctttttcaaagatacagtcagtgttagctggctggctttaaccagcaaagcaacattccatgtaagcacaagctgtcccccaagagggttcatagtgagtgtgcagttatccttcacatgaatataacac

SEQ ID NO: 225379 - DNA, 511 bp, Homo sapiens
tgtctttttttgcaactgattagaaatggagtttttcatagattatccagaatgtccattcttgctttgctatcctcgctatggttgaaaacatagactctgagataggaagttcgtgattaaaacattgactctgcatttccagctatctgattctgaacaaatcacttaaactctgaaaatttgtttccttgtgtcaaaaatgatggcactaatagctgtcccatcaacatgttaagaaagtttaaaaaatgagayaatgcagctaaactacttattttagtactgactaaccattaggattgtttgtgtataatatgattactattgttgctttaaagtttaaatttccagttcttgaagatgggtgaggtagggggctttacaaccttagaaatgggccaactattgcatttcctttttctccacctaaacatagtttagtgacatatgtagcatatattttttgtactagtgtttttgtttaggtagattaggtagatatttgtat

SEQ ID NO: 225380 - DNA, 520 bp, Homo sapiens
ccatttgtatatcttcttttgagatatgcatattctgatcctttaaccttttttattttattaaatttaattttttattgagttaaaatatacacatataatttaccagctttaccattttaaagagtacagttgatatggtttggctgtgtccccacccaaatctcaycttgaattgtagctcccataattctaatgtgtcatgggagggaccaaatgggaggcaattgaatcatgtcgtgggtctttcccatgctgttcttgtggtagtaagtctcatgagatctgatgggtttataaagaggagtttccctgcacacactctctctgcctgccaacaagtgagacgtgactttgctcttcatttgttttccaccgtaattgtgaggcctccctagccatgtggaattgtgagtcaattaaacctattttcttcataaattactctgtctcaggtatgtctttactagcagtgtgagaacagacgaatacaacagtttagtggtgataaaatgcattt

SEQ ID NO: 225381 - DNA, 619 bp, Homo sapiens
aatgcatccttatgggtcctaggtcaggcattcagcccacatgccctgtccagctgaatgtcgtggagcaaataatacctaaattgcaagtcatgatagatcacacacacacacacacacacacacacacacacacacacacacacaccatcatatcatgcttttcctcccctttggctaaagacatatgaacattacttttcatagccaaggctaaccttaatgtgtcacatgagttttaattccatcctctgcctgagttcccacaagtcttcttgtttgatcacatatccctgctgcttcttctcactgactttgtatctcttcagcctgccttttattctcacttgaatgaccttgaatacaacttctggccctgctaacttccagaatgtgccagttccctctctcttattcaactttctagtctgggtcattatgcttagattagtctagtggttgcaggaagcctgaaacacatgtaggcactaacctccacctttgcaatactgaattaaattgatttwaaaaaagtgaagggaaaccagttgctagtgttgattaaaaaacaaaacaaaacaaaacaaaaacaactcatgtaatgtgttttgggcagaaa

SEQ ID NO: 225382 - DNA, 519 bp, Homo sapiens
aaaaataacagactcaaacagaaatctggacaggcaaaccacagggaagaagtagataaaaytaagtgtcaacaaaattcagggaccttactcccaataggcctctatatctcgtctatgctttttttggtatattgtctttactctctctcattgcagaacagctacctcaacattgtaaaaaaataaaataaaattgtaggagctgacagctctctagtatcccatctaataattcccagaacaagaaaagggaaaattctcgttttgatacaatttgaaaataaatgccctagaagggctctgttgtttagcaaagtttgggttggatgaccatccctgtaccaatcaatgtaaccagtggttaaaggatggagtaaaaccttctaataataggtctttgtgcaaacatacagtttgaatggcagaagaaacaaatccttcaggaggcttccaaggtattccaagaagggtgaggtgatttgttcccaagatacagagtaaaaatggtaggtaaga

SEQ ID NO: 225383 - DNA, 519 bp, Homo sapiens
aaaaataacagactcaaacagaaatctggacaggcaaaccacagggaagaagtagataaaactaagtgtcaacaaaattcagggaccttactcccaataggcctctatatctcgtctatgctttttttggtatattgtctttactctctctcattgcagaacagctacctcaacattgtaaaaaaataaaataaaattgtaggagctgacagctctctagtatcccatctaataattcccagaacaagaaaagggaaaattctcgttttgatacaatttgaaaataaatgccctagaagggctctgttgtttagcaaagtttgggttggatgaccatccctgtaccaatcaatgtaaccagtggttaaaggatggagtmaaaccttctaataataggtctttgtgcaaacatacagtttgaatggcagaagaaacaaatccttcaggaggcttccaaggtattccaagaagggtgaggtgatttgttcccaagatacagagtaaaaatggtaggtaaga

SEQ ID NO: 225384 - DNA, 583 bp, Homo sapiens
ctgtgacattgattagttttagcatagttcatagaccattgtagagagccactacattgtagctattaatattattgaaggatattcccttccttcaaagatgtacacttcaccagggagatagcaatgacacagatgcaacactgtatggtttaatccaattcgatatgtcccacagcctaaaacattcattttttggcacaaagcggctgctcaaataagaaaggatgaaatgaataaataagtcaatgaaatgatcaacatatgaattatatttgtctagcccattggagatctcagccttgcaaacrtacaccttgccccccaaggggtggagttatttattgtttgcatatgacagcactttgccaaatgaacaaaaatctgagctggcttcattaagagggatggatataaagtaggtacatgtctgtgctgagccactgaaagtaaaatgggataattgcagtggttacaatgaggctgatcaagctgagagaaacaagtttcaaatcgttccaatcagtcctaatccagcagagttattaacagtgttctaccctggtgcgactgcatctgctaa

SEQ ID NO: 225385 - DNA, 472 bp, Homo sapiens
atagattacaagaatcctaaagccagccaggaaataatttayatgtttgaccacagaaaaaaacatgtggcttcagccaagtatggtttcttggacactgttttttctctatcccttcctcctcctgtcctattggcaatgctgctcccatttagacagccagctgtgtgtctccttcatatccagaggtatcctcaaaaaaaaaaaaaaaaaaggctattgatagccatagagacatagagatcacatgatgccatagaaagaacagtgctagctccagcttctggtagactgtcaggcacagaattacacaaaatgcatatttattgaatgaatgaatgaatgaatgaatgagctgaagggcaggaaagattgtgtacttcttcaacactctttttgataatctgaaaaatgagatttgttttcagaatgtctcagcttcctttgctttaacatttgatgaccgtgacag

SEQ ID NO: 225386 - DNA, 586 bp, Homo sapiens
agcattaactcagtcttgaggataaataagtgtgaacttaccagagaagttaaaaggaaaatccacaaaactaagatggcccaagccaaagcatgacattctgaaggcgcattacatatttctggagtggtgaatactctggtatgagcctaggatggtgcttgatatttaaagagagctcaataaatatttcttgaattagtgagtgaatcaatagctaaataattataattattaacagtgatagctagatttattagattattatttagtgtcgwattcaatattaagcacttttcatatattgtatcacttaatttccacaacaaccatagaagacaagcattgttattttttccattttgtacatgagtttcctaaagctctgggaggcagaggaacttttccaatgtcacatggccagtatcagtatcagaatttggctacaacatgactgcatgactttaaattatatgcacttaaattgtttcacctaaagtatacagtgtgttggaaaagaggatggaataagaaatgtctggaaaaatacattatggtcatattgtgaaggaagttgaatgcagta

SEQ ID NO: 225387 - DNA, 609 bp, Homo sapiens
gggacccaccacaaaggttctaattcagtaagtctggggtgagggcatgaatatgaattttttgggagttcccagtgggggctaataccactggtcaggcgcctcaatttctctgacctaataaaaaaatgagcagggattcaagacaaggaaagtgatgggattctaatggtcaactcttcactgaatccctttcacagtgyctcatctgagggtctcagcctcaccccatatcaacacagcaattgcagcacgaacctgatcaacacttgacctgtcattgcttcttggaaaaaatgaggaaggcgtcctgtcacaagtgaatcacattttccaggcagatatttattcattagatgcatatcacacctttactcagagtctggatcctaagcttaaaatatgggtaattatccagtcacaaaaataaccactctgcatcgaggctttaaacaaagtgaggaaggagggcctggtgaacactgaggatgagagaaaaagactaaaacgaaaagttcataatgaaagcctctatttttaaaaactcaaatgtcaattttccaaaatagaacattttacccccattttgtccccagtctgaatctgaca

SEQ ID NO: 225388 - DNA, 582 bp, Homo sapiens
gggtaattatccagtcacaaaaataaccactctgcatcgaggctttaaacaaagtgaggaaggagggcctggtgaacactgaggatgagagaaaaagactaaaacgaaaagttcataatgaaagcctctatttttaaaaactcaaatgtcaattttccaaaatagaacattttacccccattttgtccccagtctgaatctgacatgtttctcctctgcactgcctttctgtgaagagctgtgttcttttccttgagagtcagcgtggtgtgggaaagaagggtgggctttgtagtgagagaagactaatcctagctctgctcccttcaarccacatgaatttggctacgtaaacactcaaaagcttggagctcagaagctaaggtgatcaaatcctttccatttgcctgggacttcccttcttcccctgctgttttttgtttcttttattttctatttatttatttatttttttctgagacagggtcttggtttgtctcccaggctagagtgctgtggcataaccatggctcactacagccttaaccttctgtctcagcctcctgaatagctaggaccaca

SEQ ID NO: 225389 - DNA, 582 bp, Homo sapiens
gggtaattatccagtcacaaaaataaccactctgcatcgaggctttaaacaaagtgaggaaggagggcctggtgaacactgaggatgagagaaaaagactaaaacgaaaagttcataatgaaagcctctatttttaaaaactcaaatgtcaattttccaaaatagaacattttacccccattttgtccccagtctgaatctgacatgtttctcctctgcactgcctttctgtgaagagctgtgttcttttccttgagagtcagcgtggtgtgggaaagaagggtgggctttgtagtgagagaagactaatcctagctctgctcccttcaagccacatgaatttggctacgtaaacactcaaaagcttggagctcagaagctaaggtgatcaaatcctttccatttgcctgggacttcccttcttcccctgctgttttttgtttcttttattttctatttatttatttatttttttctgagacagggtcttggtttgtctcccaggctagagtgctgtggcataaccatggctcaytacagccttaaccttctgtctcagcctcctgaatagctaggaccaca

SEQ ID NO: 225390 - DNA, 490 bp, Homo sapiens
cttcaaaaattttaaattttgttcagtaattatttgatcacattaaggatgattttgttgttcaaagcatccacagaattacttggaagctttagtaagagataagttaatattacatagatgctragtggtttgtgctaaagttttgctgttgccatcgttgcctgttttttatttttttattttttatttatttattttgttttgctttgttttgtttgagggtttgtggtggaagggataaaagaaaaaggttgagtaggatgtctgggcaaatgacagagtccagtgaaaacagcttatgtggaggtacacctacaccatgccagaagtgaccaggagaaaatatgctcttgcgaatttctgggaaacttggagagaattgtaaacttctacagaacataaattggagattaaagtcatcttatgcacctaggtggataaagtctaaagatttttgttgtaatctgggctagaaatagtcacattg

SEQ ID NO: 225391 - DNA, 542 bp, Homo sapiens
ttaatctaaattagtaatgtattaaaacatgtttagctaacttttcagagggtatgaaagcctaatttgtagcactttccagtttttgtggtgtaaatacttccatggtggtcattttcaggcaagtgacatcaattggttagcaaaattcctgaaaacttagcaatgtgttctcatgagccagcataaccgggccctagcatgccactggaaaccaattataatcatcccactgcccctgaaagtgattcatgtaraaacaggcatgtgaacgcttctagccagttaactgtgatgagatgtgaggaagagctgagaaaggttttcttagtcatagaaagaagctcataggaaagacagatctttctccctccatgggacaagctcatattattacatgacacatggagccacgttagccctaactttcactcctactccatcagtctcaagcaagcctggatttcggtgaccaatttaggcatgaactactttggcttattattccagaaggctctctccagtgcctagtgagtgagtat

SEQ ID NO: 225392 - DNA, 398 bp, Homo sapiens
tatgtttatgactttgtgtattaaaattccttaaacagaacacaaaatgctytaagtataaagtaaatattatataagtagatagatatttaaattaagaatttttgttcatcaaaagataccatcataaacaagttacagagttcacaaagatatttgcaatagtatacatataacaaaaattcaattccagaatatagagaaaactagtacaaatcagtttaaaaaaacagaaaactcaatataaaaataagcaaaaaattgacagacactttacaaaaaataaagcacacgcacatgcaaatgaaaccatgctcaacatcatcacgtcaaggagatgcaaattaaaactgtgagaaaaaattcacattcatacaacggaaaggaaaagatagatg

SEQ ID NO: 225393 - DNA, 571 bp, Homo sapiens
attctagttaagagaaaccaaagtttacacaaagatttgagctataggaatgtgtggaatggagaatggattttagaggtgaaataattaggctttatatttggttgcataggcaatttgagaaggggagggaaggtcactaagaagggacagaggcttttatcctctattgctggagttggcggtggcttaaaaatgatgtggttgaaaaaaggaagagctttatcaaactttttttatacaaatgaaagaaaacatttggaaggatagtagtgtttcacaatccaaggaaaaggtcaacagccacatctgaggaataaggcagttccagtgtaaaaataattattcactatcccttaaataggtgayttactacaaatatgacttggttccccagtgtcctagtctctcgtatcttatttgaaattattagaagagatagactgataggccattggccagactattatgtctttgagccagatattcagccatatgggaagtggaaggaattcacagaaaagagaaaggacctactaaaggtggcaatgttattaattttgaataagca

SEQ ID NO: 225394 - DNA, 574 bp, Homo sapiens
agaaggctttctgaaagagccctctccttggaggaaaatggggttggatccaacttcaaaacctccactctgagcgttagcagctttttcaagcaggtatctcttcacattacagtgtgtctggatttttccccatactggcatgggcactggaacccacaggaggaggatacgtagtgattaagagagcaaattagttaagctcactctcttagttcattttctgctgcttataatagagtatctgaaactgggtaatttaaaaagaaaagggatttgtttctttcagttttgaaggctgaaaaatccaaagttgagggcccacccttggtgagggctttcttgctggcggggcctctctgtagagtcctgaggtggagcacggtgagcagctgagcatgctagctcaggtctctcttcctsttcttataaagccaccagttcccctcccatgatgcagattaatccattaatctgtgaatggattaatccagtcatgagggcagagtcctcatgattcaatcacgtcttaaaggctccacttcccaacactgccaccatggggaccaagctt

SEQ ID NO: 225395 - DNA, 469 bp, Homo sapiens
ctcatggaagggaagcttccaccaacccttaatgagttcctgtaccatatggagttgtcaaatgctccataccgggcacagcggctcacacctgcaatcccagcactttgggaggccgaggcgggaggatccattgagcccaggagttcaagaccagcctaggcaacatagcragaccctgtctctacaacaacaacaaaaaaattagccaggggtgggggtccacacctgcagtcccagttacttgtgaggctgaggtgggaggatcgcttgagccaggaaggtcgaggctacagtgagccgtgatcatgccactgccctccagcctgggcaacagagtgagactctttcaaaaaacaaaaacaaaaaactctgtcctaagtatcagatgatgcggaagcccagtacttggttttactaggcttagcaagcagtcgcttatggaacagaagcttttataaacaaacca

SEQ ID NO: 225396 - DNA, 469 bp, Homo sapiens
ctcatggaagggaagcttccaccaacccttaatgagttcctgtaccatatggagttgtcaaatgctccataccgggcacagcggctcacacctgcaatcccagcactttgggaggccgaggcgggaggatccattgagcccaggagttcaagaccagcctaggcaacatagcaagaccctgtctctacaacaacaacaaaaaaattagccaggggtgggggtccacacctgcagtcccagttacttgtgaggctgaggtgggaggatcgcttgagccaggaaggtcgaggctacagtgagccgtgatcatgccactgccctccagcctgggcaacagagtgagactctttcaaaaaacaaaaacaaaaaactctgtcctaagtatcagatgatgcggaagcccagtmcttggttttactaggcttagcaagcagtcgcttatggaacagaagcttttataaacaaacca

SEQ ID NO: 225397 - DNA, 469 bp, Homo sapiens
ctcatggaagggaagcttccaccaacccttaatgagttcctgtaccatatggagttgtcaaatgctccataccgggcacagcggctcacacctgcaatcccagcactttgggaggccgaggcgggaggatccattgagcccaggagttcaagaccagcctaggcaacatagcaagaccctgtctctacaacaacaacaaaaaaattagccaggggtgggggtccacacctgcagtcccagttacttgtgaggctgaggtgggaggatcgcttgagccaggaaggtcgaggctacagtgagccgtgatcatgccactgccctccagcctgggcaacagagtgagactctttcaaaaaacaaaaacaaaaaactctgtcctaagtatcagatgatgcggaagcccagtacttrgttttactaggcttagcaagcagtcgcttatggaacagaagcttttataaacaaacca

SEQ ID NO: 225398 - DNA, 573 bp, Homo sapiens
ggacagatagttggtcaccatcttcaacacaaatcatggctggaaaagggccccagtagggagtgcctttctcactcaccaatcaccaaggctagaagatagtctgcagattctttcagatgccacaaagctgtgattasagctgcccattggcaaatcaggtactagtttttgttaatcacattgcagtcttccttcactgtttcttcccctggtcccggaattaaggctgggctccatttgacaagttatcttctgtgcaggtagagcagcaggctgtgttagctcacagcatctactcagtaggcatggaaatatccactgaatgggactgagaaagtggaatgggaggggaacgtgtgaagaacaggaagtttgcctctttatgtccaaagtctgtctacttagagcaacaggatggtgatgatgctttctggttaaagatgtcatggcaacagtcttccctagacagctctctagcaatagccagtggcatgtaaaccctgcatttttgcactgtatccagtgtttgcaactcccttgtagaactttccctgaagtcagcaagaaccc

SEQ ID NO: 225399 - DNA, 594 bp, Homo sapiens
ctggtcttgggcaggtcagaaggacagatagttggtcaccatcttcaacacaaatcatggctggaaaagggccccagtagggagtgcctttctcactcaccaatcaccaaggctagaagatagtctgcagattctttcagatgccacaaagctgtgattacagctgcccattggcaaatcaggtactagtttttgttaatcacattgcagtcttccttcactgtttcttcccctggtcccrgaattaaggctgggctccatttgacaagttatcttctgtgcaggtagagcagcaggctgtgttagctcacagcatctactcagtaggcatggaaatatccactgaatgggactgagaaagtggaatgggaggggaacgtgtgaagaacaggaagtttgcctctttatgtccaaagtctgtctacttagagcaacaggatggtgatgatgctttctggttaaagatgtcatggcaacagtcttccctagacagctctctagcaatagccagtggcatgtaaaccctgcatttttgcactgtatccagtgtttgcaactcccttgtagaactttccctgaagtcagcaagaaccc

SEQ ID NO: 225400 - DNA, 579 bp, Homo sapiens
ggtcttgggcaggtcagaaggacagatagttggtcaccatcttcaacacaaatcatggctggaaaagggccccagtagggagtgcctttctcactcaccaatcaccaaggctagaagatagtctgcagattctttcagatgccacaaagctgtgattacagctgcccattggcaaatcaggtactagtttttgttaatcacattgcagtcttccttcactgtttcttcccctggtcccggaattaaggctgggctccatttgacaagttatcttctgtgcaggtagagcagcaggctgtgttagctcacagcatctactcagtaggcatggaaatatccactgaatgggactgagaaagtggaatgggaggggaacgtgtgaagaacaggaagtttgcctctttatgtccaaagtctgtctacttagagcaacaggatggtgatgatgctttctggttaaagatgtcatggcaacagtcttccctagacagctctctakcaatagccagtggcatgtaaaccctgcatttttgcactgtatccagtgtttgcaactcccttgtagaactttccctgaag

SEQ ID NO: 225401 - DNA, 364 bp, Homo sapiens
tcgtcaaaacaagcaagcgggagggtaagagacagaaagcaagacagaggccagggtctttcacagcctaatctcaagagcagtacctcatcacttttgtcctattttgacaaacrtcgtattgacttttgtcactacatcagaagcgagtcactaggtctagcccacactcaaagggagaggatttcacagagcaagaatatcaggaagcagaatcattggttatttcattagaagctgctggcacagttcttaatgaagctacaaaacattgaactgggaggaatatgggggtaggagggtgacagggagggcaggttaattttgtggatgctgaggacaacgtgcctcatgaaaagtgttc

SEQ ID NO: 225402 - DNA, 557 bp, Homo sapiens
agtgaatcttatgctttattgaacataaaaatcacctggaattgctgacttaaaatacagttttccaggctataccacaagagatgctaatacaggactggggtaggtccaggaattcgaatttttatctaagtagctgatgacttaatgcaaatgatccagcagccacactttgcaagctctacgctatgattagttgtggtttgtagtcccaattgtatatcataattatctgctgatctgaaaaaaacatagagcttctctacccactccttaccaccagtccatcaccaccattctgactccttagtcacaatgggtattgacattttaaataaatcccaaggctcccttccgggaraataaagaggataatatttataaactattttgagttccttagaagaagggtatcttagctcattaaggaaatattatcatgatataaatctaacatcatgaaacttatcttggacatgtcaaatttggtctaagaatcaaatgtagaggaaaataaaacccacacacagtacctgcatggaaacggaacctgtgca

SEQ ID NO: 225403 - DNA, 477 bp, Homo sapiens
tgagaggtctgttaaattatcaagtagtgatgttgaggtgtaattggaaaagtcaacctggaatttatggcagaagttgaggctgcagatataaacttgtaattttaaaaatgtatatttaaagccatgggagtgaatgagwtcatttgagattgaatgcagattgagaagagatttagaattgaactccagggcactgcatagcaggaggaaaacctagtaaaagtggtatctgtaaaatagaggaacgaactgtcacaatttgcctggtactgaggattttctcagtacatgagactttaagagactgggacaccctgagacaattggttgccttccatgggaagaaagtatgtcaagagggagagagtgaacaactgtgtccaataaaccaggactgagcaaaaaccattgaatttggcatcatgaagtcttaggtgactttgacaaggcttgtctgttgtgaacagccaagta

SEQ ID NO: 225404 - DNA, 576 bp, Homo sapiens
ctgtgtgtggaaaggggttatcagtttggaaatctgtgaccattttaacttattgcaatataataaatcatccgaggtttatgataggtaaaggtaaatttaagtcatttaaaatactaattcttttcattttctctcatgtaaggaaataaactgcttctgagctgcagctttatagtttatactttttttttttttttgagatggagtcttgctctgttgccaggctggagtggagtggcgcgatctcagctcactgcaacctccgcctcccctgctcaagcgattctcccacctcagcctccccagcagctgggactaccggtgtgtgccaccatgcccagctaatttttgtatttttagtagagacggggtttcaccatgttggccaggatggtctcgatctcctgactttgtgatcagcctgctttggcctcccaaagtgctgggattacaggtgtgagccaccatgcccggtctatactatgtgttttataaarcacatcttccagacagcatttcacaaactgattagaacaacaaatcccattatttctccaatgcctgccatttctc

SEQ ID NO: 225405 - DNA, 577 bp, Homo sapiens
ctttgttttctgctctctttcttttttttttgccttaaggacatctgacccggctatgattcctggacaccagacactgtattcctagacacagactacattctaggacattggattcacctgttagcttctgtttcccataattgtacagttatgctaaaagtgggcagtgcaattaaatctcttaatgtctgagtaaagcacaatttacacatgtagaaatttccaataaagatgactattttggttaaaaatccttttgcagatggtctcagtagcccaagttgtatctcatctacccaaattgtatctcatctaccatctgcgacaaatccaagttaaaaatctctgtttgtactctttccctctctcactggcagactgataagtatctatctctattaggtacaaaatattctgatgtcacctaataacaaarccaaaggtctgtgatgcagcaggtatctctgggaaccagttccactgtaactgtgattcatcagacagtagccccaaggttgggatgggataggatcttggaaaaataagatcctcagaggacaaatataaaagtctt

SEQ ID NO: 225406 - DNA, 377 bp, Homo sapiens
gtcatttgttcttgccagggttgggggcaatgtgtgagcaaggtacaaagtggaagctggatgaaactataaacatctggaattcttttttctggaatgtgaattagaaagagcaatttaactgctaccttgaatctrtgtaaaaaagagatttaaattttactaaggaataaattagtattttccccaaaatactctcagatggtcattaaaccatctgagaattgaggtctccacaagtttagattaaaattacttttagaatttaaaatcctaacttcagggaggaatggtattttcaaaaggtaaatttaaatagagaaaacttagagccccctccctgttatcctgaaaaaaagtagtttgattaaaaaaat

SEQ ID NO: 225407 - DNA, 555 bp, Homo sapiens
gatccctgggaaatctgcatgaattaataaacaaataccctcttcacataggaggcctctatggcatctagaaattgagattaagtgcctgtgttctagagtcatcttaatcactgcatattccttcatgatccaaaacttgcagattgaaaatccttctctttggtgccctgtgtgagacacagtaatctttgcaaagagcctkggagtcagctttctacccagtaaaagtgcttgaggaaaggaagtacaaagaggcttaggtatgagtcagaggagggaaaataaagggggaaaaaatacagatgaaattctcagaaaaattcccttccttgatggacagatattcctttattcttcatacataaggtttgggatcaggtattttcccatcatgggtcaacatgcacaaattaatctgtgttgagcatgcctttttatcctgctgctttgacatctgggggctcactgatgcaggaaagactgccccttccagtgctacccagttcctagagacagttaattatttgcctctgagcccactttttgaataca

SEQ ID NO: 225408 - DNA, 452 bp, Homo sapiens
atcctgtcatttgcatcagcgcttttacttttaaaatctcttaagtcttgctttaaactactcttcttggagcatttcagctctagggaccccaatctgcagcaacttccaagcacctgaaaaattgctggcctctctyggaactacctttttcaacatcactgtgagtctgtgattatcctcaattgcttcctaatccagctccaaatgagattcagagcattcatatgttggtgggcattgattttggtagtggagcagcttgatacaaaacaaaaaaaatcagacacagagacttaatcattaattatctgaaagctttcatcagatgtagggattgtcatatccatttcaaacctgctgcacgttatttcaacaaaatggttgcaggggagttgcttatggctctgttagctggggcttccttttattaaagtgctgagaaaaagaga

SEQ ID NO: 225409 - DNA, 561 bp, Homo sapiens
acatacaactaagggaaaataaaaacttgtcacagatattgaagtcacacagttcaagaaacacactgagacccaaaagaataaaagtcatgcatttgcctttcagaaaaaaagtggcaagaaatccagccccctggctctatgaagaagggagtttgggcaagacaagttggagtgtcttttataagccatcactaaattgaatagttttcatttttagackgtttgctattttttaaactgacctcctgttatatcctctagttgtgacaatcaaataccaaaacaaaattgagtattagaaggggaagatctccatcccctccttccaaaactaatatcattctaatatcgtccagggttgaatctgaccagacttgctgcagttgagctggccccagatgcgattttgctttaaaccagaggctgcaagctgacgatctatgggccctcttctgctcagtgatgtatttgtttggtctgcactaagctctgaatcaactgccatcatgtataatttcagagattttataaaattcagaagctctagcagcattcagt

SEQ ID NO: 225410 - DNA, 512 bp, Homo sapiens
gctattttttaaactgacctcctgttatatcctctagttgtgacaatcaaataccaaaacaaaattgagtattagaaggggaagatctccatcccctccttccaaaactaatatcattctaatatcgtccagggttgaatctgaccagacttgctgcagttgagctggccccagatgcgattttgctttaaaccagaggctgcaagctgaygatctatgggccctcttctgctcagtgatgtatttgtttggtctgcactaagctctgaatcaactgccatcatgtataatttcagagattttataaaattcagaagctctagcagcattcagtttcaggtaaatcgtggatgtccctttttccacagggcatttcctggccagcttgcccctgggctgcttcacccatttgcattaagccccctggcccttttaggctttcgaattttcaacccctgctttaaatggtaaactaccctctaccctgtaccctctggtcctgagacccaaaa

SEQ ID NO: 225411 - DNA, 512 bp, Homo sapiens
gctattttttaaactgacctcctgttatatcctctagttgtgacaatcaaataccaaaacaaaattgagtattagaaggggaagatctccatcccctccttccaaaactaatatcattctaatatcgtccagggttgaatctgaccagacttgctgcagttgagctggccccagatgcgattttgctttaaaccagaggctgcaagctgacgatctatgggycctcttctgctcagtgatgtatttgtttggtctgcactaagctctgaatcaactgccatcatgtataatttcagagattttataaaattcagaagctctagcagcattcagtttcaggtaaatcgtggatgtccctttttccacagggcatttcctggccagcttgcccctgggctgcttcacccatttgcattaagccccctggcccttttaggctttcgaattttcaacccctgctttaaatggtaaactaccctctaccctgtaccctctggtcctgagacccaaaa

SEQ ID NO: 225412 - DNA, 386 bp, Homo sapiens
ggaaaagagaaccccaaagcatgagattttaaattgaaaaatagacaaaaattcttggatttaatatttacaagaaatctatcttctgaggtaccaacaatatgaatcaagtgcttaaaaagcccacacacatagagcaccwgacaaacaagggtctacgcaaggagaatcctatgtgtgggacaggattaaaagctccaaatatttaaccaggaacgggattaggaaaggaagcatgataggacttcaactgggtgaaggccattatgatgctgaagggggagcaaactcactcggtatgcttccatgagcaaaccagggacctgcaggttttaatttaagaaggcagtttttggttcaatacatagacaaactttctaaccaag

SEQ ID NO: 225413 - DNA, 386 bp, Homo sapiens
ggaaaagagaaccccaaagcatgagattttaaattgaaaaatagacaaaaattcttggatttaatatttacaagaaatctatcttctgaggtaccaacaatatgaatcaagtgcttaaaaagcccacacacatagagcacctgamaaacaagggtctacgcaaggagaatcctatgtgtgggacaggattaaaagctccaaatatttaaccaggaacgggattaggaaaggaagcatgataggacttcaactgggtgaaggccattatgatgctgaagggggagcaaactcactcggtatgcttccatgagcaaaccagggacctgcaggttttaatttaagaaggcagtttttggttcaatacatagacaaactttctaaccaag

SEQ ID NO: 225414 - DNA, 386 bp, Homo sapiens
ggaaaagagaaccccaaagcatgagattttaaattgaaaaatagacaaaaattcttggatttaatatttacaagaaatctatcttctgaggtaccaacaatatgaatcaagtgcttaaaaagcccacacacatagagcacctgacaaacaagggtctacgcaargagaatcctatgtgtgggacaggattaaaagctccaaatatttaaccaggaacgggattaggaaaggaagcatgataggacttcaactgggtgaaggccattatgatgctgaagggggagcaaactcactcggtatgcttccatgagcaaaccagggacctgcaggttttaatttaagaaggcagtttttggttcaatacatagacaaactttctaaccaag

SEQ ID NO: 225415 - DNA, 388 bp, Homo sapiens
ggaaaagagaaccccaaagcatgagattttaaattgaaaaatagacaaaaattcttggatttaatatttacaagaaatctatcttctgaggtaccaacaatatgaatcaagtgcttaaaaagcccacacacatagagcacctgacaaacaagggtctacgcaaggagaatcctatgtgtgggacaggattaaaagctccaaatatttaaccaggaacgggattaggaaaggaagcatgataggacttcaactgggtgaaggccattatgatgctgaagggggagcaaactcactcggtatgcttccatgagcaaaccagggacytgcaggttttaatttaagaaggcagtttttggttcaatacatagacaaactttctaaccaagat

SEQ ID NO: 225416 - DNA, 574 bp, Homo sapiens
ttgttttaattcatttgttggcaaactatgaccagacctgacctcatctggccgtgaatgactgaacatgagattatttgcagtcaaatattcctcttagtgtgaatattcttgcattttattatatgactatagaactattaatgtattttactacaggtgctactccagactctgctacagatgttatataataatccaccttctatagtaaaaaaaattctgaggctgggcgcagtggctcaygcctgtaatcccagcgttttgggaggctgaggcaggcggatcacaaggtcaggagttcgagactgcctggccaatatggtgaaaccccgtctctactaaaaaatacaaaaattagccaggcgtggtggcacgcacctgtagtcccagctactcgggaggctgaggtgggagaatcgctgaacccggtaggcggaggttgcagtgagccaagatcgtgctactgcactccagcctgggcgacagagtgagactctgtcttaaaaaaaaaaaaaaaagaaaaaaaacttatgaattttggaacacatttgaataaagtcaaggtcctgca

SEQ ID NO: 225417 - DNA, 448 bp, Homo sapiens
aaagagctaccattttggtggtgagagagatactaaataaccagtaaaaatataatggttttgtttttgttttttgagacagagtttcgctctgtcacccaggctgcagtgcagtgatgcgatctcagctcactacaacctccgcctccccggttcaagtgattcttgtgcttcagcctcccgagtataggtgcgtaccactacgcctgactaatttttatatttttagtagagacgggttttcgccatgtttgccaggctggtcttsagcccctgaccttaagtgatctgcccacctcggcctcccaaagtgttgggattacaggtgtgagacactgtgcccagccacaatataatgttttatgtattattattggagctatgtacaaagtgcagtaggaacagaggggaatagccccgaggtttaccgaacagggtcagggaattc

SEQ ID NO: 225418 - DNA, 507 bp, Homo sapiens
tgaactctttctattattctgtcagggcggtattggcaactttacctcatttaatttgggccatcgttagctccaagttttaaggctccaatgcagaagaatgttaggatgggccacaagcatccttgccaggatgttaaatcatgagtcatggaagactcacactgatgtgaatccccatatcaataaactctcccccatccagatttgtactccattcccctgtccatgcaaacaataccttcaatatacacttccatacttgctctcctggctcctactagtacatattacccgagtactgcaggttttgtggggaggaggataatacattttctcttattatagagatagtacttctgggcctagaccttcctgagaccaaacctagttatttgtctagatgcagtaagaataaacaaaggcagattttgagaagaacaagtatcatcttgcaatctgtctgccttaggtgagacctttgcatrgtttccaggcagtggaatt

SEQ ID NO: 225419 - DNA, 598 bp, Homo sapiens
catatacttgttgaatgaaatacttcctgtgggatttcatgtttgatttctgttgaaattcagtaggaacatgttatgtatagatatagaattttgttcacacgtacatatttcgttaaatttgttgcataatgtgaaatgaactttcaattctattgaaattccttggctgaatagagggctttgtttgaggaggttggtgtacactctcggttatttgctaatccaggttcttcggtgaatctgttttggttcatgtgatttgaatgccttttctggtgttagcttaggagtaaattcgttgtcataaactatccatgagtaatcttgttcatgtctttagcctgcatgttgaaagtatttcatagtgctatgaagtatattcaaatactagttttcatttttcatgttatgattttrtgaaatgtgctttttaatttgatatactgcaaaggtgatatggtttagctctgtgtccccacccaaatatcatgttgatttgtaatcctaagtgttgggggagggacctggtggaggtgactggatcatgggggcagattttccaccttgctgttctcatgatagtgagtcctcatga

SEQ ID NO: 225420 - DNA, 598 bp, Homo sapiens
catatacttgttgaatgaaatacttcctgtgggatttcatgtttgatttctgttgaaattcagtaggaacatgttatgtatagatatagaattttgttcacacgtacatatttcgttaaatttgttgcataatgtgaaatgaactttcaattctattgaaattccttggctgaatagagggctttgtttgaggaggttggtgtacactctcggttatttgctaatccaggttcttcggtgaatctgttttggttcatgtgatttgaatgccttttctggtgttagcttaggagtaaattcgttgtcataaactatccatgagtaatcttgttcatgtctttagcctgcatgttgaaagtatttcatagtgctatgaagtatattcaaatactagttttcatttttcatgttatgattttgtgaaatgtgctttttaatttgatatactgcaaaggtgatatggtttagctctgtgtccccacccaaatatcatgttgatttgtaatcctmagtgttgggggagggacctggtggaggtgactggatcatgggggcagattttccaccttgctgttctcatgatagtgagtcctcatga

SEQ ID NO: 225421 - DNA, 459 bp, Homo sapiens
accatttttggctatgaagagtatgtaaatgtgtgctgggttatctatgagaatcgcgactttcaccagcatgaaaaaatgagaggataatggtttctttagaccagtgcccgtttcaaaagggratagatgggaaatcagttttcttctagcagctgaaaatccaggactgaaatcttcagccttgcaaagttacaatataccataaggaaaggtgagcaacacataacatttcaatgcagtggctctcaggaggggagaagatgggtaatagccgacagcatcatctgtaagcggtgcgcccctcctcatcatttcacttattgaacccaatggaatgcagctatagtaatatttttgagaagatcaaatttccaataagcttgctctaatattttgggataatcatgacatttaaggatgtcttccttcgggctgctgggtaccacggtcaatcat

SEQ ID NO: 225422 - DNA, 478 bp, Homo sapiens
caataacaccaaatgcatactccatagggttatagtgagcattacatatgrggaggcacataaaacacacatagtataaagcttgtgatgagcacccatgatgcattagccatcatgacttcatcgtgatcattattatggatttgcagatgatgggctgggagcagttacgatccagatacaggagtacaagtgagagatgataaagacctgaaatgggcaataaccgtggaggcggagaagaggtgataggtttgagaaatattttgagtttagcattggcaaaacaggaaaactgattgtacgtggaactaagaacaaaagagacacaagagaaatcgccagattttctagcttaggtgactggtggactatttgctttcaactggtacagttaatgcaggaggaaacgctcatttagaaagaaaaagtgattatttctatgagaggtaagtttgagatgcctataggaatacag

SEQ ID NO: 225423 - DNA, 478 bp, Homo sapiens
caataacaccaaatgcatactccatagggttatagtgagcattacatatggggaggcacataaaacacacatagtataaagsttgtgatgagcacccatgatgcattagccatcatgacttcatcgtgatcattattatggatttgcagatgatgggctgggagcagttacgatccagatacaggagtacaagtgagagatgataaagacctgaaatgggcaataaccgtggaggcggagaagaggtgataggtttgagaaatattttgagtttagcattggcaaaacaggaaaactgattgtacgtggaactaagaacaaaagagacacaagagaaatcgccagattttctagcttaggtgactggtggactatttgctttcaactggtacagttaatgcaggaggaaacgctcatttagaaagaaaaagtgattatttctatgagaggtaagtttgagatgcctataggaatacag

SEQ ID NO: 225424 - DNA, 570 bp, Homo sapiens
agactgatccacacaaggatatgtcagagtcccaatcattacaagaatcaaaggtcatcaggtaggaagaaaacagaaccaagaatttgctcaagagccatagaaccatgactaggggagtgttgggtactaagtcagtgcttttaggaattctctcaacccttaattctcaggactctggggtcactagaaraattcatctctccccttagaagaggtcagaaaatcttccaggcagaagagattccaaagggtgggctggttgggtactaagtcagttctttcaggagttctctcaacccttagttctcaggactctggggtcactagaagaattcatctctctccttagaagaggtcagaaagtcttccaggcagaagaaattccagagggtgggctggttgctcatgctaggacatttgagggactgcccccaggcaacataaacgtagctgcaacctctgactttgacgttagcccagatagaatagtttgtagacacactagtgtacagggcaaaggatcttgaaataatgaccaactaggtcattaattcttaaactgatacc

SEQ ID NO: 225425 - DNA, 570 bp, Homo sapiens
agactgatccacacaaggatatgtcagagtcccaatcattacaagaatcaaaggtcatcaggtaggaagaaaacagaaccaagaatttgctcaagagccatagaaccatgactaggggagtgttgggtactaagtcagtgcttttaggaattctctcaacccttaattctcaggactctggggtcactagaagaattcatctctccccttagaagaggtcagaaaatcttccaggcagaagagattccaaagggtgggctggttgggtactaagtcagttctttcaggagttctctcaacccttasttctcaggactctggggtcactagaagaattcatctctctccttagaagaggtcagaaagtcttccaggcagaagaaattccagagggtgggctggttgctcatgctaggacatttgagggactgcccccaggcaacataaacgtagctgcaacctctgactttgacgttagcccagatagaatagtttgtagacacactagtgtacagggcaaaggatcttgaaataatgaccaactaggtcattaattcttaaactgatacc

SEQ ID NO: 225426 - DNA, 622 bp, Homo sapiens
gtgctgtggacagagtcctcaaagttttgtgtttcttgaataacaatgacaagccacacttccaagtcatttctaggcaagcacaaatgtggcatgaaaaaaaaatcaactctaatgactaagagaacattttgaataaatgaccttttgatatcacatagtaattataattaactttaaaggaccggcatctgatacatagtcctgtaaaaaatccttatagttgattccaagttaatggtaagattggacacatgaacacagtaaagtacagcaactttaacaaaatcacgtttcaagtgccctgatcccttggcctctcctgccactgctcaaggttttgcaatctttytcaagtgctttttctaatgaccctaacacttgactatagataaagcaacacatttgtccagttaaatattttctcttaaatattccccagtgcatcccaaaacaaaatagtatctaggattaattaatattaatattaatacataaatattacttttcaataagatgtaggcatgagccctttaatgaatcgagtctaaggacactacctctttgtgcaaaaggcatatcatttgtcaattcagtgttttctagttaaaaaggaaccctt

SEQ ID NO: 225427 - DNA, 473 bp, Homo sapiens
ttatccatttcttctagattttctagttatttgcctagaggggtttatagtattctctgatggtagtttatatttcactgggcacatgtgactgagcttattaaatgcagctagtccgaacagactgtgctaaaattataaaatgtacactgaatttccaagacatagcataagaataatataagaagatctcattaataatttttatattaatattgaagtgatcatattttagatatattactttagaattaattttaactatttcttttaaatgttttatgtggctactagaagatttaaaaatacatgtgttgctggcatttayacttttcattgagggcacagagcgggcaaatttaaataaccacctgtcttataacaaactgtagtaagtgtcataaaattcaaatctccttccttcatcagtattaagcatgtctgacctatgtcactggtgatgtgaagaattc

SEQ ID NO: 225428 - DNA, 473 bp, Homo sapiens
ttatccatttcttctagattttctagttatttgcctagaggggtttatagtattctctgatggtagtttatatttcactgggcacatgtgactgagcttattaaatgcagctagtccgaacagactgtgctaaaattataaaatgtacactgaatttccaagacatagcataagaataatataagaagatctcattaataatttttatattaatattgaagtgatcatattttagatatattactttagaattaattttaactatttcttttaaatgttttatgtggctactagaagatttaaaaatacatgtgttgctggcatttacacttttcattgagggcacagagcgggcaaatttaaataaccacctgtcttataacaaactgtagtaagtgtcataaaattcaaatctccttccttcatcagtattaagcwtgtctgacctatgtcactggtgatgtgaagaattc

SEQ ID NO: 225429 - DNA, 518 bp, Homo sapiens
cctctggtctaattcattatcagcaaacgtgctatatctcactttwaaaaaaaaggcaaacccttttttgccctatacttcgtaatctccctccaaagtctatcctattttctccccctttgcagcaaaaattgataagacattggaaaagtatttgagtgttagtttgcatttttaaagagtaatatgaaattgaagacagaccatccagtaatgaataagaaataaacatttttccccctggtattttcctgttacttacagaagctaagggttgggagttcaggattctctcatttcaactcttctaatgaggaacaaagatcaaacacacccattggtaagcaacttatattttacaaaaatgcacctaaaggatgttagagcctattactaagatcccaggtgtggtatttaaacagtgatatctaaattagctttaggatataagaagcttgttgaattgagggttttatttggcattagcaccttaaacaatttagatgtgtacatttttg

SEQ ID NO: 225430 - DNA, 570 bp, Homo sapiens
acttactggatgaatgattatcctgtcttttctccttttcttagagaaaacagccttcttaagacagatacccctcacacacgccaactaatcaggttttcataacattccccacattacttttcccccgtggaattccagcagcctggagcggcagatccctctcacctctgtaagtcagcagcgcctcatccaggaactcagacgccttccggaaatgctgggaaatgtccacctcaggaaagtcatccacctctacacccaggtactggatctccaggccagtgtagaattcggggccagtgtaaacgccggtgccatgcgcagcattcagaatgtgggtgattcccagcctcttcagcctccccttgttcacagccacactcctgcgggaagagkcagggacctgtttgcaagagtcggaactagaaaggtgtgtcaccactgtgacggtgagcctgcctcagccagtctagggccacagctgggcaagtgcctccttttctgcccctggttgtctggggatcactgcaaataccattatagaaagagttgatgacttggcctcag

SEQ ID NO: 225431 - DNA, 538 bp, Homo sapiens
tacaatgaaaaatgatgatatcatgaacctacactcaccaagacagtgcaatattggcaaaaagatagacaagtggatcaatggatagttttttaattgtgatgagtaggtctctgtagaaatgagtgcccacattaagagtgactgactgtgatgcttggtgctaacagatttagcaccaagatttaacatcacttgtgtttttgcaagggttgttaatgttttgaaagtgatctggttgcaaaggcccattggttttcaaagttccattggttttatgtgttcttcctctaatcctaactttcctgtatgtcctattagttttagtgtgtgattttgaagaatgcaaggtttttcagaartgcatatatattgttatacctgagatgcctgtattataagtaacaactgccatatacaaattttacaaatttaaaacaaaaaaccttaactctgtctccactcccacatgtcctccattccatcatcctgttcatacacggaatcaagagaaaatgttttcaagtagaaagagcaa

SEQ ID NO: 225432 - DNA, 526 bp, Homo sapiens
aacatggtgaaacactgtccctacaaaaatacaaaattagccaagcgtggtggagagtgcctgtaatcccagctacttgggaggctgaggcaggagaatcacttgaacctgggaaatggaggttgcagtgagctgagagcatgccattgcattccagcctgggcaaaaagaaygaaactctgtctcaaaaaaaaaaaaaaaaaccaaaaaaaaaaaagtagaagtatttaccaaatgagtgaatggcattcattcatagtataattcactctgttagtttgactcttttacatatggattgcaaataaccctgggaaaagtaaaactttcagcagtaatttatgcaatattgccttctaatatacacctaatttactgatttatttcttgtattgtcttcttccccctactagaatgtaaggacctatgattctcagcctcccagcccacagacaggtggcaaaggttggccatgagctctcattctaatctcaaaacgtgactcagggcctttctgacaacaggt

SEQ ID NO: 225433 - DNA, 602 bp, Homo sapiens
gtaaatgtgacacaatgtgtttatccattcactcgtcattggacatctaggatgtttttaggtttttggctattacaaataaacctgctatgaacattcatgtcccagtctttgcatagacataggcttttttttttcttttttgagatggactgtcactctgttgcctaggctgaagtgcagtggtgcaatcttggttcactgcaacctccacctctctggttcaagtgattcttttgcctcagcctaagtagctgggcttacaggtgcccaccaccacacccagctaatttttgtatttttagttaagatggggtttcactctgttggacaggctggtctcaaactcctgacctcaggtgatccacttgcttcagcctcccaaagtgctgggattatagacatgagccactgtgccctgcagacataggccttcatttctcttgagtatatacctaggagtagaatgatgggatcatgtagatataggtgtgcatgtttaggtagatgtatgtttaattttrtaagaaactgaaaaactgtaaaatggactattttacattcccaccagcagtatataagattgtcccaagtactctaca

SEQ ID NO: 225434 - DNA, 372 bp, Homo sapiens
tacgcctgtaatcccagcactctgggaggcctaggcaggcagatcctcgagcccagaagtgtgagaccagcctgggcaacatagggagacctcgtctctacaaaaaacagaaaaatcaccagggcctggtggtgtgcacctgtagccccaactactcggggggctgagatgggaggtcctacttgagcccaggaggtytaggctgcagtgagccgggatcgtgccactgcactccagcctgggtgacagactgagaccctgtctaaaaaaaaaaaaaaaaaaaaaaaaatttaaaagataaaaccgtgtgattacctgaaaagatccagaaatttagcaaattttcaactgccattcttgattttaaaacat

SEQ ID NO: 225435 - DNA, 582 bp, Homo sapiens
actgttttcagggacatccatttcaattgtgttttataagttaatacttcaaaaataaaacgagttctgaattttttagataaggaaaacagttttctaagtattttgcaaccaaagggcatgactgtgtatatctaagcccttgaactaaaccctttttctgggaattaggttttaagtgattttctgcttaaatagaatgaaaatcggaataggtttatttttaaatgtatattaaaagtgtcagtgcatagggactatttaatgattcctgtctgtaaggtaattttttttttttttttttttttgagacggagccttgctctgtcaccaggctggagtggaggggcgtgatctyggctcactgcaatctctgcctccttggttcaagcaattcttctgtctcagcctccggagtggctgggactacaggcacatgccacggtgcccagctaatttttatatttttagcagagacagggtttcacgatgttggccaggatggtctcgatctattgaccttgtgatccgcccacatcggtctcccaaaagtgctgggattacaggcaatgagccaccgtg

SEQ ID NO: 225436 - DNA, 586 bp, Homo sapiens
ccaggtttcatttatttcacagtgccagatgagggtttgaaatactcttcaccactggaagtatgaaactgtctctaagcagtttatttaaaatggaggcaagattgatttttatttaagtcaatattttccagaaattgatggatattggtcattataacagtcattcaaaagttctgctacaatcaaacaaatgaatgtagaaaaccaatattaacctaaacaaagaagtaatttaaataaatataggcaaagagaagtgcaatttgtgagagatgcaaggatccttagataactagccagagagataatggtaggagttatgtaagttccaaggccggatattcacactatcgatcagaactcggtccagatttcatttgaaagggaaggacactcagaccattgtagtgataagtcttgctacttcaagattttgaactcctaaaatgtctggaaaawtttttaaaaaacattgttatcttattttagggaaatgtggtgtttgtgtgtgtgtgtgtgtgttgctcaatttctaaatacaaagcatgacgctatatctatgaataaaattaaaaatttgatt

SEQ ID NO: 225437 - DNA, 543 bp, Homo sapiens
ttgtgttctttaagccacagtggcattagggcaacaggactgggagccataaaggaagccagctattcctgcaaaacaaatcacatcaaaactcaatgactgaagaccacagcatttattatagatcagaagcctccaggttgattgggtatttattgtgctgttgtctcactttttcatgtgtggacagctgcagtgtggatagattactccacttattttggctggkctttctctcatattttgaaatcagttgcaacctgcttagtttagcatactcttagctaagatgagtggactatgatccatatgatctcttagcctccagcaggctcagctgggcttgttcgtctgatagttactgggacctgaaaggaaaagtataaacatagaaaacctcttgaagttcagactcagacccaacacatctttacttctgccacatcctattaactgcagcaaattgcaaagccagcccagattcaagggatatagaaataactttcacctcttgatgggaaggagtagctgcgaagacacaaa

SEQ ID NO: 225438 - DNA, 613 bp, Homo sapiens
tgctattctgattaaataaatctacttgtttccaagcattatctatctaaattctgtctcatttaatttatagtacaataaaaaggagactagaaagcagaaaaaaagtcaaagtgaagagctaggaatagaagaagagacggaaagaaagaacagaagccatatatgtgattagttccaaggtggaataattttataatctgaaaactaacactctgcttttgaaatatatagtaaactatataatatgcaagtacatagagtagatgytaaacatattattatctacttcgtctatcaatatgcttcatctaacagtatactaccttataaataatagcataacatttataaaatttagaatatagaaagtatctattcataatatgaaatatattgtgcatgctaatatactagcatattagaattaggccctctagactgtgccatgaggaatggtgcattctggcccagatactacacttttcccacagtctttgcaacccccagaccaggatattcccttgggtgcctacaccaccagggccctgggtttcaagcacaaaactgggcagcctattgggcagacactgagctagctgcaggagttttt

SEQ ID NO: 225439 - DNA, 343 bp, Homo sapiens
cacaacatatcttttatagtattctggctgaaaatatataaacttgtttaaatcatgagattgtatcaaacaaaatcaaattgaagatttgtttttattattaaataaggggggggtggattgggagaactataattgaaaatgtcattgtcgataaaatggccttggaaatacttcaggttaaaatacactagagatacatgacaacttaatgtcatatgtaatctagactggacattgcactggaggagagaaaaagctattaatggacaagctaacaaaattaraatgtaatggcagattacagtactatactgagagtaaacatactgaagttgataac

SEQ ID NO: 225440 - DNA, 343 bp, Homo sapiens
cacaacatatcttttatagtattctggctgaaaatatataaacttgtttaaatcatgagattgtatcaaacaaaatcaaattgaagatttgtttttattattaaataaggggggggtggattgggagaactataattgaaaatgtcattgtcgataaaatggccttggaaatacttcaggttaaaatacactagagatacatgacaacttaatgtcatatgtaatctagactggacattgcactggaggagagaaaaagctattaatggacaagctaacaaaattagaatgtaatggcagattacagtactatacygagagtaaacatactgaagttgataac

SEQ ID NO: 225441 - DNA, 544 bp, Homo sapiens
catttgaagcaaattggaaaggtaaaaaagcttgataaatggatgcctcgtgagctgagtaaaaaaaaaaaaaaaaaaaaaaaaaaaaagaaaagaaaaattgtcattttgtagtgttatcttctcttattctatgcaaaaatgaactattgctcgatcgaattgtgacgcatgacaaaaagtggactttatatgacaaccagcaatgaccaggttaatagttggactgagaagaagctgcaaagcacctcccaaagacaaacttgcactaaaaaaaaaggtcatggtcactgtttggtggtctgttgccgatctggtccactacagctttctgaatcctggtgaaaccatctgagaagtacactcagcaaattgatgatttgcaccacaaactgcaaggccgggtcaacggaaagggcytaagtcttctccacaacaacgcctgactgcacgttgcacaaccagtgcttcaaaagttgaatgaattgagctaagaagtttcgccttatctgccatattcacctgactgttcgccaaccaacta

SEQ ID NO: 225442 - DNA, 544 bp, Homo sapiens
cctcaagtaatccacccacctcggcctcccaaagtgctagaattaaaggcgtgagtcacagtgcctggctgactagattaatttctgaaaaacgtaacaacacaaatttatcatggtcaactttccatagagtgccttcaagaatactctaaatgcctttgttcgaagtgccacatagatccccgtccacattaactgtgtcttcaatgattttccagtagttgttcaggccaatctatatgmggtatccaggaacttcattgacagaatttgcacttaaagtatataaataatgtatatttcaatccttgattatggaggatattttaaccgtaggttaaatatcttacgtaggttaagtatctgttttcttccaatgcaatatttaaaaatgctctttcattcacctatgattagtaatagggttgttatagaaaaaagtgttttaatggagcttttctacagtgaccattttttgtgccctcttcctccacccccattccccttggatcactttctcagctcaggacccctctgcaagctt

SEQ ID NO: 225443 - DNA, 384 bp, Homo sapiens
ctgtgtgcctaccttgtttgctgggataattggccttattttggtgttttctggttttcacttttgstttttgagagtatttcagttgaaattgaggtggttttaccaaatgacagatttggaagttttctcattttaaaccagattgtattgctaacagtgtagataaactaataagagagctaacatgtatggtatctaacataagtatttcattttctcctgaagaaaattttgctagagaatatatatctctttaaactgatttcttatttaaatccatgagtcttgattttttggctttactgatatttacattaaaatgacttcccaggctttagttttgatgtgtattatttgcaattagatattaataatattcac

SEQ ID NO: 225444 - DNA, 488 bp, Homo sapiens
cgttgagtttattgtgaaatgtataaaacgaggagatggaatcacccttgtcattcagaagacacacctttttatgcagccaaatgacacattaatttttctgacagtctctaataacatgaataaattatatattgatattttaatcaacctaaatcttaatgtagttartttattcatgtgttagttgtttagttttctaagttttaaagcatatttcccagtttccaaaaataaagttgtgaaggaattcttaaaaattttgatactaccaatataagcacaaattttcttgatgttatatttaagggggacttggttaaaaattctaaaatgtttttcccgttgagattggatacgaaaaaaaaaaagacctagaatatgaaatgaaccagaatttctgttgacattttgtaagtgcataaaaaataatagttggggccgggcgcggtggctcacgcctgtaatcccagcactttgggaggccg

SEQ ID NO: 225445 - DNA, 432 bp, Homo sapiens
cataaagaccagtattcccagaaataacctgtgcttttggatctggcaatcaaaagcattgattaccttgatggcactgaaataaagctcctagtaggtcactagttgtcaggcagttctttaagacagtaaatagcatatatttattctgagagaaatatatcctggtttggacacaaatgatggctacttatataaatgtttatctgtcataaaagtttgtgaaagcaggtaatcataaatgaatgatactatagtaaacattttaacttatgaacatttcaagtcatcaatcttttgtatggggccaaggcccgcccttccctcacttcctgcattcctcccttccttytttccttccataaatatgtattaaacttttactatgtgcccagtaatgtttcaagtgctagagataaaacaataagtaaa

SEQ ID NO: 225446 - DNA, 510 bp, Homo sapiens
ctgtcatacacacacaaaaaaagtatttacacaacaatacaaatttgttagatagctgtgaagaatttacaatatgccagtgtattgttataactgctaactatttggctagactttgtgtttgatacatgttaggtatagaagatgttatagtagagatcttgtttgttggtttgttttttccttctgatcattcatcctyatttatctgctaatagtgccttgatttacttaggaaaacatttttgtaaatgtatattggcacacataagatggtaggattctgaagtattttgaaaatagaaccattagaatttgctgatgaattagttatggggtgtgaagaaaaaacaggagtcaagcaaaactaaatattttggtctcatcaactgaaaaaagtatctactataaccatgtcacataattcatatttatttgcttattctttgccttctttcactagtggtttgaggtcaagggctttctcttttttcctagcaactggaaaaa

SEQ ID NO: 225447 - DNA, 409 bp, Homo sapiens
tgcccaggacccaacatcaccaataatcacccatttctgctaccttttttgccaaagctaaraatttctattcctattgcagcccagtgcagaaaaggggagaagaggatcctccctcccttttaagacatagctctgcagatgtgttcttatcacaacatttgtaagcagtgggtgaagttctatagtactaatggtgacaccatcaggaaacacagccacttaacccaaggacagtcctactctgttggagatgcacatggggaagaaagacaagaaagaaggaagatgacattcatctaataatgaagatcaactaaatcaaccctgatcaatggagtaacatttcaccaccaaatcacccccacacccaggtaaggggtataacacactttaatgtgttataaac

SEQ ID NO: 225448 - DNA, 551 bp, Homo sapiens
ttaatatttttgtcattgaagatgaactttcttccttcagagaacaatttcttctctcctggtcagacttttagtgaagagaccagctggtgtttgggacatcagaatctactaacattcccagaaaagtcatgctgtgctttgatattatgtacttttactgaagaaataaaactttatgtgggagaaaatctgtaaaacagtttgtatgtagagaaaaattctcccacacaatgtgtattacttcgttctcacgaggctttgaagaaatacccgagactgggtaatttacaaagaaaagaggtttaattgtctcacagttatgcatgaatggggagrcctcaggaaacttacagtcatggtggaaggggaagaaaggcaccttcttcacagggcagcaggaagaagggctgagcaaagagggaaaagccccttataaaaacatcagatcttgtgagaacccagtcactgtcatgacaacaacatggggttagccacccccatgattccattacctcccactgggtccctccatgacacatagggattat

SEQ ID NO: 225449 - DNA, 518 bp, Homo sapiens
ggacacctgcttccaggtagatggggtagatgtattttgccctatttcttccattaagtacaactaaaaaaccttgggcattacacataaataaatgcaagaagactatgaataataaagagaaggcagactagctagggacctggggaacaagtcacagcatggtggtaagttctctgggcttatttttgtgtcatatatcacagacttggagctgaagaagcagacaatctgaaaatgccaataggtataaacaatgcttcaacaaaagcctactytctctaaccaatggataggaaagatgctgtctaacaagacagaatgcttttagacaataactcctccactacagctgaataccataaaaaaaactgtagccccaccccaaacaatgccagcaaaagccaagtgttgagcccagacttctacccttgtgaggatgtcacaaggcatacaaacacttctgctagagtggtgttagagaaggcaagtaggtgcacagcattcattcccatcaa

SEQ ID NO: 225450 - DNA, 560 bp, Homo sapiens
tttgacttatgtctcaaatcttatatcaaaattaactcaaaatagatcacagacttaaatgttaaatgctaaaagaatgaaaaaaaagtcaagctacagagttggagaaaatgtttgtaaatcatgtatctgatagaggatagtacctagaatatataaagaactctcaactctcaagctcaatggtaaaaagctaaacaatccatttagaacatgggcaaaagatgcgaagagacattttaccaaagaggatatacagatggaggcaaataagtacataaaaagatgttcaacrttattagtcattatggaaattgaaattaaaaccacaatatttgcataattcacctcataatctgagttaattttcagtaagtgtatatatcactacacacctaacagaatgactaagacaaaacacagtgccaacaccaaatgcaggagatgatgaagaaaaactaaattactcacatattgctgctggcaatgtcaaatggtagagccactctggaaaaatgtttggtagtttctttacaaattgaacatgcaagtaccatatg

SEQ ID NO: 225451 - DNA, 544 bp, Homo sapiens
caaatttattatatttatctcttttagcactatgtgtatgcatttattatgataaattacttgtgtatttaatgttgaaaaataatatcaactattttctctttgaatagttcctcttttccatttattctgttctgtatttctggaattctgtatttattcctggagaaggtaatttgtttgctttttcatttttagaatgcaatttctattctattctctgtgtctcttaactcatttttaatatttcttattaacaaatttctatgtgcctgttctgttcctcagcactgtcttccarcttacaaattttatacctgactatatcatactttcttcattatagctgttgtattttaaaattaccctatgtggtatttcatacctaatgtggtattttaatttccaggatttctttttcaaaatttatttttgaaaactttttggcaaattaaaattgtatataattatcaggtacatagtgatgcagtggtatcactttagaatgattgaatcaagctaattaacatatctgtcaatttaa

SEQ ID NO: 225452 - DNA, 519 bp, Homo sapiens
tgggaagcagagacaaagaaagaagtttttgagagtgtttaggatcaacaccagtagaaaggaagagacaggaaagaaagggagcaggattgggtagacaaagaagttgggctgtgatgaagtcttaagaaagtccttggctggcacttcaaagatcactgaagttgggattgccctgaagttgttctgagtagaggatgaagggctgagcctttatatacctgcattgactgatcattggatggaggtctctgggaatggggttatgaccgtggatgaagatgttctctttacgtgaggcaatttctgaagaaggctggagagctgcaagcagcatttccagaagctgggggaatagagtaaattcttaagtcctggagaaggatgcatgagagcatctactacaagtaacactccaaagttatcccaytaatatggggtggagctgatttcaaactcaattttatcagactacaggctacaaagtccatttggagggcacatatccttaattaaccc

SEQ ID NO: 225453 - DNA, 327 bp, Homo sapiens
gtcctggctatcatgaaaagttattgcaggttttttttacttatatctagctatctgctaaaccctcttaataaaatgaataatttgtttataaattatttagggatttctatgtaactaatcaaatagcctgtgaataatcacagtktgttttcttgcacctcaatttttaaacactatttctttctcttgctttatgtgtgactagtactatgttgaagtgaagcaactatcattgtctgattcctgattttaatgggaacacctataatgttttgtcattaataattgctttaccattagctttgtatagatattctttatcag

SEQ ID NO: 225454 - DNA, 571 bp, Homo sapiens
aattacgcactcacgtgtttgttgtctgtctcctccagttagaagctaaggaattagctccttgagccctagaacattgacagataaatagatatttgtaaagtcaacgaatgaatgagttccctaagtgccaaccagtgtccacactgtgatttctgtccagctgcttgacgcacttccaggactggtaagagtcagtgactgctgagaatccacagtgccctgaaccctaccaaaacgccccacccccatctcctttgtactaaactgggtctccatttgtgacatcttttccattaaaaaaaaaaaatgtgtcctggagtggtgatcccagcactttgggacgtgaaggtgggaggatcatttgagcccaggagtttgagaacagaytgggcaacatagcgagaccttgtctctaaataaataaataaataaataaataaataaataaatataaattaaaaagggacagactcagacttttttgatagattatacaagttatttctctctcaacccaaagtctctgttcaacctatagttactttgcctacttttatattcttaatat

SEQ ID NO: 225455 - DNA, 550 bp, Homo sapiens
acaatttaaaacaatttttttttttttcaatttgagactggttgaattcacagatgtaaaacccataaatactggtcaactgtatattaatatagtaacctgtctcctttccatcccccaaatgggctttaccttgctctactttctatttcttctcagcatttatcattgactaacacactaagtaattttttgttttgttttgttttgttttaraggcagggtctcactgtgtcaaccagactagagtgcagtggcacaatgcaatctcctgggctccagcaatcttccagcctcagcctcccaaagcactaggattataggcgtgagccaccgtgctttgcctcattccacattttaatacttagagaacttacaactatattttattgattctaagacacaaaaatcttttttcacactaacttttccaaaataaaaatcttttaggccaggcatggtggcttatccctgtaattccagtattttgggaggccaaggtgagtggattgttttagctcaaaagttggagaccagtctaggcaacatg

SEQ ID NO: 225456 - DNA, 576 bp, Homo sapiens
ctatattgaccaggctggttttgaactcctgacctcaagcaatcctcctgcttcagcctcccaaagtgctgggattacaggtgtgagccactgcatctggccagatgatgaccttgacctctgattgctgccacataactggaactcagagaccttcttgcacatctgtggaaaggggagtttgctttgaactgcatttcctcaccagcgtcacccattccttaagagtcaggttgataaacgagtcaatgctgagcccaaaccaggcaggattaatcatttcctcctccacattgctgctgctgctgctgctgcatcctgtgtctgagtcatttcctcatctttaatagctaacatgatgcccagtacaaaataggtatgggggaatattyactgaatgaatgtcattgaatctgacaccgttggatgttggatccactcagtccacttggccacagtttaagcagcgtgagggtagagccaagtttttttgtttgtttgtttgtttgtttgtttttagagacactatgcaaataggtagagctaagttttactctttggtgtgggaagggcagg

SEQ ID NO: 225457 - DNA, 619 bp, Homo sapiens
acaacatattaaaaagatccttcatcataaccaagtgagatttatcccagcaatgtaaggatgtttcaacatatgcaaatcaatcagtgtgatacatcatatcggcagaatgaagaataaaaatcatatgatattttcaattgatgctgaaaaaattatttgatgaaattcagcattccttcatgaaactgggtataaaaggaacatacttcaacataataaaagtcatatatgacagactcacaggtagtattgtaccaaatgggggaaaactgaaagcctytcctcttagctctggaacactacaagtacttcaatatagtactagaagttctagctagagcaatcgcacaagagaaagaaataaagggcatccaaattgaaaaagaagaagacatattatccttgtttgcacataatataatcttgtatttggaaaaacctgatggcttcaacaaaaaactatttgaaccagcaaacaaattcagtaaagttgcaggacacaaagtcaacatacaataatcagtagcatttcttatgccaacagtcaacaatctgaaaaagaaatcaaaatgtaatcccatttacaatagccccaagttaaattaaatacctaaga

SEQ ID NO: 225458 - DNA, 454 bp, Homo sapiens
gggtgtgtttattatcgtgattttggtaacaatgtatacataggttaaagcttactgaatactttaagtatgagcagtttattgtttgtcarttatacctcaataaaggtgttttgaaaaaaaaataatgtacaaacatgaaagttcaccattatttttgtgatattcttgtcaaaaacatgcaaccaggattgaaacctaaactgaaggacattctacaaaatgaatgatctggtttctttaaaagttttaaagtcctaaaaggctgaaaaagaatgaagaaatgttgtagatttaaggaaactaaaaatacatggctattacataatacctggctatacgtgattctgaactgaatttttatgctttataagacattattggaataattggccaaacttacttgggtaagttctgaatagtagacggtaataatgcacaaatgttaatttcc

SEQ ID NO: 225459 - DNA, 454 bp, Homo sapiens
gggtgtgtttattatcgtgattttggtaacaatgtatacataggttaaagcttactgaatactttaagtatgagcagtttattgtttgtcagttatacctcaataaaggtgttttgaaaaaaaaataatgtacaaacatgaaagttcaccattatttttgtgatattcttgtcaaaaacatgcaaccaggattgaaacctaaactgaaggacattctacaaaatgaatgatctggtttctttaaaagttttaaagtcctaaaaggctgaaaaagaatgaagaaatgttgtagatttaaggaaactaaaaatacatggctattacataatacctggctatacgtgattctgaactgaatttttatgctttataagacattattgraataattggccaaacttacttgggtaagttctgaatagtagacggtaataatgcacaaatgttaatttcc

SEQ ID NO: 225460 - DNA, 391 bp, Homo sapiens
  misc_feature (1)...(391): n = A,T,C or G
gaattcttcaaatgcataccaggttaatgaaggctaaaccacggtgggctaaattttttgataaatatcgaagtyttctttgatcctgataacccacaaatgttcagcatgagtgagttttcacggtcagcatgcagtggttttgatatttaacttaagctctagcccaatatggtttattttacttatgtgtatggtatgcttagaactaaggagcaggaaaaattagaaacagcacaggggtacatgacatataaggcacttttccccatttggctaagagtctgcatcatttacttgtggcttcaagggctctctctttgtgtgtgagtttgtttgaagtaaaacaaacaaaagcttagggaatgcttctttgctntatttgaccagc

SEQ ID NO: 225461 - DNA, 428 bp, Homo sapiens
tgagaagatgatgaaactacatagattgtatgtgatattttactggtcagaatggcttaactacctgaattttatttgtcacattaaaacattctttcattgtcaaactttaaaatgactgtcaaactgacagctgagtgagtaaagcagtaattcaacagcaactgytttttaagaaagaggtataaagtgttgaatctggtagtttagtcactgttcaaactagaattttaattatgtaacccttatttattcaatatatcatcattaatgttaatcagacatattcattgtttgtctccttctagagggggaaacaaatctaattatatttgatgtaatatttacatatgtatctagataagaccaaatgaagtgttactccaatgaaatagcaatgtttctgacatcctgagaatgaaatgacc

SEQ ID NO: 225462 - DNA, 575 bp, Homo sapiens
agcttggagtcgtcagaaactgcagagccctaaagagggagttatggccctggcttgggaagcccccaggtctgggcttcccaaaaggctgcagctcttctctccttcttgttgcctgcaacatggagagctgggtcatggtkgggggagcaggggagtgtgtttcagctcagtctgggttacagctgtttcagtcccaccatttggcaggtctcaagttcttgtcccatgtctaggaagaatgaggtacatggacaactggagggtgagcaaggcagagaggagcttcactgagtgacagaacagctctcaggagactggcaatgggtaggtcatttcctcaggcaggttttcccagtaagctgaggagactggaagtgggtagttgcttcatgcagctggttgtcccaatgcctgtcagagtctgccttagtcccggggtttttttgggctcagaagggagaaagtgtatgctgactggtccatggatggccactggtgggcctggaaaaagcaccctctgattggccaaatggtcatcaattaagttctcactcggagctgcagacttcacc

SEQ ID NO: 225463 - DNA, 575 bp, Homo sapiens
agcttggagtcgtcagaaactgcagagccctaaagagggagttatggccctggcttgggaagcccccaggtctgggcttcccaaaaggctgcagctcttctctccttcttgttgcctgcaacatggagagctgggtcatggtggggggagcaggggagtgtgtttcagctcagtctgggttacagctgtttcagtcccaccatttggcaggtctcaagttcttgtcccatgtctaggaagaatgaggtacatggacaactggagggtgagcaaggcagagaggagcttcactgagtgacagaacagctctcaggagactggcaatgggtaggtcatttcctcaggcaggttttcccagtaagctgaggagactggaagtgggtagttgcttcatgcagctggttgtcccaatgcctgtcagagtctgccttagtcccggggtttttwtgggctcagaagggagaaagtgtatgctgactggtccatggatggccactggtgggcctggaaaaagcaccctctgattggccaaatggtcatcaattaagttctcactcggagctgcagacttcacc

SEQ ID NO: 225464 - DNA, 561 bp, Homo sapiens
taccaacccagacaattgttatctcgtgaactgtgttgaagaccctcagcaattttatccgaggaacgtagctcattcttttgaatacatggagttgtgaggattaaatgaagtagtttttcagtgtgcccatgtgcgtgacaagcactgtggcagacacacacatccctcaccgagagcctttgctgatgtataaccccaaatttctgtgaggtggaggtctcaggcctaatacttctaagactataataattgagtcttaggaaaagaaacgaaagattgaacatgaaatyttatggtaatttattacaaagtactaagggaagtagtattgaagtcacatgtgaacgtagaagaaggagagaaagcagtgtgggtggaaaaaaaagcaaaattcagggaggtcgctttgaagcactcctgtgtagtcagcctgaaaatgagctcccgcttcttgttgttttctctttctgatgattggctctttaaggagcagttttcatggaagacgtgttgacgtaaaagctttccccacagtctccttgacttcctgccccagct

SEQ ID NO: 225465 - DNA, 561 bp, Homo sapiens
taccaacccagacaattgttatctcgtgaactgtgttgaagaccctcagcaattttatccgaggaacgtagctcattcttttgaatacatggagttgtgaggattaaatgaagtagtttttcagtgtgcccatgtgcgtgacaagcactgtggcagacacacacatccctcaccgagagcctttgctgatgtataaccccaaatttctgtgaggtggaggtctcaggcctaatacttctaagactataataattgagtcttaggaaaagaaacgaaagattgaacatgaaattttatggtaatttattacaaagtactaagggaagtagtattgaagtcacatgtgaacgtagaaraaggagagaaagcagtgtgggtggaaaaaaaagcaaaattcagggaggtcgctttgaagcactcctgtgtagtcagcctgaaaatgagctcccgcttcttgttgttttctctttctgatgattggctctttaaggagcagttttcatggaagacgtgttgacgtaaaagctttccccacagtctccttgacttcctgccccagct

SEQ ID NO: 225466 - DNA, 561 bp, Homo sapiens
taccaacccagacaattgttatctcgtgaactgtgttgaagaccctcagcaattttatccgaggaacgtagctcattcttttgaatacatggagttgtgaggattaaatgaagtagtttttcagtgtgcccatgtgcgtgacaagcactgtggcagacacacacatccctcaccgagagcctttgctgatgtataaccccaaatttctgtgaggtggaggtctcaggcctaatacttctaagactataataattgagtcttaggaaaagaaacgaaagattgaacatgaaattttatggtaatttattacaaagtactaagggaagtagtattgaagtcacatgtgaacgtagaagaaggagagaaagcagtgtgggtggaaraaaaagcaaaattcagggaggtcgctttgaagcactcctgtgtagtcagcctgaaaatgagctcccgcttcttgttgttttctctttctgatgattggctctttaaggagcagttttcatggaagacgtgttgacgtaaaagctttccccacagtctccttgacttcctgccccagct

SEQ ID NO: 225467 - DNA, 561 bp, Homo sapiens
taccaacccagacaattgttatctcgtgaactgtgttgaagaccctcagcaattttatccgaggaacgtagctcattcttttgaatacatggagttgtgaggattaaatgaagtagtttttcagtgtgcccatgtgcgtgacaagcactgtggcagacacacacatccctcaccgagagcctttgctgatgtataaccccaaatttctgtgaggtggaggtctcaggcctaatacttctaagactataataattgagtcttaggaaaagaaacgaaagattgaacatgaaattttatggtaatttattacaaagtactaagggaagtagtattgaagtcacatgtgaacgtagaagaaggagagaaagcagtgtgggtggaaaraaaagcaaaattcagggaggtcgctttgaagcactcctgtgtagtcagcctgaaaatgagctcccgcttcttgttgttttctctttctgatgattggctctttaaggagcagttttcatggaagacgtgttgacgtaaaagctttccccacagtctccttgacttcctgccccagct

SEQ ID NO: 225468 - DNA, 449 bp, Homo sapiens
agttgctagaccctgcagtgtgtccagtttgtcatatttctgaaaactaaagtctctaacacttcacagatcccagaatgtatgtgactgattcaggaatgggccctggagatggagggattaaatcttccctgtgcttgctttagttgtggcacagagaggactctgtgtgtgaaggaatgmggcctttacctgagagagtgcactggaaaaaaacactatctttgcactgttacagcaaatagagcacttggagtgtgggtgtggggattaatagggcccaggtggtgctgaagcagacaagcacctccttcccttctcaggctgtatgggactgttccctgaaagctgcctcctctaatagtgatcctgaagacaatggctttgcacacttggcaggtaataccctaggctctctatcctgttttcgtaggcaccagacagggtgg

SEQ ID NO: 225469 - DNA, 448 bp, Homo sapiens
ttttaaattttctgtgtggattataagtttttctgatatattaatatttcatctcrtgacacattatagccatatttcttgtaaatttttaaaaatatttataatagtgcctttaaagtccttgttttctgatcctgacaactgagtcacttgcgggtctgcttccactgattatataatttgtttcttatgggccaccattttttgtacttatacctgcctcatatatatatttttaaccgtattttacaccttgtatattagacaatggacacacacacgtttgttttgttatgtgtattatctagaacatgcaagctctttttattgtctaacaattagcgtgagagaggctgatcctgtaaatttttcctagggttgggctggtctggggaatagttttatttagactgagtttatgtgtgattatgcaaaacctgaaccttct

SEQ ID NO: 225470 - DNA, 448 bp, Homo sapiens
ttttaaattttctgtgtggattataagtttttctgatatattaatatttcatctcatgacacattatagccatatttcttgtaaatttttaaaaatatttataatagtgcctttaaartccttgttttctgatcctgacaactgagtcacttgcgggtctgcttccactgattatataatttgtttcttatgggccaccattttttgtacttatacctgcctcatatatatatttttaaccgtattttacaccttgtatattagacaatggacacacacacgtttgttttgttatgtgtattatctagaacatgcaagctctttttattgtctaacaattagcgtgagagaggctgatcctgtaaatttttcctagggttgggctggtctggggaatagttttatttagactgagtttatgtgtgattatgcaaaacctgaaccttct

SEQ ID NO: 225471 - DNA, 620 bp, Homo sapiens
attgtaattgtatatcattatggggtaccatttgatgttttgaaacatatctgtgttgtatgatgacccaatcaaagtagttagtgtatcactttatgcacttgtcatttccttgtagagaaccttaaaaagccygtattgtagctgttttgtagtatataatattttcctgttaaccatagagaccctccttaaaaaaatagtatatcttttttaaagcaagacttatgattggactcatcagggttttatgagttttcaagaagcctttctaatccaagtcaattcctcttgtattagttccaataattgttttctttctacttctactactatttgtgcagagtgtgaatcatgctgtatattattcctctagggtcccctagcgaatcatacttcttacctagtaagaagtatggtccccagtgagagcttgataagggcttgtgcatttgtcttgacctcttaaaatagtgccctacaactattcaaagaagattaatctaaccagcccactgaaagatgagagactgcgaggaaaactgaggtgctccattcactagccagaattaagaacagttgcagctgtgggtatgatcgtaggtgagaagagcaaaaga

SEQ ID NO: 225472 - DNA, 646 bp, Homo sapiens
ggcatatggcttgtgagatcaggtggctttgtgtaggattttttgcttggtttattaagaagtaatcrtgtatacctattcgtatcacaaaacctctgaaaatattttaaatcatcaaaagaaattattgctgctttttctttcccatctttttatatttcccttaaagctcctgatagaaatgagtagaaagaaactattttatttagaataaaaaaactctaggttagtatttgagactctggcctaattttctctaatagcttatcactcggtcattgtggctttgtgatttggaaggaaaactatctagaataggtgtcagcatgcattaatgcagacatattcattcattcaacaaattattttgaatgtctactacatctcagcattgttctatgtcccacagatacagcattgaacaaaatgggctaagcctctaatcttttggagcttatattctaattgttgttttaatacctccaacccaaatttagttggatgttgagactgatgatccctatatacacaccaagaggatataaaagattactcatgtatcgaggctttcagggtggagtgcaggataggcatccaagctgatagaaaataacttaaacatagagaagaaaacatcactagtatt

SEQ ID NO: 225473 - DNA, 646 bp, Homo sapiens
ggcatatggcttgtgagatcaggtggctttgtgtaggattttttgcttggtttattaagaagtaatcatgtatacctattcgtatcacaaaacctctgaaaatattttaaaycatcaaaagaaattattgctgctttttctttcccatctttttatatttcccttaaagctcctgatagaaatgagtagaaagaaactattttatttagaataaaaaaactctaggttagtatttgagactctggcctaattttctctaatagcttatcactcggtcattgtggctttgtgatttggaaggaaaactatctagaataggtgtcagcatgcattaatgcagacatattcattcattcaacaaattattttgaatgtctactacatctcagcattgttctatgtcccacagatacagcattgaacaaaatgggctaagcctctaatcttttggagcttatattctaattgttgttttaatacctccaacccaaatttagttggatgttgagactgatgatccctatatacacaccaagaggatataaaagattactcatgtatcgaggctttcagggtggagtgcaggataggcatccaagctgatagaaaataacttaaacatagagaagaaaacatcactagtatt

SEQ ID NO: 225474 - DNA, 550 bp, Homo sapiens
taggtggtggtggtggaggtgttgttgttgttgttgttgttgctgttgttgttcttcttcttcttctccttcttctcttcttcctcttcttcatttctttcttttctgcctcttcctcctcttcctcttctcctcctcctccttcttcctcttttccttctccttattcttcctcytcctctttttctttcttctccttcttcctcttcttctccttccttcctcctcctccttcttttcttctttttcaaaataaggtttccctatattgcccaggctggtctcaaattcctgggctcaagtgatcatcttgcctcaaccttgcaaagtgctgggattacacaagtgaaccaccatgccctgcctacaattctttttttttttttttttttttttttttttgagacagggtcttactctggtgcccaggctggaatacagtggcacaatcacagctcgctgcagcctcagtgttacaggcataatcatcacacctgactcaattctttatagaaggaatctgatagaaattcctttatagaaggaatct

SEQ ID NO: 225475 - DNA, 599 bp, Homo sapiens
aaatcagatattttacaaaatgtattacctttggaattgaaaagtatcgtcctctccagctgcctgcagtccgtggaccacccttgctggatcagacacctctccaaaccccagcagcaccacaggcccagttttccatgagcctgtgaagaataagcccagctcacagtagagctgctaacagccatcatgaaagagaccagaaaatacaaaatccttagctgtgtgagacctaaacacacttaaattcgttcaactgaaaatgaatattgttttggcttgcctatttcaaaaggacagaagacctaaaaccttttatagttttcggttcaagttttgcctttccttgcaggctgattctttgttgtgccagacagccaagattcatgtttcgtagcagctgggagcctcaataatttaagcaaaatgttgcctctttcagccaagraaaatgcagctcaccaaggaatgttgcattgtagcatctgaacagagtgggggtcatagccataaaactctcctagcgtcctagcgagggcaggaatggagagaccccactccctcacttcagtgccttcttggctttccatagatgaaga

SEQ ID NO: 225476 - DNA, 613 bp, Homo sapiens
actctttggcatagtaactctttgctgtatagtttaagttgtttctataggaataagggcagattccagcctacttccaggatagtaagtacaaaatattttaaagtctatggctaaatagcaactgttaatgcatctctgatatatcatatgtcccaccatttatgatatggattggaaagagaaaaatgacctgaaattctctttcctttaagcaaatagtacttagatgatgccccatacattctccaaaaaccttccccttactgtttttaggatgggaaaacaaccaacaatataaatttttttcatttcacaaaaatctgagaataaatttaccacagattagttcatatatttctttgatttcttaactcattattaagacattcataatcaaaatgtgtattataaacttatatatgctatgatattgtgataaaataaatatacatttggtctctgtccccagctcctggtcagagctcctgaaacacttgtaccttcctaaatgataaaagcaacagaaacatcttttgttaccrtattttgttttcattccccacccctgacaaaactctggtgcaataaaggtgagaggagcatcttttgt

SEQ ID NO: 225477 - DNA, 445 bp, Homo sapiens
catatctgttaagagttttttatattgttccctggggctctaaggctctgttttttcagtctcttttttctctttctcactattcttcaaattggacagtttctattcatataacttcaagttcactgactctttcctctatcatctctatttttctattagggcataagatgactgcagctcacccttttttmaaaaacctctaaattgaggccagacacagtggctcacgcctataaacctagcactttgggaggccaaggtaggtggatggcttgagctcaggaattcaagaccagcctgggcaacatggtgaaggccatctctacaaaaaaataccaaaaaattagccgggtatggtggcaagcacctgtagttccagctacatgggggggctgaggcagaaggatcccttgaacccgggaggtcaaggctgcagtaagct

SEQ ID NO: 225478 - DNA, 601 bp, Homo sapiens
aatctatctctcatacgcacacaaacaacatgatagcaaacttttagtatgtgtatttttgtgccccgaataataaaatgccctggagactagtcacacttttgggaaggtaaaatgaagagtgataactgaatattgctgtaattgttcacttcgtagatgttcttcagcttctgtgagaagaatgtggattatgaaacgtttaaagccctcaatgatgcatgtcttgtgtatgacagtcgacttgtgattgataccaacttccacaccaacgacatagccatcagagctgctggctccctcaccaaattctccaatagatactactcaaatgagtggactcacagcaacttcagttccaaagaaattggctttcagctggcagcagctatgctacatctctttgatccaacccttgagcctgtgaccgagccaccagctaatcttgaccggctcatccccatgtacaagggagccaagattcaaggtatacgagtaggcttccttctccttgatgaagccacagattaggtatggstcagcagtcaggccagtcctccaggtttctcttaggcttggggaaaaggctcctccgtacctc

SEQ ID NO: 225479 - DNA, 446 bp, Homo sapiens
tgtggttgttggcaacatgcagttcctgaggtctctgtctagttgctggatgtcatgtaggggccaccctcagctcccagaactgtcctagaggcagcctccagggccagcaaytgctaagacaaagtcttatacagtatatcatatccacaggagggacagtgcttctgtcctttcccgttttatatcagctggaaacaagtcacaagctctgcctcttgctcgagggtagtggatcacaccagggcatgactcactggggtcaccttagggtctgttcccacaatgtgaaaggtaaaacaattgtgttacgatagcaacctaacttctttcagtcaattttttaaaatgcaacagatggggctgggcttggtggctcactcctgtaatcccagcactttgggaggccaaggtgggtggagtcacttgaggtcaggagttcaaga

SEQ ID NO: 225480 - DNA, 446 bp, Homo sapiens
tgtggttgttggcaacatgcagttcctgaggtctctgtctagttgctggatgtcatgtaggggccaccctcagctcccagaactgtcctagaggcagcctccagggccagcaactgctaagacaaagtcttatacagtatatcatatccacaggagggacagygcttctgtcctttcccgttttatatcagctggaaacaagtcacaagctctgcctcttgctcgagggtagtggatcacaccagggcatgactcactggggtcaccttagggtctgttcccacaatgtgaaaggtaaaacaattgtgttacgatagcaacctaacttctttcagtcaattttttaaaatgcaacagatggggctgggcttggtggctcactcctgtaatcccagcactttgggaggccaaggtgggtggagtcacttgaggtcaggagttcaaga

SEQ ID NO: 225481 - DNA, 446 bp, Homo sapiens
tgtggttgttggcaacatgcagttcctgaggtctctgtctagttgctggatgtcatgtaggggccaccctcagctcccagaactgtcctagaggcagcctccagggccagcaactgctaagacaaagtcttatacagtatatcatatccacaggagggacagtgcttctgtcctttcccgttttatatcagctggaaacaagtcacaagctctgcctcttgctcgagggtagtggatcacaccagggcatgactcactggggtcaccttagggtctgttcccacaatrtgaaaggtaaaacaattgtgttacgatagcaacctaacttctttcagtcaattttttaaaatgcaacagatggggctgggcttggtggctcactcctgtaatcccagcactttgggaggccaaggtgggtggagtcacttgaggtcaggagttcaaga

SEQ ID NO: 225482 - DNA, 251 bp, Homo sapiens
catggtattactgaaacaccagggtttcagtctaggtcctgctgcttgtcacacagaaagccagtgactgagacaatgattgttgccaaggaaaatgtccttattcaggtgcygcagccaaggacatgggagatcagcctcaaatttgtctccctgaccaattaaaattaggagtttatatagcagagaagaaatgtaacaatgtgtaagaaaacaggaactgggtaggggggtaaggaagcaatcatcat

SEQ ID NO: 225483 - DNA, 582 bp, Homo sapiens
agatctttcaaaatgaactagaaaacaaaaaaacaagcagtttatttgcagagaacaaggagagtgtcaatctaaataacaaaagaaagaggttctctamaagaaaattatatttatttcgggaataagacattgcaatgcgcatacatatgccaaaataaactatctgcatattcagggaggtaaaggaagaacaatggcttttaaaggaaaagtgagaaggattacatagttgttttgagataattatccttggctacaaggatcagtaacaaggatgataccactatgggcttggacagacaattgctggcagatgtccttgcagaagtgtgttttgtgtaaagttgtaagggcctttgtgcaaagtcatggtttttgtgaagtttttcatgataggttttgttatcaggcatttatgcctgaaaatcctctcctcatggcattctctggttccatttgtcagggttttgttttaacaagtgacttcattttgattctggcaactgtcagaaaagtaaccaataagacgacaaagatgtcccaaggagaaggtaaatgtcatggctgagccggggaaac

SEQ ID NO: 225484 - DNA, 670 bp, Homo sapiens
ggtgacttacacaacagacctttatttctcacagttgtgtgggctgggcaatccaagattgaggtgctgccagactgggttcctggtgagggctctctccctggcttgtatcttactgtgtgttcacctggtccttccttggtgacaaattgtagaggagatagcagacatatacaactaaagagggtagccaagcttttaaatttttttttaaaagtcatctctctagacagaatatacatatgtggttttgtagctattttttactagagattataaacaaaggtagctgtaaagcaatgaattctcaattcactataaaagttttggaagcaccattttatgctaggggaagtcctaggcacttgagttcctgtccccagggakgtttgcaagcaaaatatggacaattaaaatatagttgtataataaagatattaataaaatacaaatcaccatttcttttgtgggggtgaaggtggaatgggtgctatattgaaatatttttacatattataaaatgcctcattaagagcctgtcttttcctgcaccttgtcttctacttcctgctcaaaagtagcatatgaacttcctatttctgccagcaagtcaggtgagaagagaaaatgagtttatgaaagtaggcatgtgtcagtgctctctgaaaaa

SEQ ID NO: 225485 - DNA, 604 bp, Homo sapiens
aatgtcacatttagaaattcaatttaagcgggatgcattttctaagacttttttaagccattacctataaatcctctaaggaaataaggtacacagaccaacctaagccaacatcaactcaacaagtgctctgaaaaacctcaaatatccccctgaaattttacctttcaaaacaagcaagagggtcctgmcttgcccttcaaaaataacattgcactattagagttttcttattttttttcacatttataatcatcgcattttcctttgggaagtaaaggaaccaaaaaacacacaaaaggagtcagatctcctttttatacttctgtaaaaacaaacaaaacacaactgcagtggatgtgagatacttcccaagagatgatcagccaaatataaatggtctttgattgtaattgataattgaacagggtccaatcttagctttatttaccttacatggaaactttccaaataatgttttatctcttcgagttcccagtcagcctatccctttatacaacttttgccagaatgtgcactccctaaactgaacattttttctattgatgaagtctgactcaagggcatttttgctacggaataa

SEQ ID NO: 225486 - DNA, 524 bp, Homo sapiens
actgcatgcaggataggcaaacccaaatctggagtaagtgtctattccagtgaggacaaacccgtgccctttccatgatggaagagatgtaatgtaatcaacctaccaccaggtagcargctgatcaccccaaggaatggtgccacatcaagggttcactgttggtctctgctgccagcaaattgggcactcagcagtggccatagccagatcagccttgatgagtggaagtcaatgttgcagagcccatgtgtaacctccatcctggccaccatggccactttgttcatgggaccattggttgatgactggggtggctggggaaagaggctgagtggtatccacagaatgggtcatcctatccacttgattattaaaatcctcctctactgaggtcacccattgtgagcactcatatgggatacaaatatcttcacagttttagaccattcagagaggtccatccacataccttccccaaatttcatcatcagttttccaatcatgcttcttccaagtccctg

SEQ ID NO: 225487 - DNA, 524 bp, Homo sapiens
actgcatgcaggataggcaaacccaaatctggagtaagtgtctattccagtgaggacaaacccgtgccctttccatgatggaagagatgtaatgtaatcaacctaccaccaggtagcaagctgatcaccccaaggaatggtgccacatcaagggttcactgttggtctctgctgccagcaaattgggcactcagcagtggccatagccagatcagccttgatgagtggaagtcaatgttgcagagcccatgtgtaacctccatcctggccaccatggccactttgttcatgggaccattggttgatgactggggtggctggggaaagaggctgagtggtatccacagaatgggtcatcctatccacttgattattaaaatcctcctctactgaggtcacccattgtgagcactcatatgggatacaaatatcttcacagttttagaccattcagagaggtccatccacataccttccccaaatttcatcatcagytttccaatcatgcttcttccaagtccctg

SEQ ID NO: 225488 - DNA, 526 bp, Homo sapiens
tcattcttgccgtatactcacatggcaagaaagaaatcatctgtcttatctctagactcgagtttgcaggtcagagtttaaagagaactaaaagaacactcgctactgctctggtcaagcctaacaaatcttaagaagtaaaccccaaaagaacaaactaattagtagttaatttctgaattaattaactactccaaagaatggaaaagacattatcacaggtataatactgtattccatatgctcaaaaatgaagtacaaaaatggaagtttttttttttaattaaaatatgttctctgaccacaacagaatcaaattagaattcagtaacaaaatgatctctggaaacttgccaaayatttggaaactaacacacttctaaataaccaatggacaaatgaaaaaaagcggggcggggggggaattagatagtattttgaactaaagaaaaataaaaacacaatatattaaataatttgggatactgctaaagtagtattgagagggaaatttataatactgaat

SEQ ID NO: 225489 - DNA, 467 bp, Homo sapiens
ttcagttttgtaaatcctagttaagatttctttgcattaattaaattctctttattaaaataactggtatggttttgattccttagctggatcctatctgaaactttgttcagcaaatgratgatgatgctaaaaaatgagatttttaaatcttaaaatgctgcatagacaatatggcataattgcacattcggaacagggtaaaaggactgtgtactcctagagaaatagagcatggcagattggctttgtaatctgagatctgcccacacatgagctggggaaattctgtctttctttcggactgtgaattaaatcccagtttggtcactttccgaccccctgtttcacctcgcaccacaaagagacatgtgaccacaaaatccaatggattttgtccaagacttttacaaaaccacaggatgggttttggaattacctatgtataataccaaagtaaggtataa

SEQ ID NO: 225490 - DNA, 533 bp, Homo sapiens
aaccacccccatgattcaattgtctccacctagtccctcccacaacacatggggattatgggaactacaattcaagatgagatttgggtggggatatagtcaaaccatatcggagtcagcaagggccagcttcacatctttctccccaagagtayggttagcttcctaaattgctaatttttaatttaaaaattcagcacaaatttctactttgaaattatgaaattcttgtagaagtatgtaataattataggaaaaaggaaattatcgcctcaaatttctttcttgactactttcatcttttctttaaagccactctggggaccattagtagtgttcctgtcttcgcaagaagacccatgcctagaacacagtctcccttcactacttccaggaagaatttttttaaatactcatatgcatccataggtacatcatacatatgaatgttcattgtagcatcgttggcaataatgaaaaaaaataatgctcatcaagaagagtgttttaaaataaattatggaagatccata

SEQ ID NO: 225491 - DNA, 533 bp, Homo sapiens
aaccacccccatgattcaattgtctccacctagtccctcccacaacacatggggattatgggaactacaattcaagatgagatttgggtggggatatagtcaaaccatatcggagtcagcaagggccagcttcacatctttctccccaagagtacggttagcttcctaaattgctaatttttaatttaaaaattcagcacaaatttctactttgaaattatgaaattcttgyagaagtatgtaataattataggaaaaaggaaattatcgcctcaaatttctttcttgactactttcatcttttctttaaagccactctggggaccattagtagtgttcctgtcttcgcaagaagacccatgcctagaacacagtctcccttcactacttccaggaagaatttttttaaatactcatatgcatccataggtacatcatacatatgaatgttcattgtagcatcgttggcaataatgaaaaaaaataatgctcatcaagaagagtgttttaaaataaattatggaagatccata

SEQ ID NO: 225492 - DNA, 533 bp, Homo sapiens
aaccacccccatgattcaattgtctccacctagtccctcccacaacacatggggattatgggaactacaattcaagatgagatttgggtggggatatagtcaaaccatatcggagtcagcaagggccagcttcacatctttctccccaagagtacggttagcttcctaaattgctaatttttaatttaaaaattcagcacaaatttctactttgaaattatgaaattcttgtagaagtatgtaataattataggaaaaaggaaattatcgcctcaaatttctttcttgactactttcatcttttctttaaagccactctggggaccattagtagtgttcctgtcttcgcaagaagacccatgcctagaacasagtctcccttcactacttccaggaagaatttttttaaatactcatatgcatccataggtacatcatacatatgaatgttcattgtagcatcgttggcaataatgaaaaaaaataatgctcatcaagaagagtgttttaaaataaattatggaagatccata

SEQ ID NO: 225493 - DNA, 533 bp, Homo sapiens
aaccacccccatgattcaattgtctccacctagtccctcccacaacacatggggattatgggaactacaattcaagatgagatttgggtggggatatagtcaaaccatatcggagtcagcaagggccagcttcacatctttctccccaagagtacggttagcttcctaaattgctaatttttaatttaaaaattcagcacaaatttctactttgaaattatgaaattcttgtagaagtatgtaataattataggaaaaaggaaattatcgcctcaaatttctttcttgactactttcatcttttctttaaagccactctggggaccattagtagtgttcctgtcttcgcaagaagacccatgcctagaacacagtctcccttcactacttccaggaagaatttttttaaatactcatatgcatccataggtacatcatacatatgaatgttcattgtagcatcgttggcaataatgaaaaaaaataatgctcatcaakaagagtgttttaaaataaattatggaagatccata

SEQ ID NO: 225494 - DNA, 600 bp, Homo sapiens
attctctaattcaggaactagtacttcatccaaaagctcatattacttaatggtcctatatttaaatattgggaaaaggtatgtgtaagcacccaagagaatgttgtattcagacagaattaagtaaatggtgagaaggtgagaaaaataaaaggaatcagatttatccagtaggatgagagagggtcactggggaatttgggaacagacatacacttcaatagacatcagctattagtgatacaataaacatgctggctatattgttgggtagagtaagattatggggtgtagagagaggataaaattgttccaggtacagggtttaaataggagactgtgtccaaatttgcattctcataaaaacacatttccargttggttggttatagtcacattttggggagctgccatattaatctaaaaacacaaatttatccaaatagcctaatctgtacaagaatcttgattttgtttcctacataaatgtcaatttttttcaccacattgccaaatcaatttcctctttcctggaacatacaaaatggtttcctagaggttcccacaagtggagtttgtttggaaacatcactgttttgt

SEQ ID NO: 225495 - DNA, 556 bp, Homo sapiens
aattagaaatcaaattatcatttactaagggatctaaactagagcctgtggcttgaatttaaggccaacggctttcctaatatgtcctcctgaactgaactcaaaccaccacactacaaactcaccacctggaatgatgaaggtgaaagtgaaattggagtgggatgaagagcctatagaaagtaaagaaggaagagagaaaataatacttgatccttcataaagctgggttctgaagaggaacagagaaatggagccatagctaaaggggatgtcagatcaatggaagattacattatgagaagggaagtaatgggatatgtttatatattcatggaaataatcaagggaggtgggagagattaagaatgttggaaaatgtatatatacatatgtatgtatgtgtatatatatgtgtgtgtgtgtgtgtgtgtgtgtgtgtgtgtrtatatatatatcagaaaagggggtgtccttgacagtcagcagagagatttcagagccccagtagagagattggcctccatagtaacgggtgggaatgtaacggtgatgg

SEQ ID NO: 225496 - DNA, 571 bp, Homo sapiens
cataacaattcagttatcacggacacctattaattcatataacaaatatatattgataatatattatatgtaaactacaggattcaatgcagttagygttctaaaataaataagacacagaaattgctttcaagttctaaaattgaaaaaagtctaaaagtaagaaagtctaaaagtttaaaaaaggaaatttaatttatactcctaataaaatgagagcataatcaaaggcatcagaaagatgtacataaaatgatatgtgagaactgagggataagaaattacaattgaggaaaatcagagaaagtttatggaggaggtacctttaaacaggccttgaaagatcagtaggaaatacacataggagcctgtcttcatataagcaaggcaggactacccatctcttcagtgtgaccctgatctagacattacttttaatggtaaaaaccataattacttttgcaccagcctatagcaaggcagagctgttctctcagtaacatgattcaccattttcctgatgtgtatcattaatactctctgagatttggcaggaggtgaggggagagtt

SEQ ID NO: 225497 - DNA, 571 bp, Homo sapiens
cataacaattcagttatcacggacacctattaattcatataacaaatatatattgataatatattatatgtaaactacaggattcaatgcagttagcgttctaaaataaataagacacagaaattgctttcaagttctaaaattgaaaaaastctaaaagtaagaaagtctaaaagtttaaaaaaggaaatttaatttatactcctaataaaatgagagcataatcaaaggcatcagaaagatgtacataaaatgatatgtgagaactgagggataagaaattacaattgaggaaaatcagagaaagtttatggaggaggtacctttaaacaggccttgaaagatcagtaggaaatacacataggagcctgtcttcatataagcaaggcaggactacccatctcttcagtgtgaccctgatctagacattacttttaatggtaaaaaccataattacttttgcaccagcctatagcaaggcagagctgttctctcagtaacatgattcaccattttcctgatgtgtatcattaatactctctgagatttggcaggaggtgaggggagagtt

SEQ ID NO: 225498 - DNA, 571 bp, Homo sapiens
cataacaattcagttatcacggacacctattaattcatataacaaatatatattgataatatattatatgtaaactacaggattcaatgcagttagcgttctaaaataaataagacacagaaattgctttcaagttctaaaattgaaaaaagtctaaaagtaagaaagtctaaaagtttaaaaaargaaatttaatttatactcctaataaaatgagagcataatcaaaggcatcagaaagatgtacataaaatgatatgtgagaactgagggataagaaattacaattgaggaaaatcagagaaagtttatggaggaggtacctttaaacaggccttgaaagatcagtaggaaatacacataggagcctgtcttcatataagcaaggcaggactacccatctcttcagtgtgaccctgatctagacattacttttaatggtaaaaaccataattacttttgcaccagcctatagcaaggcagagctgttctctcagtaacatgattcaccattttcctgatgtgtatcattaatactctctgagatttggcaggaggtgaggggagagtt

SEQ ID NO: 225499 - DNA, 495 bp, Homo sapiens
catctggccaatcactttggtgtgcatgaattctgggaaaaggatcaccagagtgttcaggaaaactgacttggcaawgccataaacttgaaagacaaaagatggcaggacaacacggagcaaaacaaagggttataggctttaaggttgagcagatccctggtttggctaataggagtgacaaatcttaattttttttaaaaaaaggtggcatattaaaatactcagattatacccactcactatctttgcagttataaagtttttccttatttctaacctcctgcagcaatttaagcctgtctccttttttacagtggtcataaaattattcagcctccttttaaaatacaactactgcatttgactctctgatctcctgcagcactgaattccactgtgtgcagaagtatttcattttattggtttttaaattttcttgctgcgccattcatatgaatacttattctcatattgtgcaatggcattttaagc

SEQ ID NO: 225500 - DNA, 546 bp, Homo sapiens
ctctagaaggcttggctttttaggtaaaaatctctggatagcaagaagccacaacaagacctaatgtagatcatgatcatcatgccagggctgcgtgggtgggacttgtaaaggtcttgggagatggtgagtatattttacatgagaaatgtatgtaaataattgaagctggaggtcctctctagtaatttgattrcaaaaattaccctaattttctgtcttttcctttatccttgctctttaaaatgtaacctttaagcttctgccattaataagtggagtctgtttccctacttcttgaatctgggatgaagttttggcttttttttttttttttttggctaaataacgtagcagaagtgatgatattccagttctacacctatgtcttaagatactatgcatgattcctctctccttcttggaattttgctattgccaagagaacaaatcccagttagcctgccagatgagagacacatggaggagaactacgtcttccagttgagaccatggtagagtagttagctccagcttacctgcctg

SEQ ID NO: 225501 - DNA, 558 bp, Homo sapiens
tccaagttcatctcaacaccaatgagagttcatctcaaccccattctcaaacaccaatgctctattacagcaagaatgattttttactctcccctcaaattacctgcgtgggctacactttaagttttcaaaatcttcttgtctgccacgtccttctatttgtttcacattcaagttctagcagacttcaaggctcagatgcactctgacttcttacagaagctctaacaacccctaccrtatcaatccaagttaccaatttttctgtacaaaaaagggccttgtagtcatcacttgttttattgttaagtgaagatgacacctaacaactagttatttataacatatcttttctttgagaaggatttataggaacttcctacatctacgtttttacagttcacaatgcatttcaacgtacgttctctcatttaatccttacgaaaaccctgccagagaggcaggacagatactaatcttgtttgaagatgagaaggctgcagctcagagcaaacaggactcaaagagtttagaaaataacctcaggttaggaaactt

SEQ ID NO: 225502 - DNA, 535 bp, Homo sapiens
aagcatgagtgaggataggattcttctgtcttcaaggattccacaggataggagagaagataaggcatgcataaggagctaatacatcatctgtacaatggtgtatgctktcagagagagatacagataaagagccccagaggttcagagaaagaagagatgatctctgaactcaagaataccacaagcaagatggcagatggtaaagcaacaggattcaaataaaagcatgttgatttagtatcctgaaactttactgaaatcatttaataactctagaagccttttggtggagtctttagtattttctaagtacagaatcatatcatcagcaaagagagatacgttaacttcttcttttcctgtttgggtgccttttatttctttctcttgccagatggctctggctagaacttccagtactatgttgaataagagtggtgagagtgggcatccttgtcttgttctagctccagctttttcccattcagtataattttggctataggtttgtcatacatggctcttattattt

SEQ ID NO: 225503 - DNA, 589 bp, Homo sapiens
tttgctttgggcccacatcaagtatgtgtcccttcctgccatagagcttctctgatgattcagtgtggaatgtccataggaatcaactttgaacccaggaatgcacaatcaggatatgacagggagctataaaggccatatggttacccttgaccaatggattaaaggagtcagtgggcagatgcttcctcctttgattcccagagcagaactgtttagagatgcatttcataaggcttttcagaaggtcccggcagaatggagcacccaytgttcattgggctggccaactgaataaagcatccttgtactggtttcctttcttccttgttctcttccttatctcatactaccgctcgctaagatcacatttgcaagtaaaccacctgcatacaatcctttatttcatgttctgcttagagggtggaatccaggctaagaaaatttgtattgaagtgagtcctcaaaaatagcaataaagaacttgttgctggtgggaagtgagatcacaattaccagagttttccctgtgttcgtttgggatgaggtacaggtggaaggggaaacatgatacagatgctggaagctt

SEQ ID NO: 225504 - DNA, 589 bp, Homo sapiens
tttgctttgggcccacatcaagtatgtgtcccttcctgccatagagcttctctgatgattcagtgtggaatgtccataggaatcaactttgaacccaggaatgcacaatcaggatatgacagggagctataaaggccatatggttacccttgaccaatggattaaaggagtcagtgggcagatgcttcctcctttgattcccagagcagaactgtttagagatgcatttcataaggcttttcagaaggtcccggcagaatggagcacccactgttcaytgggctggccaactgaataaagcatccttgtactggtttcctttcttccttgttctcttccttatctcatactaccgctcgctaagatcacatttgcaagtaaaccacctgcatacaatcctttatttcatgttctgcttagagggtggaatccaggctaagaaaatttgtattgaagtgagtcctcaaaaatagcaataaagaacttgttgctggtgggaagtgagatcacaattaccagagttttccctgtgttcgtttgggatgaggtacaggtggaaggggaaacatgatacagatgctggaagctt

SEQ ID NO: 225505 - DNA, 542 bp, Homo sapiens
ggaaagtttatggcaataaatgcctatatcaaaagagactaaaagtcctaaataaacaagctaatgttatacctcaaggaccaaaaaaaaaaaacaacaaaaaaaaaacaaaaaaaagaaaagaaaaactaagccttgagttagtagaaggaaggaaataaagataacagcagaaataaatgaaatagagactagaaaaacagtagaaaagatcaatggaagtaagagttgttttttgacaaggtaaaaatattgacaaaactttagctagactaaaaaagaaagagagtagtctcaaaataaaaataaaagaggagacattatatgtgataccacagaaatacaaaggaccataagagactattatgaacaattacatgccaacaaattgcataatctggaagaaattaataaattcctagacacatccaatataccaagactaaaccaygaagaaatagaaaatatgaacagaccaataatgaacaagaagattgaatcaaatataagcagtctcccaaaaaataaaagcccagaacctg

SEQ ID NO: 225506 - DNA, 584 bp, Homo sapiens
aagcctgcatcccagttgggattacataaagtaagaaagtctgtggatggcctctgggacagaaaggtggaaagaacccctgtgggaacccaagatcactatgttccactcctggctctgcccatactgacaatactgacscagttgttaactcctgtgacctcagttttcttacctttgaagtaagagaactgggcaaaataatctctaatcctttccgttatgaatttctctgacttttgagagttgaattccttattgcagggtaagcatatttataaaggaattgggatcagtccccagagaggagttgtgatatttttagcattgcctcctgattctgttaaggaattggcacccagctctctcatcttccttccctccattaggtcagtgatctgtgacccaggggctgatctctccttccccaattctaagaaatctctcttcttactctctgctcttcctgccactggaagcctcagaatcaccgttttcaaatctggctgtataatacagtctccagggagcttttatacatactaataccccagacaattgaatcaaaatcttgggggcaagcc

SEQ ID NO: 225507 - DNA, 613 bp, Homo sapiens
agattattaagacaacctcatctgttgttggactgaagtcagttcttcatgtataccttttgttattgttttaaggttagctgttgagtcatctgaacgaaaaatggctgtacacatttaaggttctggaggtcacatttgagtaatttaacactgacaaatgctgagagattattaacagagtttgtattctacttctaagccaagagccttkgtccctaagtgtggttttggtgttgacaaaaactttcctaagtatgacatcataggggtatctgtcctgtttactatttttagtttactatttaaagagttgcttagtagttaaatgtaattgcccaggaactagagtaagctgagttgcacccaaaagaaagtggctacaatctcaaccattggtttgattgcatattttagttaaatcacgagcaaattgtaccctgacaatagactcatacagacagtgactagggatgcacaaagcaatattatgggtaaggtcttataggtatcgttgttggagttaacaagtgcctgttaacaattcagaaatttaaaccaaaggaaagacaatagcttggacacaaaataagagcatacaaattaaagcatg

SEQ ID NO: 225508 - DNA, 526 bp, Homo sapiens
gaagctgtctctttcgttccttttgatccagaagtcttgggtagaagctatatctgtctctaagatcatcttcttctggaagattcttaagaatctttagtttgaggtctctggctgggacagacctttagtaatttgaggatctgttgcgatgctataattcagagccaatgtgttttactgctgcattagttgttaacagaatctggcaaagtcattggagtgtgttcaagtgcagtctctgtctratgatgcttcaaaaatagccagacacctaatctacggccatatacagctgatagttgtttccatcaatgataagattcagcagccctggaaagttattatcttaactagaattaatagaatggaaaagaatggatcatctagtggcatacaatacacagattcagtcagtaattatgcaggggattagacatattatgaatagtgaggaatctgacaaatctacgtggccctttagtttctatcatcaagtgtaccttgattgtccatgattaataag

SEQ ID NO: 225509 - DNA, 427 bp, Homo sapiens
tttatctgataggattctgaatactttctccatattatcttggattttattgatccttctcaaaacagctattttgaaatctctgtctgaaaggycccacattgcactctctttgggactgatcactgtgccttatttagttcatttggtgacatcatgtgttcctggatggccttgatgcttgtggatatttgtcagtgtctgggctttgaagagttaggtatttattgtagtctttacagtctgggcttgtttgaacctgtctttctagggaagactttccaagtatttgaagggacttgggtgttttgatatgtctttggtcaatgcagctatgtctgcattagggggaaacctaagcccaataattctgtggctcttgcagactcacagaggcaccacgttggtggtctttggtgagatgtgt

SEQ ID NO: 225510 - DNA, 497 bp, Homo sapiens
aattcccttttctatgcatccttgccaacatttgttctgttacagagtcttgctctgttcacccaggctggagtgcagtggcagaatctcggctcactgcaacctctgcctccggggttcaagcgattctcctgcctcagcctcctgagtagctgggattacaggcatgtgccaccacgcctggctaatttttgtatctttagtagagatagggtttcgcagtgttagccactcaaactcctggcctcatgtgatccatccacctcagcctcccaaagtgttgggattacaggcatgagccaccacacctgacctggccagtgatagccattctaactggggtgagatgatatcccgttgtggtttaratttgcatttccctcatgattagtgatgatgagcattgttttcatatatttattggacatttgtatgtcttttgggaaacgtctgttcacatcatttgcccatttttaaattgaatttttttttttttt

SEQ ID NO: 225511 - DNA, 499 bp, Homo sapiens
gaattcccttttctatgcatccttgccaacatttgttctgttacagagtcttgctctgttcacccaggctggagtgcagtggcagaatctcggctcactgcaacctctgcctccggggttcaagcgattctcctgcctcagcctcctgagtagctgggattacaggcatgtgccaccacgcctggctaatttttgtatctttagtagagatagggtttcgcagtgttagccactcaaactcctggcctcatgtgatccatccacctcagcctcccaaagtgttgggattacaggcatgagccaccacacctgacctggccagtgatagccattctaactggggtgagatgatatcccgttgtggtttagatttgcatttccctcatgattagtgatgatgagcattgttttcatatatttattggacatttgtatgtcttttgggaaacrtctgttcacatcatttgcccatttttaaattgaattttttttttttttt

SEQ ID NO: 225512 - DNA, 508 bp, Homo sapiens
tcaggccccaggcatgggaacagagatgctaggggcacatccaccatgggkgggcccactaggctgttcctcaggctctggacacagacatgcaaccacttagccaacgtgtgagcatatcagctcctcagtggcatgaaggcctctcctacttggccgagggcatgtggcagtttggctggctaaagggtggaactgtcctggataggtccactagactgttcctctgattagtagtgccggtgatgggagttggttttcctgctgtacaggactagagtcacagataatccttggcctatgtttcatgcagcttgggtagaagcattgcagtcagccatgtggtgggcttggtggaatgaaaaaggagccctagggctcaggaggtacagcagctcctggccttagagtaggcacactccagaagtagctctggtatcaagatagtgctgtgctgtagcagcttggctcacagtgggtgggtgagagttgggagtacacaccctgt

SEQ ID NO: 225513 - DNA, 508 bp, Homo sapiens
tcaggccccaggcatgggaacagagatgctaggggcacatccaccatgggggggcccactaggctgttcctcaggctctggacacagacatgcaaccacttagccaacgtgtgagcatatcagctcctcagtggcatgaaggcctctcctacttggccgagggcatgtggcagtttggctggctaaagggtggaactgtcctggataggtccactagactgttcctctgattagtagtgccggtgatgggagttggttttcctgctgtacaggactagagtcacagataatccttggcctatgtttcatgcrgcttgggtagaagcattgcagtcagccatgtggtgggcttggtggaatgaaaaaggagccctagggctcaggaggtacagcagctcctggccttagagtaggcacactccagaagtagctctggtatcaagatagtgctgtgctgtagcagcttggctcacagtgggtgggtgagagttgggagtacacaccctgt

SEQ ID NO: 225514 - DNA, 611 bp, Homo sapiens
ctacctgccttcctcggcatgcagtcccttcctccatcttcaaagcactcactccaacctctgcttctgttgtcatatttccctctttgactctgaccttcctagtcttctcttataggraccctgtgattacacttagggcctacctggattatttagaacaatctcttatctcaagatttaaagttatatctgcaaagtgccttttgtcatagaaggtaatacattcatgggttccagggattaggatgtggacattgttggggtggtattatcagtctaccccagtacttaaatggaggccatcctgtgaatgatgaaagcaagacagtgtctgccctgttgacctgcagtgtgacaggtgacataaaatcagttctctattgtgatgctgtgtcatcttctgagctatgtgggctcatgtcctcagcctcatcaggaaagctgcatcaatctccttccttcccttcttctctagctcattggaattcatggataccagtaggctctccccaagatgcctgtaagggatcagaattattcttcttcttggcggggtgggggatctatgatggttaattttatgtcaacttgccttggccatggtaccc

SEQ ID NO: 225515 - DNA, 611 bp, Homo sapiens
ctacctgccttcctcggcatgcagtcccttcctccatcttcaaagcactcactccaacctctgcttctgttgtcatatttccctctttgactctgaccttcctagtcttctcttataggaaccctgtgattacacttagggcctacctggattatttagaacaatctcttatctcaagatttaaagttatatctgcaaagtgccttttgtcatagaaggtaatacattcatgggttccagggattaggatgtggacrttgttggggtggtattatcagtctaccccagtacttaaatggaggccatcctgtgaatgatgaaagcaagacagtgtctgccctgttgacctgcagtgtgacaggtgacataaaatcagttctctattgtgatgctgtgtcatcttctgagctatgtgggctcatgtcctcagcctcatcaggaaagctgcatcaatctccttccttcccttcttctctagctcattggaattcatggataccagtaggctctccccaagatgcctgtaagggatcagaattattcttcttcttggcggggtgggggatctatgatggttaattttatgtcaacttgccttggccatggtaccc

SEQ ID NO: 225516 - DNA, 611 bp, Homo sapiens
ctacctgccttcctcggcatgcagtcccttcctccatcttcaaagcactcactccaacctctgcttctgttgtcatatttccctctttgactctgaccttcctagtcttctcttataggaaccctgtgattacacttagggcctacctggattatttagaacaatctcttatctcaagatttaaagttatatctgcaaagtgccttttgtcatagaaggtaatacattcatgggttccagggattaggatgtggacattgttggggtggtattatcagtctaycccagtacttaaatggaggccatcctgtgaatgatgaaagcaagacagtgtctgccctgttgacctgcagtgtgacaggtgacataaaatcagttctctattgtgatgctgtgtcatcttctgagctatgtgggctcatgtcctcagcctcatcaggaaagctgcatcaatctccttccttcccttcttctctagctcattggaattcatggataccagtaggctctccccaagatgcctgtaagggatcagaattattcttcttcttggcggggtgggggatctatgatggttaattttatgtcaacttgccttggccatggtaccc

SEQ ID NO: 225517 - DNA, 455 bp, Homo sapiens
cactctaacggtacaagagcctgaaggctcaattctcaggtttttgtttctctgtctgtcctcattccctgagtgatcctgcgccrtctcctctcctgtcattaaacatggaggtgaccattgagtgtacatccagctagctttctccctgagcgccaggttcctgcgtttacttgcatctgtgataagtaccatccacatccacatgcctgccagcattttctattccctcccccggctttatttttctacataacacttagacctgactgatgacatctgtttgccaattttctgtttcttcccagtagaatggaagctccctgagagcatgggtcctgttccatctcagacctggcttcttgatctacacttatgccctgggtgctgccatccaggctcgtgactttaataggctgataattctcagacttctagtccagacctccctgtcc

SEQ ID NO: 225518 - DNA, 606 bp, Homo sapiens
ttgtttttactttactcattttaaaaaagtaaaagaaaggctctaaagagttcaaatacaaaatatcttttcttgggactttgttcattttaaggtggttgatccaatraggaaaagggctcaggtctgtgatgttaatattgtgtcaacttgactgtactgaaggatgcaaagtattgttcctgggtgtgtctgtgagggtgttgccaaaggagattaacatttgagtcagtggagtgggagaggcagactcaacctcaatctgtgtgggcaccatctaatcagctgccagcgtggctaggataaagcaggcacaagaagatgaaagagcagacttgctgagtcttccagcctccatctttctcccgtgctggatgctaggaagccctcaaacatcagactccaagtgcttcagcttttggactcttgtatttataacagtgatttaccaggggctcctggggcctttggccacagattgaaggcttccctacttctgaggttttgggactcggactgatccaccactggcttccttgctcctcagcttgctaacggcctactgtgggactttaccttgtgatcgtgtgagtcagttctccttaa

SEQ ID NO: 225519 - DNA, 606 bp, Homo sapiens
ttgtttttactttactcattttaaaaaagtaaaagaaaggctctaaagagttcaaatacaaaatatcttttcttgggactttgttcattttaaggtggttgatccaatgaggaaaagggctcaggtctgtgatgttaatattgtgtcaacttgactgtactgaaggatgcaaagtattgttcctgggtgtgtctgtgagggtgttgccaaaggagattaacatttgagtcagtggagtgggagaggcagacycaacctcaatctgtgtgggcaccatctaatcagctgccagcgtggctaggataaagcaggcacaagaagatgaaagagcagacttgctgagtcttccagcctccatctttctcccgtgctggatgctaggaagccctcaaacatcagactccaagtgcttcagcttttggactcttgtatttataacagtgatttaccaggggctcctggggcctttggccacagattgaaggcttccctacttctgaggttttgggactcggactgatccaccactggcttccttgctcctcagcttgctaacggcctactgtgggactttaccttgtgatcgtgtgagtcagttctccttaa

SEQ ID NO: 225520 - DNA, 601 bp, Homo sapiens
tatactgcatgaacacataatttcaatagtttgaaatctttcttaatttgcaaaaagacgtagaccccagagtgtgaagttaataataatctggattctggctagtaatttatatttgcgaatataagcaatgaatgagaaataaaattgagttgaagtttttgtcttaggtatgatttaaaaatgttaattgatttttgagttcaaattaagaaaaatagtttataaggcttttaaaaatgtaatatctctaggggaattaataacaaggtgcttacattttaaatcacaagagcactgagcaaaaaagcattcgtaaagccagagaacaaacaatataaaaagcaagaggacattaaaaaaaagtataaracaagatgatataagaccaaacataccagttattaaaacagatgtaaacatattaaatattgctattaaaatattaaaagtccacgatagagttaaaagttaaaattcaacttatgctccaggacagaaagttggcagatctgggattctctccctcttctctttggtgttgaaagttgtgttctttctgctacaccatgctatttacttaaatatgctcatgaaatta

SEQ ID NO: 225521 - DNA, 601 bp, Homo sapiens
tatactgcatgaacacataatttcaatagtttgaaatctttcttaatttgcaaaaagacgtagaccccagagtgtgaagttaataataatctggattctggctagtaatttatatttgcgaatataagcaatgaatgagaaataaaattgagttgaagtttttgtcttaggtatgatttaaaaatgttaattgatttttgagttcaaattaagaaaaatagtttataaggcttttaaaaatgtaatatctctaggggaattaataacaaggtgcttacattttaaatcacaagagcactgagcaaaaaagcattcgtaaagccagagaacaaacaatataaaaagcaagaggacattaaaaaaaagtataagacaagatgatataagaccaaacataccagttattaaaacagatgtaaacatattaaatattgctattaaaatattaaaagtccaygatagagttaaaagttaaaattcaacttatgctccaggacagaaagttggcagatctgggattctctccctcttctctttggtgttgaaagttgtgttctttctgctacaccatgctatttacttaaatatgctcatgaaatta

SEQ ID NO: 225522 - DNA, 601 bp, Homo sapiens
tatactgcatgaacacataatttcaatagtttgaaatctttcttaatttgcaaaaagacgtagaccccagagtgtgaagttaataataatctggattctggctagtaatttatatttgcgaatataagcaatgaatgagaaataaaattgagttgaagtttttgtcttaggtatgatttaaaaatgttaattgatttttgagttcaaattaagaaaaatagtttataaggcttttaaaaatgtaatatctctaggggaattaataacaaggtgcttacattttaaatcacaagagcactgagcaaaaaagcattcgtaaagccagagaacaaacaatataaaaagcaagaggacattaaaaaaaagtataagacaagatgatataagaccaaacataccagttattaaaacagatgtaaacatattaaatattgctattaaaatattaaaagtccacgatagagttaaaagttaaaattcaacttatgctccaggacagaaagttggcagatctgggattctctccctcttctctttggtgttgaaagttgtgttmtttctgctacaccatgctatttacttaaatatgctcatgaaatta

SEQ ID NO: 225523 - DNA, 417 bp, Homo sapiens
ataatataaagaaaggatgggtaagtgtgtccccaaaaagccaaaggtcattcattgatctgcaatggaaattctaagattgctgaatcattttatagatgaagaaacagatttagaaagataaagtgactcgcctgataataagctgcatcacacagatacatcaattcatcctagataacaacctagacagctgatgcatttgcacatttgcctcttcagataaactattctcaagggaacttactgtataagaggaattttacagggttktttttttttattattatactttaagttctagggtacatgtgcacaacgtgcaggtttcttacatatgtatacatgcgccatgttggtgtgctgcacccattaacttgtcgtttacattaggtatatctcctaatgctatccctc

SEQ ID NO: 225524 - DNA, 610 bp, Homo sapiens
cctgtgataaatgaaagggctgtgtcaattagagatcttaaataaaggctggattttggcagaatagaattagagtcacaggaaaagctaaaaaacaaaacttagaaactgggtagaaagaagggatgttaaatagcarccagactacagctaaactttgccgcaaggtgaatacggtgaggacactcccatcaccatcaccaaatactggccaccactgctgcgtttctcctcggaccccagatggtgccaccatacagctctcactgctgagctgctatacctgccccaggatgggctcccagagttcctcttcattggatcacaagctcccaattttcagtccagggaggagtttctgattagaagtgccttaggtgtaggcattctacttagcagcaagagtcaggaacctgacagcaggaagcaggctctgcctcccagtaatgggcatttctggacatttctcaaacgtgggaagggaccgcagacattcaaaaaagatgggtgctaaatacccatgtagcactccctttagatgcccaatataacatacagattaatgcttgggagaggaggaggtaagaagtggctctatttcaatcatgta

SEQ ID NO: 225525 - DNA, 610 bp, Homo sapiens
cctgtgataaatgaaagggctgtgtcaattagagatcttaaataaaggctggattttggcagaatagaattagagtcacaggaaaagctaaaaaacaaaacttagaaactgggtagaaagaagggatgttaaatagcagccagactacagctaaactttgccgcaaggtgaatacggtgaggacactcccatcaccatcaccaaatactggccaccactgctgcgtttctcctcggaccccagatggtgccaccatacagctctcactgctgagctgctatacctgccccaggatgggctcccagagttcctcttcattggatcacaagctcccaattttcagtccagggaggagtttctgattagaagtgccttaggtgtaggcattctacttagcagcaagagtcaggaacctgacagcaggaagcaggctctgcctcccagtaatgggcatttctggacatttctcaaacgtgggaagggacygcagacattcaaaaaagatgggtgctaaatacccatgtagcactccctttagatgcccaatataacatacagattaatgcttgggagaggaggaggtaagaagtggctctatttcaatcatgta

SEQ ID NO: 225526 - DNA, 610 bp, Homo sapiens
cctgtgataaatgaaagggctgtgtcaattagagatcttaaataaaggctggattttggcagaatagaattagagtcacaggaaaagctaaaaaacaaaacttagaaactgggtagaaagaagggatgttaaatagcagccagactacagctaaactttgccgcaaggtgaatacggtgaggacactcccatcaccatcaccaaatactggccaccactgctgcgtttctcctcggaccccagatggtgccaccatacagctctcactgctgagctgctatacctgccccaggatgggctcccagagttcctcttcattggatcacaagctcccaattttcagtccagggaggagtttctgattagaagtgccttaggtgtaggcattctacttagcagcaagagtcaggaacctgacagcaggaagcaggctctgcctcccagtaatgggcatttctggacatttctcaaacgtgggaagggaccgcagacattcaaaaaagatgggtgctaaatacccatgtagcactccctttagatgcccaatataacatacagattaatgcttgggagaggaggargtaagaagtggctctatttcaatcatgta

SEQ ID NO: 225527 - DNA, 243 bp, Homo sapiens
ttgtttctttgtttaatgacttgactggactattttcgtggtctattttccctgataggaagtctctggttttgttcctcagagggcaccgcattggacttgcacatagtcacctggattgacaatggtttcagcayggctttttactgtttcttattgtgaggctttcccagaggctgtctgcctctgttgttatcacaaccagatgttaggcttcactaattgtcagctgatttctctttt

SEQ ID NO: 225528 - DNA, 559 bp, Homo sapiens
tcagtaggcataatggaaagcatattttcactgtgatctctgggtctttttgaagtttgttatctcgagggttgcacaaatatgagaggttcttttcagatatcataaaataccattagaatgctacaaacaagaaaattcagacattaatggcagaaatactgttcctctatgaagcagagtttattttccacttagtctctgtttcatataaatatgaaaaatattctctataaaatttayctgagaaggagattcacaggtttcatacatcgaatgagagaatttccatctgctaatggagttgttaatagttccaacaaaaatattgacatatagcataaaaatttattgtccctaaacatgtcctataagacccaaaataaaactttatatcacattttattgcacatctcttttactttcttcctttactttgatacaagtgaaaagaacattaaaatttcttttgtattcaaccccaagtatattaaattattatttccttagatcatttatgtctttaaaaattctttccataccagtatgataggaagta

SEQ ID NO: 225529 - DNA, 559 bp, Homo sapiens
tcagtaggcataatggaaagcatattttcactgtgatctctgggtctttttgaagtttgttatctcgagggttgcacaaatatgagaggttcttttcagatatcataaaataccattagaatgctacaaacaagaaaattcagacattaatggcagaaatactgttcctctatgaagcagagtttattttccacttagtctctgtttcatataaatatgaaaaatattctctataaaatttatctgagaaggagattcacaggtttcatacatcgaatgagagaatttccatctgctaatggagttgttaatagttccaacaaaaatattgacatayagcataaaaatttattgtccctaaacatgtcctataagacccaaaataaaactttatatcacattttattgcacatctcttttactttcttcctttactttgatacaagtgaaaagaacattaaaatttcttttgtattcaaccccaagtatattaaattattatttccttagatcatttatgtctttaaaaattctttccataccagtatgataggaagta

SEQ ID NO: 225530 - DNA, 553 bp, Homo sapiens
aaaatttctttgctatgagtcattatggcaaaagattaaagatcagcagttcaaattatcttctaaagggtattgtgcatgtggttttgatctgggaagaaatgagaaatgctgcaagctcaggtactgacaatggartaaaatgaatacttggcaattgtcgataatcaaataaacaaaatagaacattttttggtgtcattttagagaagattcaagcatgacatggaactacctttatggttatctctacactgctaattaatgactattatctttgaattggtttaacataatccagaaatttatattgcttggtgcaacgtagatagatccttaagtgggatgtgtctatgcatttcagatgcctcaaattatataaaatcaatgttttgaaggttgtccaagtattttcgttttcatgaggaagatttggaatggttgatttatatatcattggtggatcctctccattgctgttcagcaagttggcatcattgtcccaaataacagaaattgtgaggcagagagaagaactgcagaggaatatagc

SEQ ID NO: 225531 - DNA, 553 bp, Homo sapiens
aaaatttctttgctatgagtcattatggcaaaagattaaagatcagcagttcaaattatcttctaaagggtattgtgcatgtggttttgatctgggaagaaatgagaaatgctgcaagctcaggtactgacaatggaataaartgaatacttggcaattgtcgataatcaaataaacaaaatagaacattttttggtgtcattttagagaagattcaagcatgacatggaactacctttatggttatctctacactgctaattaatgactattatctttgaattggtttaacataatccagaaatttatattgcttggtgcaacgtagatagatccttaagtgggatgtgtctatgcatttcagatgcctcaaattatataaaatcaatgttttgaaggttgtccaagtattttcgttttcatgaggaagatttggaatggttgatttatatatcattggtggatcctctccattgctgttcagcaagttggcatcattgtcccaaataacagaaattgtgaggcagagagaagaactgcagaggaatatagc

SEQ ID NO: 225532 - DNA, 553 bp, Homo sapiens
aaaatttctttgctatgagtcattatggcaaaagattaaagatcagcagttcaaattatcttctaaagggtattgtgcatgtggttttgatctgggaagaaatgagaaatgctgcaagctcaggtactgacaatggaataaaatgaatacttggcaattgtygataatcaaataaacaaaatagaacattttttggtgtcattttagagaagattcaagcatgacatggaactacctttatggttatctctacactgctaattaatgactattatctttgaattggtttaacataatccagaaatttatattgcttggtgcaacgtagatagatccttaagtgggatgtgtctatgcatttcagatgcctcaaattatataaaatcaatgttttgaaggttgtccaagtattttcgttttcatgaggaagatttggaatggttgatttatatatcattggtggatcctctccattgctgttcagcaagttggcatcattgtcccaaataacagaaattgtgaggcagagagaagaactgcagaggaatatagc

SEQ ID NO: 225533 - DNA, 553 bp, Homo sapiens
aaaatttctttgctatgagtcattatggcaaaagattaaagatcagcagttcaaattatcttctaaagggtattgtgcatgtggttttgatctgggaagaaatgagaaatgctgcaagctcaggtactgacaatggaataaaatgaatacttggcaattgtcgataatcaaataaacaaaatagaacattttttggtgtcattttagagaagattcaagcatgacatggaactacctttatggttatctctacactgctmattaatgactattatctttgaattggtttaacataatccagaaatttatattgcttggtgcaacgtagatagatccttaagtgggatgtgtctatgcatttcagatgcctcaaattatataaaatcaatgttttgaaggttgtccaagtattttcgttttcatgaggaagatttggaatggttgatttatatatcattggtggatcctctccattgctgttcagcaagttggcatcattgtcccaaataacagaaattgtgaggcagagagaagaactgcagaggaatatagc

SEQ ID NO: 225534 - DNA, 595 bp, Homo sapiens
agcttaaaagttagtggatccttgccagagggatagtcttaaataaaagataccaagggatccatttaggaaagaaaccacttgagggtacgactgtaagttgtctgacaagctcaattttttattgkaaaataatactttaaagttttgtaaactatatgtttgttacagaaaacttaagacaaacaaaaaaagtataacagaggaaaaacaacacccacgatccctcattcaacaaaaaatgcagctatcattatggactgtttatctaccatcatctttgcgctcaaactgatgatgcactttaagaccacaacatttctgaacagtattaaagactcttggtacccatcatttttggtggctgcataatgtttcttttacatatagactataatttccttaacccctcccatgttgttgaatgttttgtttccaatttttgttattgtaacttatgctgtcctgaatatctgtgtgcacaaagctttgtttacatttctgtttatttccttgtgagatattcttagaattgtacaactcagggaagagactgagttttttaaatttttatttatttatttattatacgtta

SEQ ID NO: 225535 - DNA, 553 bp, Homo sapiens
agcaggtggaagcccaactccacagcaaggacctcagtgcccttctgtctgtgaccctggtcatctatttctgacccatctcccctgtgttactctgcagttcctaaagacccttctcccatctctcatgagatgtcatcctctatgcctctgccacttatttcctctgcctggaatgctctttccctttcttgtctaactaacccctcctgatcctttaaagtttagcttaaaagttagtggatccttgccagagggatagtcttaaataaaagataccaagggatccatttaggaaagaaaccacttgagggtacgactgtaagttgtctgacaagctcaattttttattgtaaaataatactttaaagttttgtaaactatatgtttgttacagaaaacttaagacaaacaaaaaaagtataacagaggaaaaacaacacccacratccctcattcaacaaaaaatgcagctatcattatggactgtttatctaccatcatctttgcgctcaaactgatgatgcactttaagaccacaacatttctgaac

SEQ ID NO: 225536 - DNA, 467 bp, Homo sapiens
catgcttttgtaacttatgaaagttttagatacgaattaaaaatttgtaggggcatatacagttttacaaaattcttacaacatttttcaagactgctgggtgataatagtactgtctggctattaacttggtcatctaaaatgccattttaacagagagaggaaaaacgttgtgtgtgttgaggaaaagagtgatctcaatgttttaatattacaagtcttgtggatagcrtatatactagatggatagtatccacgattaactccccacaagaccaccagaaaacctattgccttatgctagggtaggtttattagacctattttcataagagagaaagccatcttgacatcctaccacatcttggagcaggaaagttagaggaggatattaataggattggaggtccagctaatgtcatttagggtgggtcattcacagtggaaaactgattcagattgggcaa

SEQ ID NO: 225537 - DNA, 467 bp, Homo sapiens
catgcttttgtaacttatgaaagttttagatacgaattaaaaatttgtaggggcatatacagttttacaaaattcttacaacatttttcaagactgctgggtgataatagtactgtctggctattaacttggtcatctaaaatgccattttaacagagagaggaaaaacgttgtgtgtgttgaggaaaagagtgatctcaatgttttaatattacaagtcttgtggatagcgtatatactagatggatagtatccacgattaactccccacaagaccaccagaaaacctattgccttatgctagggtaggtttattagacytattttcataagagagaaagccatcttgacatcctaccacatcttggagcaggaaagttagaggaggatattaataggattggaggtccagctaatgtcatttagggtgggtcattcacagtggaaaactgattcagattgggcaa

SEQ ID NO: 225538 - DNA, 440 bp, Homo sapiens
tgaaaacagagctcccatacaaagggaggggacccaaagagggtagcmtttgctagctcaaatgcctgggttcatgtcctgatcattgtccctcctgctgtgctctcaggcaatagatgattggctatttctttacctcatgttgttgcataattagcattttagtgagctctctttactatctgattggtcggatgtgagctaagttgcaggccccgtgtttaaaggtggaagccatcaccttcccagctaggcttagggattcttagtcagcctagaaaatccagctagtcctgtctctcagtaccccctctcaacaggaaaacccaagtgctgctggggaggttggccgacaaccgctctaactgcttcctgctgaattggggcatagtagggatggtgcagttgagatttcctcgggaggggtgccttcaatgtca

SEQ ID NO: 225539 - DNA, 571 bp, Homo sapiens
ctctcccgaccccctccccacggtggacacattctccttcacagaagaaaggccctgggacccctcagctaccggtcccgaaactgcaaacctagacccccctgtgctccaacctcctcttggatgaggggcctcctcctcgctctactgagggagtcctcccccactgcttctgcctcgtgccttctgactcaaacctcctaggaggacacctgcatcctctcagcctcgtactctggctttggggggcaccaagctggggtcaccagctccagcagatgccttttgccccttgcctcagacactgtccactccttccacgaagctctcctgtgggcctcctgagcacctgctccactgaccgcctggctgccggctgccattcctgccccmtctccttggcctccttcttctccttcacttatggcgagttttcactgccttccattggaagctatcttttccaccccatggcttccctcccatccagacctctcttcctggactctgcagagagctccaattcgaactgtccatgcagggtctgatcatcctcccctcttgccaagct

SEQ ID NO: 225540 - DNA, 572 bp, Homo sapiens
ctctcccgaccccctccccacggtggacacattctccttcacagaagaaaggccctgggacccctcagctaccggtcccgaaactgcaaacctagacccccctgtgctccaacctcctcttggatgaggggcctcctcctcgctctactgagggagtcctcccccactgcttctgcctcgtgccttctgactcaaacctcctaggaggacacctgcatcctctcagcctcgtactctggctttggggggcaccaagctggggtcaccagctccagcagatgccttttgccccttgcctcagacactgtccactccttccacgaagctctcctgtgggcctcctgagcacctgctccactgaccgcctggctgccggctgccattcctgccccatctccttggcctccttcttctccttcacttatggcgagttttcactgccttccattggaagctatcttttccaccccatggcttccctcccatccagasctctcttcctggactctgcagagagctccaattcgaactgtccatgcagggtctgatcatcctcccctcttgccaagctt

SEQ ID NO: 225541 - DNA, 442 bp, Homo sapiens
cctgtgaacaatcataaatgctgtttttttaacattcagtttcaaattataattcctagtatatagaaatgattgatttttataaacaattatttttcagtaaaaataagtgacttttctttatagactgtttctgaaggattctactttatgttcatggaaattacactcttttaaycctgagattttatggattgctgaagtatataattaaattgtgtagtcattataatatgtacaggtggcagaaacaggttgggaacaaacccaatcaactcttggtaagcatacaaataaaacaggaagagcaaaagtatatcagtgtatcacagtagactactgggctatagggattcagcatggtcatgaaaaaatagagtaaacagaaggtcagtcagttaatctggagagtcagctaagcgaaggtcatttaagagagctt

SEQ ID NO: 225542 - DNA, 363 bp, Homo sapiens
tgatccttatttctagcaccataggagtaagttttacctgtttttgaacttcatataaatggaattgtatgtgtactattctgtgcctggtctcttttgtccaatgtcacatttgagagatccccccgtgtcatagtaacagtagtttgttccttttcatcacagtgtagtattccattacatgaatatattacagtttatttatccattctattgttgatgaatgcatggagtttgttttcattttggggtgataatgaaaacaatatratatttatatttataatgtttagataattatagtgaatataattatatttattatttgctccatgaatgcttctctgagctttcttggagata

SEQ ID NO: 225543 - DNA, 444 bp, Homo sapiens
aagaaattagttaaaaattaaaaacttcccttgccaagcattgaaatattgcacaaggcgaatatatttattttattattttattttattattattttttgagaacgagtcttgctttgtcacccaggctggggtgcagtagagcgatctctgctcactgcaacctctgcttcctgggttcaagcgattctcctgtctcagcctcctgagtagctgagactacaggcgcgtgycaccatgcctggctaatttttgtgtctccgtgcccagcctgacaaatatatataaattcaccaagtatggccagaaagcctctcccttcaaacaggctttttgtaagtaggtggagtgggtatccccagaacgtatcctttcacaagtgggctttcagagaactggcctgctgcataaaatcctccacttttggctgtgaaacctatgttg

SEQ ID NO: 225544 - DNA, 636 bp, Homo sapiens
gattgtggtaatagcacaacttttaaaattcactaaaaatcattctaacttacaagggtacgttttatgtcaaatatacttcaataatcctcaagtccatagcaatattcagaaagaaagaaaragagaaagagagaaagcaagcaagcgggcaagcaagcgggcaagcaagcgaagggtgtaagaaactttgccaccattgtagatgaccattatgctaacttcttactccaaaaattagtcattaaagaaaaagaatcgagcattcaccttgcttttttaaagtcaaaattgtggttaattcctaattaatggagaaagctttcctttacaggagaataccggtaattaatgtgtagaaaagaaataataaaattagaaaaatattattttgccaaacataataaagtaactgattcagacaagaacaatttgtatgtgctaatactactaagtaaaaggattgagggataccaggatatttaaatggtggcaaagtatcactccacagattatttgatcattacaaagggagaaacatatctttacaatggagagatctgatgatggtaaccttcttaacctgtgggacaaacttggcatcactgacagtgaaacaacctgacattaggtact

SEQ ID NO: 225545 - DNA, 584 bp, Homo sapiens
ataggctccgatgctcagttgcttctctgcttgccgctcagctgcttgtgttgctctgccagctaagtcttttatgggcccaggatgggggtaaggggcaagccagaaaggcaacgtttgggtggaaaaacggggtcagctgtttccacgtaggrccacagatctaggctgagcttaagggtggggtttagatgggagcccagctcttctatatcactagtagttaatggattctttaccaccacattcttgcaggaaaaagaaactgctttctgttacgaatatctttgaggaagcagcaaaattaattttagcaaatctcaaccctttactgcccatcttttttatgttctgtatggtgaaatgggaagtttgcataaagcacttgtataattgtttgagttgcaaattgaactagcctcttttttatagaacaccatttgtacttgaaagaatgactgatagacagactggttattcagacttgggtatttggcacttccccaaaaaaatgaacctagtgagcatgtcacttcaaagaaaacaatggatagtgcttgttgccagtgataaaattcaagctt

SEQ ID NO: 225546 - DNA, 596 bp, Homo sapiens
gctgcatctgtccataggctccgatgctcagttgcttctctgcttgccgctcagctgcttgtgttgctctgccagctaagtcttttatgggcccaggatgggggtaaggggcaagccagaaaggcaacgtttgggtggaaaaacggggtcagctgtttccacgtaggaccacagatctaggctgagcttaagggtggggtttagatgggagcccagctcttctatatcactagtagttaatggattctttaccaccacattcttgcaggaaaaagaaactgctttctgttaygaatatctttgaggaagcagcaaaattaattttagcaaatctcaaccctttactgcccatcttttttatgttctgtatggtgaaatgggaagtttgcataaagcacttgtataattgtttgagttgcaaattgaactagcctcttttttatagaacaccatttgtacttgaaagaatgactgatagacagactggttattcagacttgggtatttggcacttccccaaaaaaatgaacctagtgagcatgtcacttcaaagaaaacaatggatagtgcttgttgccagtgataaaattcaagct

SEQ ID NO: 225547 - DNA, 649 bp, Homo sapiens
aaactagaagaaaatgtataaatacgcagttcatgtcaacaaactactttttacgctgatgtgagaataaatcaaaacaacctacctcttttgtcttcagtggtatatctccaaggtacaccttgtacatcttattaatgatggcaggattattccagtcaattaagctatggaaggtttcaacacaggttgttaaaattatttttccccctccttcagtgatttcaaaaaaattatagccccaacatttcttaacaaaagaaaatgttagaaacacacaaatgaaatgggcaattgacattgyagaagagaaggaaaagaaagggactaatttctatcaaagtatgtttttaaaccaaaacaaatacaaatcacttatcccacccagactcaacagattattgtatccaatggcacaatttggtaccacaagaacactggacactgttcctacatagatgggttctcaggccaatggcatggagcaactccaacagagcagagctttactacacttgttcaaagaggcctggggcagggtaggattcgtctgtttaaccatttggcagttcaaaagtgataaggaaagtgacaaaaaaatttttacccatgaaattaaagccacatctaggaagcttgcaagccaccg

SEQ ID NO: 225548 - DNA, 649 bp, Homo sapiens
aaactagaagaaaatgtataaatacgcagttcatgtcaacaaactactttttacgctgatgtgagaataaatcaaaacaacctacctcttttgtcttcagtggtatatctccaaggtacaccttgtacatcttattaatgatggcaggattattccagtcaattaagctatggaaggtttcaacacaggttgttaaaattatttttccccctccttcagtgatttcaaaaaaattatagccccaacatttcttaacaaaagaaaatgttagaaacacacaaatgaaatgggcaattgacattgtagaagagaaggaaaagaaagggactaatttctatcaaagtatgtttttaaaccaaaacaamtacaaatcacttatcccacccagactcaacagattattgtatccaatggcacaatttggtaccacaagaacactggacactgttcctacatagatgggttctcaggccaatggcatggagcaactccaacagagcagagctttactacacttgttcaaagaggcctggggcagggtaggattcgtctgtttaaccatttggcagttcaaaagtgataaggaaagtgacaaaaaaatttttacccatgaaattaaagccacatctaggaagcttgcaagccaccg

SEQ ID NO: 225549 - DNA, 536 bp, Homo sapiens
agatctagatgaacagcttgaaccaccccaccccccattctatgccctgaggaaatctaaggttctcctcaagatttctacatattttcaaagatttgatgtgcttccaaagccaagaaaggctcccyattctctggctgctgtctctgttctgcattgttgacttatatggtcaacttggccccttcctggatttaggcatgcacatacacctacatattcacacaaagcattagtgactttagtgacgatttgaggattattggccagacttcctattaggaagcacacagcaagctatttaaaatcactcattaacgacttcacttcttaagtcttttcctccatcttgcttcagggagagctacacttgcttttgcctcagatgctgctagcccctcaccttctctctctctcctctccttatcttttctgctgtcatctccttccttcaaacatacagaacaggttagacttctttacttccttctgcaatagctgcatctccaaacatattaaagtactgagtagaacac

SEQ ID NO: 225550 - DNA, 538 bp, Homo sapiens
caccccccattctatgccctgaggaaatctaaggttctcctcaagatttctacatattttcaaagatttgatgtgcttccaaagccaagaaaggctccccattctctggctgctgtctctgttctgcattgttgacttatatggtcaacttggccccttcctggatttaggcatgcacayacacctacatattcacacaaagcattagtgactttagtgacgatttgaggattattggccagacttcctattaggaagcacacagcaagctatttaaaatcactcattaacgacttcacttcttaagtcttttcctccatcttgcttcagggagagctacacttgcttttgcctcagatgctgctagcccctcaccttctctctctctcctctccttatcttttctgctgtcatctccttccttcaaacatacagaacaggttagacttctttacttccttctgcaatagctgcatctccaaacatattaaagtactgagtagaacaccatttaacagagtctaccctaaagagatct

SEQ ID NO: 225551 - DNA, 538 bp, Homo sapiens
caccccccattctatgccctgaggaaatctaaggttctcctcaagatttctacatattttcaaagatttgatgtgcttccaaagccaagaaaggctccccattctctggctgctgtctctgttctgcattgttgacttatatggtcaacttggccccttcctggatttaggcatgcacatacacctacatattcacacaaagcattagtgactttagtgacgatttgaggattattggccagacttcctaytaggaagcacacagcaagctatttaaaatcactcattaacgacttcacttcttaagtcttttcctccatcttgcttcagggagagctacacttgcttttgcctcagatgctgctagcccctcaccttctctctctctcctctccttatcttttctgctgtcatctccttccttcaaacatacagaacaggttagacttctttacttccttctgcaatagctgcatctccaaacatattaaagtactgagtagaacaccatttaacagagtctaccctaaagagatct

SEQ ID NO: 225552 - DNA, 340 bp, Homo sapiens
gggaactaacttccttggagcatattttataagtcaggccctcttcaattyttcagatatggggtctttatttcatctccccataatttgagatgtagaaattattgcccagattttttgggaaaatgagagtttcagtaccttgaccaggtcatagggcaattaccttgcccagaatttgaatctaacacttcttgactcctaggcctgagctttttagctgtaccatgctgcttcttgacccagtcaaaagctcaaagcaagcataagatttgccaatgacatcagacccacatattcagactcccctcaagagactctatgtgaaagaacttgagag

SEQ ID NO: 225553 - DNA, 533 bp, Homo sapiens
attacattcccctgttgcgtctcaatgtgcaaaaaagtcaggatattgatattcagtgcaaaagttcttttcacaagaagttctgctaagggatatatgtagctatgctacatgttttattaacttttaagaattctaaattttattgcattttaaatgcttagcaaagagccaggagaaaagaaagtactcaggaaatgttcgttatgatcattattattatttcaacttacactaagcatgctttataaatggaacagatttaacatatcatgtaataaacagctttaataacaatttccatttctcaatgttctaacattaattttaccccagcacctccctaaaaatatgactttattcagagagctttttttttctaacttctcacatactatgttcattttctgaggttagaacataatggatatgtttatgagcacagggctgaatsctgggaaatgtagatttggtgacctctggcaaatgaatttgctcctctcacggctggtagaggcagctgtaaagtgcag

SEQ ID NO: 225554 - DNA, 533 bp, Homo sapiens
attacattcccctgttgcgtctcaatgtgcaaaaaagtcaggatattgatattcagtgcaaaagttcttttcacaagaagttctgctaagggatatatgtagctatgctacatgttttattaacttttaagaattctaaattttattgcattttaaatgcttagcaaagagccaggagaaaagaaagtactcaggaaatgttcgttatgatcattattattatttcaacttacactaagcatgctttataaatggaacagatttaacatatcatgtaataaacagctttaataacaatttccatttctcaatgttctaacattaattttaccccagcacctccctaaaaatatgactttattcagagagctttttttttctaacttctcacatactatgttcattttctgaggttagaacataatggatatgtttatgagcacagggctgaatcctrggaaatgtagatttggtgacctctggcaaatgaatttgctcctctcacggctggtagaggcagctgtaaagtgcag

SEQ ID NO: 225555 - DNA, 400 bp, Homo sapiens
gtcggatccatcactgggctggaggccaagagtggcaatccgtgaggctgaggctggcccagtgcccagttttcagacaaagacaggttgggaacccccctgcaatgaagaatccacrgttccctcctcccagagtcctgcctcttgtttcttgggtactttctagaacaccacccccatcctagtgtgtgtgtgtgtgtgtgtgcgcgtacgtgcgtgcgtgtgcacgcatgtgtgtgtgtgtgagatggacagagagagattggtggggggtagatgaggggggactgagaagcagggagggaaggagagaaaggctggacaaatctcgtgcttgtaagggtaccaaggattgctcatatactacacacactcatggaaataaatcatgtttttaggg

SEQ ID NO: 225556 - DNA, 400 bp, Homo sapiens
gtcggatccatcactgggctggaggccaagagtggcaatccgtgaggctgaggctggcccagtgcccagttttcagacaaagacaggttgggaacccccctgcaatgaagaatccacagttccctcctcccagagtcctgcctcttgtttcttgggtactttctagaacaccacccccatcctagtgtgtgtgtgtgtgtgtgtgcgcgtacgtgcgtgcgtgtgcacgcatgtgtgtgtgtgtgagatggasagagagagattggtggggggtagatgaggggggactgagaagcagggagggaaggagagaaaggctggacaaatctcgtgcttgtaagggtaccaaggattgctcatatactacacacactcatggaaataaatcatgtttttaggg

SEQ ID NO: 225557 - DNA, 488 bp, Homo sapiens
ttactgtgctgaggtgaccagggaaagttcagaaactaggccctgtttccccaagctgtctcccaagccaggaacagggtacatcccctcctgctcccagttagtggctcagggagctcttcccacttagtggctcaggatctctgcagagaccaggtggtctagaagcacttgcccttcaccctggggcaccgccatccaccattttccatcctgggtcatctctcttgaatctgtargacagtgttggttatgaggacccagtggcagaggttgggctggaccagcatgtggcagagctgtagcttaactagggacatgtccagaagtgactgtcattgaagattatagaaagggacagtctcaaaactgatcagggctcctttcatgtcttccttgtagtcaacgcatttcctctttaatccttgagcaaacattgtgtcatgtgtcatgatggttgcctgcccagcccagtccactgtcatcgt

SEQ ID NO: 225558 - DNA, 488 bp, Homo sapiens
ttactgtgctgaggtgaccagggaaagttcagaaactaggccctgtttccccaagctgtctcccaagccaggaacagggtacatcccctcctgctcccagttagtggctcagggagctcttcccacttagtggctcaggatctctgcagagaccaggtggtctagaagcacttgcccttcaccctggggcaccgccatccaccattttccatcctgggtcatctctcttgaatctgtaggacagtgttggttatgaggacccastggcagaggttgggctggaccagcatgtggcagagctgtagcttaactagggacatgtccagaagtgactgtcattgaagattatagaaagggacagtctcaaaactgatcagggctcctttcatgtcttccttgtagtcaacgcatttcctctttaatccttgagcaaacattgtgtcatgtgtcatgatggttgcctgcccagcccagtccactgtcatcgt

SEQ ID NO: 225559 - DNA, 552 bp, Homo sapiens
ttacaggcgtgagccaccgcgccccgccctaaattctattttacataatattaatacaactacatcagttttgttttgcttagaatttgcttgatattgtaaaagttatcaaactcaaaatggattgcttgcatcaaaccccaacaaaacatagataaagatgggaggttaagaagcgaggaccctcacacactcatgcttatgatcagaacaattacaaatgtctgtaacaaaaacttttgccaatgacttttcaaacttgagcttgctacatgagttacaggatagctagctggatgcataagaacacttgaytaacactgtctccataatgaactggtatggactcctgagataagcccttgtcaccaatattctctttgtttcaaaacaaattacatgttctttttccttttgtctttaaaagtttgcccgttcctcaatctctttggataggtctatgaatcctataggctgcatatcctggaagtgcaaatcccttgcacactcctgaataaactcagtgtcttcggagactctctcttcgtcttt

SEQ ID NO: 225560 - DNA, 597 bp, Homo sapiens
acagaaaaacaaaaataatcatcagacttaaattgcattatagaccaaataaacctaacagacatatacagaatatttcagccaagagctgcagaaaacaatcttctcttcagcatatgaaatgttctccaggagggaacatatgttaggccacaaaacaagcaycaacaaatattgaaaaatcaaaaatcaaaatcacatcacatatcttcttagatcacaaaggagtaaaactagaaacaaataacgtgaagaactctggaaattgtacaaatacattgaaattaagcaacatgctccagaaagactgatgggtcatggaaggaattaaagagaaaaaaaaatcttgaaacaagtgaaaatagaaaacaacgccccaaaacctacaggatacagcaaaagcagtactatgacggacgtttatagccatagaaacctacatcataaaagtagaaagattttaattaaatgatgtagtgatgcacctcaaggaactaaaaaagcaagaagaaaccaaacagaaaattagtataaaaaataaataacaaagatcagagcagaactaaacaaaatacagacaaaaagaaaaccccatat

SEQ ID NO: 225561 - DNA, 568 bp, Homo sapiens
cctggcaagagcttaggatacagaaatctgtcacactggttctttacccttgcaataaggcagaaggtccattaaactgattaacactcaagccttctgcggaaggcaaagctgaaagagctttgcaaaactggggttgcagacactcacccctagacactacagtggagytggagcccaaagcgctcacccggcctctgcatctgcccgtctgcatgctccccctccctcaagcagtttgagctgcagggcaaccaaacaggcaagccacaccccaatcatatgtcctgcaaggggaatcagggaactctcccatttcaaaaacaacccctgacaaacagtatttaacattaatcaagacttggatcttgaatataaattttatggtattaattaggaaacttatagattcagcccagaactctctctggaatcccagacctctctctggaatctcagacttgtatatccaaatgtctttatgtccaactgctatgtgaaccttcccctcttgaatctcttttaggcattgcaaactttacctcaagtaatgctcttgacagctgtc

SEQ ID NO: 225562 - DNA, 568 bp, Homo sapiens
cctggcaagagcttaggatacagaaatctgtcacactggttctttacccttgcaataaggcagaaggtccattaaactgattaacactcaagccttctgcggaaggcaaagctgaaagagctttgcaaaactggggttgcagacactcacccctagacactacagtggagctggagcccaaagcgctcaccyggcctctgcatctgcccgtctgcatgctccccctccctcaagcagtttgagctgcagggcaaccaaacaggcaagccacaccccaatcatatgtcctgcaaggggaatcagggaactctcccatttcaaaaacaacccctgacaaacagtatttaacattaatcaagacttggatcttgaatataaattttatggtattaattaggaaacttatagattcagcccagaactctctctggaatcccagacctctctctggaatctcagacttgtatatccaaatgtctttatgtccaactgctatgtgaaccttcccctcttgaatctcttttaggcattgcaaactttacctcaagtaatgctcttgacagctgtc

SEQ ID NO: 225563 - DNA, 606 bp, Homo sapiens
gtcgcgccactgcactccagcctgggtgaaagagtgagacacagtctcaaaacaaaacaaaacaaaaaacaagtattagtgaagaattattttcttatcctacagttcctcattaggatatgcaaattaagacccacccatagtcacactatacctaactcaaattctgagtccttgagcaagtttattaaagcaaagatgaaatttcccagattaaaaaagaaaagctcataaaatctgctaaattttggcttaaaaacacatcaattatacaatctgtaatatgtgagaaatataaaatattaagtatttataatatagaattcacatatgatatcatgcatatatatgtatagattatagtacttagaatcttgaagtaytattgcttttggatatcaaagaataactaagtgtttctccctcttccaagaagaattctaaatcactcataggtatacgaaagtatagttttatttcttctgaatcaataaaagaaatatgaattatgtcacagctgatataaatagatcaaatataaagatatctgaaatcttactgacctaataatatgttttagagtttattttctagcaaggtatgaaa

SEQ ID NO: 225564 - DNA, 582 bp, Homo sapiens
atacaactaagtcaaaactattttgttagtcattccaaatttccatttgccttttgcacagtgctgatgtttgcagtgatggtgaaaaagcaatgataggtaaaactgctggaaccttagcacaaatcaaagcagtgttagcaaactactagtagtcactgaatttttcactgccaagcccttgtagaataacaaaaaaaatccgggtttactttacttaaaaatatccttgatgcatcagtaaaattattaattttattaaatcttgactcaagtataacaaatgggaagtacaaatrcagcatttctgtaactaattaactgtctcctggaaatgcacttatgagactgagttgcatgctcatttagctgcctttttcatgaagcaccattttaagttgaaagcacaagtgacacacaaaccattcacattagatattttacagatattttcacaaaaatgaaaaaactctgtcacttgaaggaaaataactgactgtatttgttggcaatgataaaataggagggtaaagcaaaaatcatagtttgggaaaaattttatagtacactgtgagcctgata

SEQ ID NO: 225565 - DNA, 592 bp, Homo sapiens
acaactaagtcaaaactattttgttagtcattccaaatttccatttgccttttgcacagtgctgatgtttgcagtgatggtgaaaaagcaatgataggtaaaactgctggaaccttagcacaaatcaaagcagtgttagcaaactactagtagtcactgaatttttcactgccaagcccttgtagaataacaaaaaaaatccgggtttactttacttaaaaatatccttgatgcatcagtaaaattattaattttattaaatcttgactcaagtataacaaatgggaagtacaaatacagcatttctgtaactaattaastgtctcctggaaatgcacttatgagactgagttgcatgctcatttagctgcctttttcatgaagcaccattttaagttgaaagcacaagtgacacacaaaccattcacattagatattttacagatattttcacaaaaatgaaaaaactctgtcacttgaaggaaaataactgactgtatttgttggcaatgataaaataggagggtaaagcaaaaatcatagtttgggaaaaattttatagtacactgtgagcctgatagctttccaatac

SEQ ID NO: 225566 - DNA, 592 bp, Homo sapiens
acaactaagtcaaaactattttgttagtcattccaaatttccatttgccttttgcacagtgctgatgtttgcagtgatggtgaaaaagcaatgataggtaaaactgctggaaccttagcacaaatcaaagcagtgttagcaaactactagtagtcactgaatttttcactgccaagcccttgtagaataacaaaaaaaatccgggtttactttacttaaaaatatccttgatgcatcagtaaaattattaattttattaaatcttgactcaagtataacaaatgggaagtacaaatacagcatttctgtaactaattaactgtctcctggaaatgcacttatgagactgagttgcatgctcatttagctgcctttttcatgaagcaccattttaagttgaaagcamaagtgacacacaaaccattcacattagatattttacagatattttcacaaaaatgaaaaaactctgtcacttgaaggaaaataactgactgtatttgttggcaatgataaaataggagggtaaagcaaaaatcatagtttgggaaaaattttatagtacactgtgagcctgatagctttccaatac

SEQ ID NO: 225567 - DNA, 592 bp, Homo sapiens
acaactaagtcaaaactattttgttagtcattccaaatttccatttgccttttgcacagtgctgatgtttgcagtgatggtgaaaaagcaatgataggtaaaactgctggaaccttagcacaaatcaaagcagtgttagcaaactactagtagtcactgaatttttcactgccaagcccttgtagaataacaaaaaaaatccgggtttactttacttaaaaatatccttgatgcatcagtaaaattattaattttattaaatcttgactcaagtataacaaatgggaagtacaaatacagcatttctgtaactaattaactgtctcctggaaatgcacttatgagactgagttgcatgctcatttagctgcctttttcatgaagcaccattttaagttgaaagcacaagtgacacacaaaccattcacaytagatattttacagatattttcacaaaaatgaaaaaactctgtcacttgaaggaaaataactgactgtatttgttggcaatgataaaataggagggtaaagcaaaaatcatagtttgggaaaaattttatagtacactgtgagcctgatagctttccaatac

SEQ ID NO: 225568 - DNA, 320 bp, Homo sapiens
cagtaattcctctatatccagttgtacccaacccttayaccctgctctctcaaataccagagcaagcagaatgattcactgttctggacctcaaggatgccaccttctgcatttccctgcactctgactcccagtttctgtttccctttgaggatcccacagaccacacatcccaatttacatggacagtcttgcctcaagggtttagggatagccctcatctgtttggtcaggcactggcccaagatttaggccacttctcaagtccaggcactctggtccttcagtatgtggatgatttacttttggtgaccagttcg

SEQ ID NO: 225569 - DNA, 557 bp, Homo sapiens
gtagtatcgtgcagttccttttgaaaacagtctggcagtttatcaactgtgctatagtctgaatgtgttccttcaaaattcgtatgttgaaacttaactgccaatgtcatagtatgattggagccttaaggaggtgattaaatcattagggcagagccatcakgagggggatcagtgccttataaaagaggcttcggggatcccccttgccttttctgccatgtgaggacacagcaagaggtgtcacgtttgaagcagagtaagccctcatcaaacttcttttttttttgagctggagtctcactttgttacccaggctggagtgcagtggcacaatctcagctcactgcaacctctgcttcccggattcaagcgattctcttgcctcagcctcccgagtagctgagattacagtcatgcaccaccactcctggctaatttttgtatttttagtagagatggggtttcaccatgttggcctgcctggtttcaaactcccgcctcagccttccaaagtgctgggattacaggtgtgagccactgtgcccggccctcat

SEQ ID NO: 225570 - DNA, 557 bp, Homo sapiens
gtagtatcgtgcagttccttttgaaaacagtctggcagtttatcaactgtgctatagtctgaatgtgttccttcaaaattcgtatgttgaaacttaactgccaatgtcatagtatgattggagccttaaggaggtgattaaatcattagggcagagccatcaggagggggatcagtgccttataaaagaggcttcrgggatcccccttgccttttctgccatgtgaggacacagcaagaggtgtcacgtttgaagcagagtaagccctcatcaaacttcttttttttttgagctggagtctcactttgttacccaggctggagtgcagtggcacaatctcagctcactgcaacctctgcttcccggattcaagcgattctcttgcctcagcctcccgagtagctgagattacagtcatgcaccaccactcctggctaatttttgtatttttagtagagatggggtttcaccatgttggcctgcctggtttcaaactcccgcctcagccttccaaagtgctgggattacaggtgtgagccactgtgcccggccctcat

SEQ ID NO: 225571 - DNA, 557 bp, Homo sapiens
gtagtatcgtgcagttccttttgaaaacagtctggcagtttatcaactgtgctatagtctgaatgtgttccttcaaaattcgtatgttgaaacttaactgccaatgtcatagtatgattggagccttaaggaggtgattaaatcattagggcagagccatcaggagggggatcagtgccttataaaagaggcttcggggatcccccttgccttttctgccatgtgaggacacagcaagaggtgtcacgtttgaagcagagtaagccctcatcaaacttcttttttttttgagctggagtctcactttgtyacccaggctggagtgcagtggcacaatctcagctcactgcaacctctgcttcccggattcaagcgattctcttgcctcagcctcccgagtagctgagattacagtcatgcaccaccactcctggctaatttttgtatttttagtagagatggggtttcaccatgttggcctgcctggtttcaaactcccgcctcagccttccaaagtgctgggattacaggtgtgagccactgtgcccggccctcat

SEQ ID NO: 225572 - DNA, 416 bp, Homo sapiens
gacagagaggtggacaagggttggggtgatcaggcccaacaccaggccrtgggggctacgaggtccagtggagttgaaggaataagaaaagacaaaagagaaagtgggaccagggggccaactgtagtatggaggctgtgaaggcccccagctctgggagcccacattatttattggtgatcaaacaaagaaacaggtggtgaggatgtgggggttgaaaggaagcactgtatcaagtgactgagctgcagctgtgccggtttagcattttctttgaaacatatggctacttgagataatgggagtgctagaagcaaggagccagcaagtctagacacactccaaaggccaggagggtttttttgtttgtttttgagacggagtctcactctgttgcccaggctagagtgtaatgc

SEQ ID NO: 225573 - DNA, 428 bp, Homo sapiens
tcttttgagagaccgtgatagtaggacagagaggtggacaagggttggggtgatcaggcccaacaccaggccgtgggggctacgaggtccagtggagttgaaggaataagaaaagacaaaagagaaagtgggaccagggggccaactstagtatggaggctgtgaaggcccccagctctgggagcccacattatttattggtgatcaaacaaagaaacaggtggtgaggatgtgggggttgaaaggaagcactgtatcaagtgactgagctgcagctgtgccggtttagcattttctttgaaacatatggctacttgagataatgggagtgctagaagcaaggagccagcaagtctagacacactccaaaggccaggagggtttttttgtttgtttttgagacggagtctcactctgttgcccaggct

SEQ ID NO: 225574 - DNA, 428 bp, Homo sapiens
tcttttgagagaccgtgatagtaggacagagaggtggacaagggttggggtgatcaggcccaacaccaggccgtgggggctacgaggtccagtggagttgaaggaataagaaaagacaaaagagaaagtgggaccagggggccaactgtagtatggaggctgygaaggcccccagctctgggagcccacattatttattggtgatcaaacaaagaaacaggtggtgaggatgtgggggttgaaaggaagcactgtatcaagtgactgagctgcagctgtgccggtttagcattttctttgaaacatatggctacttgagataatgggagtgctagaagcaaggagccagcaagtctagacacactccaaaggccaggagggtttttttgtttgtttttgagacggagtctcactctgttgcccaggct

SEQ ID NO: 225575 - DNA, 415 bp, Homo sapiens
gaattctgtgattgtagccgagatgtgtgctgcaagacctgattccttctctgccccgtaaaccttacaggtgatgtgcttcctgctttttttttttttttttcagtctttgggattctgttgttactaattgtgtaatctttttttcaaatttatattgccatcttggaggtattgtgttttgtaagttttttccttaactctgtgttaagtaraactcacttaagtttcaaaaattgttcctatttgtagaaactttttagaattgttttatctgtttctttgttcagcttttctgactcatttgtgatttgattatttctctgctaagctctttccaaagtgaaacctaaaatggctgtaggagccaaacttccaaaatcagtgtaggtcagcctgacctctgtcctcaaca

SEQ ID NO: 225576 - DNA, 415 bp, Homo sapiens
gaattctgtgattgtagccgagatgtgtgctgcaagacctgattccttctctgccccgtaaaccttacaggtgatgtgcttcctgctttttttttttttttttcagtctttgggattctgttgttactaattgtgtaatctttttttcaaatttatattgccatcttggaggtattgtgttttgtaagttttttccttaactctgtgttaagtagaactcacttaagtttcaaaaattgttcctatttgtaraaactttttagaattgttttatctgtttctttgttcagcttttctgactcatttgtgatttgattatttctctgctaagctctttccaaagtgaaacctaaaatggctgtaggagccaaacttccaaaatcagtgtaggtcagcctgacctctgtcctcaaca

SEQ ID NO: 225577 - DNA, 415 bp, Homo sapiens
gaattctgtgattgtagccgagatgtgtgctgcaagacctgattccttctctgccccgtaaaccttacaggtgatgtgcttcctgctttttttttttttttttcagtctttgggattctgttgttactaattgtgtaatctttttttcaaatttatattgccatcttggaggtattgtgttttgtaagttttttccttaactctgtgttaagtagaactcacttaagtttcaaaaattgttcctatttgtagaaactttttaraattgttttatctgtttctttgttcagcttttctgactcatttgtgatttgattatttctctgctaagctctttccaaagtgaaacctaaaatggctgtaggagccaaacttccaaaatcagtgtaggtcagcctgacctctgtcctcaaca

SEQ ID NO: 225578 - DNA, 542 bp, Homo sapiens
gataccctttgtcacacgtatcacacactagcatcttgctatyttctcccgattgtctaaaaagtaagatagcattaatgatggcttatctttaaacttatgttttgcaacataagtaatcatgaaaatcatcagtcctgggaaccgcacagttcataaatacctcagtatctgttttgtctctgcagatagtaacagaggtaaccctaccataaggattccctcctaaatggtgatctttactcaatgctcacctatggttaacttgctctagccattttaggattcctgcaaaggaggaagggttaaggcaagatgaatagcctctgatctttacttttaaaatataatttttgagaggaaggcgctataactgctatgtgctactgtgtggaaagatcaaatcttggcacagcaaattgaaaagactgtcatataacataaagaggatcaaatttggcatcagatctctatttgtattcaggctgctgttttctagctgtgtcactaaacaacttagactaaagctctctgagtttcag

SEQ ID NO: 225579 - DNA, 542 bp, Homo sapiens
gataccctttgtcacacgtatcacacactagcatcttgctatcttctcccgattgtctaaaaagtaagatagcattaatgatggcttatctttaaacttatgttttgcaacataagtaatcatgaaaatcatcagtcctgggaaccgcacagttcataaatacctcagtatctgttttgtctctgcagatagtaacagaggtaaccctaccataaggattmcctcctaaatggtgatctttactcaatgctcacctatggttaacttgctctagccattttaggattcctgcaaaggaggaagggttaaggcaagatgaatagcctctgatctttacttttaaaatataatttttgagaggaaggcgctataactgctatgtgctactgtgtggaaagatcaaatcttggcacagcaaattgaaaagactgtcatataacataaagaggatcaaatttggcatcagatctctatttgtattcaggctgctgttttctagctgtgtcactaaacaacttagactaaagctctctgagtttcag

SEQ ID NO: 225580 - DNA, 542 bp, Homo sapiens
gataccctttgtcacacgtatcacacactagcatcttgctatcttctcccgattgtctaaaaagtaagatagcattaatgatggcttatctttaaacttatgttttgcaacataagtaatcatgaaaatcatcagtcctgggaaccgcacagttcataaatacctcagtatctgttttgtctctgcagatagtaacagaggtaaccctaccataaggattccctcctaaatggtgatctttactcaatgctcacctatggttaacttgctctagccattttaggattcctgcaaaggaggaagggttaaggcaagatgaatagcctctgatctttacttttaaaatataatttttgagaggaaggcgctrtaactgctatgtgctactgtgtggaaagatcaaatcttggcacagcaaattgaaaagactgtcatataacataaagaggatcaaatttggcatcagatctctatttgtattcaggctgctgttttctagctgtgtcactaaacaacttagactaaagctctctgagtttcag

SEQ ID NO: 225581 - DNA, 542 bp, Homo sapiens
gataccctttgtcacacgtatcacacactagcatcttgctatcttctcccgattgtctaaaaagtaagatagcattaatgatggcttatctttaaacttatgttttgcaacataagtaatcatgaaaatcatcagtcctgggaaccgcacagttcataaatacctcagtatctgttttgtctctgcagatagtaacagaggtaaccctaccataaggattccctcctaaatggtgatctttactcaatgctcacctatggttaacttgctctagccattttaggattcctgcaaaggaggaagggttaaggcaagatgaatagcctctgatctttacttttaaaatataatttttgagaggaaggcgctataactgctatgtgctactgtgtggaaagatcaaatcttggcacagcaaattgaaaagactgtcatataacrtaaagaggatcaaatttggcatcagatctctatttgtattcaggctgctgttttctagctgtgtcactaaacaacttagactaaagctctctgagtttcag

SEQ ID NO: 225582 - DNA, 456 bp, Homo sapiens
  misc_feature (1)...(456): n = A,T,C or G
tcactaaacaacttagactaaagctctctgagtttcaggtataaaacgggaataataaacattactgtgagaattaaatgtaatgcaggttcaagtgcttagaatgtctattaagcaattaaatgctgaataattatttcaaaagaygaatcttgtcataattattaagaattataattgaaaacctaaaacctttctttaaacactcttctgcccccaaagattgggcccctgtcctacagcgttatctctgttgagatttttgactataattactttcagatactatgattttaaattcaagaggaggggaagagaaaaaaacagggaaagcaagaagagctgagagaggaatctctgaatgaaatctgggggataaacagaagtcaacaggaagatgggtcagttggcctccaattattattcagttcaacctctccnnnnnnnnnnnnnnnn

SEQ ID NO: 225583 - DNA, 457 bp, Homo sapiens
  misc_feature (1)...(457): n = A,T,C or G
tcactaaacaacttagactaaagctctctgagtttcaggtataaaacgggaataataaacattactgtgagaattaaatgtaatgcaggttcaagtgcttagaatgtctattaagcaattaaatgctgaataattatttcaaaagacgaaycttgtcataattattaagaattataattgaaaacctaaaacctttctttaaacactcttctgcccccaaagattgggcccctgtcctacagcgttatctctgttgagatttttgactataattactttcagatactatgattttaaattcaagaggaggggaagagaaaaaaacagggaaagcaagaagagctgagagaggaatctctgaatgaaatctgggggataaacagaagtcaacaggaagatgggtcagttggcctccaattattattcagttcaacctctccnnnnnnnnnnnnnnnnn

SEQ ID NO: 225584 - DNA, 451 bp, Homo sapiens
  misc_feature (1)...(451): n = A,T,C or G
tcactaaacaacttagactaaagctctctgagtttcaggtataaaacgggaataataaacattactgtgagaattaaatgtaatgcaggttcaagtgcttagaatgtctattaagcaattaaatgctgaataattatttcaaaagacgaatcttgtcataattattaagaattataattgaaaacctaaaacctttctttaaacactcttctgcccccaaagattgggcccctgtcctacagygttatctctgttgagatttttgactataattactttcagatactatgattttaaattcaagaggaggggaagagaaaaaaacagggaaagcaagaagagctgagagaggaatctctgaatgaaatctgggggataaacagaagtcaacaggaagatgggtcagttggcctccaattattattcagttcaacctctccnnnnnnnnnnn

SEQ ID NO: 225585 - DNA, 457 bp, Homo sapiens
  misc_feature (1)...(457): n = A,T,C or G
tcactaaacaacttagactaaagctctctgagtttcaggtataaaacgggaataataaacattactgtgagaattaaatgtaatgcaggttcaagtgcttagaatgtctattaagcaattaaatgctgaataattatttcaaaagacgaatcttgtcataattattaagaattataattgaaaacctaaaacctttctttaaacactcttctgcccccaaagattgggcccctgtcctacagcrttatctctgttgagatttttgactataattactttcagatactatgattttaaattcaagaggaggggaagagaaaaaaacagggaaagcaagaagagctgagagaggaatctctgaatgaaatctgggggataaacagaagtcaacaggaagatgggtcagttggcctccaattattattcagttcaacctctccnnnnnnnnnnnnnnnnn

SEQ ID NO: 225586 - DNA, 451 bp, Homo sapiens
  misc_feature (1)...(451): n = A,T,C or G
tcactaaacaacttagactaaagctctctgagtttcaggtataaaacgggaataataaacattactgtgagaattaaatgtaatgcaggttcaagtgcttagaatgtctattaagcaattaaatgctgaataattatttcaaaagacgaatcttgtcataattattaagaattataattgaaaacctaaaacctttctttaaacactcttctgcccccaaagattgggcccctgtcctacagcgttatctctgttgagatttttgactataattaytttcagatactatgattttaaattcaagaggaggggaagagaaaaaaacagggaaagcaagaagagctgagagaggaatctctgaatgaaatctgggggataaacagaagtcaacaggaagatgggtcagttggcctccaattattattcagttcaacctctccnnnnnnnnnnn

SEQ ID NO: 225587 - DNA, 455 bp, Homo sapiens
  misc_feature (1)...(455): n = A,T,C or G
gtcactaaacaacttagactaaagctctctgagtttcaggtataaaacgggaataataaacattactgtgagaattaaatgtaatgcaggttcaagtgcttagaatgtctattaagcaattaaatgctgaataattatttcaaaagacgaatcttgtcataattattaagaattataattgaaaacctaaaacctttctttaaacactcttctgcccccaaagattgggcccctgtcctacagcgttatctctgttgagatttttgactataattactttcagatactatgattttaaattcaagaggaggggaagagaaaaaaacrgggaaagcaagaagagctgagagaggaatctctgaatgaaatctgggggataaacagaagtcaacaggaagatgggtcagttggcctccaattattattcagttcaacctctccnnnnnnnnnnnnnn

SEQ ID NO: 225588 - DNA, 491 bp, Homo sapiens
ctttccttagtgctcccagtgaaccatcatctctcttaccacaccattagtgcctctcattgcatcaccacctaggacgttttattgtttgtaattttatttagtggtaggcwgtggggcaagagatacctaaattacttctctcaatatttccattggtttttctctgagatttggctaacatacatcttaaattctttttagtcaatagtttaatattatgttggcagtagacagttctaaaaaatatgagacagaaagtcatactctaagataaaaataatgttgaataattttatttcagaaataagaattttctggtaattatgtattattcatcataatttaaaagttagctttgatgccaaaattttatctcactttgaaaagacagactttgtgtaattttatagttctgaagaaaaattatcattatacttagatattctgacaaattatctagtatattccttagaccttaaaactaaaat

SEQ ID NO: 225589 - DNA, 491 bp, Homo sapiens
ctttccttagtgctcccagtgaaccatcatctctcttaccacaccattagtgcctctcattgcatcaccacctaggacgttttattgtttgtaattttatttagtggtaggcagtggggcaagagatacctaaattacttctctcaatatttccattggtttttctctgagatttggctaacatacatcttaaattctttttagtcaatagtttaatattatgttggcagtagacagttctaaaaaatatgagacagaaagtcatactctaagataaaaataatgttgaataattttatttcasaaataagaattttctggtaattatgtattattcatcataatttaaaagttagctttgatgccaaaattttatctcactttgaaaagacagactttgtgtaattttatagttctgaagaaaaattatcattatacttagatattctgacaaattatctagtatattccttagaccttaaaactaaaat

SEQ ID NO: 225590 - DNA, 628 bp, Homo sapiens
taacatgagctcccagttctcacaattaagtattatgattattaaacrtatgtgacagtatttaagcactttaaatactgcttttaagggtttcctatctcaagaaatttgctcctctataaatcttatattgtactaatatcctgcttttgtcttgaaaaagtaaaacataaaaatatatgcatttaatttaaaagacaatttatactgttcacacagattataggttcaactgattcatttggtctgatgatttaaaaagctgagaactggagcttttagtaaaaaattattatcctattctgttctttaccgcattctcgtgtcactctgtgctcactcatatacaaaatgacattatctccttatagccgaaagaaacaaaacaagtgtcatatttaatgcaattggtgataatcgagagtcagcactgctcactttcaagcatttcaggatagaggctttctggggaaccttttaagtggtatcgtgtgcttggttttaaatatggacaggtctcaatacttcactagttgtatctaaggttcttggttttttctttttaagaactcagtcttaataaaacttacatatttgaataaagtgtcatggccactgaaagcaagca

SEQ ID NO: 225591 - DNA, 628 bp, Homo sapiens
taacatgagctcccagttctcacaattaagtattatgattattaaacgtatgtgacagtatttaagcactttaaatactgcttttaagggtttcctatctcaagaaatttgctcctctataaatcttatattgtactaatatcctgcttttgtcttgaaaaagtaaaacataaaaatatatgcatttaatttaaaagacaatttatactgttcacacagattataggttcaactgattcatttggtctgatgatttaaaaagctgagaactggagcttttagtaaaaaattattatcctattctgttctttaccgcattctcgtgtcactctgtgctcactcatatacaaaatgacattatctccttatagccgaaagaaacaaaacaagtgtcatatttaatgcaattggtrataatcgagagtcagcactgctcactttcaagcatttcaggatagaggctttctggggaaccttttaagtggtatcgtgtgcttggttttaaatatggacaggtctcaatacttcactagttgtatctaaggttcttggttttttctttttaagaactcagtcttaataaaacttacatatttgaataaagtgtcatggccactgaaagcaagca

SEQ ID NO: 225592 - DNA, 556 bp, Homo sapiens
cttttaattttcatattgtgtttttaattatacattttgtattatttggcatttgactctaaggattaagatacacatgcattaactttttcagttacttggaagttagactgtactaattcccacaaatacaaaaaaacatgaaaacattcagtttatatgttccccttgtcatcttctatgctattattgccctgtgtacttagattataaactgcacaagtaaatgttacaatatttttccttaaaactctcataagtattttaaagaaattcagatgaaatagttatttgcatttacctacatatttaccatttttgatgttctttgttctctcttaaaaatctggattttcagtagggataaaggtcctcaggataaagaatatactttagcattacttatagcatcagtctgctggcaatgaattacattagttttcttctatctgaaacwtttttatactggatataaaaatctaggttggcattttagtttcttttagcatttttttccctctactctttactctcttctagacttcatatagattta

SEQ ID NO: 225593 - DNA, 445 bp, Homo sapiens
ctaaggataggggagggtcatgatcaaatttacagtttagataacgaatcattttggcgttttttttcccctcagtgttgcctgctctaagatttaatctcagaagtgttcttttacttatttctatcttaatcaaaaagaagctctgaaagtcttgaraacaaatatttcatcttcccccatagaaatttctaaattaagacataaagaagatattaactagcattaggtaataatataagaagacagacagatgaagggagacatagctaggccccaatactagaggaagaaattagaggaaaatgctaagctaccacttcatctttgccaatgatcaaaaagtgagataaaatacttattaaaattgtaatttcttccattaatattgcaacaagctaatgaattctagcagatgtatatttaccctgacatatgtaccctt

SEQ ID NO: 225594 - DNA, 439 bp, Homo sapiens
aagaattcaacagcagagaaagatgatcattcttcaaatggttcaaaggacaaacctttcaatccatgaaaaactctatggtaactgtttctgtacttactttgtgttaggcattgtgctgggcactttatagataccacttcaytaaatccaacatccctgtgaggtaagtaccgttaaccttctatacactgacttagggaagttaaacaggtagccaaagatcatcaatttagtaactgaaaaaactgcagtttgactccacagcataagcttttaaccaccacactatagtgccttcatagaacagaataaaaagattaagtatccaatagtattcccagaaattatgtaatcctgtcactctcaaaagagaatagcagattacaaagagcaaatcgaaaagaagcacaccaaaggggagacagaacaagctgag

SEQ ID NO: 225595 - DNA, 424 bp, Homo sapiens
gaattcaacagcagagaaagatgatcattcttcaaatggttcaaaggacaaacctttcaatccatgaaaaactctatggtaactgtttctgtacttactttgtgttaggcattgtgctgggcactttatagataccacttcattaaatccaacatccctgtgaggtaagtaccrttaaccttctatacactgacttagggaagttaaacaggtagccaaagatcatcaatttagtaactgaaaaaactgcagtttgactccacagcataagcttttaaccaccacactatagtgccttcatagaacagaataaaaagattaagtatccaatagtattcccagaaattatgtaatcctgtcactctcaaaagagaatagcagattacaaagagcaaatcgaaaagaagcacaccaaaggggagac

SEQ ID NO: 225596 - DNA, 439 bp, Homo sapiens
aagaattcaacagcagagaaagatgatcattcttcaaatggttcaaaggacaaacctttcaatccatgaaaaactctatggtaactgtttctgtacttactttgtgttaggcattgtgctgggcactttatagataccacttcattaaatccaacatccctgtgaggtaagtaccgttaaccttctatacactgacttagggaagttaaacaggtagccaaagatcatcaatttagtaactgaaaaaactrcagtttgactccacagcataagcttttaaccaccacactatagtgccttcatagaacagaataaaaagattaagtatccaatagtattcccagaaattatgtaatcctgtcactctcaaaagagaatagcagattacaaagagcaaatcgaaaagaagcacaccaaaggggagacagaacaagctgag

SEQ ID NO: 225597 - DNA, 383 bp, Homo sapiens
caaaggacaaacctttcaatccatgaaaaactctatggtaactgtttctgtacttactttgtgttaggcattgtgctgggcactttatagataccacttcattaaatccaacatccctgtgaggtaagtaccgttaaccttctatacactgacttagggaagttaaacaggtagccaaagatcatcaatttagtaactgaaaaaactgcagtttgactccacagcataagcttttaaccaccacactatagtgccttcatagaacagaataaaaagattaagtatccaatagtattcccagaaattatgtaatcctgtcactctcaaaagagaatagcagattacaaagagcaaatygaaaagaagcacaccaaaggggagac

SEQ ID NO: 225598 - DNA, 332 bp, Homo sapiens
ccttatgaaaacaatgttattctataatatatacttaatgatattgtaagtattttgttcctagtgacatagttcagcatattttcccctatttcatgttaattacgtttcaaatrttatggaaaagaaataaaagttatcccaatagtaaataatctcaagattttctaaaaagagctttataaatttaattttcttgacttttggtgtcttgaaatagaagattatttttgtatgtatgtatctacctcacagaagttattgatttggtggaagagcactaggagtagagtcagaaaagctgggaaaaatcctgcagcttccttatattt

SEQ ID NO: 225599 - DNA, 349 bp, Homo sapiens
ttgatattaggcatttctgtattatactgctktttttatttactgttgcttctacatattcttcacatcggggactggcggtaaaataagctgcattttcctagctgtgattgtcatgtaagcaagattctttggtttccagctatttttttttgttaaagtcactggcattttcatattttgttgaacattaccaatctttggtctttaccagtacagtaaatactaaccaaagaaatgtagatttaccttaagttctgtttcatggtgggcaaattattaagttgattttaatgattttctataatagtattatatgagcttttctaggaattcacttcaaaattaa

SEQ ID NO: 225600 - DNA, 460 bp, Homo sapiens
  misc_feature (1)...(460): n = A,T,C or G
aacttgcaggaaatattctacagttagcaggaatgtgtatatacgtatattagaaatactgaagttcagtattctgttacatgaatttctttgatattaggcatttctgtattatactgctttttttatttactgttgcttctacatattcttcacatcggggactggcggtaaaataagctgcattttcctagctgtgattgtcatgtaagcaagattctttggtttccagctatttttttttgttaaagtcactggcattttcatattttgttgaacattaccaatctttggtctttaccagtacagtaaatactaaccaaagaaatgtagatttacyttaagttctgtttcatggtgggcaaattattaagttgattttaatgattttctataatagtattatatgagcttttctaggaattcacttcaaaattaaacaaacattttaataggaann

SEQ ID NO: 225601 - DNA, 555 bp, Homo sapiens
aaaataaaataaaataaaaataaataaaataaaatgctggttaagtgaccagaggttttatttcttgggttttttttaatcatcatggaattaaacacacatgaagaaatctgttgaaacccctcaaacttgcaatgctatacctgaatcagtrttctttcagagacttttcaaattatacaaatatttcaaaatgctgagttactctactatagctaataaaactacttaaactaagtggaaaaccttgagaactaaagggggaggggatattatttattctcattactcttaaatcaaccaacttccaaatccagaacataaaacttttatgattatttgttctttccctgtttacaaacctagttctgatttcattattaaaaatacaggccaggcacggtggctcatgcctgtaatcctagaactttgggaggccaaggcagacagatcacggatcagcaattcaagaccagcctgaccaacatggtgaaaccccgtctctactaaaaacacaaaaaattagccgggcgtagtggctggcacctgtaatcc

SEQ ID NO: 225602 - DNA, 245 bp, Homo sapiens
agtttagtctatcatactaggttggtgcaaaagtaactgcagtttttgacattacttttaatggcaaagactgcaattacctttgcacctacctaatactctgtctcgctaactgcagtatcttctgcatcaaatcatctctacttayggttctgacgtcctctctaaatcattttctacacatccagaacaatctttcaaaaatgtaaatctaattgttaacctctgtataaattaaaactcca

SEQ ID NO: 225603 - DNA, 245 bp, Homo sapiens
agtttagtctatcatactaggttggtgcaaaagtaactgcagtttttgacattacttttaatggcaaagactgcaattacctttgcacctacctaatactctgtctcgctaactgcagtatcttctgcatcaaatcatctctacttatggttctgacrtcctctctaaatcattttctacacatccagaacaatctttcaaaaatgtaaatctaattgttaacctctgtataaattaaaactcca

SEQ ID NO: 225604 - DNA, 565 bp, Homo sapiens
  misc_feature (1)...(565): n = A,T,C or G
tatctatcaatcttaaaattttttaaataaaagagcaactatattacataatgactttttagagagggttggcatagaaagataaggagtcaaagaggaaggtaagaaaagagaaagaatgagaaagtaaatatacaagaaaatgtaaccagaggctcaaaaaaaagtaggacagtaaaataaacattttgacctatttatatgactcataagatcaaaataacttgctatgagattttcatcattaactgacatttagattagagaaaatatacatgaagcaagcctcaccccaggcaatacaacagctccrattccacttttcagctttgacctgcctcggccacctcaccccgacagtcctgcacctcgaggtctccgctttcttggaaatccagacccacggccctatgtaacagattaggaaaagtcaacattctgtgacagcccaaaataatttttaaatccaaatgccactgagataaaacattttattaaatgttatacaaacacttctttagataagtattaaaagacctggcttatatttttancttaaaagtat

SEQ ID NO: 225605 - DNA, 565 bp, Homo sapiens
  misc_feature (1)...(565): n = A,T,C or G
tatctatcaatcttaaaattttttaaataaaagagcaactatattacataatgactttttagagagggttggcatagaaagataaggagtcaaagaggaaggtaagaaaagagaaagaatgagaaagtaaatatacaagaaaatgtaaccagaggctcaaaaaaaagtaggacagtaaaataaacattttgacctatttatatgactcataagatcaaaataacttgctatgagattttcatcattaactgacatttagattagagaaaatatacatgaagcaagcctcaccccaggcaatacaacagctccaattccacttttcagctttgacctgcctcggccacctcrccccgacagtcctgcacctcgaggtctccgctttcttggaaatccagacccacggccctatgtaacagattaggaaaagtcaacattctgtgacagcccaaaataatttttaaatccaaatgccactgagataaaacattttattaaatgttatacaaacacttctttagataagtattaaaagacctggcttatatttttancttaaaagtat

SEQ ID NO: 225606 - DNA, 565 bp, Homo sapiens
  misc_feature (1)...(565): n = A,T,C or G
tatctatcaatcttaaaattttttaaataaaagagcaactatattacataatgactttttagagagggttggcatagaaagataaggagtcaaagaggaaggtaagaaaagagaaagaatgagaaagtaaatatacaagaaaatgtaaccagaggctcaaaaaaaagtaggacagtaaaataaacattttgacctatttatatgactcataagatcaaaataacttgctatgagattttcatcattaactgacatttagattagagaaaatatacatgaagcaagcctcaccccaggcaatacaacagctccaattccacttttcagctttgacctgcctcggccacctcaccccgacagtcctgcacctcgaggtctccgctttcttggaaatccagacccayggccctatgtaacagattaggaaaagtcaacattctgtgacagcccaaaataatttttaaatccaaatgccactgagataaaacattttattaaatgttatacaaacacttctttagataagtattaaaagacctggcttatatttttancttaaaagtat

SEQ ID NO: 225607 - DNA, 417 bp, Homo sapiens
aatatcaaaacattactatatacatgggaataatgatactactgacaccacacctgacttctcattagaaaccatggaagacaggaaacaatgcaacatcttttaaatgcttgaagaagaaaaacataatcatcccagaactctatattcagggaaaaaaagrcaaaaatgcatgcagacttccacttccaggcaaaatgcagaaaatgtacttttccctgttctttccactaaatacagctttaaaaacccttggccgtgatacataagacaaacaaaggaagacaacaaaatgtagagagagggcagaccaattagggcttcaggtgccaagaaacacaagaggatgaattccctaggtttcctttctgactcatatatacaagaaaagttgctagagaagcagacaactcagaa

SEQ ID NO: 225608 - DNA, 417 bp, Homo sapiens
aatatcaaaacattactatatacatgggaataatgatactactgacaccacacctgacttctcattagaaaccatggaagacaggaaacaatgcaacatcttttaaatgcttgaagaagaaaaacataatcatcccagaactctatattcagggaaaaaaagacaaaaatgmatgcagacttccacttccaggcaaaatgcagaaaatgtacttttccctgttctttccactaaatacagctttaaaaacccttggccgtgatacataagacaaacaaaggaagacaacaaaatgtagagagagggcagaccaattagggcttcaggtgccaagaaacacaagaggatgaattccctaggtttcctttctgactcatatatacaagaaaagttgctagagaagcagacaactcagaa

SEQ ID NO: 225609 - DNA, 417 bp, Homo sapiens
aatatcaaaacattactatatacatgggaataatgatactactgacaccacacctgacttctcattagaaaccatggaagacaggaaacaatgcaacatcttttaaatgcttgaagaagaaaaacataatcatcccagaactctatattcagggaaaaaaagacaaaaatgcatgcagacttccacttccagrcaaaatgcagaaaatgtacttttccctgttctttccactaaatacagctttaaaaacccttggccgtgatacataagacaaacaaaggaagacaacaaaatgtagagagagggcagaccaattagggcttcaggtgccaagaaacacaagaggatgaattccctaggtttcctttctgactcatatatacaagaaaagttgctagagaagcagacaactcagaa

SEQ ID NO: 225610 - DNA, 434 bp, Homo sapiens
aacaatacaaagtttcacaaagaaatcaagaaagaaacaaataccaagttgaaaattaaaaaatatgctagcaataataaaatacaaactaaactgaacaacaaaatgggagagattacccaacctagagaagtaaatgaactgattaaaaaaaaaaaaaaacagtggccaggtgcggtcrctcaggcctgtcatcctagcactttgggaggccgagatgggtggatcacctcaggtgaggagttcaagaccagcctggccaacatggcaaaaccctgtctctaataaaaatacaaaaattagctgggcatggtggcacacacctataattccagctactcaggaggctgaggcaggagaatcacttagacccaggggtggaggctgcagtgagctgagatcgtaccacttcactccagcctgggcaaaagagc

SEQ ID NO: 225611 - DNA, 620 bp, Homo sapiens
acatattttttttaaaaaaaggcattaaagacacttgtgggaatataataaatgatgcaacattcctgtcactggartctcagaaaaggaacatgatgcagctgaacaattattcgaagacccacagattcaagaaattgaataaatcctaagaggatacacacaaataaatcaatgctaatatatatcataaacttctgaaaactaatgactaaacttaaaaaccttgagataaataagagaaatgacaccttatccacagatgaaaaacaactcaaatgacagcagatttctcacctgaaaccatggaggccagaacaaagcagcataacatttttgcaagtcctaaaagaaccgacaacaaagaattctatatccagcaaaaacatccattagtaatgaaagggaaatcaagaaattgtgagatgaatgagaactaaaaattagtcatgagacaaaactacagcaaaagaatagtgagaaaagttattgaaccagaaaggagaatgataaaaagaaggattctcagaacatcctgaaggaagaaagaacaaacaaatagtaaaaatatgggcaataaaacagactttactgttccttgagtttccaaaataatgttt

SEQ ID NO: 225612 - DNA, 620 bp, Homo sapiens
acatattttttttaaaaaaaggcattaaagacacttgtgggaatataataaatgatgcaacattcctgtcactggaatctcagaaaaggaacatgatgcagctgaacaattattcgaagacccacagattcaagaaattgaataaatcctaagaggatacacacaaataaatcaatgctaatatatatcataaacttctgaaaactaatgactaaacttaaaaaccttgagataaataagagaaatgacaccttatccacagatgaaaaacaactcaaatgacagcagatttctcacctgaaaccatggaggccagaacaaagcagcataacatttttgcaagtcctaaaagaaccgacaacaaagaattctatatccagcaaaaacatccattagtaatgaaagggaaatcaagaaattgtgagatgaatgagaactaaaaattagtcatgagacaaaactacascaaaagaatagtgagaaaagttattgaaccagaaaggagaatgataaaaagaaggattctcagaacatcctgaaggaagaaagaacaaacaaatagtaaaaatatgggcaataaaacagactttactgttccttgagtttccaaaataatgttt

SEQ ID NO: 225613 - DNA, 581 bp, Homo sapiens
cctggggctgagtgagatcccctggagagagaaggaagcttatgtttgagccctagttcagcccaacatttagaagaacccctttgggaagaggagaagaaygagcaaaggctaaatgtgactccctgttttagaagaacctccttcagaagaagaatcaataaagcaaaggctgaactcaactttgtctccttttctcccccagacataatttatgttcttttattgggagtttgtttcccactcaacctttcaggttagagctctgaagtcacgtttgatttttccctcaacatcaaagagacacaacagtttgcttctgtggtgactgttttttgtttgtttttgtatttttgtttttttgtttttgtgtgtgtgtttgtgttattttaatttgtttgtttgtttgagacaatgtctcactctgtcacctgggctggagtgcagtggcacaatctcagctcactgcaacctccacctcctgggcttaagtgatcctcccacctcagctcccctagtagctaggactacaggcacacaccaccactcctggctattttttctatttttaatagagatgg

SEQ ID NO: 225614 - DNA, 581 bp, Homo sapiens
cctggggctgagtgagatcccctggagagagaaggaagcttatgtttgagccctagttcagcccaacatttagaagaacccctttgggaagaggagaagaacgagcaaaggctaaatgtgactccctgttttagaagaacctccttcagaagaagaatcaataaagcaaaggctgaactcaactttgtctccttttctcccccagacataatttatgttcttttattgggagtttgtttcccactcaacctttcaggttagagctctgaagtcacgtttgatttttccctcaacaycaaagagacacaacagtttgcttctgtggtgactgttttttgtttgtttttgtatttttgtttttttgtttttgtgtgtgtgtttgtgttattttaatttgtttgtttgtttgagacaatgtctcactctgtcacctgggctggagtgcagtggcacaatctcagctcactgcaacctccacctcctgggcttaagtgatcctcccacctcagctcccctagtagctaggactacaggcacacaccaccactcctggctattttttctatttttaatagagatgg

SEQ ID NO: 225615 - DNA, 529 bp, Homo sapiens
tgcaccaaaccacttgaaaaacttgagaaactaccacttctcaagctttggtttagtatcaaacaggaatattcattagggcttgtgctttcattcttacrgtatcttttaataaacagaagttatttctcaaatgtagttgaatgctccaatattttctttacattcagtgctgtatctcaagaactcttttacaaaaatattatcctatattatctttttaagtataaataaaaataattatctttttaaaagcttatgagtttaggtggaaatatgaagggccaaaaggaattggaagatattttcctactatttgttctttctcttgattttcatgattcattattcttgtagaagtgaccttaccacagtataaggttcacttataatcactgttctgccttgtaattttaggtgaatttgttacaaaatattatgaaatctataggaaaagccaactttcaaagctattaagcatttgacttaacagttgagggcaatattattcagaaaaatttcaatctca

SEQ ID NO: 225616 - DNA, 570 bp, Homo sapiens
cattactcataccaaaatcacaataatggggataaaacaaattgaagacaggatgggcatttccattattttaaaaacatgaaaaacatcaagatatccagaacccagcttcttgtaattgaatatttatttgctcagccacactagaagagtaacggtttttgtttgtttttcaaattattcatataaatatggggagcaactatattactcatttcaaaaaattattttggaaaatattaaaatgtatatggaagttctttataaacagggaacatgcctggccaaggttacatggctaattggcgtattgtaagctcacacctgtaattccagtactttggcaggctaaggcaaggggatcccttgagcccaggagttggagaccagcctgggcaacacggggagaccttgtctctaaaaaaatacagaaattatctgggtgtggtagtgtgcaccygcagtcccaactacttggaaagctgaggtgggaggatagcttgagtcctggagggaggtcgaggctgcagtgagccatgatcacgccactgtgctccaacccaggcaaca

SEQ ID NO: 225617 - DNA, 559 bp, Homo sapiens
atgtataggtatgcacacagagttttttttttttttgtatgtaggagaaactaaatctttttctcaccctgttttattaacattttataataatagatttatgtaactgttactaaataagaagagacaggaaaacaatgaaaatcaaatgaaaatcataactgatacctttgtcaggatggactattacagttccattcaatggcaacactractgcaacttttggaacacagtactagccttctactgtaagacccaactagacaaataggcacttgggacttgctgcttgggtacttctcgtttatcaaaaataaatgctggtctcatggtaaacatttgctccttgatatctacttctatttttttaatcacttaaatagtattctattaataaccaaaatgactttgttagaagtacctcaaggtcataactttgatgactctactatgccacagtatacagaaaatagccttctttctcatttcgcagacttgatgattccgccatttgaaataatctgtcctttaaattaccggttctattttttccacttt

SEQ ID NO: 225618 - DNA, 596 bp, Homo sapiens
gtccacagttcccaacaatttactcaaagatggtaccataaagcctccacatttatctggtagataatgcccagagccccctcacctatcaccctgtcactttatgatgaatttaaagcccctgtacctggaactgtttgtttttcctgtaaccatttgtctttttaactttttttgtctgtttctcttctgtaaagttgctgcagctagaatccccctcccctctctaaaccaaagtataaaagaaaayctagccccctctttggagccaagagaattttgagcactagctgtctctcagtcatgggcaaataaaggacttctgaaattgtcccaaagtgtggcgtttctctccgactcgcttgggtacaacagctggggcagctgaaacacagggtacaaagtctctaggctgcacagagcagggggtcctgggcctacgcatgaaaccatcattgcctgttaggcttccaggcctgtgaggggagtggctgccatgaagacctctgatatgtcctggagacattttccccattgtcatggggattaacttttggctccttgttacatatgcaaatttctgcagccagcttgaa

SEQ ID NO: 225619 - DNA, 596 bp, Homo sapiens
gtccacagttcccaacaatttactcaaagatggtaccataaagcctccacatttatctggtagataatgcccagagccccctcacctatcaccctgtcactttatgatgaatttaaagcccctgtacctggaactgtttgtttttcctgtaaccatttgtctttttaactttttttgtctgtttctcttctgtaaagttgctgcagctagaatccccctcccctctctaaaccaaagtataaaagaaaatctagccccctctttggagccaagagaattttgagcactagctgtctctcagtcatgggcaaataaaggacttctgaaattgtcccaaagtgtggcgtttctctccgactcgcttgggtacaacagctggggcagctgaaacacagggtacaaagtctctaggctgcacagagcagggrgtcctgggcctacgcatgaaaccatcattgcctgttaggcttccaggcctgtgaggggagtggctgccatgaagacctctgatatgtcctggagacattttccccattgtcatggggattaacttttggctccttgttacatatgcaaatttctgcagccagcttgaa

SEQ ID NO: 225620 - DNA, 568 bp, Homo sapiens
agagtcctcttgtcttctgccaccatgttaatagccacacctttatggccaaactgtccacctcgaccgattctgtggatatagttttccctgttcgtgggaaggtcgtagttgatgactaaagaaagctgctgcacatcaatgcctctgggcagcaggtcagtggtaatcaaaactctgctagagccagaacgatactccctcatgaccaygtctcgttccttttggtccatatctccatgcatggcagagacagtaaaatcttgggcatgcatcttctgggttagccagtcctccttccttcaggtgttgatgaagatgactgcctgggtgatggtcagggtttcattcaagtcacacagttgtgtccagcttccactccttttgttccacgttgatgtataattggtggatacccttcagggttaactcttccttcttgacaagaatccgaatggggtccctcatgaacttcttggtcacctcaagtacatcagaaggaattgtagctgacagcaaaactacctgggtgttgctattgagcatttggaatatgtcacagatctgg

SEQ ID NO: 225621 - DNA, 551 bp, Homo sapiens
agatctcaatgtctcaaagagtcctcttgtcttctgccaccatgttaatagccacacctttatggccaaactgtccacctcgaccgattctgtggatatagttttccctgttcgtgggaaggtcgtagttgatgactaaagaaagctgctgcacatcaatgcctctgggcagcaggtcagtggtaatcaaaactctgctagagccagaacgatactccctcatgaccacrtctcgttccttttggtccatatctccatgcatggcagagacagtaaaatcttgggcatgcatcttctgggttagccagtcctccttccttcaggtgttgatgaagatgactgcctgggtgatggtcagggtttcattcaagtcacacagttgtgtccagcttccactccttttgttccacgttgatgtataattggtggatacccttcagggttaactcttccttcttgacaagaatccgaatggggtccctcatgaacttcttggtcacctcaagtacatcagaaggaattgtagctgacagcaaaactacctgggtgtt

SEQ ID NO: 225622 - DNA, 551 bp, Homo sapiens
aaccccaaaagagttgtgaattctgcttagttttacatggaactcattattagtaagttgtggtatagatctttaagctgaggtcagtcatagagaaaagctttttataaaaacactcagcgagttaaaccaaatacaccttttagaaacttttgctccatgaaacaatagttccctaaaccaggttttgtttggttcgtttttttaaactgtgggtttctatttaccaatggcatgtgaaatcaatkcattggaacaaaacagcttttgcacaaacaacaaaacaaaacagactttattgcagagcagctgacgaaaaataagtataataataataatttcatgaaaaattttcattcacaggtatgtgctgtgtgtgtgtgtgtgtgtgtatgtgtgtgcggtgtatgtgtccagggttacaatggaaaatttacttgttaagttgggttacaataaaaaagtttgaaaagcactactcctaaaccatacatttttcttcaaactgtctgtctgaggtttcccttgatgagtgaccttcagtggccacc

SEQ ID NO: 225623 - DNA, 551 bp, Homo sapiens
aaccccaaaagagttgtgaattctgcttagttttacatggaactcattattagtaagttgtggtatagatctttaagctgaggtcagtcatagagaaaagctttttataaaaacactcagcgagttaaaccaaatacaccttttagaaacttttgctccatgaaacaatagttccctaaaccaggttttgtttggttcgtttttttaaactgtgggtttctatttaccaatggcatgtgaaatcaattcattggaacaaaacagcttttgcacaaacaacaaaacaaaacagactttattgcagagcagctgacgaaaaataagtataataataatmatttcatgaaaaattttcattcacaggtatgtgctgtgtgtgtgtgtgtgtgtgtatgtgtgtgcggtgtatgtgtccagggttacaatggaaaatttacttgttaagttgggttacaataaaaaagtttgaaaagcactactcctaaaccatacatttttcttcaaactgtctgtctgaggtttcccttgatgagtgaccttcagtggccacc

SEQ ID NO: 225624 - DNA, 544 bp, Homo sapiens
gattttccataaaattctggatgtctgttatctcttgaaaggatattcttattctcacacggccacagctggctggagctgcatagcaatcgctccctttagaatggcaaagccacatctgtcttctaattactttccgaatatttttcaccacatactaaacatttcattcattcgaccaatatttattgagcacctactatgtgccaggcattgttccaggctgtggggatacaagtagtgagcaagaccagccttctaacagaggagccagtcaaaacaaacatatacatagtttatataatttcatgtagtgatgctgctctgaggtggaaaaaggtaaatacattttaggaacaattgtgggaagaggagggtgattttcttttatcttttttccccaaagcatagtttcctgcttcatagtacttattaaccwatttcttctaaaggtagcatttcctcccgtcttcggtccttgattcctccagttttttttttttgccaaagtttattgattatctcttcaaagtgtccataaata

SEQ ID NO: 225625 - DNA, 627 bp, Homo sapiens
attactattaacatatcctgctgcttattagattttcaaaggcaaccggtataaaatcttattagtgctgactgtggtctccaatttaagaagagtaaatcattcaaggtgcaattataggaggaacacaaacagaaaatcccactagtcataacttatcttccagttgtcttcctcagctttccgtttttgttttcatgctgcacctactcttggaacctctaaagcccaagctacaaatagctcataaaaatcagcatctgtgcttatggaatacatcttaaggcaggctacatccttttctgctacgagggtaaagctctgaagaggaaagatttattttgctgcagtagatgattttttagaaagttcatctccaatgctttagaataatccaaacaactatttggaggatggagtactacacgttaggcgtaatgggggaaayagctcatcttttgattaaaaggtgagatcaactcacctaattattaaacatgtcaattattttcattaaaatgttttaaaaacaactgttaacttcaaactcaataaaagcagtatttaaatcagatttttttttttctatagtgaggcaagtctgctagataaacggtagttcagccc

SEQ ID NO: 225626 - DNA, 504 bp, Homo sapiens
aggaatgtgagctggtggcagagcaggaacagtgcatcacagacacaccacacagactacagagcatgttcttcaaaacgttccctatttttcattcagaatctctcatatgctaactcacaagccacttttatggggcttattagaaaatgtattaacttcactccagcctgtagttcatggtggtaaacccaacaaatgacctttcacttttcctccttcccgctttggtcctctgagaaatacaaatcctaagaagaatgaatggccattttgcctagtcctactaaaaacatgttactatctttccttgtgcttaggagtagagattatttctaaaaagccctttaaaacctccttgcggaagctatcctgatatacttctcaacactttcattcattctttgattcagtcaacaagtatttattgagactytatcatgcactgggtgctgtggcatgagctatactttcccagattcaaaatctccattgcctaaggaa

SEQ ID NO: 225627 - DNA, 584 bp, Homo sapiens
taggtcaacagtctgttcattagtattttgtaagctaaaattgcaagtcacaaatgcttattctttattycttctttatttcccataaagcatttaaatcaggcaagaatctaataaacaattgtacttattgaatcattgaataggtagaaaaaccttatatagagataggaatatcttatatatctttagctttaaagaactttagaactcaaagaacaaagaagacaatgacaatatatatatatgtatgagtgagagttgccctttcttcatttatgactatcctaaaacccctttaagcattgtataaagtcctttccaactctaaaaagtatttatacatgaataatttctcaattgcagcaagtttttcacacttgtaactaagaatcaactccattattattttataatgtgaacaaaattgcaaaggaatgctgattccagtccaaaaaagccattttatgtggattcttatggcactcctcacccatacttgtgagtcacaggtgcaaaaacacaaacacaaaaatggtcacaaaatgtaaatatatttaaaaacaccttctgtgtttgtcctt

SEQ ID NO: 225628 - DNA, 584 bp, Homo sapiens
taggtcaacagtctgttcattagtattttgtaagctaaaattgcaagtcacaaatgcttattctttattccttctttatttcccataaagcatttaaatcaggcaagaatctaataaacaattgtacttattgaatcattgaataggtagaaaaaccttatatagagataggaatatcttatatatctttagctttaaagaackttagaactcaaagaacaaagaagacaatgacaatatatatatatgtatgagtgagagttgccctttcttcatttatgactatcctaaaacccctttaagcattgtataaagtcctttccaactctaaaaagtatttatacatgaataatttctcaattgcagcaagtttttcacacttgtaactaagaatcaactccattattattttataatgtgaacaaaattgcaaaggaatgctgattccagtccaaaaaagccattttatgtggattcttatggcactcctcacccatacttgtgagtcacaggtgcaaaaacacaaacacaaaaatggtcacaaaatgtaaatatatttaaaaacaccttctgtgtttgtcctt

SEQ ID NO: 225629 - DNA, 596 bp, Homo sapiens
aggtaagtttgttttcttttctttttagtagtcgtgaaaggtgccaaattggcagaggctcacgtttcttctctttacaccaaacaggtattacaaagaaagtaaatctttcaaaggccagttaaatctccatgctgatttttggctttataatttgattagtatgttttagcctgatatttcaaaaattataaaattcccttacaatgtaactgaaaatacatattctgtttatttcagtccatgaatagctaatcagttttcctagaacttaaaatgttttaagccatgttgctttgaatgaatcagaagacaaatatatttcagcgtgatcccaaagaatggagattaaatcttaccaacattaattaggtttacaattatattattcatagtattaatattattttaattataaatattacttagtattaagttgctactgaattttttacttgtttataaatactagcactctacatgtactttcatatgttttcatttaaaacttaggaaggagttgttcatttccattttayagataaggaaacttaggctaatagagatggaatgatttgcccagtcatagctagtgg

SEQ ID NO: 225630 - DNA, 608 bp, Homo sapiens
gctgtgatcttttgcagcctaatgtttgaagggagyatgatgcagagaggttttggtaaaatcattttagcccaaagctttgtgtaattttcctgcaactttgattttgatttctttctcaaatagacttttttaatgtttagaaaagttggaggtcaatttatgatgtgattcaagttttagatttatttgctattttcaaagttttttttaatagtcttctctttttccagcagagagagatcatcattgcctgaatttagctttgtgactgcaagagcaagaccagttcctgtctggagacgactgttacaataatatcatcctattattttatgttcactctttatcaatttgaacagatgtttacatgtactataattagcattttatctctacagttctctaagagtacatctgagtccaaagtgtatctgaatgtgtgctctgaccttattcttaaatgttttctccccatactttatagccatttattttttaaacaccttaagaaggaacgaaaaagttctcttggatgacgtatattcaagtctgagccaaattgaggattgtgtctaggaaatctgtaaagccatactactgtgttc

SEQ ID NO: 225631 - DNA, 608 bp, Homo sapiens
gctgtgatcttttgcagcctaatgtttgaagggagtatgatgcagagaggttttgktaaaatcattttagcccaaagctttgtgtaattttcctgcaactttgattttgatttctttctcaaatagacttttttaatgtttagaaaagttggaggtcaatttatgatgtgattcaagttttagatttatttgctattttcaaagttttttttaatagtcttctctttttccagcagagagagatcatcattgcctgaatttagctttgtgactgcaagagcaagaccagttcctgtctggagacgactgttacaataatatcatcctattattttatgttcactctttatcaatttgaacagatgtttacatgtactataattagcattttatctctacagttctctaagagtacatctgagtccaaagtgtatctgaatgtgtgctctgaccttattcttaaatgttttctccccatactttatagccatttattttttaaacaccttaagaaggaacgaaaaagttctcttggatgacgtatattcaagtctgagccaaattgaggattgtgtctaggaaatctgtaaagccatactactgtgttc

SEQ ID NO: 225632 - DNA, 530 bp, Homo sapiens
gccaaattgaggattgtgtctaggaaatctgtaaagccatactactgtgttcattagcatgagcaatttaaaatgaaaatgaattaaaaagttaaacatgagtttggttttaattttggggggatcttaagatatatttctgggagtaggatagccactgaaaataattttgaatagatgataaagtacttttttatgtactgtaatagcttgtgcatttcttctgaatatactttctgatgttgccaaggtcatttacccaaatatttttttaaaaattcttagcccttcaaarccaacaaagaaaataattttcttccaagtgacaaatgatgatctgtggattataaatattttaaaaattatatgtcttaacataattttttcacatttttttgactttcaatcaagacatcgaagacgacctttaaagcaagaggaaatagtgttgtgtgcctaacattggtaaagactagtttttaaccattttaagaagtgtatgtccaaattatttataagcagtatgactt

SEQ ID NO: 225633 - DNA, 526 bp, Homo sapiens
tttcagatttccagtctggtgttatttctgctttattcactagttatataatcctgcgttagcattttatttctctaggctttagtttactcatttaaaaaaaaaaaaaaggcactgaaccatacgatctgaaaaagtgggtcatttttgtgaaaaaatatttggctttcaccaycttgcgctctttctcccttcccattccagtaacttttagttaactgaatttcaaaataatttagtacatagcattagaatcttcaagagaattttttttctttatgtctttctaaagagtcacagaatcccatttcctcagcactcatgaccaaattttgagcccttagaaggcataaataaattctacttaatagaaacattttgtgtatttctcctaaattgccagacctatataatttctgtacattgtttctaccactgttacatagcaactactggtatgtttgactgtttctcccattggtattacagataactatgcctgccttttccctagaacaaatcacaa

SEQ ID NO: 225634 - DNA, 526 bp, Homo sapiens
tttcagatttccagtctggtgttatttctgctttattcactagttatataatcctgcgttagcattttatttctctaggctttagtttactcatttaaaaaaaaaaaaaaggcactgaaccatacgatctgaaaaagtgggtcatttttgtgaaaaaatatttggctttcaccaccttgcgctctttctcccttcccattccagtaacttttagttaactgaatttcaaaataatttagtacatagcattagaatcttcaagagaattttttttctttatgtctttctaaagagtcacagaatcccatttcctcagcactcatgaccaaattttgagcccttagaaggcataaataaattctacttaatagaaacattttgtgtatttctcctaaattgccagacctatataatttctgtacattgtttctaccactgttacatagyaactactggtatgtttgactgtttctcccattggtattacagataactatgcctgccttttccctagaacaaatcacaa

SEQ ID NO: 225635 - DNA, 561 bp, Homo sapiens
gacttcacataatagagatatgttatttaggcttttcactgattgcccctttttcagccctgtttttcacctccacttgataagtatttcatacctccaattacggagtctttctggggctctgtgactgaagacatcttgcttcttattattagaagatatgcaggttttaactcctatatgtcagattaaacacgtggaaaaacttttacatttcaaaatttgaygtgatctggtatgctcttttcttctctcctattatctttgtccctgcgtatttctgattttttttattctttactgttgctttagtgtgatttttggagagagtgaagataaatgcatatgtttgagctgacacgtttaaagagaggtccaaacacttaacttagtaattttacttgtactctgtaagatactttatcgttatctctcattatcacagcaatcttcaaaaggagatattaacatctttactttgtaaataagggacctgaatttcagaaaaaaacaagtaatggatccaatagcatcatttgacaggcaagtcactgagattga

SEQ ID NO: 225636 - DNA, 596 bp, Homo sapiens
atctgcaataaaagaaaaaaaactacagctaacataatattcaattgtgaaatattgactgtttttccttgaggttgggaaagacaaggatgtccatttgcatcacttttattttttttagtattgtactggagagactcatgggtgcactaaggaaggaaaatagaataaaccatataaagattggaaataaaactgtttacttgcagatgacatggttgtagatatagaaaattcaaaataattcacacagttgggattaagtaagtgtagtaagatgtatagaagtaaatatgtaaaaattatagcacatatagaaatgcatttgsaatatagaaatgtggttgtttggagaagtcactgtctctgttcttaggaattggagtatcttcttttctgttgggctcgttacttccctccactaatttcagttttaatagattttcttcttttgaaaatacatgtgtctcttactatccaaactgtctaatctccagaaccagatagattcaaatagtgaacaatatagttcattgtttataagtcacatttttacattttaacacctctgacgttgggctgtgtcttataattgt

SEQ ID NO: 225637 - DNA, 443 bp, Homo sapiens
accatgcacatctctaccctagacctsctgaactacattctcacagatgcttcaccaataactttcttaacatgattaccactatgaataatcttttctggcccaaaacactcccatccttccttctctcatccacacacagaattctgctcatatttaaagatccagcttatatgttacatcctcagaaaagcctcaagcaaccgtaccctcctctatattcaatagtactttggtcaaaccattactatagtacttaccataatgtgtcataattacttgactagctagttcacgcattagattatacattcctcatgggcagagtcactgtgttattccttgtcatatttctgctactctttggtcacccgtactttactttttacccctgccaacatgctttccacatcttgccccccattgggtataaagtaggtgtt

SEQ ID NO: 225638 - DNA, 591 bp, Homo sapiens
ttatttcatgtcaatggatttttgtcaatctcttaagggaaaaaaggagaactttgtaatttcttggagtaagaaaaatgtctccttcaacacttgagttcctgctgctcagtggtgtcatttgtttggagcacaaactcawtattgttccaaaagacagctatttaccctcaagttctgaatctctatgaatttaacaggtttaccatatagatgtgctgagggttatgttctccttggttagttaatgctccacaaaatttaattctgcattacacaaataccagtaaagagagtgaaaaataaaacaagatgcaaattttatgttcattgcaatgtgaaaattaggccacagaaaaattcctggctggattcagagttttcttgtgccagctaaagccttggtaaaatgttaaattatttttcgccaattcaacagaggtaaaaacgatcacataaaaaccagactaaacaaaaacaagtcaatgaggctgctacacataaagctttatacaaatgaaggactatcaaaacatttccaaatgtcaggaattcatttagaaatttatagtatcttaaaaaaaggaaaaa

SEQ ID NO: 225639 - DNA, 565 bp, Homo sapiens
aagagatgcaaaaccagtcttgccaatactggaaattcaaaataaaaatatattttggctttttttaagggtaaaattatgttatctatatcaacatcattggatttatttatttcaatagtagaaaaataggtaatgtgactaccatctacccatcctttgtccccctaacactggctgatttttaatgtgtaatactattacacattaaattacattacacattaaatttttaatgtgtaatactattacacatgatttttaatgagggtaatamtgttctatgaaacatggaaaaagttagaaataaactagcttaggtctagctgctttcatgagagactaaatctgcttctgtaatattggttggtcttttgacacggcaaaaactgattccaactgaggccttcacataggggtttgaagggcacccattaggacttcacaagccacagccaagtgtttgtctaacaccagcatatttgatacccgcccagactgtttttctagtatcataatttcacctctttagcagaggtgccaaatgttctatgacaggctacaa

SEQ ID NO: 225640 - DNA, 578 bp, Homo sapiens
gcatgaccaatggcaccagccagtgtacatgggagacccttggacatctccagccccacctcagatctggcaatggtcagtgatattctatgatgggcagccctctggcacaggccaaacattcaaatattttatttatatttgtacaaagtaactctgcgcatttcttcacttctagaaataaacaatataaagaatatttatataaattaaggccatctttcaggatgatgatataaaaatctcagtaaagattccaaaatgcatagaggctatgcaatgttgtataaagaggtgtgaacagtaagtaatcttgctattaatctaaaccctgttacagacacgtcatatgtgattaaatyttctcatctataaaataaaaaggttaggctaattctaaggtctctttgagtctaaaagggtctgttttatctctgtaatttcatcatgccatgattaaaaactatgaatagcactttttaaaaaattaaaaactagattttattttgctctaattaaaaattaataacatagcctaatgtgtaatactaattggcaaaggttggtcaaaatcagag

SEQ ID NO: 225641 - DNA, 533 bp, Homo sapiens
tttttatgtctccacagtattccatggggtatatgtaccacattttctttatccagtctgtcactgatgggcattgaggttgatcccatgtcattgctatagtaaatagcggtgcaatgaatatttgcgtgcatgtatctttatggtagaatgatttatattcctctgggaatatacccaaatactgcacgttttcacttataagagggagctaaaygatgagaactcatggacacaaagaagagaacaacagacactggggcctgcttgagagtggggggtggcaggagggagaagagcagaaaaaaataacatttggtactaggcttagtacctgagtgattaactaatctgtataacaagccactgtggcacaagtttacctatgtagcaaacctgcacatgtgccccaagcctaaaataaaagttaagaaaaaaaggaaaatgtagccgacacctaaaaatatgaaagaaaggtgcatgggctactacagttatcaaagtttctatgtcaaggaaaatataaaagacca

SEQ ID NO: 225642 - DNA, 556 bp, Homo sapiens
gaattctcattattcttttataattgtgcccgtggtcattttgaatctttaccttagtagagtttctaatgaaaaccagatggtagacaggtttaatgtgttgagcacctaccatgtacaaggcttgttcacattactgaatgtacaaggcctggtgtgtttcctcaaggaacctataatctaaaggaacagatatctgtgctaataatwattaataataagtgatgataaccacagcattaatctagcatttcctgtatgataaccattcttcacatattaacccacctaatccttataacaattctatcacatgggtaccatttgtcaccattttgctgatgagtacattgagaagaagaaggaaaatcatgtgcccaaagtcctgtaactactagatggtacactgagaatttaaaaaccaggcagccaactcttgacccactgtttatacccagtacacgtgtggcattcaacttcagtgtgaaataaagcagagtacaggattggtgcaagagctaggtatggactgggaacagcattagtcagtatcaac

SEQ ID NO: 225643 - DNA, 556 bp, Homo sapiens
gaattctcattattcttttataattgtgcccgtggtcattttgaatctttaccttagtagagtttctaatgaaaaccagatggtagacaggtttaatgtgttgagcacctaccatgtacaaggcttgttcacattactgaatgtacaaggcctggtgtgtttcctcaaggaacctataatctaaaggaacagatatctgtgctaataataawtaataataagtgatgataaccacagcattaatctagcatttcctgtatgataaccattcttcacatattaacccacctaatccttataacaattctatcacatgggtaccatttgtcaccattttgctgatgagtacattgagaagaagaaggaaaatcatgtgcccaaagtcctgtaactactagatggtacactgagaatttaaaaaccaggcagccaactcttgacccactgtttatacccagtacacgtgtggcattcaacttcagtgtgaaataaagcagagtacaggattggtgcaagagctaggtatggactgggaacagcattagtcagtatcaac

SEQ ID NO: 225644 - DNA, 567 bp, Homo sapiens
ctagggagaccttaggtagcaagctgttataatyatccaggaaactattaaatgtgtgacaatttgatgtccaatttataataacttaaaaagtgaatggtttaaataaagtttcttctctttcattttataacctgaatcctttcttagtaattattatcttcatactgatgctataaattttgaaataatgcctatagacaggcatatatttttggcagtacttggagaacataaaaagtttacttgcttgccgataaaaatcttgatgattttactttttaaagaagagaaaggtaagcacttaagaatttaaactttgcggcattgctttttgactccatttagttgtgattgtaagtaggcagagtttttgttttggaaaaagaactcagccggcagaggctgtggcaagggaagggagatgggcttgtttaaagacagcaagaatagtctcttgtcattccttataaaatattagctgtgaacttccaagttagaagtaaagctgtaggggtggggtgaggaaactgagccatccagaatttaactaccccagtatttatt

SEQ ID NO: 225645 - DNA, 567 bp, Homo sapiens
ctagggagaccttaggtagcaagctgttataatcatccaggaaactattaaatgtgtgacaatttgatgtccaatttataataacttaaaaagtgaatggtttaaataaagtttcttctctttcattttataacctgartcctttcttagtaattattatcttcatactgatgctataaattttgaaataatgcctatagacaggcatatatttttggcagtacttggagaacataaaaagtttacttgcttgccgataaaaatcttgatgattttactttttaaagaagagaaaggtaagcacttaagaatttaaactttgcggcattgctttttgactccatttagttgtgattgtaagtaggcagagtttttgttttggaaaaagaactcagccggcagaggctgtggcaagggaagggagatgggcttgtttaaagacagcaagaatagtctcttgtcattccttataaaatattagctgtgaacttccaagttagaagtaaagctgtaggggtggggtgaggaaactgagccatccagaatttaactaccccagtatttatt

SEQ ID NO: 225646 - DNA, 383 bp, Homo sapiens
aacaccaggccagtacagacactgccctgacctargcctcacatggcagttgctcaccaatgggtagttctcaacagatgttgatttactctgttgtgaacattctaggagggtttggtgtgcatgtaacaaaaaaagaagaggaaggagaaggaggaggaataggagaagctgctgtttcccaaattatctctatttcatttagtttatgcacttagaaaacaagcaataatacaggaggggttcagatcttaacacacaaaaaaaaaccacatatgcacaaaatgaagctcactaaattttcatttaagaagaaaaactctttttagtgagcatagacagtgaatctgctgtgtatgatttattgaagttacactccagtt

SEQ ID NO: 225647 - DNA, 583 bp, Homo sapiens
agactaaggagagaaaaaccttgagctaagtggcttccagcttcaactcatcctctcacccactctcttttacatgactttttctcttttattagtccccatttagaagctccttcataagtcttcctaggaagtcaatacggtaatctataaccttttatttttagcatgattgctcaaaacaatgatatttttcagacttatttaaagctatttttaaagcatttggtgaggggggttactaaaaagaaaatgagattgaaataatctgaatatttcaaatatctccaaatsaaattcatggtaattttgccatttaaaggtgaagcaatttggacttgttgatacagtcccaggtagaatttctcttagaaaatcccaaaatggaaatcatgtttccaatctgaccccaggccttttgcttacaatgagtctagggaacctcttccctgaagacaacgattgttctttctgaggaattggaggcacatgtacacttatgtcgagccatcattttcactagttaatcttgcccctggcttggctggggaaaatttaacatacagcattggggaattacaga

SEQ ID NO: 225648 - DNA, 583 bp, Homo sapiens
agactaaggagagaaaaaccttgagctaagtggcttccagcttcaactcatcctctcacccactctcttttacatgactttttctcttttattagtccccatttagaagctccttcataagtcttcctaggaagtcaatacggtaatctataaccttttatttttagcatgattgctcaaaacaatgatatttttcagacttatttaaagctatttttaaagcatttggtgaggggggttactaaaaagaaaatgagattgaaataatctgaatatttcaaatatctccaaatcaaattcatggtaattttgccatttaaaggtgaagcaatttggacttgttgatacagtcccaggtagaatttctcttagaaaatcccaaaatggaaatcatgtttccaatctgaccccaggccttttgcttacaatgagtctagggaacctcttccctgaagacaaygattgttctttctgaggaattggaggcacatgtacacttatgtcgagccatcattttcactagttaatcttgcccctggcttggctggggaaaatttaacatacagcattggggaattacaga

SEQ ID NO: 225649 - DNA, 550 bp, Homo sapiens
tgggggcaggcaccatatttgtcttgtggcagatgttagcctctgattgggcagaatatctgatacataattttcaatgctcgttgaatatgtaaataaatttagagaatgcctagataatttcttaatacccaattactgtattttgagatggcttgctgaactggtttaaatttggatctgaataatgccagacctacttaattaaatgaaattttaaattattcaatgaaggtatttgaccatgaaatggaaatataatgcagctgttaaaaacatcatcaccatggctggaatgctgtgttcaaatactgcctgtgcaactgagatgtgtccctgggctaattactgacctstagttcctccatttcctcagctgtcatattgtgagaagtaaacacatgaaaatatctaaagcacttagaagcataataagcctaatagttcagacacaatcatctaaaaggaaaactctcttttcttcttccatcaattggatgcttgtctttcatattttcaagctaaaactttagataatataaaattataa

SEQ ID NO: 225650 - DNA, 588 bp, Homo sapiens
tggtttatattttaaagatcaataaaaattttcttctyatgctcccatcttgttatgcatattcaatcagaattctaggctatggttttcaattttaaaagccgggtatatctgaaactcaaagcataaacatttgttaaatcattcatggtgtctggaaagggtattctgaaagctaattcctaatgatgaaaacaatagtatatataagcatgatttgaaaagataaacacagaatataagttattttaaccactatacttctaaataactaatatcaagaaattgctatcctttaaagaaatattggcagtgtgctacaatgccacctattaataatatttatatatcaacattttatattatagttcctatttgtgagtacctagaccaatgctgacttctgagatgggtcaaccaattcctgactatacccacactcatgcgtaggtgtgtccatgattttaccacatccaagaacttcagagctggccaatatcccaaaatccctaagagaaatcaagatcgtcttatagaaaaacaagcgctctccacatgttcagcttctctagctctttttttttttgg

SEQ ID NO: 225651 - DNA, 588 bp, Homo sapiens
tggtttatattttaaagatcaataaaaattttcttcttatgctcccatcttgttatgcatattcaatcagaattctaggctatggttttcaattttaaaagccgggtatatctgaaactcaaagcataaacatttgttaaatcattcatggtgtctggaaagggtattctgaaagctaattcctaatgatgaaaacaatagtatatataagcatgatttgaaaagataaacacagaatataagttattttaaccactatacttctaaataactaatatcaagaaattgctatcctttaaagaaatattggcagtgtgctacaatgccacctattaataatatttatatatcaacattttatattatagttcctatwtgtgagtacctagaccaatgctgacttctgagatgggtcaaccaattcctgactatacccacactcatgcgtaggtgtgtccatgattttaccacatccaagaacttcagagctggccaatatcccaaaatccctaagagaaatcaagatcgtcttatagaaaaacaagcgctctccacatgttcagcttctctagctctttttttttttgg

SEQ ID NO: 225652 - DNA, 428 bp, Homo sapiens
caatcgatagctttacaagtaacccatcatagttgattttatatgagcttagccctttcaggaaaaagaaatcattccatgaagcaatcttacaaaaactgtgctaggatattatatgtatgagaagactccaagaacacaaacccaatgaactgaagctaatgaattatctatggatttcagttcagatttcccaggtttacttgagaagatgaatatattcagasaaataaatgccattactatttttttgtctgctagcaaatggcattatcaacagatttgcctttataagatgtacacattgctttacctagggtagttgagaaaatattaatcgtcagaaatactgtaaattccagtcatgtatttatgaaatatattgatattgtcagtctctatttattatagtgtgctacaaagtctag

SEQ ID NO: 225653 - DNA, 352 bp, Homo sapiens
ctgtaactcagacaatttagatagaagtgaggactttggcctagacagccctgttcactctaaagatggattaaacaaggaaaaagatattgatatcaaaaattcaatcaggaatttgattaaagcatttcattaaatgtgataattgcttagtatattatcttacatatgcaatattcatgtgtgacaaatwaaatacaagtaaacatttgagcatattatctgcagcataatttacatatcaatttacatattcagttttgctcacatgaaaacttggatcttctcaatagaaaattgtgaaatctttaattcctcatccccaggaatgtaaataaataaatataaatat

SEQ ID NO: 225654 - DNA, 356 bp, Homo sapiens
ggacactgcaatgggaatatgcatgacaaagcaaactgtgtagattcaaatggtaaaggaagacaaggtctttaaaagaaaagcgatcaacctggaattatgggggagtagaaaaaaataaataaaggaaaaatgaagaggcttmtataattgttttgttatagttatctttgactataaagatcaacaacaaggtcgatgtcagttgaagtttgagcaggtggttgctggatagatgtcctcacagaagtgtattttgtgtaaggttgctatggcctttgtgcaaggttgtggattttgtggtattttgtgacagtttgtatcagccctagaagcacgagaaccctctcttcaag

SEQ ID NO: 225655 - DNA, 356 bp, Homo sapiens
ggacactgcaatgggaatatgcatgacaaagcaaactgtgtagattcaaatggtaaaggaagacaaggtctttaaaagaaaagcgatcaacctggaattatgggggagtagaaaaaaataaataaaggaaaaatgaagaggcttctataattgttttgttatagttatctttgactataaagatcaacaacaaggtcgatgtcagttgaagtttgagcaggtggttgctggatagatgtcctcacagaagtgtattttgtgtaaggttgctatggcctttgtgcaaggttgtggattttgtggtattttgtgacagtttgtatcagccctagaagcaygagaaccctctcttcaag

SEQ ID NO: 225656 - DNA, 538 bp, Homo sapiens
ttatttaattgtgtttttcatcattatccaagatagtatggggtggttttaggattttattattattggtgatgggaataagaaccagtgtattttgctgcagtcttttttgtttgtatgtttttttcttcgcttcttagtgtttacttgtccttcagctagcttgatcagagtctaaactttaatacrgattccctttcacatggcatgaatattaagagtactaggcattttagcctagtttttttttttttaattgatggatggggttcttactgtgtttcccaggctggactctaacttctgtgctcaagagattttcccacctcagcctcttgagtagctggcattacagataaattgttctgttttcaatcaaatatattgcctaggagaaggttatcatttatttaactattagagatggcaaccttatgtggccacagggagcatgtccataatttaaatgagtacagacatcaggtgaaaaaagcatagcttgttagggctttggcaaaatggagagtccttaccccat

SEQ ID NO: 225657 - DNA, 544 bp, Homo sapiens
ttattattggtgatgggaataagaaccagtgtattttgctgcagtcttttttgtttgtatgtttttttcttcgcttcttagtgtttacttgtccttcagctagcttgatcagagtctaaactttaatacagattccctttcacatggcatgaatattaagagtactaggcattttagcctagtttttttttttttaattgatggatggggttcttactgtgtttcccaggctggactctaacttctgtgctcaagagattttcccacctcagcctcttgagtagctggcattacagataaattgttctgttttcaatcaaatatattgcctaggagaaggttatcatttatttaactattagagatggcaaccttatgyggccacagggagcatgtccataatttaaatgagtacagacatcaggtgaaaaaagcatagcttgttagggctttggcaaaatggagagtccttaccccatataaagatattcacattcagtattgtaaatcacttcacgaagaaaacaaaaagtgtctgggcaga

SEQ ID NO: 225658 - DNA, 442 bp, Homo sapiens
ctttaactttcattagatcacaagcaattaaagagaaaagacaatcccttttatctatttagattgcctataattaaaactatcatcatcatatgccatatatgctcaaataatgttgatacatcagtaacaatttctcaattgaataaattcttccattgaagtcagtgatgacagctagctagctagctagctagatgatagatagatttgtgatagatagatggatagataggtaataaatagatagatatggtctgacctgacccttcccagtgaataactcatacctggtggaaaattacctacctttgagaagacaagtttcctgtttttagggtatcattgccaaaaaaggttattgtattctcatttcttgaaaaacaattcatcttctaatcatargcaatttatttcaggaattggtttactcaactggaat

SEQ ID NO: 225659 - DNA, 417 bp, Homo sapiens
cattggccaaggaggacctgtagcttaacgtctatgcaggcctcatcaaaactcttttgtacatcttttactatgcattcttaaaggaaaagatggctgtgtctaaatgttgtgaaagtgtgtgggtcattgcactgcccatatagagataggcatagcttcagaatgtggagaaagagctgtcatttctcagtagcgcaggaactgactttcttgcttctcrttgtgctgttgtgctccaatttatttttccagaggaatgcactaattagcatgatatttgtgtgtgtgcccgtgtgtgagtgtgtgtgtctctttgcatggggcagtcgagaaacatttgcaattttctacaatccctgttactcaaatttagatgtatgcaagtctatatttacagggtatgaaaatgaattc

SEQ ID NO: 225660 - DNA, 279 bp, Homo sapiens
cctgaaaaagtgctcaacaccagtaatcaggwaaatgtaaactgaaaccaataatatcccactatatactcactatatatccacattgttggtgcagctgtaaaatggcacaactgcctcagaaaactgctatactgcttagctgtttttaaaacatttattctatgattcagcaattccattccaaggaagataaaatcatatgtctgctaaagacttgtgcacacatattcacagcatctttattcacagtcgtcaaagactgcaaacaacgcaaat

SEQ ID NO: 225661 - DNA, 579 bp, Homo sapiens
ttttttccccttttatttttagttgacatataataattatacatatttatgggatacagagtaatattttgatacatgtattcaatgtgtgatgatcaaatcaaagcaattaggatacctatcacctcaaacattgatcatttctttgtgttgggaacattccaaatcctctcttctagctttttgaacatatacattaaattattcttaactgtattcactccatagtgctacaggatgctggaacttattcctcttctctagctgtaactttgtatctattaaccaacttcttcccatcctccacttccctctacccttcccagcctctgataaccamaattttactctctacttctatgagctcattttttaagcttccatatatgattgggaacgtggttttttatctttctgtgcatgacttatttcacttaacataatgtccttcaggtttgaggactgagaagagcagacattttattgttcatctccatgttgagaatcagaaatgtccccaattaaaaagtgattacaaatatgttatatcaggaactgtggcttgcctgtgggtcctgg

SEQ ID NO: 225662 - DNA, 367 bp, Homo sapiens
tgagtgggccacggggttctacaggaagagtgaatggtttaaacaaagaggcagagactaatcagtcaaattttagttgaaacaaaattagagttgaatatcttttctccaaatctaggtccaattatacattcaacaaaattcaacattactgactagtyaatatttatgcttatttacagatataacaaaatttcatagctagggaagcagttctggggctgtcagtgatcttgcttgttattccagacaactgtcattcagggactccaggtagcatgatcctgagagcaaatgcaccattgttaaaggcatagacgtataaatacaaacctctgccacagagcactattcactctttgcgtct

SEQ ID NO: 225663 - DNA, 624 bp, Homo sapiens
gattaaatatctcaagtagtcaaccaattatcaaagtgaagacttattttactttaggatataaagtatgatgcagttaatacaagtacaggaaaaacatgaggatcatattttctgaaacctgagttacaggtgaacagagcaatattggatgagaagatgatgctctcaggccctagtgccaaaataaktcttcccaacacttcaaaaagagaagtgagcagggaaagatactagcaacttgctgatataccagcatatttctcagaaagactcctctgacctgtacaaaattgtttttcaactagaaaaactggactcttgccctgtcttagtcaccagtcatatctggcacacggtaaaacaagttatttcctttggctggaacttcatttgctaatctctaaaatggattcatcgagctaaatgatatcatgcttttttctaactcttaactttctaggatcctaaatagaagaaatctttagtgtaaccatttgcacaagaattattttgtccaagaaccaaagaatgttcccaaggccctacagattttcttccttcatttatttctgtacaatcactagtagggtgctgattcaagacagtgccatgttagattct

SEQ ID NO: 225664 - DNA, 624 bp, Homo sapiens
gattaaatatctcaagtagtcaaccaattatcaaagtgaagacttattttactttaggatataaagtatgatgcagttaatacaagtacaggaaaaacatgaggatcatattttctgaaacctgagttacaggtgaacagagcaatattggatgagaagatgatgctctcaggccctagtgccaaaataattcttcccaacacttcaaaaagagaagtgagcagggaaagatactagcaacttgctgatataccagcatatttctcagaaagactcctctgacctgtacaaaattgtttttsaactagaaaaactggactcttgccctgtcttagtcaccagtcatatctggcacacggtaaaacaagttatttcctttggctggaacttcatttgctaatctctaaaatggattcatcgagctaaatgatatcatgcttttttctaactcttaactttctaggatcctaaatagaagaaatctttagtgtaaccatttgcacaagaattattttgtccaagaaccaaagaatgttcccaaggccctacagattttcttccttcatttatttctgtacaatcactagtagggtgctgattcaagacagtgccatgttagattct

SEQ ID NO: 225665 - DNA, 624 bp, Homo sapiens
gattaaatatctcaagtagtcaaccaattatcaaagtgaagacttattttactttaggatataaagtatgatgcagttaatacaagtacaggaaaaacatgaggatcatattttctgaaacctgagttacaggtgaacagagcaatattggatgagaagatgatgctctcaggccctagtgccaaaataattcttcccaacacttcaaaaagagaagtgagcagggaaagatactagcaacttgctgatataccagcatatttctcagaaagactcctctgacctgtacaaaattgtttttcaactagaawaactggactcttgccctgtcttagtcaccagtcatatctggcacacggtaaaacaagttatttcctttggctggaacttcatttgctaatctctaaaatggattcatcgagctaaatgatatcatgcttttttctaactcttaactttctaggatcctaaatagaagaaatctttagtgtaaccatttgcacaagaattattttgtccaagaaccaaagaatgttcccaaggccctacagattttcttccttcatttatttctgtacaatcactagtagggtgctgattcaagacagtgccatgttagattct

SEQ ID NO: 225666 - DNA, 569 bp, Homo sapiens
ttattataaatcaagttatgtggagaggttgaagaaaatctcagaatctgcattataacaattaccagataattttaatgcaaacgagttagagcaacactgaactatattgtttatttctctactcagtttgtctagcatagtgcttgcaatacttgtttgaatgaatgttaaatgaaagagaagatgaatggataagacatctcaagtatattcatatgtaatccctatgtgatgtggaggactccctgtccctttgtaaaattccctaattaaaatcagatctaactacaggtttcctgctccgtagaagtctaaagaccttgcctgtagtaacaattcttgagggcctctgctcttacagtctctaatgattaatttatgtgtcaacttgactagattaagggactcttttagatggtaaagcattatttctggatgtggctgtgagcatgtttccagaaaagattggcactagagtcagtggactgagtaaagaagatctgtcctctcccaatgtggacaggtacagtaaagtcagytgaaggcccacatagtaacaaacaaca

SEQ ID NO: 225667 - DNA, 504 bp, Homo sapiens
ttagcctaatacagcataaaaatgtgcagcaacaatgcttttcagcctctacttactagtctttccagggcatgggtgtgaatcccccttcttaaactccagatcagttacactgacattcagtgtggtatttcacacaasaaaaatgagttttgcaagtctgtattcccctgaacgagcatataggagatattaattaatgctggttcactgcttaaatcaaggaattactatcaaggccattatccttagcaaactaaagcaggaacaaaaaaccaaatactgcatgttctcacttataagtgggagccaaatgatgagaacacatggatatatatagaggggaacaacacacactggagcctaccaaaaggtggagggtgggaggagggagaatatcaggaaaaataactaatgggtactagggttaatacctggtttatgaaataatctgtacacaacaaaccctcatgatacaagtttacctatttaacaaacctgcac

SEQ ID NO: 225668 - DNA, 504 bp, Homo sapiens
ttagcctaatacagcataaaaatgtgcagcaacaatgcttttcagcctctacttactagtctttccagggcatgggtgtgaatcccccttcttaaactccagatcagttacactgacattcagtgtggtatttcacacaagaaaaaygagttttgcaagtctgtattcccctgaacgagcatataggagatattaattaatgctggttcactgcttaaatcaaggaattactatcaaggccattatccttagcaaactaaagcaggaacaaaaaaccaaatactgcatgttctcacttataagtgggagccaaatgatgagaacacatggatatatatagaggggaacaacacacactggagcctaccaaaaggtggagggtgggaggagggagaatatcaggaaaaataactaatgggtactagggttaatacctggtttatgaaataatctgtacacaacaaaccctcatgatacaagtttacctatttaacaaacctgcac

SEQ ID NO: 225669 - DNA, 510 bp, Homo sapiens
aaacacaggaaggatgatgatggagagaagaattatgataacacaaactatcttttcctcaaacttggtggtgtcactgatattcattcttgccattattttgaaaaataacataattttagggaaaaaggaaacactgaaatatgcatattgactgtaacaagcatcatgatttcagaaacattaaagtgtgaattctagaatgcagtgattaataaaaatctcccggtttttccttaatactttacaaggtcattggggataaggataatgatgatcaaatgaattcactgactgtagatctgtgacattactagaggtcatttagctatgcttttgttaagaactggttcccagccaggcatagtggctcatccctgtaaccccagcactttaaggggctgaggcagatggaacacttgaggtcaggagttcgggaccagcctgaccaacatggaaaaacactgtctctactaaaaayacaaaaattagccaggtgtgttggtgcac

SEQ ID NO: 225670 - DNA, 535 bp, Homo sapiens
tgttacccccaaccccatacctaacagttttgagtgagagggatttgagtggccagacgtcatataggggctttcctgaacyctctccttcccagctgattgtgatagaatgtcttttttttttttttttttttttgagatggtgttttgctgttgttgcccaggctggagtacaatggtagggtcttaggtcactgcaacctctgcctcccgtgttcaagcaattctcctggctctgcctcctgagtagctgggattacaggctcctgccaccacacccgaataatttttgtacttttagtagagacagggttttaccatgttggccaggctggtcgtgaactcctgacctcaggtgatccacctgccttggcctcccaaagtgctgagattacaggcgtaagccactgtacccagtctgatagaatgtctttttaaacagacaccctatcagtcagaacttggaggccatacagtgccccttcaaacaattatgggtatgaaaaatgaaaaatagcctcccccacactccctg

SEQ ID NO: 225671 - DNA, 537 bp, Homo sapiens
ccatacctaacagttttgagtgagagggatttgagtggccagacgtcatataggggctttcctgaactctctccttcccagctgattgtgatagaatgtcttttttttttttttttttttttgagatggtgttttgctgttgttgcccaggctggagtacaatggtagggtcttaggtcactgcaacctctgcctcccgtgttcaagcaattctcctggctctgcctcctgagtagctgggattacaggctcctgccaccacacccgaataatttttgtacttttagtagagacagggttttaccatgttggccaggctggtcgtgaactcctgacctcaggtgatccacctgccttggcctcccaaagtgmtgagattacaggcgtaagccactgtacccagtctgatagaatgtctttttaaacagacaccctatcagtcagaacttggaggccatacagtgccccttcaaacaattatgggtatgaaaaatgaaaaatagcctcccccacactccctgctatattaatttagga

SEQ ID NO: 225672 - DNA, 497 bp, Homo sapiens
gtatattgtgtttaatactttaataaaaaagaaaaaaattaaaaaattaaattcaccatttttaccttcatatcttgccctattgtgcatcctttggttgtttggacagtgatcccactaatctcccaattacaaagactgcaaaactcagacacaatgactgttctgtaattcgcccctgccaccagcttcctgcttcagtaatgactctctataattcagttttcaactagcactcaggctaatttttccaaaaacacaaatatgaaaatgctgctcctttgtgataaattcattctatcatcttaggataaaatccaagttccttaagttgtaaggaactccgtgcctacttaatctctccaaactcatctctcackactttctcagtgtgaactccagctttcctaagtttcctaccgagatatgtatttacctatgacctaaaatgcagaataatacttcagagatttattgaatggcagtttagttcaatt

SEQ ID NO: 225673 - DNA, 525 bp, Homo sapiens
aggagaatgtaccacagactgtcctactggtcgaattttttttgttgttgtttgttttttttttttttttttgagacagagkctcgctgtgttgcccaggctggagtgcagtgagcgatatcagctcactgcaagctccgcctcccgggtcgacgccattctcccgcctcagcctccagagcagctgggactacaggcgcccgccaccacgcctagctaattttgtctttgtatttttagtagagaagggtttcaccatgttagccagccatccctgacctcgtgatctacccgtttttttttgtttttttgttttttttttggcaatttagttgggtttttctttttctttcttttaatttaatttactttaagttctgggatacatgtgcagaacatgcaggtttattacatggatatacatgtaccatggtggtttgctgctcctatcaacccccatttaggttttaagccctgcatgcattaggtatttgtcctaaagctctccctcccctgtccccctgc

SEQ ID NO: 225674 - DNA, 541 bp, Homo sapiens
gcagctataatttttggtgattattaccagacattcctccacaggagtggtatgctccatttgccaccagcagcaatatatgattcactggcacagtgtgttgtcaaacctttcagtttccaccaatgtggccatgagaaatgttatctcatttttatttctcctactrtgagtggggctgagcatcttttcacatgcttatggacatttccatttctttttctgtatctatccactcctgcctttcaaccatttttctgtgcagtggctggtctttttcttcacagtattaggagctttttatatagtaggaaagttacatatttgtctgtgatgtcagtggcaaatattttttccttgtctatcaactgacttctggctttgcctattggagttttcaagttttttatttccattcagaaaatatgactacattgtcctttctaagcattacacaaccctagaaggtagcacaattatttccattattcagaagacaccaagctataggaatattaagtaaattgtccaaaaacataca

SEQ ID NO: 225675 - DNA, 558 bp, Homo sapiens
tgcagctataatttttggtgattattaccagacattcctccacaggagtggtatgctccatttgccaccagcagcaatatatgattcactggcacagtgtgttgtcaaacctttcagtttccaccaatgtggccatgagaaatgttatctcatttttatttctcctactatgagtggggctgagcatcttttcacatgcttatggacatttccatttctttttctgtatctatccactcctgcctttcaaccatttttctgtgcagtggctggtctttttcttcacagtattaggagctttttatatagtaggaaagttacatatttgtctgtgatgtcagtggcaaatattttttccttgtctatcaactgacttctggctttgcctattggagttttcaagttttttatttccattcagaaaatatgactacattgtcctttctaagcattacacaaccctagaaggtagcacaattatttccattattcagaagacaccaagctataggaatattaagtaaaytgtccaaaaacatacaaatctgaccacagatc

SEQ ID NO: 225676 - DNA, 571 bp, Homo sapiens
ggtgacaatttcagagaataaaaattgcttagctatatattaattacatacattttagaatatttttctttacctggtaaataatatttagcctttaccaaggaacattgtaaagaagattgtggaaatttctacagtcaaatgatttagaaagtagaaaatctttgattatctcatacatagtccctagacaatgaatatactcatartattctcatcaaaacctgtctttaaattattttaatctaaattaattttcctaagtaataaatgacagcagctaaaacttataaggctatttggaactattaagtcaatgattaagaagacataaagaccctcaaaaactaattaacttgactatcagtcttttagatttgtgtactgcttccaggattataacaagcttaaataaatctaactaacacttaaattgtgatttcttgttctctgcatattttaaagaaaaatgtaaagagcctggagatcttttgtactatttagataaagggtttagaatttaagaatctatctgatatcaatggaagctttatctgaggaatgctacaag

SEQ ID NO: 225677 - DNA, 619 bp, Homo sapiens
tcttttggtcaaaataagtctcaaggctagcaagagaaggaatagacttccctcttgatgcaggagtggaaaggtgatattgcaaaagggcatgttggaatrgaagatattgtgtggccatctttagaaacagtccacaacattttgcttcattcatttctgtggccacagttcctctcatagggttcaaatagttgctgaacgaaacaagttaaaggaaccaaaaaggtgtagtctctgtagatagatgaacatgagtatgaattccagttctgccactgctgtgtaatcatgaacaatttgtctgagctctctaaggctgccttctcctgtgtcaaactagaataataatatctgtgtcttgggatttgatggatattgtgaaagttgagagataaggtacagaagatattcttacagcaactaaaacacatagatttttaataaaggcaattattattaacattattaataacccattttaaggaaatacattttccaagggttaaaatagagggcataggtcactctgagatgatttatcactttctatgtctgcctttctttctgttcttcagacacactgaatgcttgatgacatcagcgcctttccacttta

SEQ ID NO: 225678 - DNA, 363 bp, Homo sapiens
cctacttgcccagaagttaacttcaatcattgaatttcccttctctgtactttgtatgtagttggtgctcaaagatatctattgaattgcgttgaatttctggattccaatttatgctacmtgacagacaccagaagatatttaccatcaatgctgcagtgaattaaagaacctagaattcggaaatgacttagactcatttaaaaatacctgtaagactgatgccatattttagtaggatattctgatgatggaagaaataggtagctgtgtctgggcctagtttctttacaaattagatatggcaacaaatgtgaaacaaaaatgaatgaggttttgcttcacccttataacctgaactct

SEQ ID NO: 225679 - DNA, 524 bp, Homo sapiens
ctttctcagtaatttttgagtctctgtatcaatatatgtgtgctcacacgttcaaacatccatgaatagccaagcactgcaggatgtttctggaaattgaccttccatgatgtctactttgactaaccctttcctctgggcaaacatacctaacctttaagccacattttcaaaggaatcatagatcatgcacctcatagaactgaactagaatgtcagaaattatgatcaagataggaaagagaagtaaygagaagctgacctattttgctgtgaatttactgtggatggaagatctcaaggaagtttttactttcttaactaaaataataataataaaaaataccctgtaaaatatttaaataatggtcccatttccataaatagtttggcatcttcaaagttatatttaaatagtatttttataatttacctgcatatttaagaaaatgagtttttaaaacatatcatgaaatcaacataaagaagctataactggtgtgataattctagaatttcaccct

SEQ ID NO: 225680 - DNA, 524 bp, Homo sapiens
ctttctcagtaatttttgagtctctgtatcaatatatgtgtgctcacacgttcaaacatccatgaatagccaagcactgcaggatgtttctggaaattgaccttccatgatgtctactttgactaaccctttcctctgggcaaacatacctaacctttaagccacattttcaaaggaatcatagatcatgcacctcatagaactgaactagaatgtcagaaattatgatcaagataggaaagagaagtaatgagaagctgacctattttgctgtgaatttastgtggatggaagatctcaaggaagtttttactttcttaactaaaataataataataaaaaataccctgtaaaatatttaaataatggtcccatttccataaatagtttggcatcttcaaagttatatttaaatagtatttttataatttacctgcatatttaagaaaatgagtttttaaaacatatcatgaaatcaacataaagaagctataactggtgtgataattctagaatttcaccct

SEQ ID NO: 225681 - DNA, 476 bp, Homo sapiens
tgtatcaatatatgtgtgctcacacgttcaaacatccatgaatagccaagcactgcaggatgtttctggaaattgaccttccatgatgtctactttgactaaccctttcctctgggcaaacatacctaacctttaagccacattttcaaaggaatcatagatcatgcacctcatagaactgaactagaatgtcagaaattatgatcaagataggaaagagaagtaatgagaagctgacctattttgctgtgaatttactgtggatggaagatctcaagraagtttttactttcttaactaaaataataataataaaaaataccctgtaaaatatttaaataatggtcccatttccataaatagtttggcatcttcaaagttatatttaaatagtatttttataatttacctgcatatttaagaaaatgagtttttaaaacatatcatgaaatcaacataaagaagctataactggt

SEQ ID NO: 225682 - DNA, 592 bp, Homo sapiens
tgggtgttaacatgcaatccaaaaatgtttacactttgtatccacttcaaacgtaaactcctgtgactccttctcaaaacttacyacatacattttctctttaccctttcaggcccctgtccaagcagccaggccctctgcgtctatcatgagccctcacagatgtttaccttaggccatgtcactttcaacacaaaggtaatgactagttgcacctgcaagagtgctacccactggagaatttcccctgcctgctaccgtgcagggacaccccgagtgagctgtaatgcagcagctgtctgttttccactgcatgagtgacctgcaatctatgctcgttcttttttcttttccatcaggtggtcataaaagccctctgtcctatattgacacagatattagttcagagagggaatccaatgcatcagtggtaggtattatggaagtctaagtcatctgctcatatggcttacttttaaaattaaggtcatctccaaaagatggcatggttccaccagtatggtatcacagatatggcatatgtccaaagtcatcaaattgtatacattatacatgtgcaggatttttttgg

SEQ ID NO: 225683 - DNA, 500 bp, Homo sapiens
tgccatcttgacaaaatatgacactcataatccataatgtggaaatgttaccacatgatgtatcatattggattcaagtgatcattattagaamccaagaagttacacaatttttgaaatgtacaagaaaaatgcctaaatatactgaatgttagcaatagtgtttctaaaaattaaaaggggaaggaaggaggaattcaaccccttctccctgcctcacttaatgagctgggacatctcatctcattttcttctgttctcagaatgggatttacagtatcagctcccttggttctcaggtctttggactcatacttagttacatccccggctttcctggtttttagtttacagatagcaagtggtaggacttcccagcctccatggctgcatgaaccatatatatatatacacacacatacatacatatgtttgttgttcccctctttctgccaatgtgttctcattattcagctcccacttataactgagaacatgtg

SEQ ID NO: 225684 - DNA, 600 bp, Homo sapiens
agctaattatcttaaactcatttgcaagaatacaacaaatgtattttcaggaacagagaagagtctaggaacagagatctatttcataaagtcttaggatctgggctttaattttttttgaaaagtgtagtaaaattttaaactcatttgtaaatctacctaaatgtctttccagggaatgaagaggataycacgaacacaagtctatttcaaaagccttatacattttgctttcaattcttttaaaaccatagtaaatataaattgaaactagcaggctaagtataaaaataacacagccactcacatttggcatttcttcctttttaacagaaatagcatatttgaagcataaggtcaaaatgtcttcctttatttaaagaaaatgtcaaagataacagtaatttagggatcaacgggtaaacaatgcatagcaaattacatcagtaactagttaaaagccctataaaaataacttatcctgtatttttaagtaatgggattcatcaagaacttctaagacatcaaaatgctgattcacaaaaaaaattctttaaaaagaaccaaataaacatctccgcagcccccacacccaaatta

SEQ ID NO: 225685 - DNA, 600 bp, Homo sapiens
agctaattatcttaaactcatttgcaagaatacaacaaatgtattttcaggaacagagaagagtctaggaacagagatctatttcataaagtcttaggatctgggctttaattttttttgaaaagtgtagtaaaattttaaactcatttgtaaatctacctaaatgtctttccagggaatgaagaggatatcaygaacacaagtctatttcaaaagccttatacattttgctttcaattcttttaaaaccatagtaaatataaattgaaactagcaggctaagtataaaaataacacagccactcacatttggcatttcttcctttttaacagaaatagcatatttgaagcataaggtcaaaatgtcttcctttatttaaagaaaatgtcaaagataacagtaatttagggatcaacgggtaaacaatgcatagcaaattacatcagtaactagttaaaagccctataaaaataacttatcctgtatttttaagtaatgggattcatcaagaacttctaagacatcaaaatgctgattcacaaaaaaaattctttaaaaagaaccaaataaacatctccgcagcccccacacccaaatta

SEQ ID NO: 225686 - DNA, 600 bp, Homo sapiens
agctaattatcttaaactcatttgcaagaatacaacaaatgtattttcaggaacagagaagagtctaggaacagagatctatttcataaagtcttaggatctgggctttaattttttttgaaaagtgtagtaaaattttaaactcatttgtaaatctacctaaatgtctttccagggaatgaagaggatatcacgaacacaagtctatttcaaaagccttatacaytttgctttcaattcttttaaaaccatagtaaatataaattgaaactagcaggctaagtataaaaataacacagccactcacatttggcatttcttcctttttaacagaaatagcatatttgaagcataaggtcaaaatgtcttcctttatttaaagaaaatgtcaaagataacagtaatttagggatcaacgggtaaacaatgcatagcaaattacatcagtaactagttaaaagccctataaaaataacttatcctgtatttttaagtaatgggattcatcaagaacttctaagacatcaaaatgctgattcacaaaaaaaattctttaaaaagaaccaaataaacatctccgcagcccccacacccaaatta

SEQ ID NO: 225687 - DNA, 561 bp, Homo sapiens
acggctaaacacaggaccctactccaccattacgttgtacatttaaaaccatcagaattggctaagtttggagactagaatacccaatcaataaaaagtgcttcaatttagtttttaaactactgtcatcatgctgcctcattatattcccttaaaaattgactagaggcaattttgctgaatattgaaaatggaaagtagtaaaagtggaggagaaaaaggggtgccaacaccattatagagtggctcacaaagttcttgagcatgaggattatgtattaaatctttaatttcggcacaaaaataagtaagtgtaagtgttacacatagaattactcagagaatagagaaaggcaagaaggatgaggtggcgaggagcaaagaagggaggacagcaggatggattaccactacttaagttactaggtgacttggtttagtaataaagttgcagtatagcgtttttaactgttccctaatattacatcgcaaagagaaaagatmattgcctcctcaatgactccaatacatgaaatagatactatcctggatgtagaattc

SEQ ID NO: 225688 - DNA, 643 bp, Homo sapiens
atgacatccagtgaaaaatatgaaatacaatcagaatatggtcaatagaaagttcttaattgctctgaatacacagagatgaagaggttggtttctgtcattcatcaggcagaccccagaaagctttatagtggagctgatagccaacctgggccgttgaatgccgaggattttgatgggacagtgttttagaaagtgggatttcataaaatgaagatgacttcaaaggcctagagatagaaaagtatgtttggggaaaagtaaatatttgggaatgtgagagggttattgtattgtgttgagctctttagaatcaatgaaggtctgtcctctactcctgtaaaaacctggaacattgcttcttaaattggagtccaaaaatatatcttcagcaatctcaaggtctcttgagttttatttttaaattaaagtttctatttccatgatgatacgtggggtgatgaaaacattmtaaaaattaagattatggtgatggttgcagaattttgtaaacatgataaaaaccactgccttgggcattttaagtagatgaacattatggtaagtatattctatcttataaagctggtaaagattattttacacattttaaagaggcaaatatatttttaaataatgaaat

SEQ ID NO: 225689 - DNA, 254 bp, Homo sapiens
tgctttctgggacaacgtttagcatatttagcacgtttaacattgcccagtcatgtgattcacaaaaccattgtatgtacatacatgtgtgcacgtctacatagttccttatkgctatgataggcaagtggatgtggataaaacttctctccagtttcactctccaaagagatcaatctgatgaaagtttctatttttttcatctggtatacacacacattgttctatggcagttatcgtctaaaaagctgttg

SEQ ID NO: 225690 - DNA, 395 bp, Homo sapiens
agatagatgtatatgtgaaccacatagtacatagttacgctaatattatctcttaagcgcrtaggaatctctatttgctgtatttattgtgtaaacatttgttttaactgtgaaaggtagcatcatcaaaacagcaatgctccccagatcactaagtggcttgcatttaaatgcaatttaggtatgaaagcaatctaccgtcccgcctcacaaaataaaattctatttgtttttataaagtaacaggtgaggatgcatggcaagctcaaactttgtggtaattagatgtcccatcagggaaactttgatctaattgattgaaattccaaagtctacagttccaaagaacaaaagattccctttggctagatgagttttcagaggttctatgtact

SEQ ID NO: 225691 - DNA, 554 bp, Homo sapiens
aatagcatggcaaaaaacacaattacttttgcaccaacgtaatactttgggaaatacttcataaaataacctttaacaatggaaaataggctacctttttgaaggcatgttataaaatacaaatccctatggggtggatatttttatgagagcaaattctcctcccaaagagaaatgttgtgttaacatttcaagttagcccttaatctttttttgtttttattttattttttgaaatggagtttcactcttgctgcccaggctggagcacaatcgtgtgatcttggctcactacagcctctgcctcccgggatcaagcaattctccagcttcagcctcccaagtagcygggattacaggcgcctgccaccacgccccagctaattttttttttttttttttttttttggtatttttagtagtgacagggtttcaccatgttggccaggctgttctcaaactcctggcctttggtgatccgcccaccttggccttccaaagtgctgggattacaggcatgagccactgtgcctggccagcccttaatctttaaa

SEQ ID NO: 225692 - DNA, 596 bp, Homo sapiens
tccttgctcagtagtggcagatgcaataatggcagatggcagataccatatctcctgggtaattcaacatgacaatcatgctgttaagaatcaataatcatacaaaaattagctgagcatggtggacgtgcctataatcccagctacttgggagactgaggcaggagaattgcttgaacctgggaagcagaagttgcagtgtgctgagattgtgccactgcactccagcctgggtaacagagtgagactccatctcaaaaacaaaaaattaataatcagtctgatcatctatggtcaaagayagacccagaattcagccagtagttgattcaacaagttaaaatatgtccccagctgattttgatagtgtttaataaaaagagccatgtagggattttcttacccctgtgataacttcagggaggtggcattttttaacttcctacttttcatataggaaacagactcattggaaagataaaagacttgcttcagatcatgttcagcttccacgctcttggttgctggtctggtgctttgtctgttgactaattcctttttctccctcctcaccccaggccctcccctgtaaagta

SEQ ID NO: 225693 - DNA, 498 bp, Homo sapiens
aacctggctgacattaggatctacagctgctagggatayagtggattaatgccttacctagtggtattattaataataaataatgtttgggatgtttttaatggattttctccagattcctcatgcaattctcagatgttggtcacggaccacaggatttatgaaaactatatagagcagtgaacacatgctataaaagcttcttcagtcagagaaacactaaaaatgcattaaagtaggatttcaagattaactcaagtctgcactactgttgtctagaaaagtctccattcagtttcaataacatctttttgcactatcctaattgttggacaactctcttagagtcgatgtacatatttattatgttttcttgggatattccatgcaaagcaagtgtccattcatgagcataaacctctaaaagtcttgagtaagcagtaaataatccattcctctaaatccatagaaccatgattcagtgtcttggagacaaac

SEQ ID NO: 225694 - DNA, 577 bp, Homo sapiens
attctgaatcaacctggctgacattaggatctacagctgctagggatacagtggattaatgccttacctagtggtattattaataataaataatgtttgggatgtttttaatggattttctccagattcctcatgcaattctcagatgttggtcayggaccacaggatttatgaaaactatatagagcagtgaacacatgctataaaagcttcttcagtcagagaaacactaaaaatgcattaaagtaggatttcaagattaactcaagtctgcactactgttgtctagaaaagtctccattcagtttcaataacatctttttgcactatcctaattgttggacaactctcttagagtcgatgtacatatttattatgttttcttgggatattccatgcaaagcaagtgtccattcatgagcataaacctctaaaagtcttgagtaagcagtaaataatccattcctctaaatccatagaaccatgattcagtgtcttggagacaaacttaaaatttggagttgtttaagcctatcatctccttggtttttgccatttgatagtaaatttgagattt

SEQ ID NO: 225695 - DNA, 539 bp, Homo sapiens
ccaattagtggcacagctgggtgcaaacctaggctgacataattccaaaatactttctcctttcatcctacacatggaagcattatctcatttttttaaaaaggctcccctaaagtttggttaccttggagagtttgagggtcattattccattcagcaactatttgagcaccaactctgtgccaaatataggttgagcattgattcagttggaatgagtcatcaagcaaaactttgggaagaagatggtggttagttgcaagatggtggagaaacaatattaggaagaaatacracagggtgctggagaggagcgtggggatggaggcaagcagaggacctcctgatcatgtacccatagaacagggcgatggagaggagggtggggttggaggcaagaagaggacctcctgatcgtgtatccataggacagggtgatggagaggagggtggggttggaggcaagcagagggcctcctgatcatttacccacaggacagggtgatggagaggagggtgagggtggaggcaagcagagg

SEQ ID NO: 225696 - DNA, 509 bp, Homo sapiens
tcctttccctgcagctttacgctaggacactgttctcaaagtatggtcctgggaccagcaacaatagcatcacttggaaacttccttgaaatgtacattctcaggtcttattctagacctgctgatcagaagctctggaggtggggtccagcagtgtgggtgttttaatagctcctccttcagggaattctgatgcatgctaaaattgagagacatttgaagtggagatttctacacaccccttcttgggatagttttcagtgaacraattagtttttgcacattagaatcggggttttaagagcagtccttaaagtgccactttcttatttataacattaagatagtctactttctacagtaatggtattagcccttattgttgcaatcaaatagatccttggtggcagcagtagaaagaagcaagtagctgtttcacagacaagacaaagtaggatatgaggttaaatactcgagtgattaaggacccaaagcacccattgcatgtc

SEQ ID NO: 225697 - DNA, 612 bp, Homo sapiens
tggttctatatagtttaaacttgaagactcaaagcaggaatatattatagaaaaaccaagcagaaacatggaaataattttatgtttgaaaagagtttggttcattttctgggaaaaaaataggcatattcaccacctaaataacaagacatagtatatgtggctgagttagtcacagactttccatttctaaaactcagcaggtcttacagttaaataagataaggatataaaaaatattgggacaatgaaattgactcactttcaaggtatctattaattagcttaatttgtgatttatatgtatgccacrgtgagcaatgaatccatgaaaatagagatgaagatgtagtagagcttttgaaaatgaaaataaacatgatattagagtgaaaagcatctataagctgcaaggacagtttggttcaatctatcaaaaaatataaaggaacactctacaatcatttcatgctgtgttagatatgtaagaaatgatatctgagtttgacaaatggtttgtaacatgtctgagaattttagaaatattctcatagctatacgatagataatcaacaaagaaagttcttatcatctaagaatttagaacagtct

SEQ ID NO: 225698 - DNA, 559 bp, Homo sapiens
ctcatcctctcctctctcttccatagggtgccgcagggatccaggcatctccatctgtgagcctccagggtctctgcagaagaggaaggctccacccacacttccttggctagagtcagtcatgcggccacagcctagtgcaagggaggctgggaggtgtggtttcaggataccagtgaagcaggaaatgagaagaaaaggggacctgtttctgacattattaaaataaaaaatgcatctctgcatacctctcargccacatctgggaaaggctgacttttctgagaggccagcatgcagtgctgggtgaccttgagcaggtgacttacccactctgagctcaagtctttgccacacatatggagaggctcactggagttttctagctgggaagattcgacgcacagcccacctagcacttggcccagggcagagcccgctgcggctcgttccgcccccacccccacaaaccgtgttgcagacaccaagggcgtggccctgccaggtgccctctcttaaatcttctataaaaggagagggctggctgggtgactgtttc

SEQ ID NO: 225699 - DNA, 482 bp, Homo sapiens
agataatcctcctagcctatggtcagctgattagcaactttaattccaactacaactgtcatcccygtggccgtgcagctgagcacatccgtggtgctggggactgggatgtgggcatcttggggctgttcttcccctactgcaaagggtgataagctatggggcgtgcatggcccaagtcccagcctcctggagctcagagggccgggggagatgaggcttgaacagggccacacacatcagtgtgggatgggcactatgatggcagagaccagcaccgctagagaggacaccggaggcccagagcctctccagggagctgccgctggagctcacagtaaggcaggagggcgaaggtcacgccaagagtgggcacagctcagtgaccctatgcgttgtgatttgcaagccatggaggaagtccctgttttcccagctgcagttgccagcaatgtgacccccaaattgcatggccagccagg

SEQ ID NO: 225700 - DNA, 391 bp, Homo sapiens
catggtggctcatgtctgtaatcctagcactttgggaagccggggtgggcggattgcctgagcctttaagatcagcctgggcaacatggtgaacctccctctctaataaaaaatataaaaaattagctgggcctggcagcatgcgcytgtggtcccagctactcaggaggttgaggcaggaaaattgcttgaacttttgaggcagaggttgcagtgagctgagatggtgccattgcactccagcctgggcaacagagcaaaactacatctccaaacaaaacaaaacaaaactgagtgcctttaacagcacccaggtcacctcttgaatgctttgctgcttagaaatttcttccaccagtaccctaaatcatctctgtcaaggtcaaagttc

SEQ ID NO: 225701 - DNA, 391 bp, Homo sapiens
catggtggctcatgtctgtaatcctagcactttgggaagccggggtgggcggattgcctgagcctttaagatcagcctgggcaacatggtgaacctccctctctaataaaaaatataaaaaattagctgggcctggcagcatgcgcctgtggtcccagctactcaggaggttgaggcaggaaaattgcttgaacttktgaggcagaggttgcagtgagctgagatggtgccattgcactccagcctgggcaacagagcaaaactacatctccaaacaaaacaaaacaaaactgagtgcctttaacagcacccaggtcacctcttgaatgctttgctgcttagaaatttcttccaccagtaccctaaatcatctctgtcaaggtcaaagttc

SEQ ID NO: 225702 - DNA, 391 bp, Homo sapiens
catggtggctcatgtctgtaatcctagcactttgggaagccggggtgggcggattgcctgagcctttaagatcagcctgggcaacatggtgaacctccctctctaataaaaaatataaaaaattagctgggcctggcagcatgcgcctgtggtcccagctactcaggaggttgaggcaggaaaattgcttgaactttkgaggcagaggttgcagtgagctgagatggtgccattgcactccagcctgggcaacagagcaaaactacatctccaaacaaaacaaaacaaaactgagtgcctttaacagcacccaggtcacctcttgaatgctttgctgcttagaaatttcttccaccagtaccctaaatcatctctgtcaaggtcaaagttc

SEQ ID NO: 225703 - DNA, 430 bp, Homo sapiens
aatgaactcttaaaatgaaataataaaaagaaaacccattaaaaaaatacaccaaaggctgggtacggtggcttacgcctgtaatcccagcactttgggaggcggggggggtgtggatcacttgaggtcaggagttcgagtccaacctggccaacatggtgaaacactgtctctactaaaaatacaaaaattagccaggcgtggtggcaggtgcctataatcccagctacttgggaggccgaggcacgagaatagcttgaacttargaggcagaggttgtagtgagccaagattgcaccactaaactccggcctgggcgacagagcaagactccatctcaaaaataaataaataaataaataaataaatgtcaagtatctgagtagacatttcttcaaaggaaatatacaaagccccaataaacacagaa

SEQ ID NO: 225704 - DNA, 486 bp, Homo sapiens
gaattctacagtgacatccatatgttcatcatctagatcctataataagcattttttatatttgctttttcacatacctctccagccatatacatgtttactaatcaataaacttcctcaggttttgtttttttaagtagttacagaaacacagggggccatgcatggkgactcacgcctataatcccagcactttgggaggccaaggcaggtggatcacctgaggtcaggagttcgagaccagcctggccaacatggtgaaaccccatctctactaaaaatacaaaaattagccgggtgtggtggtggatgcctgtaatcccagctacataggaggctgaggcagaagaatcgcttgaacccaggaggcggaggttgcaatgaaccgaaatcgcaccatcgtattccagcctgggtaacagagaaagactctgtctcaaaaaaaataaagcagcagcagcacagagactatattaggttctacaa

SEQ ID NO: 225705 - DNA, 486 bp, Homo sapiens
gaattctacagtgacatccatatgttcatcatctagatcctataataagcattttttatatttgctttttcacatacctctccagccatatacatgtttactaatcaataaacttcctcaggttttgtttttttaagtagttacagaaacacagggggccatgcatggtgactcacgcctataatcccagcactttgggaggccaaggcaggtggatcacctgaggtcaggagttcgagaccagcctggccaacatggkgaaaccccatctctactaaaaatacaaaaattagccgggtgtggtggtggatgcctgtaatcccagctacataggaggctgaggcagaagaatcgcttgaacccaggaggcggaggttgcaatgaaccgaaatcgcaccatcgtattccagcctgggtaacagagaaagactctgtctcaaaaaaaataaagcagcagcagcacagagactatattaggttctacaa

SEQ ID NO: 225706 - DNA, 543 bp, Homo sapiens
ctttaatcactgggaaatcagaggttcatggaagttaagtaacttgtttaaagttgtcaagattgagatcatgagtcaacactggggctatggcacaaatgaaaatgaaagccagagcatcatgagattattaaattgattcctggagcagtttagacataaaattaaactatgaattaaaaacatggacacactaactgcacagacactttaaagtattaacatgcgaagcgcttatcttcgttatgatgttaatgatagaacaaatacctaggaaaagcaagaatatggtatgacatcaaaagggctcccaaagacataatttgtttttgatagattttgaattttttaaattcttcccaggctttcgttttatgcactcagaactcttggctgtagtcaattgctactgcaggttcaattatcaccagttacattttcaactatttctttcactgatctcgctgtsaaacacacctgttctgactattctttgccagcaggaattagccactcaaaagtattaaactccacttccatttt

SEQ ID NO: 225707 - DNA, 543 bp, Homo sapiens
ggtgttaataaatggatgacactggtaaaataacaacacaatttattaagtcaggcttagatccaattaaaatctttactaagagtttcaactttatttctcarggtatttctatgttctgaagtatacaagtatatttgtttgggtttccatttccttcctggaatctgtgttaatatctacagtacatgatgcctttaggaagaattttttatctttatgagctatcattatgcagaaaacactcaggtttatatctctctatttgatcatttagctttggcagcagatgatctgattcagagtctgtctacagtgaataattgagtgtcagaaatgttttaaattaaattctgacaaagatgaaatgctttgtgggggaagctaaatgtttgttaagttctttgtcctctttttcatggcctcttaatggttgcaatcttttatctgcttttgcaaagaagagtctatgtgctatttaagattctgttgtgggagccatcaggcacattaaatctgttcctctgtgttctttcaccatct

SEQ ID NO: 225708 - DNA, 582 bp, Homo sapiens
cacatgttaaattttttttctcttacattattttttatattttccattttgtaatacctctttgattcactgttttcttcagaaacatctttaataggaatactttctttagctgtgtcttagaarttattaaacacattttacttataaattaggttttcgttcttaaattttcatttatcttcatattttccactttactcttgaaatgctccatgtatgtttccttttcttgaacatgttattcaccattattttaaagtgcatatcctgttacctttatttcctttgagtctcctccctctgctattctcttgctttctaagtcctcttgcatgtctcatggttttttattggttattgaataaaatctacaatgaattttacacattattttatataatggagaagttgacttaaaggaagaaactgagacataaaatataatttttaaagagtttacttgagcccagatgaggacatctgccctgaagactcagacctaggtaaccttgggtatgagctccatttggcctgtgttacaagctggtttttaaaggcaaaacacaggacaaagagtgg

SEQ ID NO: 225709 - DNA, 582 bp, Homo sapiens
cacatgttaaattttttttctcttacattattttttatattttccattttgtaatacctctttgattcactgttttcttcagaaacatctttaataggaatactttctttagctgtgtcttagaagttattaaacacattttacttataaattaggttttcgttcttaaattttcatttatcttcatattttccactttactcttgaaatgctccatgtatgtttccttttcttgaacatgttattcaccaytattttaaagtgcatatcctgttacctttatttcctttgagtctcctccctctgctattctcttgctttctaagtcctcttgcatgtctcatggttttttattggttattgaataaaatctacaatgaattttacacattattttatataatggagaagttgacttaaaggaagaaactgagacataaaatataatttttaaagagtttacttgagcccagatgaggacatctgccctgaagactcagacctaggtaaccttgggtatgagctccatttggcctgtgttacaagctggtttttaaaggcaaaacacaggacaaagagtgg

SEQ ID NO: 225710 - DNA, 582 bp, Homo sapiens
cacatgttaaattttttttctcttacattattttttatattttccattttgtaatacctctttgattcactgttttcttcagaaacatctttaataggaatactttctttagctgtgtcttagaagttattaaacacattttacttataaattaggttttcgttcttaaattttcatttatcttcatattttccactttactcttgaaatgctccatgtatgtttccttttcttgaacatgttattcaccattattttaaagtgcatatcctgttacctttatttcctttgagtctcctccctctgctattctcttgctttctaagtcctcttgcatgtctcatggttttttattggttattgaataaaatctacaatgaattttacacattattttatataatggagaagytgacttaaaggaagaaactgagacataaaatataatttttaaagagtttacttgagcccagatgaggacatctgccctgaagactcagacctaggtaaccttgggtatgagctccatttggcctgtgttacaagctggtttttaaaggcaaaacacaggacaaagagtgg

SEQ ID NO: 225711 - DNA, 198 bp, Homo sapiens
tgagctgatgcttccctcacctcccgtgcaggtgasaatggaaggcgtatggcctacagccgggactcctcttccttcctgaaacagtcctcaaatgcctggttgacaaaaacatcaagctcatggtctcgactctagacataccatcaagctttcaggaacaataggcatggcaggagatgacagccacatcacacc

SEQ ID NO: 225712 - DNA, 475 bp, Homo sapiens
atgaccttgggcaagttattcaattgtctagaccctcagttttcaaatctgtaaaatgggtactataatagtctctgcctcatagagctkttatgaactaatggatgtcaagcgttttaaacagtgcctgttgggcagtgagggtttataaccacctacttgagtggttactgatgtggcgtggaatgatagatctccatttcatatggtcgaaagttaccccgaggagcaagaaacttcaggcttgtccttcgttttatctccccattgccagtgaagttccccagaggcccaaggagaccctgctgatcatgtggaggtacaggcaaggggctgtctctcactcggcagcttgggggaattgatacatccacatggcaaacagctgtgaatgctgtcgcctcccactggtgtaggttctactggagaataagaaagcttctcactggcacctgaaaactatctggaggattcc

SEQ ID NO: 225713 - DNA, 556 bp, Homo sapiens
tgagctactgcaccttaggaggtaatctgggaaggagtttgggagagctttgtgtcaggcrcagaatgagatcacaaaaagaaaaatacgatttatgtatgaaagggtggacttaagactatgttccaagaatgctgtgggtatcatgggtccataagtaccttcttgttctgacttagtcattgtagtaggcattactagtgctcaacaatgcccagttctctggcctttcctggccacccacgacccctgtccacttgcagataggtggggccatgtgatctgttctggcctatggattgtgaatgcaagagtcatggggaatctatcaccagtgaatgcaactctccagctatctcttccccttctgaggggatcacagtgccaggagacatggaattaaagaggcatggattgctgtgtctccacatcaaggtaagctgtccttgagaatcaccagacctacagtggacattgcaagagtgaagactaaacaaacactatatatttagtcactgagatttggggtttgtttcttactgcagcaagcgtgtac

SEQ ID NO: 225714 - DNA, 202 bp, Homo sapiens
ttctgctctcttcatgttattttctgtttttccctccttcatcctgtcctttccctctccttttctcctccctacaccttttctttcctgcttctccctctccactccctgtcttgttctcccttcctctctcttcttctgcccttccttccccaacmccaccaccctttctcttgggcctatggttaaatttgagttgtta

SEQ ID NO: 225715 - DNA, 674 bp, Homo sapiens
acttttttccccacaaagtttgaaattctccctctttaaatgatccctggacaattcacatgcctgtctaagttggaattaacatttctacatgaagacttactttgataatattaatgttaatttatgttaaaaaacactgtatagttatcagagcaatttcatagatatgatctcrttctatcccattgctggctgatattctctttaaagtacgcttccagaaggtaaaaggcttgtccaaagtacctcatccagaatgttctgggctataccttgatgtcctagctcagggctcagcaaatggcagccatggattgaatccaacccaccatgtactttttgtctggtacaacatgtaagaatgggttttacttttttgaacgattgcagaaaaaaactttacaatacaggaaaaatatttaaaatccaaatttctgtgtctgtaagtgaagtttccttggaaaaccacgtttgcacatcatccatggccactttgttgctgcaagggcagtgttgagtagttgcaacagagaagatatggcctgaaaagccagaaatgtttacttcatggtccttgacagagttggccaacctctgtcccagatcaagggcttattccattgctcaagagctgtcttactagaggcctagcagacccatggacaaaggca

SEQ ID NO: 225716 - DNA, 674 bp, Homo sapiens
acttttttccccacaaagtttgaaattctccctctttaaatgatccctggacaattcacatgcctgtctaagttggaattaacatttctacatgaagacttactttgataatattaatgttaatttatgttaaaaaacactgtatagttatcagagcaatttcatagatatgatctcgttctatcccattgctggctgatattctctttaaagtacgcttccagaaggtaaaaggcttgtccaaagtacctcatccagaatgttctgggctataccttgatgtcctagctcagggctcagcaaatggcagccatggattgaatccaacccaccatgtactttttgtctggtacaacatgtaagaatgggttttacttttttgaacgattgsagaaaaaaactttacaatacaggaaaaatatttaaaatccaaatttctgtgtctgtaagtgaagtttccttggaaaaccacgtttgcacatcatccatggccactttgttgctgcaagggcagtgttgagtagttgcaacagagaagatatggcctgaaaagccagaaatgtttacttcatggtccttgacagagttggccaacctctgtcccagatcaagggcttattccattgctcaagagctgtcttactagaggcctagcagacccatggacaaaggca

SEQ ID NO: 225717 - DNA, 344 bp, Homo sapiens
aaccccaggcatagttgatccagtctggcgtgatacggacttggtctcttggagttcagtgaaagtgaggtcagcatgtacagaggcctggggaaaacaaactgatttaaggtactaaactggaaaatactgttccatttctttctgaatggagtccacagtggtgctggaaaatcatctggagaaacacagccccaagagtaatagcatgctgtaatgcatttgattaaaaagaggaaggaaaaaaacatgttatgtgctgtcctcatgctaggatcggggaacaggcagcctgtgagytgtggcccgtggagatttcacctggattactttaaaagcacttt

SEQ ID NO: 225718 - DNA, 427 bp, Homo sapiens
acttagcacccagatcttagtttctaatactgttctccagtgaggagaaccacaactcactggacaaatgtgtgatcctaggattgggaaatgaaaggagcatcttatagtcccccaaataaggaattgcccaaacaataacaagaacaatatcgtaatattaataataatggggaatgtcaaagggacacaggagccaactgaaagagctaccaatggccaaagttggaacaatttgggcwagaaaataaataaaatagtatagtgtcataacccaaagtataacataaatatccgtgaattcacacagatataagtaagtgattgaataaataaatgggggaggagagcaagttttatgtgcagaaggtttccaaataatttatggagatactctgccattgaagaggtgaaacatcccttccca

SEQ ID NO: 225719 - DNA, 463 bp, Homo sapiens
tctaggggctgtctagggactgatctccaatgtcgaagcccagcctggcgctgagttccataccttgagaagtgtggtatttatatacattttggacctgttgtgtgtgtgttagtgactgacccatgataaaggaagagctcactcaacagtgggcttagtcaaagaaggtgtggtagaattcatgtctcgaggccagtgtggtggctcacgcctgtaatcccagcactttgggaggccaagrcgggtggatcacccaaggtcaggagttcgagaccagcctggccaacatgatgaaaccacatctccactaacaatacaaaaattagctaggtgtggaggcaggtgcctataatcccagcactcgggaggctgaggcaggagaattgcttgaacctgggaggcagcggttgcaccagcctgggcaacaagagagaaactctgtctcagaaaaaaaaaaaaa

SEQ ID NO: 225720 - DNA, 463 bp, Homo sapiens
tctaggggctgtctagggactgatctccaatgtcgaagcccagcctggcgctgagttccataccttgagaagtgtggtatttatatacattttggacctgttgtgtgtgtgttagtgactgacccatgataaaggaagagctcactcaacagtgggcttagtcaaagaaggtgtggtagaattcatgtctcgaggccagtgtggtggctcacgcctgtaatcccagcactttgggaggccaagacgggtggatcacccaaggtcaggagttcgagaccagcctggccaacatgatgaaaccacatctccactaacaatacaaaaattagctaggtgtggaggcaggtgcctataatcccagcactcgggaggctgaggcaggagaattgcttgaacctgggaggcagcggttgcaccagcctgggcmacaagagagaaactctgtctcagaaaaaaaaaaaaa

SEQ ID NO: 225721 - DNA, 521 bp, Homo sapiens
tctaggcttcatctctgattcccctccttaccttaccttccacatctaatccatcacgaagttctctcagctctagctccaaaacatatatcctgaattttccatgtcttcccacctttgcagctactgactcatccagacattactaaatctcacctggactaggcctcttgtgttgtgtgcctgctttcatccactattttctttccttgttctttacatagcagcatggggtattattcaataacataaatcaggtcactggatatctagtggcttttcatgacactttgaacaataatctgccataaaatatagttatataccttgacctagtgtcggttgcctctctttcctcatctcttgcccgtttccttttggtcactggactcgagcccattggctttctttyggcttctctaacactataagctttgtcctgcctcagggactttgcacctgctattccctgtgccctcaggactttacatggctggatccttcttgacatttatgtcttg

SEQ ID NO: 225722 - DNA, 603 bp, Homo sapiens
tagtggcttaaaacaccacagacttctcatyttacagttccagaggtcagaaatctgaagcagatcttactccctaaaattaaaaaggctgccttcctttgggaggttctgtggaagaatccattccttgccttttccagtttctacaggctgcccgaattccttgttccctggctgcattgctccaacttcttcttccattgtcacatctccttctcttcctctgcttgtccatatgccatttctctctctctgacccttctgcctccctaaggacccatctgaatacactgagtcttcccagataatctacaatgatctctttctccccatatgcttaatttaaccacatctgtaaagccccttttgtcacataagataacttactcacaagttctgagaattaggacatagacatctttggagagctactattcagcctatcacaatctacataggctttactggaggaaatgcctatggcaggaaaagggagaacaccaccacaacaaaacagtggggatggccatcagactgtcacataggacataggtctgacccctgtgaagaaaaaagggagggaaggagaactggatagaaaaa

SEQ ID NO: 225723 - DNA, 551 bp, Homo sapiens
tttctatgtttaaatgtgttagctacacaaatacttaccattgtgttacaattgccttcagtattcagcgtagtaatacgctgtaccggtgtgtagcctagaagcaataggctattctatatatcctaggtgtgtgtagtagaatatactatcttggtttgtgtaagtatattctatgatgtttgcacaatgaaattttcaaataacacatttctcagaatgtatctccattgttaattgacacatgactatataaaatataataatggtagtcaaacttttttatgaagctcaattgacaactttaaaaattctattgggracttaaaataaatgtgataaaataaccactctcttgtgatgtgaatgtcttgattgataagtaaaaatgtttcactgtaattcctacagtcatataaaattctaagtaatgtataaaaatatctttgttttctgcctgagacttatatagagattttaatttacaaaataccattgatatattattttacttagccaaccaacatatgtggcattttattagttatttt

SEQ ID NO: 225724 - DNA, 632 bp, Homo sapiens
ggtgatgttttgatctctaattgcttgmtttattatgtgtttctctcaattgatcctaaacttttgaggagaaaagtgtgttatttattggtagcttcaaactgaaatatctacgtgcttttgtcagggcccacctgcttaaatactaaagtcaaaataaataaaggtacacgaggaaggtggggtttagaaacagcatatgagaaaaagacatggatctttcacttatttaaattatgtgctctcagtaatgctgttgcaattttagcctattagtagaagtaaatcatctagaaaatattctttgtgctagtcagttcatagtggaactatttttgctaaactcacaggtgatatactctaaggggtgattggttaaatgaatagatttaaaagaaagtgacttggataatgcaagataaacattttggctattgaagaatgattgagaaagtttgagatgcttagctttgagaagggcagactcatggggatatgaaaattttcttctgatactgcaggtttgtcatgtgaaagaagaatagaccttgttcaagcagtccctgactctgtttgcaagtttcaaggaagcagatctggctcaaatctctcatttttcataaaatgagaag

SEQ ID NO: 225725 - DNA, 632 bp, Homo sapiens
ggtgatgttttgatctctaattgcttgatttattatgtgtttctctcaattgatcctaaacttttgaggagaaaagtgtgttatttattggtagcttcaaactgaaatatctacgtgcttttgtcagggcccacctgcttaaatactaaagtcaaaataaataaaggtacacgaggaaggtggggtttagaaacagcatatgagaaaaagacatggatctttcayttatttaaattatgtgctctcagtaatgctgttgcaattttagcctattagtagaagtaaatcatctagaaaatattctttgtgctagtcagttcatagtggaactatttttgctaaactcacaggtgatatactctaaggggtgattggttaaatgaatagatttaaaagaaagtgacttggataatgcaagataaacattttggctattgaagaatgattgagaaagtttgagatgcttagctttgagaagggcagactcatggggatatgaaaattttcttctgatactgcaggtttgtcatgtgaaagaagaatagaccttgttcaagcagtccctgactctgtttgcaagtttcaaggaagcagatctggctcaaatctctcatttttcataaaatgagaag

SEQ ID NO: 225726 - DNA, 632 bp, Homo sapiens
ggtgatgttttgatctctaattgcttgatttattatgtgtttctctcaattgatcctaaacttttgaggagaaaagtgtgttatttattggtagcttcaaactgaaatatctacgtgcttttgtcagggcccacctgcttaaatactaaagtcaaaataaataaaggtacacgaggaaggtggggtttagaaacagcatatgagaaaaagacatggatctttcacttatttaaattatgtgctctcagtaatgctgttgcaattttagcctattagtagaagtaaatcatctagaaaatattctttgtgctagtcagttcatagtggaactatttttgctaaactcacaggtgatatactctaaggggtgattggttaaatgaatagatttaaaagaaagtgacttggataatgcaagataaacattttggctattgaagaatgattgagaaagtttgagatgcttagctttgagaagggcagactcatggggatatgaaaattttcttctgatactgcaggtttgtcatgtgaaagaagaatagaccttgttcaagcagtccctgactctgtttgcaagtttcaaggaagsagatctggctcaaatctctcatttttcataaaatgagaag

SEQ ID NO: 225727 - DNA, 573 bp, Homo sapiens
gtgaaaaatctccagaggttttcaagcattgattaagcaactgtttgcaagcaatattttagagggcattcaagtaccagatagccacttggaaatctctaaaatctcttcaaaccctgaactttttaatcttttaattctatgatttagactatgtgatacagtctagggtgctgtggaaatgcaggcatagcacatatcaagatagtgagtaatgctaatggaggtttcctcagctatcccaaggaagaggactcacgatggaacattacctttgacatccacccyagtctaagcctcagttctgcatagcaggaaacatgattttatcattctgtcagggtatatcagactcaaaagagcttacgcactctaatgaagttgacatgagactgatatatgcaacctgaatgccaatttattcatttatgaatagaaataaatctgttaatggaatttatattccattcctctggccaaaatttctccttgtatacacaatacgatagaagccaaattaaagtaagactactgtttggtgagcatgggatagaaggaaatgagataactcta

SEQ ID NO: 225728 - DNA, 620 bp, Homo sapiens
tatgtgttccatctcaccctgcatcattgttgctttccattttactgttttattgtcatcattgtacacatatgctgttacctcctattgaaaagtaatactgctaacccaacagccctagagctaactaacacaccatatctctttcccttgcagagcaaaacttaagagcaggtttacccattttttctagwttttctactcccaatttttaaaaaagttttcagttctggggtatatgtgtgggatgtacaggtttgttacataggtaaatgtgtgtcatggtggtttgttgcacctatcaacccatccatcacctaggtattaagtaccatatgcattagctattttttctgatgttctccctgcccccaacctaccccccgacaggcccgagtgtgtgttgttcccctccctgtgtccatgtgttctcattggtcagctcccacttataagtgtactattcccaatttattttgaatcctttccagccaatttgaaccctcaacgccttttaatcctttgcccattacaatgaatgtattaactgtgtaacacactgtcccaaataattgaaccagtcttaacctctcagtagaggttggaatatcccaataata

SEQ ID NO: 225729 - DNA, 620 bp, Homo sapiens
tatgtgttccatctcaccctgcatcattgttgctttccattttactgttttattgtcatcattgtacacatatgctgttacctcctattgaaaagtaatactgctaacccaacagccctagagctaactaacacaccatatctctttcccttgcagagcaaaacttaagagcaggtttacccattttttctagtttttctactcccaatttttaaaaaagttttcagttctggggtatatgtgygggatgtacaggtttgttacataggtaaatgtgtgtcatggtggtttgttgcacctatcaacccatccatcacctaggtattaagtaccatatgcattagctattttttctgatgttctccctgcccccaacctaccccccgacaggcccgagtgtgtgttgttcccctccctgtgtccatgtgttctcattggtcagctcccacttataagtgtactattcccaatttattttgaatcctttccagccaatttgaaccctcaacgccttttaatcctttgcccattacaatgaatgtattaactgtgtaacacactgtcccaaataattgaaccagtcttaacctctcagtagaggttggaatatcccaataata

SEQ ID NO: 225730 - DNA, 620 bp, Homo sapiens
tatgtgttccatctcaccctgcatcattgttgctttccattttactgttttattgtcatcattgtacacatatgctgttacctcctattgaaaagtaatactgctaacccaacagccctagagctaactaacacaccatatctctttcccttgcagagcaaaacttaagagcaggtttacccattttttctagtttttctactcccaatttttaaaaaagttttcagttctggggtatatgtgtrggatgtacaggtttgttacataggtaaatgtgtgtcatggtggtttgttgcacctatcaacccatccatcacctaggtattaagtaccatatgcattagctattttttctgatgttctccctgcccccaacctaccccccgacaggcccgagtgtgtgttgttcccctccctgtgtccatgtgttctcattggtcagctcccacttataagtgtactattcccaatttattttgaatcctttccagccaatttgaaccctcaacgccttttaatcctttgcccattacaatgaatgtattaactgtgtaacacactgtcccaaataattgaaccagtcttaacctctcagtagaggttggaatatcccaataata

SEQ ID NO: 225731 - DNA, 620 bp, Homo sapiens
tatgtgttccatctcaccctgcatcattgttgctttccattttactgttttattgtcatcattgtacacatatgctgttacctcctattgaaaagtaatactgctaacccaacagccctagagctaactaacacaccatatctctttcccttgcagagcaaaacttaagagcaggtttacccattttttctagtttttctactcccaatttttaaaaaagttttcagttctggggtatatgtgtgggatgtacaggtttgttacataggtaaatgtgtgtcatggtggtttgttgcacctatcaacccatccatcacctaggtattaagtaccatatgcattagctattttttctgatgttctccctgcccccaacctaccccccgacaggcccgagtgtgtgttgttcccctccctgtgtccatgtgttctcattggtcagctcccacttataagtgtactattcccaatttattttgaatcctttccagccaatttgaaccctcaacgccttttaatcctttgcccattacaatgaatgtattaactrtgtaacacactgtcccaaataattgaaccagtcttaacctctcagtagaggttggaatatcccaataata

SEQ ID NO: 225732 - DNA, 630 bp, Homo sapiens
ttgctccattctcagcatctgtttattccacacactaagtactcaatagatatttgtttaatgaatgagaaatgaagtacatagctcaggaatgtgttggtcccaatgtttacaaacttttatattagggcttttattcctcaagagatctagttgttaaacatgtagcagcacactactgataacaaaataagtaggaaaatataagcacgaggtagggtattgtaatataagggaagaacacctaatatggaattgagatggagaggagttgggattttcctatgggatatttttggagagaatgttaaagggtaagcacaagttagtaagatgataagcaaaggaaataaagggcctaacaggcaaaagaaatatcaaagattttttatggtataatactcatttatcatggtttctgaataaaacggaattagaaggaagagttgatggtttagagggatgatcgtaaaatcytgaaggactgtgtgtgctgaaagtcatgaagagatggaaatacacttggttaggacctcaattttgtaatcttcaaacagtcacttattatggttgtgacttcccctatgaaacctttcagaaggctgtattatagaggacaaggcaggataa

SEQ ID NO: 225733 - DNA, 534 bp, Homo sapiens
gcatcttagtcatggtcttccatcctactattgtcttgaagatgccaatatccatgcaagggaccagtctaacagaccaaccagaaaagtatccaggtattcatttcttggctgggttaagatgacggggtggsgtgctggggcaacccttttaactaaaccttattctccaatatccaaggaaaagcaaaaccaaagctaaaatataagaatatgataaaataattaatcttgacccttgacttttcaataattccattctgattaatcttaattacttaattatttatggatacatgcttttaagaccttattatgtgcttggaagtaaacaaagcaaaaatccccacatttatggagcttatattctaacatggaaagacagacaacataataaataagtaaattatatagtaggttaaaaagctctaggtgctaagaaaaaaagagtaaaacagagtaaaggtagtcaactgagccagggcagagggccaggcaaatgggtagattgcaatttcaaatagggtaaggtaa

SEQ ID NO: 225734 - DNA, 534 bp, Homo sapiens
gcatcttagtcatggtcttccatcctactattgtcttgaagatgccaatatccatgcaagggaccagtctaacagaccaaccagaaaagtatccaggtattcatttcttggctgggttaagatgacggggtggcgtgctggggcaacccttttaactaaaccttattctccaatatccaaggaaaagcaaaaccaaagctaaaatataagaatatgataaaataattaatcttgacccttgacttttcaataattccattctgattaatcttaattacttaattatttatggatacatgcttttaagaccttattatgtgcttggaagtaaacaaagcaaaaatccccacatttatggagcttatattctaacatggaaagacagacaacataataaataagtaaattatatagtaggttaaaaagctctaggtgytaagaaaaaaagagtaaaacagagtaaaggtagtcaactgagccagggcagagggccaggcaaatgggtagattgcaatttcaaatagggtaaggtaa

SEQ ID NO: 225735 - DNA, 617 bp, Homo sapiens
tcctaactcctgctttatactggaagctgttggttagctgcagctgctgcagctccaatctactctattcagctctatttggctctgctctacaggtcttctcattccagagtacaggttgaaggaccagctctttcggggacatgctgttcttatggcacagaaaaaggagcagtagccaaaaattcaatggctcttaaagtttctgccagaaagtggtataatttgcatcttattggctaaagcaagtagcatagcaagtttaatttcaatggagagagcaagtatattccttccacagttggggactctgcaagttacatgaaattggggagaatgtctaatctctcagagggaatcaaagaataaataattagggccaaaaatatgatctaccagagaaactaagctatcttttgttctttgattattgagcttagtttcctgtggcagactaataagtagtcccctraactgtatctttttttctccttggcagaggtgggttacatttcccagtctcccttatgcttaggttgaggcatgtgtctgagatctgataaacaaaatgtgagcagaacagtgtaagccactgataagtttggcttataaaatgt

SEQ ID NO: 225736 - DNA, 512 bp, Homo sapiens
tcatttctgtagctctcttctagggaacctctactttgcccttgaggctcataagtatgtttcaagatgagaaagtatatccattatttttaatataatgcttctctccccaaagtgtgttcccttgagaataataaacttcctgttagaaattgagtcttggcataagccttctcaatttgctaggaagggaaatacaccatgaaagtaggtagcagagcaaggtraacactccatctaataagccaaggattaacagaaatcaagactttcctaaagaaaatcaggtagttagtctaatgaagaaacaacaacaaaaaagaaatttactcagactcttattttcttgcccctcttgttaaatatcctttaggacctatgttggtgaaggatttgtttaccagaatgatacaacgataccaattccttttcctaggaccctgtgtagaaaccaattcctacctaccttcaaatcttattcattaaagaactaagctagattccaggccagg

SEQ ID NO: 225737 - DNA, 435 bp, Homo sapiens
ttacaggggaaaatttttcttactaggaaaaactatacatgcatctagataaaacagaagacatggttttgagcatgaaatcaaggttgccaacttgcattttgctttgcaatttatattttttgcacgcccattttctgcctctrtatttttgttgaatgtctactacacatcacaccatgtcttagtaccatcctgggacatacaggaggaaagataaattttatttaccccatgaaacttacattctgtaggagcaggcaataaacaagaaaaatgtaagaaagaaaatttcagaaagttgtaagtgctatgaaggaaataaacagtgatatggtagagaatgaaagtcattgatgggggtgcgtcatcatgtggggtggtggagaacagaaaagcaggtcttacccaggcattgcctttgagatgagatct

SEQ ID NO: 225738 - DNA, 435 bp, Homo sapiens
ttacaggggaaaatttttcttactaggaaaaactatacatgcatctagataaaacagaagacatggttttgagcatgaaatcaaggttgccaacttgcattttgctttgcaatttatattttttgcacgcccattttctgcctctgtatttttgttgaatgtctactacacatcacaccatgtcttagtaccatcctgggayatacaggaggaaagataaattttatttaccccatgaaacttacattctgtaggagcaggcaataaacaagaaaaatgtaagaaagaaaatttcagaaagttgtaagtgctatgaaggaaataaacagtgatatggtagagaatgaaagtcattgatgggggtgcgtcatcatgtggggtggtggagaacagaaaagcaggtcttacccaggcattgcctttgagatgagatct

SEQ ID NO: 225739 - DNA, 439 bp, Homo sapiens
aaaaattgacacccccaaaacttacaggggaaaatttttcttactaggaaaaactatacatgcatctagataaaacagaagacatggttttgagcatgaaatcaaggttgccaacttgcattttgctttgcaatttatattttttgcacgcccattttctgcctctgtatttttgttgaatgtctactacacatcacaccatgtcttagtaccatcctgggacatacaggaggaaagataaattttatttaccccatgaaacttacattctgtaggagcaggcaataaacaagaaaaatktaagaaagaaaatttcagaaagttgtaagtgctatgaaggaaataaacagtgatatggtagagaatgaaagtcattgatgggggtgcgtcatcatgtggggtggtggagaacagaaaagcaggtcttacccaggcattg

SEQ ID NO: 225740 - DNA, 418 bp, Homo sapiens
ttacaggggaaaatttttcttactaggaaaaactatacatgcatctagataaaacagaagacatggttttgagcatgaaatcaaggttgccaacttgcattttgctttgcaatttatattttttgcacgcccattttctgcctctgtatttttgttgaatgtctactacacatcacaccatgtcttagtaccatcctgggacatacaggaggaaagataaattttatttaccccatgaaacttacattctgtaggagcaggcaataaacaagaaaaatgtaagaaagaaaatttcagaaagttgtaagtgctatgaaggaaataaacagtgatatggtagagaatgaaagtcattgatgggggkgcgtcatcatgtggggtggtggagaacagaaaagcaggtcttacccaggcattg

SEQ ID NO: 225741 - DNA, 544 bp, Homo sapiens
acaacatgatgcaggtaggttrtctataatgttaggcagtgaatgaagagtccgggagatgataaccacctcaacgttcccatttaaatgtcactgttactgggccctttttaattctattccaggacgtgtacctaccaataatttttactttagaagtttcttggtgtggtaggaggagtttgatgatgaaaccatgcatccatatatatagaaacaagtggatatattatcagtatggatggaaatatattttacaggttaaatcattctaaaaatatttttatcaaataccttattctgatattgcttacatctgggtttaaatccatactttcctggagaaacatgttatcttttactcttgtctcagtaggtgccaggcattcaaatgctgtttttccagctcaaaggaattaaggacccaaaggcatttaccattgatatataggaagagtggcaacaataagtcacgctacagtgtgtagaaaagtagaaagcatccctaccaatccttaaaatgtttggctgagagctatacact

SEQ ID NO: 225742 - DNA, 625 bp, Homo sapiens
ttgggtggaattataatattttagataagatttaagaggattctaattctagctacttgataggaatgcgaatgatgataaggcttttagagttagataagagagagggctagcaccctgatattctgtaattgaaacagagtttcaagtcctttggtcaagtattacccttattccttcaggaatagtagatattttaagattacagataggttatcttatctaatttacctacctattgttgaaattatttaatttgcatttaactgtgttttcactggcttatcatttctctcttctagagctaacttatctcttgttatattccagactcttggtgtaaattaccttcattgaaaattttggagaaatatagtgttttatttctttatggataaaatagtcccagagagagagacacaaggatggacacttagaaaacagtcccagctactcgggaggctgaggcaggagaatggcgtgaaccckggaggcggagcttgcagtgagccgagatcgtgtaactgcactccaaactgggcaacagagcgaaactccgtctcaaaaaaaagaaagaaagaaaacagtccaaggagagaattctaatgcctgacagaagtaatgt

SEQ ID NO: 225743 - DNA, 576 bp, Homo sapiens
tgaagtttaaatctggctgggatgataaaatatctataagaaatgatctaatattaatgtcattaaaatgcccttatcaattccattgagcttaaccaatatctgttgtatgccaggcaccctgctatattttatggttgtaactaactgtcctaaaggagtacctggtttggcagaaaataaatggaaaataaacacacaaacacayattatgatatagtataaaaaaaatctacaaaaaacgtatttacaaattactggggaaactcacatgatagtataaataattacttttgggaagattaagggagattataaaaaagagattgtatttgagcaaaggcattcatcaggcagatacttgtagaaaagccattataaatggggaaactgcatcagtaaagacaaggagatgtgaaagtgtactgtattggttattaagcaattgtcttttaactctaaatccacccttctgatgttgaggccagaactctgcaagttgtctgctggatcccaccaacagggggcactagagggagcagagaaagtaggaggcatggaagatcctgtttcctt

SEQ ID NO: 225744 - DNA, 576 bp, Homo sapiens
tgaagtttaaatctggctgggatgataaaatatctataagaaatgatctaatattaatgtcattaaaatgcccttatcaattccattgagcttaaccaatatctgttgtatgccaggcaccctgctatattttatggttgtaactaactgtcctaaaggagtacctggtttggcagaaaataaatggaaaataaacacacaaacacatattatgatatagtataaaaaaaatctacaaaaaacgtatttacaaattactggggaaactcacatgatagtataaataattacttttgggaagattaagggagattataaaaaagagattgtatttgagcaaaggcattcatcaggcagatacttgtagaaaagccattataaatrgggaaactgcatcagtaaagacaaggagatgtgaaagtgtactgtattggttattaagcaattgtcttttaactctaaatccacccttctgatgttgaggccagaactctgcaagttgtctgctggatcccaccaacagggggcactagagggagcagagaaagtaggaggcatggaagatcctgtttcctt

SEQ ID NO: 225745 - DNA, 583 bp, Homo sapiens
tagcaatttctagcttaatgaatacttgtcaatttgaaaaaaatcatcgttcactcctacaatttcttggatgaatcaatagctgcttacctcttgaaaagatctatttgttaatttttctttaatgatgagaaaaataaacaagagctcttattaaaaaaaaaagtttaggtaaagacagtgactttagacaagctcatgagtaacattaagtaattctgtgcaacataacttttactaaagccaaacttcaaacatgaggcagaaagaggatgtactgagttctttcctaatatccagaggaatcctttcttcattggttaagaaaaaggtatttgagtgagaacagatctgcttagtggacctgaaaaggggggaaattaagtcattacgggcatgcagaagggtattttayagcttttcgaagaagagcaaggctgttgtgtctcaggagagaggtaagatacttaaaccaaaatcagagtctggcaaaaaatgtgtggaagctatgccttcagggactttcagatccagcagcagagagaaaaaatttatgaattggtttggatacaactgggaggct

SEQ ID NO: 225746 - DNA, 575 bp, Homo sapiens
atttttctagttctattcacttttaaaaacataactgaacataaacaggaattcttgaagaaacaggataaacctatcagtaggaataaagcagtcatacatttttctttatacctacttgctttctacctgtctagaaatattttatcaagacaagtatgcaatgaggaagttggttttaaaaaatggtaattgggaacctggtaaaatatatttcagtgcaatgctaatcatgtgtgtcaagataaaggaaattaaggtagcttaagttttcagttcttttcagaaaaatcaattataaagcagttacgctgctgacactaaacaataaatccctggatttagttaatagaaaaagcttccactttttgaaggtttttttttttttaatccagcagaagaagctcataacattgatttttgaggaaaaaagmaaggactctttaagtcaggtatttttaaatccagacatattcttggtcttagcctgttgggatcagaaatcactgaccatctagggaacatgtctttataaagcttcccacagtccgcagtgctcttggcattagttacct

SEQ ID NO: 225747 - DNA, 531 bp, Homo sapiens
aatttattttatagaatataaaagttgctattactactatattatacaaataatatacagttttctatagaaattggctttagatgtttcctgcatgctgacatttgtttcaagtgaaaagyaagcaaaaataactctagggctgtgctgtccaatatggtagacacatgtggctattaagccttacaatatgggcagccctaactgacattttctgcaagtataaaatgcacatctgacttcaaagacaataaaaaaacacgaaaaatatagccttaataattttgatattagttatatgttgaaataatagtatcttatataatttgagctaaatataatagttattaaaattaatttatcttatttctttttacttttttaatgtggaaagcaaaagcatctaaaattacatatgtggcttgcttgattttctattggaccacactgctacacaggatatgtcttgtggtgctttaatactagcaaaatacctgtctatagatgaaatggaaagttagttcggaattc

SEQ ID NO: 225748 - DNA, 538 bp, Homo sapiens
atgaaaaaccaaataaaactataccatccaactaaccaagagaagtcttgaaaatttagtttaatataatcaagtttggcatattagatttgctatggggattcagggtttagccttatagatgggtctaggggtttgattctaagtttatgtcacagacactaattattcttcaaataaatgtggagtaccttagaattatgatttattttatgctaattaagtcaggtttcgagttcagcattcttataaaacaaacatttatatgatgaatagttatatatgtaggtaaaaataaaacttaataaactctaaaatgctctctccttgcctggcttagtttgtacttaacaactagagttttattttaaattaacattttctattttaatatgcrtgtgtatatggaagcagattaaaaatattttaaaatactaattttgtgaaagcttttaatgtttgtctgtacataggcacattataaatttgtacctatatcgaaactgtaatttttttttttactgtttaaagtgtgtaa

SEQ ID NO: 225749 - DNA, 659 bp, Homo sapiens
tttgttttagggatagtctcgcacaaagtaggcatttaataaattactgttgaatgaatgaacaaaggagtgaaaaagcaaatgcaagtccctasctgtatatagaacattagcaatggtagatactaattaaatcagcctgtagaatcatattgaatgatatttgctgacccaagaagtggctagaaggagaaatatgttcagaaattttaagatgacagagaagtagagtaacttataattgtaagcaagactactaaatatggttgttttatattagtagctactttaaattttactgcttaatgaaattatagattttttttttaattatagggcaagttaagtgaagataaatagaggggaatttgaagaggaggggatagattgagggagtttagaaaatggtattgcttttgattctgggatatattgtttatcggggtccatgagtagtgctgaatgttctattctgggcttaaaatttattttcctgcatttgctacatccatctcctcaaaaattctgatataggcaggtagaaaccaagaactgaggaaaacacaggcggttcataaatgggtcaacttcatttctagcaatatggcaactagagacaaagcctggaactgcagcacaatgcaaacttgggtatatcc

SEQ ID NO: 225750 - DNA, 589 bp, Homo sapiens
ctactttggtattggttcaggattggaaagaaaaaaggaaagcagtatcccctgagaatttctaatcttaaatccaaaaccatccagatgaagggctggaattcataccagctctactacctaaataattctaagctagaagtgtagtttaaaattattccagattattccactgcactccagtctgggtgacagagcgagactccgtctcaaataaaaaataaaaattaaaaaaattattccacattgattattctcccaatgaaaattcaaatgctgtctggattggagcctctttgcacacattcctcaaaggatttttaacataaagtcctaggcaacatacaytcacaatttgaaatcattaaatcaatccagaaacaaaccaccttatgccaagatcagcagaaacaataaaatatataattaaatccacaaatatagcagatatttgaattttagatactaaattcaaaattttatacttaacatggtttaagaaattaaagggaacaaaaatctaagaggaaaggaagacactaattgggtatatatgaaaatgattcaggtatagtaattgaaataaaag

SEQ ID NO: 225751 - DNA, 526 bp, Homo sapiens
aatataagccagtgtggttggagcttagtaaccaaagggcagagaggtatcaggtgaggttaaacagatagatagggggcagatcaggaagaaacttatttataaggatttgagacttctgtgaggtcctcttgcaataggtcacaaaagttgtcattgacgtagctgagactaaaatctaggcctatctgaccccacagcccaaactgtcacaattacaatgccttcctaattattactggaactcaactctctgtagaaattctaacattttacttgtttcttattcttatattttccaatctaattttccaatttttgtacatcctttcactggcaaacttgttgcaatattcatctatatccattacctccccattcccaacaccttcttaccctgtctctcaaaatctgttctctgctcttgaaactttaattgtaatgggatttgtttagtcttcactctccttaatgtctycataacatttaataccctttcctcccagaagtctcttgtgttttagtt

SEQ ID NO: 225752 - DNA, 564 bp, Homo sapiens
gtttgaatctcttgggcacttctgaatctgtctattctccacatatttgactgcaagaccttccaagattatgactagtgatttacttccactttctaaaccttgtacaaattccccccaactccaattgtgttcaggagacataaagggaatgggattytgagaaatgtagttccactttaaccaagtgatatggcacacttcagcaaaattccagaggaaaaagactggtcatttattcattcattcatttaaataagaagtatattgtgccagtaacactcgaggcactcagcttgcagagcttcaaacagacttaatggaatgtaaaacatagcagaacagacattataaacacgtttcaaatactgaagtctataattataaacatgatagtgctgtgaaggaaaattaacatgggcccatgagagaaaatgacagagtaggaagaagttagactgagtggtagagaatacttcactgagagatgacatgtaagctgagacatcacaaatgaagagtgcaagaaaatattctagaaaaaaaaaaaaagcaagtagcccc

SEQ ID NO: 225753 - DNA, 404 bp, Homo sapiens
gcttgtgttctggtcacaatcctgctgaccaaaacaggctctggcccagacaggatgaagtgaaaaaacagcaggaaccagcagatggcgatgaaagcaattgctagctgccctcatagtcccatcagcaccatgacagtttacaaatgccatggcaacgacctagaagttaccgcccctttcctggaaagttctaaataactcgcccctcaatctgcattgatccaytccttaatttacatgtaaccgaaatgggtttacagcagtataaacacagttgcctgccaggaacccttatgttgctgactctgggtgtgctgcctgtgagttagccctgctctgcaagaagcagtgcctttcactaacagattgctgtctagcaccactggctcatccttgaattc

SEQ ID NO: 225754 - DNA, 404 bp, Homo sapiens
gcttgtgttctggtcacaatcctgctgaccaaaacaggctctggcccagacaggatgaagtgaaaaaacagcaggaaccagcagatggcgatgaaagcaattgctagctgccctcatagtcccatcagcaccatgacagtttacaaatgccatggcaacgacctagaagttaccgcccctttcctggaaagttctaaataactcgcccctcaatctgcattgatccactccttaatttacatgtaacygaaatgggtttacagcagtataaacacagttgcctgccaggaacccttatgttgctgactctgggtgtgctgcctgtgagttagccctgctctgcaagaagcagtgcctttcactaacagattgctgtctagcaccactggctcatccttgaattc

SEQ ID NO: 225755 - DNA, 536 bp, Homo sapiens
tccccagtaaggctgaatgccagcagttgtgttcagtggtaactagtatgagcacccacactttgtcagtttacttcttttccctgtctcactttcaccatgccrctaccagtacttcccagcatcgcgttccctatagactacttacacccaaatctgcctctgggagagcccaaagcgagataggagctaatgaaagaagcttgtaagggtaatttagaaacttggaacattgagatgtctgtgacttagataagtattattaaaaaggagaatgtccttagtcatgtttaaactgcatagggttttcgtagtaggagcaagacaacccaaaaacttctgtgtgttttttaaatattacttttattttaagttcatgggttcatggcaggtttgttatataggtaaacttgtgtcatgggggtttgttgtacagattattttatcacccaggtattaagcctagtacccattagttatttttcctgatcctctccctcctcctaccctccaccctccaataggtccaatactgt

SEQ ID NO: 225756 - DNA, 536 bp, Homo sapiens
tccccagtaaggctgaatgccagcagttgtgttcagtggtaactagtatgagcacccacactttgtcagtttacttcttttccctgtctcactttcaccatgccactaccagtacttcccagcatcgcgttccctatagactacttacacccaaatctgcctctgggagagcccaaagcgagataggagctaatgaaagaagcttgtaagggtaatttagaaacttggaacattgagatgtctgtgacttagataagtattattaaaaaggagaatgtccttagtcatgtttaaactgcatagggttttcgtagtaggagcaagacaacccaaaaacttctgtgtgttttttaaatattacttttattttaagttcatgggttcatggcaggtttgttatataggtaaacttgtgtcatgggggtttgttgtacagattattttatcacccaggtattaagcctagtacccattarttatttttcctgatcctctccctcctcctaccctccaccctccaataggtccaatactgt

SEQ ID NO: 225757 - DNA, 557 bp, Homo sapiens
gtacgttttatcacatctctgcacctgacaggttactttctggtgcctaaggagatcaaatattaataacaactcttgcgggacttggttctactttattttattttatttactcttttagagaagaaggaacactcaaataatgaatgtaaaatgtctagtggcagagaagggcgaacccggagttgtcaggaataggctggacaaaaacaaccaagactgtcacttcaaatgagatgttgccagtgagtctaggcaaccaagaagacttctggggagccgaaaaataataatagaagggttctaactgaagatgtttacctatttgaagttaagaaaaaggaagagatgtggcctcaaaatttccataataattataataggcgttattttgtactaaacacatcactaaaatgcgaactgtaaacatatctactgtcccttctacctgcaacggttacattgcatgttctggggcttcccttgctcttctaatccgcaagtgcctggcatgcatctgtcttaaagtaygctgtcaattaagtgcatggtgatga

SEQ ID NO: 225758 - DNA, 577 bp, Homo sapiens
aacttcctttcctttttgcctgtttcatatagattaaaaaattatacttatcattttttcattttattaccaactgaaaatctgcttattgtgtgtctctcccaccagaataaaagctgcatgagaacatgtcagtttacgactgccaaatcccatgacctaaaataatgcttagcacayagaaggagctccataattatcatcacttgaatgaatgactacagtggttgagacagctaaggccaaccactctttcagaaaatttggtgtaagagaggtagtttaaacgagaaacatagatggtttgggggaagatttttttcagatggaggtgaaggtggatatctgttgctctaaatgggtcccttcctctgggatttgcccctagatttttccactgggaaatcccctctttcccatagttcaatgtgattctggaagactatggtttctcgacctcaatattattgacatcgtggaccagataattctttgttctggagggctgtcttttgccttggaggatgtttggcagtatccctggcctctacctactagaggctggaagcccttccgt

SEQ ID NO: 225759 - DNA, 298 bp, Homo sapiens
cagaagaggaagggtgggaggagggtcagggataaaaaaaactacatattaggtacaacccacatccaygccaacactacttggctggtgggtgcactaaaatgtcagaattcaccactatataattcatctattaaccaaaaaccacttgtgccccaaaagctactgaaatgttttcaaagagaaccatatcagaagggtttcttaatagaactcagggaatctcaagcaagcaaacatggttcaagtggaaacaaccaacccctgggtctggagtggcaatactgacaagaagaaa

SEQ ID NO: 225760 - DNA, 577 bp, Homo sapiens
ttatatatggatagacatccttcttcttgatcagaggcctgcttaagttacaaccagctactagtgtctgcagcatggaggaccagccctgggcctggggcaagggcctcagttgttcgtaggagcagttctgatgggcccataaactgggatgagctcaatattttggcacacagcacctctttctacctctagtcacatcttagttaacatgactagcccaccagagcatatggtaactatgaaaggtgtttaacamaatccataaatactttccacattaagtatctatttattgagcatctaccctgtgcctaatattgttgggtagaagtatatagagcctctgaggctgggcacagtgtctcatgcctgtaatcccagcactttattaagcatctaccctgtgcctaatattgttgggtagaagtatagctatagagcctctgaggccgggcacggcggctcatgcctgtaatctcagcactttcccaggtcgaggtgagcagatcacctgaggtcaggagtccgagaccagcctgccaacatggtgaaaccctgtccctactaaaaatat

SEQ ID NO: 225761 - DNA, 588 bp, Homo sapiens
ttgtttgctgtgaagagccatgacacctgcctcatttaaactaaattacccttaagcagctctaatgcatggagcagcctcccttctccatcaccatgtctcatgagagttgcccagcctggataaggcttacttcccttggaattcggttaattcaccttttcccctcaaggatgcacatggtttccacttcacagagtatccctggcacatcactggcccactcctgcttcgcaccaccagaatcccctgaactttaccgagatgatacagatgtaattaaacctgaattctagtctctccttgtgacaactcagtggacaattaatgatgataaaagagcctgccagctgctgcctgacataccaatgtgagcttccaactccgaggaagatggagggtgaagggcaggtccctctggctycatttcaatctgtcttttatctcacactagctaaaaagtaacacttactttggggaaatttagattctttcttctcctctcttaaaagcaccaaacagacagtcagaggtaatgcaaggtctatgaaataaataagaatgcttccgggaagagtaattgaagct

SEQ ID NO: 225762 - DNA, 621 bp, Homo sapiens
cagtattttaaagcatgtaaataaaggactaaaagtatatttgtcatggtgggctgtacaacaaactccaaagcttggaggcttaaaacrattaaggtttatttctcactcgtattggaagtcagctagggactcatacccacattactttactcaggaacaaaaactaatagagcctccatcaccaatcaccatggcagagagaaggaaatgtatcaaatcatacactgactcctaatgactcgtccagaggtgatacaggctattttcatctacattttcactggccacagccagtcagatgaccagtcctatgtaatgcaaacagggaagttcaaccctacaatgtgcctagaggaaagaaaacaagaaaaaaaattgtgaataggacaaatacttactaccaaaaaagcattgattttgtcttaggaattatttaaatgtccaactgaaggtctttcctctgtgctttattagtagtaaagatgtgatattcacatgaccctaaacaatttgattctgcttctcaattcacagcttcaaacccaagatattcaggagatgccattaatgccggcaaaaggctgttttaaaaggcaaaaggtgtgcacataccacagc

SEQ ID NO: 225763 - DNA, 623 bp, Homo sapiens
gtctactccctttactaggtctgcactgtacatatacatctctatcattactgccccataaaatgatgcatactgttatgggttgaacaatgtgtgtcccccaaaaatgatataacccccagtacctcagaatgtggccttatctggaaataagatcagtacagatgtaattcactaagttaaggtcayaagtagggtgggctcctaatccagtatgactggtgtccttataaaaaagtgagaatttggacacagacaaagaaatgcatagaggggagatgacgtgaagagacacagggagaagatggtcatcagcaatcctagaagaggaacctgaaacagatttttttcttttttttttatacagtggattatattattaatttattctatactttcattttatatatataatttcaactttttagattcagggagtacatgtacaggtttgttacatgcatatattgtgtgacactgtgggtacccaacaggtagtttttcaacccttgtccttgtcctgctcctccctcctccctctagtagtccccagtgtctgttgttgccatatttatgtccctatgcacccattgtttagctcccacttacaaatgagagcatgc

SEQ ID NO: 225764 - DNA, 623 bp, Homo sapiens
gtctactccctttactaggtctgcactgtacatatacatctctatcattactgccccataaaatgatgcatactgttatgggttgaacaatgtgtgtcccccaaaaatgatataacccccagtacctcagaatgtggccttatctggaaataagatcagtacagatgtaattcactaagttaaggtcacaagtagggtgggctcctaatccagtatgactggtgtccttataaaaaagtgrgaatttggacacagacaaagaaatgcatagaggggagatgacgtgaagagacacagggagaagatggtcatcagcaatcctagaagaggaacctgaaacagatttttttcttttttttttatacagtggattatattattaatttattctatactttcattttatatatataatttcaactttttagattcagggagtacatgtacaggtttgttacatgcatatattgtgtgacactgtgggtacccaacaggtagtttttcaacccttgtccttgtcctgctcctccctcctccctctagtagtccccagtgtctgttgttgccatatttatgtccctatgcacccattgtttagctcccacttacaaatgagagcatgc

SEQ ID NO: 225765 - DNA, 623 bp, Homo sapiens
gtctactccctttactaggtctgcactgtacatatacatctctatcattactgccccataaaatgatgcatactgttatgggttgaacaatgtgtgtcccccaaaaatgatataacccccagtacctcagaatgtggccttatctggaaataagatcagtacagatgtaattcactaagttaaggtcacaagtagggtgggctcctaatccagtatgactggtgtccttataaaaaagtgagaatttggacacagacaaagaaatgcatagaggggagatgacgtgaagagacacagggagaagatggtcatcagcaatcctagaagaggaacctgaaacagatttttttcttttttttttatacagtggattatattattaatttattctatactttcattttatatayataatttcaactttttagattcagggagtacatgtacaggtttgttacatgcatatattgtgtgacactgtgggtacccaacaggtagtttttcaacccttgtccttgtcctgctcctccctcctccctctagtagtccccagtgtctgttgttgccatatttatgtccctatgcacccattgtttagctcccacttacaaatgagagcatgc

SEQ ID NO: 225766 - DNA, 433 bp, Homo sapiens
tgttccagtctgaaacagattcttcctcacagacctcagaaggaagcaaccctgcgaataccttgattttggacttctaaccttcagaactgtgacgaaataaattttttgttgtttaagccaagtttaaacatgctttgtggtattttgttagggcattgctggcaaattaatactcattccttaaaggtacatatgaatacgtatgtaagagtaaataagggtttgtaagttgttttccccagcatctagcagaaagcttggtacatagtaagtgcttaataaacacgtgttaartggctgaatagatgaatacatatctggtatggtggatcatattcccagcaagacatgccagaggagaggtgcttgagacctctgctaaggagaaagacatggctgacagtgagaatcatccaaagatgggactggc

SEQ ID NO: 225767 - DNA, 573 bp, Homo sapiens
ttcctccctctgccatttcttagctgggtgatcttgtgcacactgcttaccttctctgtgccttggtttcctcatctataatatgaagacaataataggacctgcctcatggggtttttgtgaagatcaaatgagttgatgcacacaaagcgcttagaatactgcttggcacatagtagcttctcaataagtgtttgctgtcataattaatgaatcaagtcctcaatcatttaggtcccaggcacattacaatcagagtgattgattgagacasctctctgtttgcccagggactgtttcaacaccctgcttgttgtcaccaccactgtgtgcacatgtacacacacacacacacacacacacacacacacacacacacacccctcagcagtacctcacgtctagagaagaatcatttccgggaggcttcaacaacaccaatgctcaccacctcttaatgaagcaaagtcctcagcagtatcctagacatgctttcctcagggaattgccttcaattctctctactgagcaggggggagatcagagggcccgtggaatcttttggtctactcc

SEQ ID NO: 225768 - DNA, 445 bp, Homo sapiens
gcacaaacctgcctcctatctctatgatccccagtaacacagtatgtccatggtggagagggagggggagtcaacaggggagcagccaccagcctcaccccctcgacattcatgtgacccgattgtgtcagcgtcacttgtccccccatctgtcacaatgtcagttcctgctggggccctgggatccacagaggttgctccacatgtcgccccatttatctttgcaggcggcagcactgatgggtttgacagttctatttgttatcctacaaagcagggtccccactcctcaaagcaaagggwagaaaagtcagcatggaaaaggaccgggacagaaataggcagtaggaaaaatctggaggaggaagtttgtaccagctgatggagatgggaagaagagaggtccgacaattgggaaaagcaggccctgcaccttgccttctgg

SEQ ID NO: 225769 - DNA, 377 bp, Homo sapiens
aggtggtttgctttagcttgaaatcatcagtgaggattatacatgggcaatgtccagaaatcacattattgctcatagaccgtgtagtcttgatctaayggataactgtacattgtcttcactaagaagctagggtggttgtccttgatattgggacattgtagacttggccagaccaatgcccaaatatttcccaagacttttacctaagactctgctcagtatccatttgtctactgctggtcatctggaagaataaacttctcctgagtggtaccagcttatgagatttcctgagttgatacagaggtaaatgcatctttgttgcacaatttacagtctttttttttttttaagaaaaaacatgattttgatca

SEQ ID NO: 225770 - DNA, 578 bp, Homo sapiens
aacaaattagtatacacgtacaattactaagccttaaaaaggaagagttttgacacatgctaacacactgatgaaccttgaagacatatgaattgaaataagccagtcataaaaggacaaatattgaatgattccacttatataaggtttctgtagtagtcaaattcatagagatagaatgtagaatgatggcaggcaatgggtttatgtggagcttttgtttagttaatacagtttctgttaggcaagatgaaagatwtctggatatggatggaggtgacagctgtataacaatgtgaatttcattaatgctacagagctgtacacttaaaaatggttacgaggttaaattttattttttttacaacaacaaaaaataatatccactacagattgaaacattttttcaaccttaaagatcactgtgaactctgttattgcataaaaattgtaataaacattgtatagtttattatagttattattatgtacattaattatttttattactgtcttactccttttaggagaggcataatttgtgcttttgaaatggaaactaaggtatcatgggaata

SEQ ID NO: 225771 - DNA, 520 bp, Homo sapiens
cttgcctaattttgtattttttagtacagacagggttggtcatgttggtcaggctggtctcgaactcccgacctcaggtgatccacccacctctgcctcccaaagtgctgggattacaggtgtgagccactgcacctggccagtatgaatttctttctggacaagtgactgtcagggccagtaaagaagtttgacaaaacactggttatgcatgcctttacatgaaaggtagctaagactgtggacatcaccaagagcatcaacattttagcctcaagaaactcagtgagttttaccaacctcttggaatccactggattggttaccctcagatttaacttctgaagctattactttaatacagcttttcatattaatatttctctttttcattttaggcatcctttttaagatgcttgatgtccaggactttgaaacagctgatttctttttaaccacctctcaataggtarttcaattgatttttacaggaacagcaccagtgagggttctcaagaga

SEQ ID NO: 225772 - DNA, 603 bp, Homo sapiens
gacaggtttgatgatctgtcggcaagagaaactcattgcctgatcttctggaacatgggagaaggcagtctttcasagtgtctctcaccaacgcgggacagctctatgctgctaacaagatgtaaaaatcccccctggcctagtgtaggacacagatgttacctaagagcactggctggtcattaagtcaagaggtgaagtgactgtggaggagaaagagttagagtaaatggcccaagctaggaattaagtggcagtcacagccagtcttgggaaaaaatatagcacccacaagcattaggatggggacttagtctatcagagggctgatgccaatgcataacacagacaaggaaacagaaggcaatctgtctcatctacagttgcatcagacacagagtcaatatgaaaggccaagggacaacattctttagtgggagcctgcaaacaaccgaagggtacacattgacctgacgccacttccccacctcatcatgctgcatgtagccatgaaactcatagtctccctgaacccaagcaaagaagaaagagcagaggaaaaaagccactgaaagtttaagtgtctgttctaaagagttggat

SEQ ID NO: 225773 - DNA, 603 bp, Homo sapiens
gacaggtttgatgatctgtcggcaagagaaactcattgcctgatcttctggaacatgggagaaggcagtctttcagagtgtctctcaccaacgcgggacagctctatgctgctaacaagatgtaaaaatcccccctggcctagtgtaggacacagatgttacctaagagcactggctggtcattaagtcaagaggtgaagtgactgtggaggagaaagagttagagtaaatggcccaagctaggaattaagtggcagtcacagccagtcttgggaaaaaatatagcacccacaagcattaggatggggacttagtctatcagagggctgatgccaatgcataacacagacaaggaaacagaaggcaatctgtctcatctacagttgcatcagacacagagtcaatatgaaaggccaagggacaacattctttagtgggagcctgcaaacaaccgaagggtacacaytgacctgacgccacttccccacctcatcatgctgcatgtagccatgaaactcatagtctccctgaacccaagcaaagaagaaagagcagaggaaaaaagccactgaaagtttaagtgtctgttctaaagagttggat

SEQ ID NO: 225774 - DNA, 558 bp, Homo sapiens
agaaagagttagagtaaatggcccaagctaggaattaagtggcagtcacagccagtcttgggaaaaaatatagcacccacaagcattaggatggggacttagtctatcagagggctgatgccaatgcataacacagacaaggaaacagaaggcaatctgtctcatctacagttgcatcagacacagagtcaatatgaaaggccaagggacaacattctttagtgggagcctgcaaacaaccgaagggtacacattgacctgacgccacttccccacctcatcatgctgcatgtagccatgaaactcatagtctccctgaacccaagcaaagaagaaagagcagaggaaaaaarccactgaaagtttaagtgtctgttctaaagagttggatttatccagaaagcaatgaattttaactggaagtcagtaagatacattcaagtggcatataagtattccttccttaagcagaaatgggtgctggcgagcaagcagtattcagttatgcagaaataaagttatatttctacccacctcagtcacagtgtacaaatttta

SEQ ID NO: 225775 - DNA, 475 bp, Homo sapiens
gaattcaacgaacatttattaaacatttattaggagcccaggattttgtctgacgccagaagagaacacaaagaaaaacagattccgtctatgagtccgtgatccagttaggacagaagcgcycatgaaagaaaagggaagttgataaagagctatataccccttctcagtcacaccaaaacccttcccgttacagctgctccggaagacagcttcttttggtgtctgcagcaatgaacagagtccacctggttatttgaaatacatgagcccaagcacacttgcgaagattccacagagcagtgtgtgttcctaaccactgatttctccaccttttacttgctcttcttacataagggaaaaacattatgggtttgctcagttttctgtcgaagttcgtattttcctcctggtactcataacctagaacatttggcccagcccagctgtttccaactcagcagaaaaatgttga

SEQ ID NO: 225776 - DNA, 545 bp, Homo sapiens
cgtttttaaacaagatccccaagagatgagtgtgctcattaaagtttgaaaagccccacttcagtggacattattttgcctgtcttgggcccattcccccttcttctggtraaattgatcgggtttttttgggggagaaccatgggccccaactctgggcatatgtgcttcagtagggctgatgcactctacaaaaccctgatggcacacgaaagtgagtcctggcccatccaaatcaaccgctgggactgtggctgggcacaaggacctcttctttacatggctgttgttccgctgtaggaatggagtctgaaggtgggctccgcccttttggtcacgattatgagaatctaagagtggaatccttgaaaaaaggagctttagagggtgtgtgtgtgagtgagtgtgtgtgtgtgtgtgtgtgtgtgtgtgtgtgtttaagagagagaggaggattccagatcacatctactgagcttccatctttgtccaaattcagatcgacttcctggcttttcagtgtatataagccaatcatataagac

SEQ ID NO: 225777 - DNA, 395 bp, Homo sapiens
ccttgaagctttcccgattgcatcaacctccatcctgtccccaagttgccttgtaacactctccccatctcattctcggctttagttcccctcccagccttcaccctcttctgttatattatcctgttttccttctcttttagacccctacctggtggtctctgctttgtccctcttgccttcgtagagtctgtactcgcaactaatttctccagcctctaatagtgtcacctcctaacaccctctctcaagaccctccaataacttccccatattttctcccccaaactccttcagtcttcccytatccctctacacatctcctcccaggctcctaacccctcccaagaaccccattccttaactcaactttcagtcccatccccctgcattcc

SEQ ID NO: 225778 - DNA, 530 bp, Homo sapiens
agggtctctcatcttttggttatttttttcctaagtatattttctgtagcaattatgaatgggattattttaatttatttatcagatggcctgttgttagtgtaatgaaacattactgattttttgttttaattttgtatcctgcaattttattaaatttatcagttttacagttttttggtcaaatctttatggttttctatatataatgtcatatcatccacacacagtaacagtttcacttctttctgtcacacttggatgcctttatttctttctcttgccttattggtctagcaagcacttccaatactataytgaattaaagtgatgagagtaggcatccttgtattgttccagctcttacaaggggccctttttaaagggttccaattcttttactattgagtgtaatatttacagtgggcttattatatatggcctttattacctttattgtgtagaacttccttacttgtatacctgatctgttgaatgtttcatgacaaaataatgttacattttgtcaa

SEQ ID NO: 225779 - DNA, 530 bp, Homo sapiens
agggtctctcatcttttggttatttttttcctaagtatattttctgtagcaattatgaatgggattattttaatttatttatcagatggcctgttgttagtgtaatgaaacattactgattttttgttttaattttgtatcctgcaattttattaaatttatcagttttacagttttttggtcaaatctttatggttttctatatataatgtcatatcatccacacacagtaacagtttcacttctttctgtcacacttggatgcctttatttctttctcttgccttattggtctagcaagcacttccaatactatactgaattaaagtgatgagagtaggcatccttgtattgttccagctcttacaaggggccctttttaaagggttccaattcttttactattgagtgtaatatttacagtgggcttattatatatggcctttattacctttattgtgtagaacttcmttacttgtatacctgatctgttgaatgtttcatgacaaaataatgttacattttgtcaa

SEQ ID NO: 225780 - DNA, 542 bp, Homo sapiens
gctgtaattcttttaaataataaggaatctttaatcttagcagtgaacattttaacaaggagttaatgtttgcaagacatgtacggaaagcagggttgtccacgtgtttatgttttcaagtacacatgaaacgtccctcaacacagtcatttcacaaatattacccaacggcactctcaggtacatgtgaatatttgctcttttttcaagaatcttgcaatcgatagtccaaggaaataatctgttatctgtgaaaaggctaaaatcagtaaaaaataagaaatkatttccttgaattattgttcccagaattcttaacaaagaacaaaagaggaagaggggagacaggtgggtttggcctctcttcctgaagatggcagcacttgactcagcaggttcaaatacacttttggttctggatcaattgccctaatgtcacttacagggagagtgcacgatcttctacaatacatggaggtgggggcgagactgtaggtgaaatcctaaaacacctcataaaaggggtagtcagccctaaaaat

SEQ ID NO: 225781 - DNA, 446 bp, Homo sapiens
agaaatgatttccttgaattattgttcccagaattcttaacaaagaacaaaagaggaagaggggagacaggtgggtttggcctctcttcctgaagatggcagcacttgactcagcaggttcaaatamacttttggttctggatcaattgccctaatgtcacttacagggagagtgcacgatcttctacaatacatggaggtgggggcgagactgtaggtgaaatcctaaaacacctcataaaaggggtagtcagccctaaaaatggaagctgtgaccttgaaagcttggaataagtcaagtgggtggcccacaaccaacacggagaagctaagtcaaagatgtttttaccagcagctatgcagagggaaggttgagatgctctttgacttaccagctgcatgatctttggcaattatttgatctctctaaagccacagttgtttca

SEQ ID NO: 225782 - DNA, 592 bp, Homo sapiens
atcacattttcaaaatatttagtgaataatcattctttctaaatcacttttttcctgacggtatttccactggggaccagggaaaggccactgggcagaggcatgggacagcatcagaggaaggagaaggtggctaatgtcgcttcagaaagagggaagatatggcccagaggatgtatcagaggcacaggcagagcgaggrgaactgatctctgaaagattcccaggggatgaaggaagaaaggagtcaacagataaggaaagtaggtgacaagacgctggtgtcccaacctctctggagcctcaggatagaggggatggggcaaaggaagttggaagcagatgccattttccttacttcctgactgaggtttataatttgggttctctagaagcagatgctgagatggaatttgggatgcaagatatttattagagatcaacaactgtggaagagtcaaggagaagcagaactggacagagagatgttgaacttcagaacaggaccagcaaggcatcagccaacctcacagggaaccgagatgtagatggcatgttggcatcttccgggattgagccaaactagccaggc

SEQ ID NO: 225783 - DNA, 383 bp, Homo sapiens
aagaatttgttagtgacactgaaaatgcgcacactctatgttaagggaaataaccctgatgtaaacttggaagttgtatgtacagtgttgggagaattgagtgaaaaataatgactgcaaacaaattagatagcgtaataccagacacatacggtttaataaagaccaactcttattatcttaccatttcctagccataaacattcttccatatttgaattggctgttgctgctattaattctggctaagacacgtttcacatcckcctgtggttataatgatgccagcgcctcacccatagtgttaacgcatttcttgctggccccgcaagggaagagacagaggctcagcctgggataaactgtgtacatcgtggaaagta

SEQ ID NO: 225784 - DNA, 521 bp, Homo sapiens
ttaggcgaagagggcttctttgtgcaacttgattatgacatgcctcaacatctttgtcttagcgtgtgtgtgtgtgtgtgtgtgtggtggtgtgtgcatgtgcatgcacatgcttggagtggttgagctgctgggatcagcaagtgtatatttttcattaatttgagacatttsgggacatcagttttcaaatatatctcttctgcttctcctttcttctctcctttagaaactctaattatacatacatgaggccacttgcacttgtgccacaaatcaccacactgttcatttcttgtcttttgttctctgtgtgtttcattttggatagctttctatgtttacaagttcactaatcttttcctctgcaaggtctaatctgctaatgacctcacttatatttttcacctttgccactgtcactttcaacactagatgtttgatttatctttatattttctaagtctctgctgataacaggctcattttctttctgcagttttttgatcatatggaataca

SEQ ID NO: 225785 - DNA, 521 bp, Homo sapiens
ttaggcgaagagggcttctttgtgcaacttgattatgacatgcctcaacatctttgtcttagcgtgtgtgtgtgtgtgtgtgtgtggtggtgtgtgcatgtgcatgcacatgcttggagtggttgagctgctgggatcagcaagtgtatatttttcattaatttgagacatttggggacatcasttttcaaatatatctcttctgcttctcctttcttctctcctttagaaactctaattatacatacatgaggccacttgcacttgtgccacaaatcaccacactgttcatttcttgtcttttgttctctgtgtgtttcattttggatagctttctatgtttacaagttcactaatcttttcctctgcaaggtctaatctgctaatgacctcacttatatttttcacctttgccactgtcactttcaacactagatgtttgatttatctttatattttctaagtctctgctgataacaggctcattttctttctgcagttttttgatcatatggaataca

SEQ ID NO: 225786 - DNA, 455 bp, Homo sapiens
aagtttacctagtcaaagagttacaatccaagaaagaggagtgaagattctgaaggaatacattacaaaaaagaaaagctactaaatggtgtctaaatcacattttagtgtgctgcagaaatgayagttcaaaaaaaattagagcaatggaaatacaataatttttatgtcctgtctagtattttgtcttttccaaacactgttccaggagatacttcaaagaagttgatgtataatgtttcttagacttgcatgcaatggtctcataattgaaacattttcttctttctgaatcttgaatcaaatcctatctcttgtccatactctgaaacatgaaatttgagaatggctatggtccctttctccatcttgaaagccagcaacagcaaatggagtcctcctcacattgcttaattcacattctgtgatcacatcaccgtgacctcttccatccc

SEQ ID NO: 225787 - DNA, 232 bp, Homo sapiens
cagggaccaagaccttctgccctgaatcatgatcgttgcaaaccaagcctgcgctggctggtgctgagcaaagactcacagcccggaagacaaaggcagggacccacagcaccgagcctatgcccgtggccaactgaatccctgtggaccggccccgcctgtctgccttcctcacatccctccacctcacmgggaggccctaagtcggctcacagggagccctcctaagtcg

SEQ ID NO: 225788 - DNA, 610 bp, Homo sapiens
ctgccaccaaccccttgctggtgctctcctggccttttcttagagacttcacagagttctctgagtttytgcttcttgtcaaaacagtctcaagcgtcctctcccaacaggtgtctgtggtaatgcatctggttctctcaccttctgtcatttggtctggaaatcaccacaacaaaatttttatttgctttatgtagtataaattgtttacatatatgtaaattatatgtatgtatttatgtgtatatgtaatatcaagtatgtgtactatcaagtatctatgcacaacataattagatacaaaaatcacacacacacacacacacacacacacacacacgaattgtcttttctgggagaagcacacggctgctgaaatggtagataaaacaggtgcacaaggatgacccatagtgtaacaaatgtgcatattcactttaagaacctagttaggatgttagcttgtgtccatgtgaaatgataaaagatggcatgcaatggtatgattcattgtggcactaactattaatacccactgccaagattgtcagtttgtatgtccccttcctgtgccctctgtaaacgcactccagtccagcattttacccct

SEQ ID NO: 225789 - DNA, 610 bp, Homo sapiens
ctgccaccaaccccttgctggtgctctcctggccttttcttagagacttcacagagttctctgagtttttgcttcttgtcaaaacagtctcaagcgtcctctcccaacaggtgtctgtggtaatgcatctggttctctcaccttctgtcatttggtctggaaatcaccacaacaaaatttttatttgctttatgtagtataaattgtttacatatatgtaaattatatgtatgtatttatgtgtatatgtaatatcaagtatgtgtactatcaagtatctatgcacaacataattagatacaaaaatcacacacacacacacacacacacacacacacacgaattgtcttttctgggagaagcacacggctgctgaaatggtagataaaacaggtgcacaaggaygacccatagtgtaacaaatgtgcatattcactttaagaacctagttaggatgttagcttgtgtccatgtgaaatgataaaagatggcatgcaatggtatgattcattgtggcactaactattaatacccactgccaagattgtcagtttgtatgtccccttcctgtgccctctgtaaacgcactccagtccagcattttacccct

SEQ ID NO: 225790 - DNA, 403 bp, Homo sapiens
tcaaaccaggctgtgagagttggccataaaaattgctttccagggtcattttaaatacctccctccatgggtacaaaacaaaattgagatggttgacttagatgtacatttctgggcctgtgacctcatgtttaaaagatctttgtaagtttattttgcatgtgtagagttttaaagcattgaccattattgctttcgacttcaaaccatttttacgagctccataaatggaaggtaatgatgttttttaaaaaggtgttttcactctcttgcattttctycaatgaaaagctaagtacaggagtgtgtgtttctgtcacaactacaactgcccttcacctcaggacctaatttccattccctcaaaagaataaacacaaaaggaatgcatccagcttgttga

SEQ ID NO: 225791 - DNA, 548 bp, Homo sapiens
attgagcaatttggaaacactctttttgtagaatctgcaagtgaatttttggagagctttgaggcctatggtggaaaaggaaatatcttcacataaaaactagaaagaagcattctgagaaactacttggtgatgtatgatttcatctcacagatttgaasatttcttttgattgaccagtttggaaacagtagttttgtagaatctgcaaagggatatatgggggcccttgaggcctatggggacatacgaaataccttcacataaaaactaaacagaaacattctcagaaacctcttttggatgtgtactgtcatctcacccagttgaaactttcttttatttgagctatttcaaaactctctttttgtagaatatgcaagtggatgttttgagcattttgaggactacgatcgaaaaggaaatatcttcccaaaaaaactagacagagcattctgagaaacttctttttgatgtgtacattcatctaacagagttgaacatttgtttggattgagcagtttggaaacagtcgtttagtagaattc

SEQ ID NO: 225792 - DNA, 471 bp, Homo sapiens
aatcccaagggcccatcacagagcctggctcctggttaaagaggcttgctcagctaacatttgcaaattttcactgtctcccaaaagaatgttacctgtgggcccccctggggacaggcctcctstttccccccacccccacccccccggggcctccctactttcctctgcgggaagtcacaccaagccattagcagcgcgccgcctcccggggcggcaccagctggagaggccgcctttcagctcaggaattgatttcccaagcacaccccagcatgtgtgcacaccagagacgcctggagtgctcctgctaaggaggaaagccgccgtgccgcacctgctgggaaacgaggacctttcttgtcacctctgcctcccctagcagcatcccaggcgcagacctggacagctggctcccgcacctgccctgggagtgctcccggcagcaacggcccatgcttttccaggctg

SEQ ID NO: 225793 - DNA, 570 bp, Homo sapiens
aagctttacctaacagatgctttgaatagggtggcaacaaactggcctcatcagatctttggaaagtatggaggccatgaaagcacactccatgaagcctgtcatgcatcccagtctggaaacccagagggacagtgcagctcaggagctgatgccctgtaccactaggttcccggactcttcactaaacccccagcatcaaaggtgagctgggcctttctcagcctaccatccccagaacttaccccaatctgtcagggaaagtttttcaattccaggttgctttgatttgaatatctgrgtccctccagaattcatatgttgaaatcttgaccccacgaggtgatggtgttgagaggtggaccctttgggaggtgatcaagtcataaaggtagaacccgcatgcttgggattagtgccgtcccggtaagaaagactctagatagctccgttgccccttctgccacatgaggacacagtgagaagatgaataagtgaaacagaaattggtgcccaagcctaaggcagacgagtctggattgtaaaaatacaatgccaacagtctctgtt

SEQ ID NO: 225794 - DNA, 570 bp, Homo sapiens
aagctttacctaacagatgctttgaatagggtggcaacaaactggcctcatcagatctttggaaagtatggaggccatgaaagcacactccatgaagcctgtcatgcatcccagtctggaaacccagagggacagtgcagctcaggagctgatgccctgtaccactaggttcccggactcttcactaaacccccagcatcaaaggtgagctgggcctttctcagcctaccatccccagaacttaccccaatctgtcagggaaagtttttcaattccaggttgctttgatttgaatatctgggtccctccagaattcatatgttgaaatcttgaccccacgaggtgatggtgttgagaggtggaccctttgggaggtgatcaagtcataaaggtagaaccckcatgcttgggattagtgccgtcccggtaagaaagactctagatagctccgttgccccttctgccacatgaggacacagtgagaagatgaataagtgaaacagaaattggtgcccaagcctaaggcagacgagtctggattgtaaaaatacaatgccaacagtctctgtt

SEQ ID NO: 225795 - DNA, 570 bp, Homo sapiens
aagctttacctaacagatgctttgaatagggtggcaacaaactggcctcatcagatctttggaaagtatggaggccatgaaagcacactccatgaagcctgtcatgcatcccagtctggaaacccagagggacagtgcagctcaggagctgatgccctgtaccactaggttcccggactcttcactaaacccccagcatcaaaggtgagctgggcctttctcagcctaccatccccagaacttaccccaatctgtcagggaaagtttttcaattccaggttgctttgatttgaatatctgggtccctccagaattcatatgttgaaatcttgaccccacgaggtgatggtgttgagaggtggaccctttgggaggtgatcaagtcataaaggtagaacccgcatgcttgggattagtgccgtcccggtaagaaagactctagatagctccgttgccccttctgccacatgargacacagtgagaagatgaataagtgaaacagaaattggtgcccaagcctaaggcagacgagtctggattgtaaaaatacaatgccaacagtctctgtt

SEQ ID NO: 225796 - DNA, 586 bp, Homo sapiens
gactccagccagagaaagttctctgcttaatttaaggactcatgtgcttaggttgagcccatccgggtaatagaggataatctccctatttaaggtccctaactttagttgcatctagaaagcccctgccatataatgcaacatattaataggatccagggattcaggtgtggacatctttgggagcccactattttgtgtaccacggtgaaccrtttcctatgctcatttgtctcagaaaacatagtatgtcacagcagaaaaagagaaaaataggacatgtttcctaaacttcagtttcaaggccctacccagtctttgatagaggattcctgtactttgacaatacaataaattttggagtccataaggggccaggggaatgcagaggtcaaggtcctatattgtaaagggagttctggtgggaattctctggcgacacagcaggcaaaagacatttccaaatgggcattttatattcagtatggaacgatttccatcactgtgatacaagtcctgaggccctttctaccccaaacccagatgctttgtgagaggtgtttttgcaggagttcaggggaagctt

SEQ ID NO: 225797 - DNA, 580 bp, Homo sapiens
caacaaaccaccatgacacatgtatacctgtgcaacaaacctacacattctgcacttgtatcctggaacttaaagttaaaaaaaagtgtgtggcacttgcctcttcactgtctctctctctcctgaggcctcccmggttgtgcctcctctacagcctgcagaaatttgagtcaattaaacctcttttctttatatattacccagtctcaggtagttcttcatagcagtgtgaggatggactaatataaggtctggctcacagtgaatcttatgctcttttgtcccttgctgccttctgcacgtcataaatctgctttatgtaacttgttgcacatgtgtgtgttctgtctcgctggactcagacaagttggttggtaaccagtacatgatgaacctactttataactggtttccagatcagagaagggttctccttcaggtagtgattcagcatcccaggatcattaatctagtggcttccccatcttctgcaaatcattttcatgctcttttttatgatctggcagaaggggaaagagcacagagacccatacacaggaaggtttcatgggccaggctg

SEQ ID NO: 225798 - DNA, 502 bp, Homo sapiens
caacaaaccaccatgacacatgtatacctgtgcaacaaacctacacattctgcacttgtatcctggaacttaaagttaaaaaaaagtgtgtggcacttgcctcttcactgtctctctctctcctgaggcctcccaggttgtgcctcctctacagcctgcagaaatttgagtcaattaaacctcttttctttatatattacccagtctcaggtagttcttcatagcagtgtgaggatggactaatataaggtctggctcacagtgaatcttatgctcttytgtcccttgctgccttctgcacgtcataaatctgctttatgtaacttgttgcacatgtgtgtgttctgtctcgctggactcagacaagttggttggtaaccagtacatgatgaacctactttataactggtttccagatcagagaagggttctccttcaggtagtgattcagcatcccaggatcattaatctagtggcttccccatcttctgcaaatcatttt

SEQ ID NO: 225799 - DNA, 582 bp, Homo sapiens
tttggagggtcaaatattcaaacaacagcactaagccatgatccctcccggaagtgggggcagaaacggctgtgactggagcctcagcagccctgacaccctcatgcgcccttgcatgccaaatccacactggcttctgcatatacacggcctccagcctgtattctggctttatgtgaccatctgagaggtcaaggttactgtgctcagagataccaacgccacagtggggaataagtgaattgacttcaagccttgccccaggctggtgcccatgagtgtctctagcccatcagtgctggtcctgtgccaatctcaagcctacgctggcccctgaccccagggtctcttgcttcagtgaaactcttacctctgtctctgctcctgtgcccctgacttggccgcctcccttgggtttcagggaaatacctgccccattttgtaatgcaagtctcccggtggagaatgtaaaggaagtcagctgttgatgctgagtgccaagtgttagtagcctttcaatgccaagmgtaccttcctgccccccaacatgtgcactctgttaagttcacatagtccacaggc

SEQ ID NO: 225800 - DNA, 612 bp, Homo sapiens
cactaccacatcttcagagaacgtaattccattagaaccccctgtaaggtcctcaaatgcccactgccccctcagccatgctgtggcctttccctgcaaggtggtgctgctctgaactgttttactagatggtgatgggcacaaggctggcacctacctgcaggacaatggctgttgtgtgctatgtgttcaccaggttttagacatttatctccaatctctaaaactcccccttaaagtgaatatcacccttcttttcatttatggaagaggaatctgaggctggaatgtagggcctgcaggatagtgcggtcttaagccccaggctgagtggccccctcaagaccacatggccctgctttcctccactggtgactgagtgaggcctgctgtcacctgccagggctgaggcctcctcttccaccagcamccctaggtctggggtcatgttagcctgtgtctcggggctctcaggagggcgggggctgcacatttctggaaggaaatgtcctaagctggtgctggtctcaggagcactaacccaggctggcagatttgcttccttccccctggtcacctaagcacagtatttttctatttgttatgggagtt

SEQ ID NO: 225801 - DNA, 610 bp, Homo sapiens
taatatttgaaccgtggttatttaaagatccacatctggtaactccggtgtctggctgatctcctgcgggccggtttccatgatctggttgtaggagtgtgcccctgtggctgtgacccatcccaggttgagaggtagccgtccatccaggtgcatcaacacacatttccacgtgtgctgtttcaagtcatttcggcccatgttaatttctcctcrtattataatcaggttgtttcttattggtttatattttcaaaacatgccatttcaatttaatgaatctttgctgaggacaaccttgaagctcaaagtggttaaaagatttttcccaatatccctacagcattcagtgactacagaggactttcgttatgttttctggagctcaacatctcagagcccttctgatgtttgggaacagcagtccgggctaggacactctcagcacaagcacatgaccctctcctgtccaaccacatgctccctctaggctttgcatctggcgggagtgatgcagagatgtaggggaacccttggaattcgtgccaatggcagtggtggtggaggcagtggcaggtcctgcagtggcagcagcatcctgcccacgcca

SEQ ID NO: 225802 - DNA, 610 bp, Homo sapiens
taatatttgaaccgtggttatttaaagatccacatctggtaactccggtgtctggctgatctcctgcgggccggtttccatgatctggttgtaggagtgtgcccctgtggctgtgacccatcccaggttgagaggtagccgtccatccaggtgcatcaacacacatttccacgtgtgctgtttcaagtcatttcggcccatgttaatttctcctcgtattataatcaggttgtttcttattggtttataytttcaaaacatgccatttcaatttaatgaatctttgctgaggacaaccttgaagctcaaagtggttaaaagatttttcccaatatccctacagcattcagtgactacagaggactttcgttatgttttctggagctcaacatctcagagcccttctgatgtttgggaacagcagtccgggctaggacactctcagcacaagcacatgaccctctcctgtccaaccacatgctccctctaggctttgcatctggcgggagtgatgcagagatgtaggggaacccttggaattcgtgccaatggcagtggtggtggaggcagtggcaggtcctgcagtggcagcagcatcctgcccacgcca

SEQ ID NO: 225803 - DNA, 590 bp, Homo sapiens
gctggctacttctttgttgtgggactgtccwgtgcattctaggatgctgagcaacatccctggtctctaccactggatgccagcagcactttgattgttgggacaatcaaaaatgtctccagatattgccaaatgcctcctgggggcaaaatcaccccagttgagaacaacagtctacaacaacgcacagagcttccaagaaaccttctagtgactggcccttaaatataaacaggctgttagagaccaccaacatgtgaagaaagttttaacagtcagagaacaaaacaaaacaaaacagttttctctgctcgtgcctagtgtggcctcactacacagaacaatgccagtaagattgtggacctgtacatcccatggaaatgctccagcagccatcacgtcattggtgccaaagaccacacgtccatgcagatgaacatggcgaggttgaccaggttacgggcaggtttaacgacccgtttaaaacttatgttatccacagggccgttcgtgggatgggtgagtcagagaagcatttctgagtttgcttgtttcaaaatcaggttcatgcattaatacccaggaagctt

SEQ ID NO: 225804 - DNA, 590 bp, Homo sapiens
gctggctacttctttgttgtgggactgtcctgkgcattctaggatgctgagcaacatccctggtctctaccactggatgccagcagcactttgattgttgggacaatcaaaaatgtctccagatattgccaaatgcctcctgggggcaaaatcaccccagttgagaacaacagtctacaacaacgcacagagcttccaagaaaccttctagtgactggcccttaaatataaacaggctgttagagaccaccaacatgtgaagaaagttttaacagtcagagaacaaaacaaaacaaaacagttttctctgctcgtgcctagtgtggcctcactacacagaacaatgccagtaagattgtggacctgtacatcccatggaaatgctccagcagccatcacgtcattggtgccaaagaccacacgtccatgcagatgaacatggcgaggttgaccaggttacgggcaggtttaacgacccgtttaaaacttatgttatccacagggccgttcgtgggatgggtgagtcagagaagcatttctgagtttgcttgtttcaaaatcaggttcatgcattaatacccaggaagctt

SEQ ID NO: 225805 - DNA, 590 bp, Homo sapiens
gctggctacttctttgttgtgggactgtcctgtgcattctaggatgctgagcaacatccctggtctctaccactggatgccagcagcactttgattgttgggacaatcaaaaatgtctccagatattgccaaatgcctcctgggggcaaaatcaccccagttgagaacaacagtctacaacaacgcacagagcttccaagaaaccttctagtgactggcccttaaatataaacaggctgttagagaccaccaacatgtgaagaaagttttaacagtcagagaacaaaacaaaacaaaacagttttctctgctcgtgcctagtgtggcctcactacacagaacaatgccagtaagwttgtggacctgtacatcccatggaaatgctccagcagccatcacgtcattggtgccaaagaccacacgtccatgcagatgaacatggcgaggttgaccaggttacgggcaggtttaacgacccgtttaaaacttatgttatccacagggccgttcgtgggatgggtgagtcagagaagcatttctgagtttgcttgtttcaaaatcaggttcatgcattaatacccaggaagctt

SEQ ID NO: 225806 - DNA, 617 bp, Homo sapiens
gtcccccacactccaccccgtcttgctccatctcctttccctcttctggtgcgctcctcccctgccttcattctgccctccattccccagccccttctccatgagaatcacttgagaacttgttaytttatttattccttttgcaagacaatagacaccaatcacagaagaaagaatgcattctagaaaagtatttcatttgtaacacagttacagaaaaacgtgaacaaagtatgaaccaaaaataattagacaccttttgacatcattatacaatgagcatattggctattaagtgattacaacgtcccctgtgtgaatctaattaataagtcttaaaaactaatctcaaacatgcacccaaacaactgaaatacaacagcaatcactaacacaaggaaccagccagccattccatcctttgacaattgttgcactttagggaataacgctcccactaccagtgggggagtgggggtggggggtggggagaggaagagggagggagtcaggtgacctgcttgtcttctcttgacttgccctttccagaacagtcaccataggaagtttctagaggccactgacagggtatgaactagggtcagaatatttaaaac

SEQ ID NO: 225807 - DNA, 617 bp, Homo sapiens
gtcccccacactccaccccgtcttgctccatctcctttccctcttctggtgcgctcctcccctgccttcattctgccctccattccccagccccttctccatgagaatcacttgagaacttgttactttatttattccttttgcaagacaatagacaccaatcacagaagaaagamtgcattctagaaaagtatttcatttgtaacacagttacagaaaaacgtgaacaaagtatgaaccaaaaataattagacaccttttgacatcattatacaatgagcatattggctattaagtgattacaacgtcccctgtgtgaatctaattaataagtcttaaaaactaatctcaaacatgcacccaaacaactgaaatacaacagcaatcactaacacaaggaaccagccagccattccatcctttgacaattgttgcactttagggaataacgctcccactaccagtgggggagtgggggtggggggtggggagaggaagagggagggagtcaggtgacctgcttgtcttctcttgacttgccctttccagaacagtcaccataggaagtttctagaggccactgacagggtatgaactagggtcagaatatttaaaac

SEQ ID NO: 225808 - DNA, 617 bp, Homo sapiens
gtcccccacactccaccccgtcttgctccatctcctttccctcttctggtgcgctcctcccctgccttcattctgccctccattccccagccccttctccatgagaatcacttgagaacttgttactttatttattccttttgcaagacaatagacaccaatcacagaagaaagaatgcattctagaaaagtatttcatttgtaacacagttacagaaaaacgtgaacaaagtatgaaccaaaaataattagacaccttttgacatcattatacaatgagcatattggctattaagtgattacaacgtcccctgtgtgaatctaattaataagtcttaaaaactaatctcaaacatgcacccaaacaactgaaatacaacagcaatcactaacacaaggaaccagccagccattccatcctttgacaattgttgcactttagggaataackctcccactaccagtgggggagtgggggtggggggtggggagaggaagagggagggagtcaggtgacctgcttgtcttctcttgacttgccctttccagaacagtcaccataggaagtttctagaggccactgacagggtatgaactagggtcagaatatttaaaac

SEQ ID NO: 225809 - DNA, 605 bp, Homo sapiens
ttaatttaatatctgtgcaaggtactattggcgatttggtgtccaagtgcatgctattatcattaagtgctagacaattagaaaagatcaagatcacaaagggctgaagcaggcagggaagaaacttggcagacagatagaaaaacagcaagagcaaacaacttttctgcgtaccagataccctaagaagcacttttcaaaaagagctcctttaaacttcctaacaatccattgggagagttactattatctccattttgcaggcacagaaattgagatttagtgatattamccaattcatccaggattgcatagcctaggaagctgatgcacgcatgcaggagactgcatgttgagttaattcctcaaagagagggagggtcttggggaggggaaggaagatggacatggtaggagtgctggggaagagagaacagtgagtataaaggcccgggaataggaatgaggagacttccatctccattcctgggaagaagggataaagcttgacatgttaagtcaggctctgaacaggccatatagtttgtatctgggtattttcttactagtcacacaaagtaaaagtttcaagatagcaaaagtct

SEQ ID NO: 225810 - DNA, 398 bp, Homo sapiens
tacacagttttttatataagtgataatactatacatactgattggtaaccttgttctatttggtacaatgtcatgaatacaattataggttgatgaataatcatttttaatggctatgtggtattccattgcatagatgtaccagcataatttattttataatttctgattagttagggtaaatgtctataatttgacattgttatgtcaaatagtattagtcaaatagtattatactttcatatggattcacacactgctattcactagtgcgagcaattgctgattttgccacatcttcaacaatgctaagttgttcamccttttaatatttttcaatgtaatgggaaaaaaaattttcaatgtgtctttttgtttgttttttgagatggtgtgta

SEQ ID NO: 225811 - DNA, 570 bp, Homo sapiens
ctcagtttggccagaagagttttctgagttttcttctttctagactttatattttccaaagcaaaagaaaggaagatttcagggcattttagtgtggaagttgtatttgcttgtaatgaattaaaagtcactggctcactgcaagattgtaagagcatrgctgccatgttaaggatatgaatccaatttattttacagattttaaacaggtttcctaagtaccattagttatttttacaggtaagaaatatagaccctcataactgtcattagagatacatcaaaacaaaatcggattatcatatttcaaaaacagggcctgttcattgcaagttgtctgaaggtagtaaaacagagactaacaaaatgaagactatataagaaaagttaggaaatatggatagaatgagaaatttagcataaacctaatttagattttcccccaaaaagaaaacagagactaggggaaggcaacatttgaagagatgacagctgagaatttcagagatgaattaaaggccagaatcttctgatgcaggaagcccagtgaaatctaaagcaggatagata

SEQ ID NO: 225812 - DNA, 570 bp, Homo sapiens
ctcagtttggccagaagagttttctgagttttcttctttctagactttatattttccaaagcaaaagaaaggaagatttcagggcattttagtgtggaagttgtatttgcttgtaatgaattaaaagtcactggctcactgcaagattgtaagagcatagctgccatgttaaggatatgaatccaatttattttacagattttaaacaggtttcctaagtaccattagttatttttacaggtaagaaatatagaccctcataactgtcattagagatacatcaaaacaaaatcggattatcatatttcaaaaacagggcctgttcattgcaagttgtctgaaggtagtaaaacagagactaacaaaatgaagactatataagaaaagttaggaaatatggatagaatgagaaatttagcataaacctaatttagattttcccccaaaaagaaaacagagactaggggaaggcaacatytgaagagatgacagctgagaatttcagagatgaattaaaggccagaatcttctgatgcaggaagcccagtgaaatctaaagcaggatagata

SEQ ID NO: 225813 - DNA, 560 bp, Homo sapiens
ctcctgtatttattctgactataatccatatttattctagacacttctttcttccttttctctcagcctcccacagatagtaattcacaaaacggttggaagacagagataaagccagtggcttgaggtatactttgtcctagggattctccaggtattttgaccctcattggtatttattagttcatagagtgctcctcatactccccaaacaggaccgctgttactttagagggccctctgcttccccatcytaagtcaacctacactccagatctagtgctgacctttcaggccccaaaagcatcacatgggatcacttatccccataaattctacaggtgcctggatattaaattcctgtggccatgagtggcttttgacagcagacaaaactaactctaggaatgtcttaaccatcataaggtgtgcaaacaacacgttgatcttatttgccttagctcacaattgattcttaattaatacatttttaaaatttctagaggcacaaataataaataattggttatagagtattcaaagagataactatgattcag

SEQ ID NO: 225814 - DNA, 511 bp, Homo sapiens
gaaattatgattcctactaaactcaaaaacatatcccaaagcactctctttacctgaacttagaacttaaaagaatatttcttccattctttscattatttttcagcgctacagattgtctactagtatattcctcaccattattacttatttattgtactccagtagtatgctaggcactgaataaggtaaaaacaagacacaattcctgatctcaggtgaacaattcaaatacaacccacacaacagcaatttctctcctttcctttctccttcccttaagaaaggggcagggagaccacagaaatatgacattttcagtaataatctgacataccagacgaccttattaataaagaaattccggacccatagagacagaagaccaattacagccattgctttttgatatctgaacttccaaataggcttatgaactttaacttgatccacataatttggaatttataatggaatttttagcaaactatttgttatctaccagtattag

SEQ ID NO: 225815 - DNA, 447 bp, Homo sapiens
taaggtatatgaatgtttgtggaagcaacttacctggagaaaaacacttaattctgtgtcagtttctctagctacacaacactaaaattaayaaatgatccctctgctatccgtaaagtataactaaaataaatgtggtgaaatgctattttggaacttaagagaaagaggatccctttttttcatcttaactgaaccaaaatatctaaacaattcacttttattaacaatataataccacctgacaagtatcaaatctgacataatctgaacaatgatgcaaagatatttctcccgcaaagacactaatggaatggtcctctgcattgtaatttattatttactcataaataaagtcctataaaattaaaaacatactgcttaaacatacagtggaaatgaagcaaatcagtaccgtagtttgcagcatcataactcacagcaaag

SEQ ID NO: 225816 - DNA, 447 bp, Homo sapiens
taaggtatatgaatgtttgtggaagcaacttacctggagaaaaacacttaattctgtgtcagtttctctagctacacaacactaaaattaacaaatgatccctctgctatccrtaaagtataactaaaataaatgtggtgaaatgctattttggaacttaagagaaagaggatccctttttttcatcttaactgaaccaaaatatctaaacaattcacttttattaacaatataataccacctgacaagtatcaaatctgacataatctgaacaatgatgcaaagatatttctcccgcaaagacactaatggaatggtcctctgcattgtaatttattatttactcataaataaagtcctataaaattaaaaacatactgcttaaacatacagtggaaatgaagcaaatcagtaccgtagtttgcagcatcataactcacagcaaag

SEQ ID NO: 225817 - DNA, 502 bp, Homo sapiens
caatcattaataagtattactctgcattgactctgagctacagatttttgtttatgtaaataaatatttcaaataaaagaacttcaaatgatattttcttgggaacttcattcattctgtagttgttcaataaacatttgtaacaaaataatgaatctctattctatcaaagcatgccatataacttccacacttccatcaaaacatcttttgatgctaaaaacatayataatttggaagaagacttagatttttttaatgggaaaaaattaagcttagaaattatagcaaatcatctattatccacacaatagatgactttgaaaaaaaggaaaacaacttctggtatactcgattaacttatacatgtaaaatgataatgtgctatgtatctctcagcagcctgactaaaaggacctgttagcatcagtaaaggacttgacaagcaaaataccaagacagtgatatcccaaatcctgcccacataggattagctcatcta

SEQ ID NO: 225818 - DNA, 580 bp, Homo sapiens
gtaactgatttttttgtgttgactttgtggcctcctactttgctgaattcatttattatttcttacagtattttgtgtggaatctttagggttttctacatgtaagagcatatcatctgcaaagaaagataatttcacttcttcttttccaatctgagtgccttttctttttcttgcctaatttcctttgctaggccttccagtactatgttgaatgcaagtggtgaaaggagtcaggtttgccttgttcctgatcataaagagaaagctttcattctttcaccattgagtaagatatatgctccgggcctttcatatatatgacctttattgtsttagggtgatttccttctattcctagtttgttgagagttttaaattaggaagcagtattaaatttaatcaaatgcttgtatgcatgtatcgagatgatcatgtgatttttagccttcattctgttactgtggtgtatcacataaattggcttttgtatgttgagctctccttgcatcctggggtaaacccacttagttatggtgtttggtcattttattgtgctgttgaattcagttgcttgtat

SEQ ID NO: 225819 - DNA, 580 bp, Homo sapiens
gtaactgatttttttgtgttgactttgtggcctcctactttgctgaattcatttattatttcttacagtattttgtgtggaatctttagggttttctacatgtaagagcatatcatctgcaaagaaagataatttcacttcttcttttccaatctgagtgccttttctttttcttgcctaatttcctttgctaggccttccagtactatgttgaatgcaagtggtgaaaggagtcaggtttgccttgttcctgatcataaagagaaagctttcattctttcaccattgagtaagatatatgctccgggcctttcatatatatgacctttattgtcttagggtratttccttctattcctagtttgttgagagttttaaattaggaagcagtattaaatttaatcaaatgcttgtatgcatgtatcgagatgatcatgtgatttttagccttcattctgttactgtggtgtatcacataaattggcttttgtatgttgagctctccttgcatcctggggtaaacccacttagttatggtgtttggtcattttattgtgctgttgaattcagttgcttgtat

SEQ ID NO: 225820 - DNA, 580 bp, Homo sapiens
gtaactgatttttttgtgttgactttgtggcctcctactttgctgaattcatttattatttcttacagtattttgtgtggaatctttagggttttctacatgtaagagcatatcatctgcaaagaaagataatttcacttcttcttttccaatctgagtgccttttctttttcttgcctaatttcctttgctaggccttccagtactatgttgaatgcaagtggtgaaaggagtcaggtttgccttgttcctgatcataaagagaaagctttcattctttcaccattgagtaagatatatgctccgggcctttcatatatatgacctttattgtcttagggtgatttccttctattcctagtttgttgagagttttaaattaggaagcagtattaaatttaatcaaatgcttgtatgcatstatcgagatgatcatgtgatttttagccttcattctgttactgtggtgtatcacataaattggcttttgtatgttgagctctccttgcatcctggggtaaacccacttagttatggtgtttggtcattttattgtgctgttgaattcagttgcttgtat

SEQ ID NO: 225821 - DNA, 510 bp, Homo sapiens
cccacccactgcactctccctctcccaagttcacagatttctctgtgcagcaggatcgatgctgggggctggggaggggtggcacaagcactccctaagccatctaggctggtgtctcagcaggttgtaggtcccccacttcctcttccgtctactggctctgagcccagctcagcactaggacttgccttggaattgcagttcttgtggcctagactgtctctcaagttcacttaaggccccagagcactcccgcctgtggtgctgagacttgccagaactcaagccctgatgctgagatgggcgatgaccctctggctatggctaatccaaatgctttctcrggggcaccaactgaatatagcgggttccgctttctgtgacagggcagcaccgagttcaatgcagagcctcacaatcaccacactctccttcttccaggcacacaggttctccttactgtactctcctggaagaaggacagcacagggggtgagggaggggtggcat

SEQ ID NO: 225822 - DNA, 510 bp, Homo sapiens
cccacccactgcactctccctctcccaagttcacagatttctctgtgcagcaggatcgatgctgggggctggggaggggtggcacaagcactccctaagccatctaggctggtgtctcagcaggttgtaggtcccccacttcctcttccgtctactggctctgagcccagctcagcactaggacttgccttggaattgcagttcttgtggcctagactgtctctcaagttcacttaaggccccagagcactcccgcctgtggtgctgagacttgccagaactcaagccctgatgctgagatgggcgatgaccctctggctatggctaatccaaatgctttctcgggggcaccaactgaatatagcgggttccgctttctgtgacagggcagcaccgagttcaatgcagagcctcacaatcaccacrctctccttcttccaggcacacaggttctccttactgtactctcctggaagaaggacagcacagggggtgagggaggggtggcat

SEQ ID NO: 225823 - DNA, 590 bp, Homo sapiens
tggtttccatcaccataggctgctttgcctgcctggaactttatagaaagaaagcagagcatatactcttttgtgtctgactcctttcataaaacataataattttgatatttatatatcttgttacatgtagtaatccattctttttcattgctgaatagtattccatgatatgaatatggcacaatgtttatattcrttcatccattgtaataattggactgtttgcaagtttcggctatcattcataaagttgcaatgaacatgtctagcacaaatctatctgtggatgtatgtttttcatttttttaggtaaatacctaggagtggaattactggaatgtaggataggcacatgtttgactttgtaagaaactgttaaactgttttccaaagcggttgtgccgtttataccccccaccaacaatgtaggagattgaatagactctgtatcttcttgcctctgagtctttgttttcattgtttactaaacctggaaagccctatggctactgcctggctcttctcccttgagtcacctctattaagccacctaatatctgtaacaaatacacccaacatgcataatg

SEQ ID NO: 225824 - DNA, 569 bp, Homo sapiens
atggttacggatacaaaattacagctagatagaagaataagttctaatgttctatagcattgtaggataaccatagttaataatttattgtatatttttcamatagctagaagagaggattttgaatgttctcaacacagagaaatgatgtgtttgaggtgatgaatattctatttaccctgaattgatcattacatattgtacacatatatgaaaatgccactctgtacccaataaatatgtacaattatcacatgtctaaaaataaatacatggatgaataaatgtgattctaggccatgatgccatgcaatcatgaaccaggcacaaaactctcctggttgtgaggtcacgtcctcaacccagaccacacaagatcccctgaatagagaaagctccactgaagatgatctcagcttccaaaattatgaagaatattaggaaatggtttcccatgagagagaaccagtggatagaatacagagcgagatcagatccccaggcacttcagataataaatgtattacataaagactataagtaggtttaaaaatgattcaaagcataaa

SEQ ID NO: 225825 - DNA, 517 bp, Homo sapiens
atgtgagtactgctgttatgtaacttggctacgatttttttccttctgcgttttaagttagtgcaagctattgtggcctcaagattctttacacacagctgaggctgcagaaagtcacatgcgttagttagaatgtaggctaaatggctgtcacaaagacatggaagaatacagtggctcagaggaggctgattatttctcctcacggaacagtctaatttccctgcaggtcggtagccccaggaaggtaggtggcrctgttccataaactcgtctagcctccttctgctgtgctactccagtagcccctaaggttgtcctcttcctcattcttacatctgcgtcccagcccatgggaaaggcaagcagctactttaaaaagatgtgacccagaatttgcacacattactcctactcatgtccctcttcttggaaatcatcactcagtcacatggccccccttgagctacgtgggtgtctgggaaataccatctccagccaggcagccatcttcctt

SEQ ID NO: 225826 - DNA, 566 bp, Homo sapiens
tttctttcagagataaagctgaaattattgtgcatattataactgcaaagaaactgccagggagttttaatgactttcccagactcagtcagctagttcgtcgtgsagcaagactcttgcgaagctagtggtatccaggcagcctctctggaatagtaagctggcagtgggcgggctccagtggattagagcgcagacatatagtcaaggaggcaaccaaattagaccagagagccttttgcagccaggcaggtgtgagatgataataagacaactgggaatgaggcatgaaagagaaagcccttatgaagaggatcatgaggattctggcctgagagaagagggccccatcaacctaataggcagcctcttgaggccaggtggcagggagggcttctgggtaggaccagcttcaggaaagactcaatgattgaaggcgttttgctccccagggacctcgaggaaatcacttgatttttctgagcctcagcttcttcctgtgctaaataaagtgaattataacccctgaggacaaagtgttaagaggattaaatgagaagactgga

SEQ ID NO: 225827 - DNA, 566 bp, Homo sapiens
tttctttcagagataaagctgaaattattgtgcatattataactgcaaagaaactgccagggagttttaatgactttcccagactcagtcagctagttcgtcgtggagcaagactcttgcgaagctagtggtatccaggcagcctctctggaatagtaagctggcagtgggcgggcwccagtggattagagcgcagacatatagtcaaggaggcaaccaaattagaccagagagccttttgcagccaggcaggtgtgagatgataataagacaactgggaatgaggcatgaaagagaaagcccttatgaagaggatcatgaggattctggcctgagagaagagggccccatcaacctaataggcagcctcttgaggccaggtggcagggagggcttctgggtaggaccagcttcaggaaagactcaatgattgaaggcgttttgctccccagggacctcgaggaaatcacttgatttttctgagcctcagcttcttcctgtgctaaataaagtgaattataacccctgaggacaaagtgttaagaggattaaatgagaagactgga

SEQ ID NO: 225828 - DNA, 566 bp, Homo sapiens
tttctttcagagataaagctgaaattattgtgcatattataactgcaaagaaactgccagggagttttaatgactttcccagactcagtcagctagttcgtcgtggagcaagactcttgcgaagctagtggtatccaggcagcctctctggaatagtaagctggcagtgggcgggctcmagtggattagagcgcagacatatagtcaaggaggcaaccaaattagaccagagagccttttgcagccaggcaggtgtgagatgataataagacaactgggaatgaggcatgaaagagaaagcccttatgaagaggatcatgaggattctggcctgagagaagagggccccatcaacctaataggcagcctcttgaggccaggtggcagggagggcttctgggtaggaccagcttcaggaaagactcaatgattgaaggcgttttgctccccagggacctcgaggaaatcacttgatttttctgagcctcagcttcttcctgtgctaaataaagtgaattataacccctgaggacaaagtgttaagaggattaaatgagaagactgga

SEQ ID NO: 225829 - DNA, 566 bp, Homo sapiens
tttctttcagagataaagctgaaattattgtgcatattataactgcaaagaaactgccagggagttttaatgactttcccagactcagtcagctagttcgtcgtggagcaagactcttgcgaagctagtggtatccaggcagcctctctggaatagtaagctggcagtgggcgggctccagtggattagagcgcagacatatagtcaaggaggcaaccaaattagaccagagagccttttgcagccaggcaggtgtgagatgrtaataagacaactgggaatgaggcatgaaagagaaagcccttatgaagaggatcatgaggattctggcctgagagaagagggccccatcaacctaataggcagcctcttgaggccaggtggcagggagggcttctgggtaggaccagcttcaggaaagactcaatgattgaaggcgttttgctccccagggacctcgaggaaatcacttgatttttctgagcctcagcttcttcctgtgctaaataaagtgaattataacccctgaggacaaagtgttaagaggattaaatgagaagactgga

SEQ ID NO: 225830 - DNA, 635 bp, Homo sapiens
tgtttgtgttttgcaattctccaaatgttcttctgcttatggattcccctaaattcactttccaacagctcttcgtccccctggcctcatgctgcccttgaaagtggccggaggaaactcttaggtgtcaggcagtcagcatggagagcttcttttcatcccctgagtgtctggagatgtgagtttaatgagaggcatcgacctttgarttatacaaatggacctctttagcaatcacttccctccccagtccatacccaccctcagcttttaatcttctcaattatatttcctttccattgattactactttgctaactttcggattgagcaggcagaaaacctcagccgcacaggtaatgcaattgctcttcaagctttgacgcctgcgtctcacctcctgaggggacctgcaggcccccctcccacccttttgggtcttggcaggtccatcggccttcaattgattttgcaagatggccccttccatccaaagagctgtgcaatcctggttaggaagatggagtttcagttctgagctttaagtaacaaagataagggggatttgcatgctggcagggtgtgagaagggcactcacagtcaccagctgtttgcagctaggcctgggagtggg

SEQ ID NO: 225831 - DNA, 550 bp, Homo sapiens
ctctctgccttttgtcttcccagcctttctctttggctgtactttttggcctttctcagctgctggccaagtaattcatcatgagcatccaggaacaccttcacctattgactgagctgctttaagctacactggacccacagagatttcagggaggcaggattacaggaagatggacaggrcccagatgtagtggcactgaaattccatcatccatcaatcattcatccatccatgcacccatcatcatccatccatccattcatccacccacccatccacccacccgttcacccaagccttcatttaatcatatcattcattgctttttttttttcattcaaaaaacattcattgaacatgtactatatgccaggcattgggctaggcacttgagagagaatgatgaccaaatatagatgtgggccttgacctacggggctcagcagaagaggcagacataagtaatcacagataacaatgtaaaactccagtaagagctaaggagagatgtaggtaccagcagaccatctcattgggatttgaccta

SEQ ID NO: 225832 - DNA, 380 bp, Homo sapiens
gcactataccacacatactgcagtttattcactcattgaaggacacttgggctgtttccagatttcagctattactaataaggctgctataaatattcgtgtgtaggtgttgtgtgaatataagtttttgtttctctgggataaatgcccaaggatacaaattrtggatcatatggtatttttcaggtttggttatataagaaactgccaaactgttttcagggtggctgtaccattccatattcccagcaatgtaggagtgactcagtttctctgtatcatccccagcatttggtgttgtcactaattattattctgatagatgtatatgtagtgatatcccattatgatttaaatttgcatttccctaatgactaatg

SEQ ID NO: 225833 - DNA, 380 bp, Homo sapiens
gcactataccacacatactgcagtttattcactcattgaaggacacttgggctgtttccagatttcagctattactaataaggctgctataaatattcgtgtgtaggtgttgtgtgaatataagtttttgtttctctgggataaatgcccaaggatacaaattgtggrtcatatggtatttttcaggtttggttatataagaaactgccaaactgttttcagggtggctgtaccattccatattcccagcaatgtaggagtgactcagtttctctgtatcatccccagcatttggtgttgtcactaattattattctgatagatgtatatgtagtgatatcccattatgatttaaatttgcatttccctaatgactaatg

SEQ ID NO: 225834 - DNA, 380 bp, Homo sapiens
gcactataccacacatactgcagtttattcactcattgaaggacacttgggctgtttccagatttcagctattactaataaggctgctataaatattcgtgtgtaggtgttgtgtgaatataagtttttgtttctctgggataaatgcccaaggatacaaattgtggatcatatggtattttkcaggtttggttatataagaaactgccaaactgttttcagggtggctgtaccattccatattcccagcaatgtaggagtgactcagtttctctgtatcatccccagcatttggtgttgtcactaattattattctgatagatgtatatgtagtgatatcccattatgatttaaatttgcatttccctaatgactaatg

SEQ ID NO: 225835 - DNA, 565 bp, Homo sapiens
agaacagatggctgcttctctgcctccgcacggtgtcttacctttgagtatatgtcatagttttgaggaatatatgattactatcattaaagcagagtcctgggaacagaaagcctgggcagcaaacacgtgaacccacttgcaagactggctttccagccaacaggctggccctgcaggatgtgccggtgctgctggcctgcagtgcctggcttagggtaggggacattagagcagacacctggcctggtgaaggtcctggactggtgaaaggcaggacacctgggctgcagctccaccrccagcttagtgtggggctagagcagtcagctcacctctctggacctggctgtccctggctgcagcaagttgaaggcagggttgtgctggggttggtctctatgggttggaggcctggccgaggcagaaatggtggcatctgtattgttttttgcaccagcatctaatgtaattggaagagacgggcccagggaagcacactgcagtatcaggagtgtgctcacctgatggacacctgctggatcactggggccagggccagacc

SEQ ID NO: 225836 - DNA, 589 bp, Homo sapiens
ccaatctttgtagttttatctacctttggcctttgatgatggtgacgtacagatggggttttcgtgtggatgtcttttctgtttgttagttttccttctaacagtcaagaccctcagctgtaggtctgttggagtttgctggaggtccactccagaacctgtctgcctgaatatcaccagcggaggctgaagaacagcaaatattgcagaacagcaaatgttgctgcctgatccttcctctggaaacttcatctcagaggggcacmgagctgtatgaggtgtcagtcggcccctactaggagatgtctcccagttaggctgctcagggatcagggacccacttgaggaggtagtctgtccattctcagatctcaaactccgtgctgggagaaccactactgtcttcaaagctgtcagacagggacgtttaggtctgcagaagtttctgctgccttttgttctgaacaatttttaaaagtcaaagtagcagtttgtgactttaaaaccatttagcaaacctaatatctgacttgtgtaatttagaccaaatgtctaaattttgaagacaatttaattttactaataatct

SEQ ID NO: 225837 - DNA, 534 bp, Homo sapiens
gttgtaccatgttgtattcccaccagcaacatatgaatgatccagtgtctcagcatcttcatgagcatttgttattatcactatattttattttagctattataataggaatgtagtgatagtactttatggttttagttacattttcctaataactaatgaagttgaacatctttccatgtgcttgtcacttgtatattctttccagcaacatgtgtctttatatcttttgtccatgttctgattgttcacastttttaatgtcaagttttgagagtcctttatatattcttgagatgaatcctctgtcagatatgacacttgcaaatatttcccctattgtaacttgtcttttcatcttaacagagccttttgcagagaaacatttttcattttgaaaggttcaattttttttaaatcaattttttcatccatgcattgtgcttttcaggtcaaatctaagtactctttgcctagttctagtcacagattttctcctcttttttttctagaagttttataattttacacttt

SEQ ID NO: 225838 - DNA, 499 bp, Homo sapiens
gaattcattgtggatgatcaaagactattgaaacatgttgaaatgttgaaatgaatcaacagagatgttctaaatcatcaccagaatttaaattatgctatctttgtagagtatgttaaacattggaaaattacaaggtgaaacttaaagtcagtggtttgttattactaacaatttgttctcccagggtaatataatattagatgagcacatggctgtttagaacaaagactgcatttcccagcttcccttgcagctacacatgtttgtgtgactcacatcacaaagggcttcagaatatttcaacttcttggagcagtccttaagatccagcaaccttcaccctttgctgkcttcttcattcattgcttcctcttgctttccagcatgtggtgctgctaaaacctctaggcttgatttatgtgtgagagaaattaacttccacctacaagaagtagaaactatctcgaatttacttgtcacttgcagaagaacctaa

SEQ ID NO: 225839 - DNA, 548 bp, Homo sapiens
tagtagatttctctgaaaggtttccagagcttacttctaggctcaaggtaggccagaggtccaggtaggtgggatgcccagagtcaccaggaaattcctctgggtgggaggcatggcctggttctggtgctccactgtttcccaacactcratgaaaagcagtagaaaggctttttctcctttcaagaaaaagaggcagtggtgcatacacacatattcctcacttgtaggtattttatttttgaactttttcctctattattagcagtttttgatttttatgacaacagcctacatactgagaggtcaaatttcagtaactttcattagttagaaaggcggggaacaaaactaattgaacttgccccctgtaagaagttctgggccagtttaaaccagtcagtataaatcagaaggaggttcactgcatggatggagggaaagagagctcctaagctaacaagaaagggtcaccagcagacttagaaaaaggctggtcggttggcaggttttagagaggagcagagggaagcagcaggagatgcccg

SEQ ID NO: 225840 - DNA, 478 bp, Homo sapiens
ctttaacagcagagtagaagatagttttaattccacctacttcagcttctatagtatgtcttcaaattttgttcaaagcattataaatgctgttagatttactgataatccaaatataaaatttaacccacactgttttagtctagaaaacccacaaagttttagtagagtttactatttaacacctgaaaaacttttggttaataccacataatagcataaggtacccataagcacagttgagttcatatgctattacctcatttaaacttcatgtggtatatatcctttcagagggctgaagaatcactttaaattaaatcaatttccacacatagataagaacacttgtcttaggatatayttatgataaaatgctttgggatactgttaacaatgatacagattttaaaatacatttttttttttttttttttacttcttacattattttccaagtagaataatgtgttacttt

SEQ ID NO: 225841 - DNA, 537 bp, Homo sapiens
gcttgagtcaataaaaatattcctccttttgaaggaggataaccttagaggaggagcccagccagggtaaacaggcctgaaaaatgcagtgtcagacacaccacacgctcacagcatgtgcacgcgcrcacacacacacacacacacacacacacacacaactgcactgtgaaagccaggcattctctgggggaataggggaaaaaactgtttttctgagtcagaagcatggcagcttgctatgtaagagcttaaaatacccacaagcagaatctgaaaccttaaacaggccagccttacccagggagaccagatggctgtagttctccagcatcacctccctgtacagggtcctctgagcagaactcaatagcttccactccttctgggtgaaggccacagccacatcccggaaggccatcaatgcctgtaacacaaacacatccctgctcactcaacagccagccatgcccactaaccaacttaagccactaaccacagtcaaggcagaaagaagcagtcctagagcacccaagt

SEQ ID NO: 225842 - DNA, 586 bp, Homo sapiens
aacaagattgggggactgttagttttcaagtcttatgaacctccagtaatcaagactgcagggtactgatgtaaagacaaatagatcaaaggaacagaataaagagttcagagactgactaatatatggacaattgatttttgacaaagatgcaaaagtagaccaggcayggtggctcacacccataatcccagcactctgggaggccaagatgggtggataacgaggtcaggagttcgagaccagcctggccaacatggtaaaaccctgtctctattaaaaatacaaaaattagccaggtgtggtggcgtgcgcctgtaatcccagctactcaggaggctgaggcaggagaatcgcttgaacctgggaagtggaggttgcagtgagccgagattgcgccactgcactctagcatgggcgatgggacaagacgccatctcaaaaaaaaaaaaaaaaaaagatgtaaaagctattcaatgaataaaaacatatttttcagcaaatgaacaactgttcataaacaaataatttccatccttattttgcaccatataaaaatgtaatcaaaattaaacacaaacccaat

SEQ ID NO: 225843 - DNA, 586 bp, Homo sapiens
aacaagattgggggactgttagttttcaagtcttatgaacctccagtaatcaagactgcagggtactgatgtaaagacaaatagatcaaaggaacagaataaagagttcagagactgactaatatatggacaattgatttttgacaaagatgcaaaagtagaccaggcatggtggctcacacccataatcccagcactctgggaggccaagatgggtggataacgaggtcaggagttcgagaccagcctggccaacatggtaaaaccctgtctctattaaaaatacaaaaattagccaggtgtggtggcrtgcgcctgtaatcccagctactcaggaggctgaggcaggagaatcgcttgaacctgggaagtggaggttgcagtgagccgagattgcgccactgcactctagcatgggcgatgggacaagacgccatctcaaaaaaaaaaaaaaaaaaagatgtaaaagctattcaatgaataaaaacatatttttcagcaaatgaacaactgttcataaacaaataatttccatccttattttgcaccatataaaaatgtaatcaaaattaaacacaaacccaat

SEQ ID NO: 225844 - DNA, 485 bp, Homo sapiens
tagggctggttattgctggaaatcataaacaaagtgaccatttaagtataagaatcatctgtatatctagcctagccaacgtggtgaaacatcgtctctactaaaaatacaaaaattagctgggcgtggggcatggtggcacacacctgtaatccyagctacttgggaggctgaggcaggagaatggcttgaacccgggaggtggaggttgcagtgaccaagatcgcgccattgcaccccagcctgggcaaactctgtctcaaaaaaaaaaaaaaaaaaaaagaaacatctgaatttgacttttaaaattatgactatatatcataattcaatcaataaatatgttaaatgatttttttctatgaaggataaagtaatattttccctaaaaccaatcataagaagaaaagtacttcctttagtgcaaagttataacataggccagtggttctcaaagtgtggcatagggaaccctggagaatccc

SEQ ID NO: 225845 - DNA, 485 bp, Homo sapiens
tagggctggttattgctggaaatcataaacaaagtgaccatttaagtataagaatcatctgtatatctagcctagccaacgtggtgaaacatcgtctctactaaaaatacaaaaattagctgggcgtggggcatggtggcacacacctgtaatcctagctacttgggaggctgaggcaggagaatggcttgaaccmgggaggtggaggttgcagtgaccaagatcgcgccattgcaccccagcctgggcaaactctgtctcaaaaaaaaaaaaaaaaaaaaagaaacatctgaatttgacttttaaaattatgactatatatcataattcaatcaataaatatgttaaatgatttttttctatgaaggataaagtaatattttccctaaaaccaatcataagaagaaaagtacttcctttagtgcaaagttataacataggccagtggttctcaaagtgtggcatagggaaccctggagaatccc

SEQ ID NO: 225846 - DNA, 450 bp, Homo sapiens
attatcattactactatttaactctgctgactctaaaaatgtacaaattatttgcagagtccaatggatttattactatagtgagctctgctttatccaatttttacaaataagaattaagttgagtgtttaaggtctttcgttacagtgcagataataaaataaattcaaagagcattgacttccatgaacctgctgtaatgtatatactatttgatggcaaagcayactaataataataaggtcatcatacataagaagaaaaagctctgaaaatatactttttaaaataccacaccctaattatgtgctacagaaaaattaattccagactaattaaagtgtaaaataaatgaaagcatgtaatattgagatcaaatgcagatttactatctgattttaggatagcaaaacctaaaagtaaaggaattaaaaaaaacaaaataatta

SEQ ID NO: 225847 - DNA, 450 bp, Homo sapiens
attatcattactactatttaactctgctgactctaaaaatgtacaaattatttgcagagtccaatggatttattactatagtgagctctgctttatccaatttttacaaataagaattaagttgagtgtttaaggtctttcgttacagtgcagataataaaataaattcaaagagcattgacttccatgaacctgctgtaatgtatatactatttgatggcaaagcacactaataataataaggtcatcatacataagaagaaaaagctctgaaaatatactttttaaaataccacaccctaattatgtgctacagaaaaattaattccagactaattaaagtgtaaaataaatgaaagcatgtaatattgagatcaaatgcagatttactatctgattttaggatagcraaacctaaaagtaaaggaattaaaaaaaacaaaataatta

SEQ ID NO: 225848 - DNA, 533 bp, Homo sapiens
tagacctaactctttcatcatttcactcccagtttcccaaaggttcaaatagcatcttgtgtttatttttatcataacccttgtagcaacaagaatcttttatatattgcatttttacaatacaatttaaattcttccaccaacaccatactaaaactatacaatgttaattattgctctgttttagctatcatttctttgtgttggttttcttgaccaactttcccttggaattctcttttttctgagaccaaacactattcatgggtttaaacaaaagttcaaatagcatcttgtgtttatgtctaccataacccttatagcaacaagagttaacacttactgagtcccagctatgtgacaggcataactcttgacatacattatttcacttaatcttcaactagtctrtaagataattttgttggtgatgatgtcattttgtttgctcattcaacaaatgaggatgtggaaactcagcaagttaatttgtttacctacaataagttagttaataaacagcaaagacagag

SEQ ID NO: 225849 - DNA, 499 bp, Homo sapiens
tttgtttttgtttttgagacagggtttcactcctgtcacccaggctggagtgcaatggtgcgatcttggctcactgcaacctctgcctcctgggcttaagtgatcctcctccctcagcctcctgagtcgctgggactacaggcacattccatcacgcctggccattttctgtattttttgtggagactgggtcttactatgttgcccagcctggtcttgaactcctgagctcaagtgatccaccctccttggctttccaaagtgctgggattacaggtgtgagtcacgacacccagccaaaacctacctttaaataccattrtaacaataaaaataaaaaagagtttcctgaataactaaatgacaacatggtgtaatgtaaaataggcctcttaaatttcaaatttagtgatacggtaatgctttcagcaaaactgattgatctagctctcccactaaagtaaacagagacctaggtgctgcggaagggattttaata

SEQ ID NO: 225850 - DNA, 564 bp, Homo sapiens
atctctttgatatagttctgtttacacacgtgttcagaactagctggaatcacatctcatatttgtgattctttcagaaataaaaaatgttcatgccctgaaacagctcctttttatwcctgacagaacagtttggtctctgtaaattcaggaagttatcgagtgcgcccgccaggaggtaggggattttgctaatcttttaagtcagataatattttctctcagatataaataaaatccttagtttacagtatgtcatctagtgtggcaaaggaagaatagatccaaatgatacagtggcctttagaaaatcaaaacaccataccttcctttaagaagcactggattcatctactttgccatagctttctttaatcagatgaatgtaacaagttgattaggctttacaagcgtcaagaaaagtcagaaccacttaaactgaaaaataggactcaggatgtaaattattcacagttcattagactaagacaagcatttctcaaacatttctgtatgcttgagaaaagcgacatattgaaccctattttactgtgaggctcaaaa

SEQ ID NO: 225851 - DNA, 575 bp, Homo sapiens
gaaccaccaggcccagctcaggtcgttgtaacagaggaaactgataagttaagacatagaccatgaaggagcattgaattgagtcatgaaagttctgaattgaagtctagcacatacacataagtcccttggtattgggtctactttattgctgaggggattttgtttcactggcctatgagagtgatagagcagtatagtgggaaaggcactgaactctaccaccagcctaagctacccgtgggactctagacaacagtctcaaactctccagactaattttcttcattgcaaatgaggaggttggaccaagtgatctttaaggtttttttggcttgaaatttctgtgctctttttcttcattttgaactccaycactttataaatagaactaatgagaggctgcccttgccctatctcaatactgaatagagaaaacagtaagtcacatgaccaaattgagccaatcacctagttaggtagtgatatcttccatttaatgaggctttcttggagatagaattctggttataaaaccacaagtgtgttgatttgtgacagaagccacaagagga

SEQ ID NO: 225852 - DNA, 547 bp, Homo sapiens
ctttgttgatcattatacccttatgttatcatatttttcaaagggcatcatgttattcataatatatgagtatactttttatttgaaatagacacaacataacatctttgcagatggtgacctaaaatttgtaaatatgttctgctttgctaaggcagtaatgagtgtacagagggaaccatcaagggtgcgggaacattttcaggacatctggggcccatcagcatcaaatcatttaacagagtgcaaacaatttaacactgagagcctctcaattatctacttgcaaataaataaatgataaagtatacatctttaccccgtaagcaaaagagtacacttctgggttgccttcccaaatttggcatcattagtatggtgaatgttcaaaaaatgcacrcaaaatttaacactcatttgtgcaaaatatgagttagataaatatgtcacatatgtataaacacctctaaaaacattgcagtaagtcaagcagaagttcactataggtgactcatcagattgggttgctcatactattgttttacca

SEQ ID NO: 225853 - DNA, 417 bp, Homo sapiens
tgaaactcactttctcatatcatagtatgattagcttcatttcaatattcaggcttggctcaaatataaagtcaacagagatgcattttyccattttttttcattacatactcatcaatatctgaaattattcatttacctgcttattttctgtgttcttaactagaataaaactgccatcaggaaaaggaatatgtctgtgatagttttcactataattccaggactcataagagtgactgacacatggtagatgtttattaagtatttgtaaacagacggatggatggaaggatggatggatggaaggatggatggacggatggatggatgaataaatcagactctactttttcatgtttttttctgtgatgctcaaaatagccttacagtgtattgcaaatattattgccagct

SEQ ID NO: 225854 - DNA, 574 bp, Homo sapiens
gtgtcattatttgcttaatatctaccttctccactaatgtgcttctgaggtgaaggattgttaatattgctcatcaatttacaatcagcacataagacgtttcgtagcccagcagagtgtttgttaaactaatcaagtgtattagtccactctcacactgctataaagaactacttgagactgggtattttayacagaaaagaggtttaattgactcacaattctgcaggccgtacatggctggggatgcctcaggaaacttacaatatggtgaaaggcaaagcaggagccagcacttcatacacggcagaagcaggaggaagagagagagctaggggaggtgctatacacttttgaactctatcatgagacagtagggctaaaccattagaaatcatacccatgatccaatcacctcccaccaggccccacctccaacatttgggattaccattgaacatgaaatttgggtgggaacagagagccaaatcatatcaccatgcttatgactgagttatttattcacagttgagaagaattttaggcatcattttcactgtaggaaaaaaaaaat

SEQ ID NO: 225855 - DNA, 349 bp, Homo sapiens
agggtggggaaagatggagataactgaatcatgtgggtggttttccccatactgccttcttggtagtgaatatgtctcataagatctaatggttttataagtggaagttcccttgaataagctcccttgcctgctgccatataagacgtgtctttgctcttcctctgccttccaccatgattgtgaggcctccagccacgtggaattgtgagttcattaaactgcttctctttataaattacccactctctgtatgtctttatgagcakcctgagaatggactaatacaaggtatttaactcattaaggttataatgtttgaatatggtatactatagtgatattgttc

SEQ ID NO: 225856 - DNA, 485 bp, Homo sapiens
agtctgctatggctaggtcagggcatttgttgagaaaaatatagggtcctcatatatagaataaagaaagaaaactctgacctagtgttttctctcaccttctctcctatctactaagtcaatgactagggttataagtgtcaacataacctctttgtataaatcctcaacctgataaaagaacaaactaactatatctcaaattacctacagaatccaaccaatatgtactggcagaagcaagagagtattcatggaattacaccaagtggagagaatataatggtgaataaggaactatttattgatttgaaagcacactcatagaattcaggatggaaccccctgctgagtactctagaagatgataaaacacattgctaagatggctcctggaagtacagaaacataatartgcacattttggtgttggagaaatgctgaaattgccatgacgcatggtggagtaagggataaaaggcttg

SEQ ID NO: 225857 - DNA, 572 bp, Homo sapiens
  misc_feature (1)...(572): n = A,T,C or G
agagtatagtactagcatataaacagatacttagaccaatggaacagaataaagaacccagacataaatccacacatttacagccaattcattctcaacaaaggcaccaaaaacatatattggggaaaagatagtttctttaataaacggtgctaggaaagctaaatattccataagcagaagaatgaaactagatcattatctctcactatacaaaaagggattaaagactgacatgtaagtttgaaactttgaaactatgagattactagacaaaaacaaggggaaaatgctccaggaaatcggtatgggtaaggatatttttgggaaagacctcaaaaacacgggcaacaaaagtaaaaatagacaaatagaattgtatcaaagtacaacatttcttaatggcaaaggaaacagagtgaagagtctgtccattgaatgggagaaaatatttgcaaactacccttctgacaaaagattaacaaccagaatataagggactytaataactgaatagcaaaaacaaactgaacaacctgattaaaaatgggcaaaacactgannnnnnnnnn

SEQ ID NO: 225858 - DNA, 482 bp, Homo sapiens
aggtggcagagttggaacaagaatccgtgtagaataatgtaaattaatgaccattatattattgagatgaattatacatgtttatatgcaaatgatcttcagagagtgacagaatatgaaaaaaaacagcaaaatatgcttgccatttcaaaaatgaaatgctttattttactttatgccttcttaatacaaattgacatggacccctcaaaagtgttagctcatgtctaggaaataccagagtttaaaagtttaatggatcttccaaagctcactacagtttatgattccattaattatttccgctagacatatcartgtgacattctgacagacattagtatcacttttaagatttattgtagatgtaaagcatcattctcaccatgaaacaatgaaactgtagattctaacaaaatattatttacttacattgaattaacaaagttgacagtacagtaatgttgaataaacataacaat

SEQ ID NO: 225859 - DNA, 522 bp, Homo sapiens
gaattcaacctaatatttccagttactgagcacaaacctagaaactttataattgttacctcacttaaayataaaaacaagacaaaacaaaacaaccctacaatataaataatattttactaaagaaagtcaagtacttttggttctaaattcaaaatgtgatgggaatcttcagttagattaccgtaatattctcctattatttgcttttctgtatcttctttttcctttctctttttttttttttcttttttttttgagacagtgtctcgctctgtcacccaggttggagtgcagtggcccgatctcgtctcactgcaagctccgcctcccaggttcacgtcattctcctgcctcaggggaatgtaggtgcccgccaccacgcccagctaattttttgtatttttagtaaagacaaggtttcaccatgttagccaggatggtctcgatctcctgtccttgtgatctgcccacctcggcctcccaaagtgctgggattacaggtgtgagccaccgcgccgg

SEQ ID NO: 225860 - DNA, 545 bp, Homo sapiens
gggccaacgccagttgatacacatttgtaggcatttgtttctctcacatcatgcctgtttcagtcattcaataagacatttgcattcatgataaatattatcccataataccctaagtatttgttttaagaaaaaaatagcaagaaagaaagggatatataatgaaagaaatgaagggaaagacagaaaaaaggaagcaaagatgataaaaggaagaaaagagggaggagggacataactgcccttttgctttccctaaaagagaaaaaaaaatctcaaaaatatgtatttaagtaaaacaatattctataataattgttttgatatccttttagtataatttgttttactcctagctaatatttttaataacttgyagtgttttaatctttgctattattttgtactttttgctatcattttgctgttatttctgtaaggtgtagcttttgtcactttgaacagcagtggctataactaacacaaaataacctgagtgtaattgtaccagatattagaaatttaaaaataaaactagaaagaat

SEQ ID NO: 225861 - DNA, 594 bp, Homo sapiens
ctccaaaatccaaataggcccaataggcattgtgcctctttcttggttgtaggaggggccaaatgcagcaacttaccctttcttagaaggagtatttccacaggccccacaccaatggatccctagaaattttactgaggtagaagctccctgaatcttaatcgtatttatttcccatcctcctgcacacacatgtctcaccagtaagtccagtgtgtttgctacttcttgctcattggatgtaatctgcataatttcatcgatgtaatggaccagtgtgatattttcygaagtgaaaaggtgtcaagttctctctgaataatgttatgacagtaagctagagagttgatatatccctgaggtaggacagtgaaggaatattgctggccttgccagctgaaggcaaattgcttctggtgggccttatggacaggaatggagaaaaaggcatttgccaagtcaatggcttccatttggcctttcccaccataatagccctcaccgtaacagtcagtgagccaatgtgggggttctgccagctgctaagtatgtctatgccaattatgcattctggcactggggaaatgatcacag

SEQ ID NO: 225862 - DNA, 483 bp, Homo sapiens
aaactaaaaaaattattcaataatgaccttgtgcaagcaatgaaattaaggtggaaataaaaacaatttacaagacaaatgaaaacagagacacaatatatacaaccctctggattacagcaaaagcaagttctaagagaaaaaaattatagaattaaatgcctatattaaaaaagataggaatatcttaagtgaacaacctaatgtcatatctgaaggaactagaatatcaagaataatccaaaccctaagctagccgaagaaaataacaaagaggggaggagarctaaatgagagtgagatgacaaaatgcatgcgaagcatcgatgaaacaaaaagttggttcctagaaaggataaacaaaattgacagacttctagttagattaaataagaaaaaaagagagaagattcaaatacatattatcagaaatgacaaaggtgacattacaatggataccacagaaatacaaaagatcatcag

SEQ ID NO: 225863 - DNA, 610 bp, Homo sapiens
aaataaaaacaatttacaagacaaatgaaaacagagacacaatatatacaaccctctggattacagcaaaagcaagttctaagagaaaaaaattatagaattaaatgcctatattaaaaaagataggaatatcttaagtgaacaacctaatgtcatatctgaaggaactagaatatcaagaataatccaaaccctaagctagccgaagaaaataacaaagaggggaggagaactaaatgagagtgagatgacaaaatgcatgcgaagcatcgatgaaacaaaaagttggttcctagaaaggataaacaaaattgacagacttctagttagattaaataagaaaaaaagagagaagattcaaatacatatwatcagaaatgacaaaggtgacattacaatggataccacagaaatacaaaagatcatcagcatctactatgaacctctatgcacacaagctaaaattctagaggaaattaataaattcctgaaaacatacaccttcctaaaactgaaccaggaagaaataggaatctcaaacagaccaataaagagtaatgaaattgaatcagtagccaaaaagaaaaaggacatctaggaccagtgatat

SEQ ID NO: 225864 - DNA, 610 bp, Homo sapiens
aaataaaaacaatttacaagacaaatgaaaacagagacacaatatatacaaccctctggattacagcaaaagcaagttctaagagaaaaaaattatagaattaaatgcctatattaaaaaagataggaatatcttaagtgaacaacctaatgtcatatctgaaggaactagaatatcaagaataatccaaaccctaagctagccgaagaaaataacaaagaggggaggagaactaaatgagagtgagatgacaaaatgcatgcgaagcatcgatgaaacaaaaagttggttcctagaaaggataaacaaaattgacagacttctagttagattaaataagaaaaaaagagagaagattcaaatacatattatcagaaatgacaaaggtgacattacaayggataccacagaaatacaaaagatcatcagcatctactatgaacctctatgcacacaagctaaaattctagaggaaattaataaattcctgaaaacatacaccttcctaaaactgaaccaggaagaaataggaatctcaaacagaccaataaagagtaatgaaattgaatcagtagccaaaaagaaaaaggacatctaggaccagtgatat

SEQ ID NO: 225865 - DNA, 565 bp, Homo sapiens
tgcatgaccccagtatgaagcctggcataccaccatttctagaaaccagccctcagctgggcacaatggctcatgtttgtaatcccagaattttgcagggccaaggtgggaggatcacttgaggttaggagtttgagatcagcttaggcaacacagtaagaccccatttctgcaaagaaaaagttaaccaattagctggacatggtggtgcatgcctgtggtcctagctwctcaggagactgaggctggaggatcatttgagcccaggaattaaaggttacagtgagctacaattgtgccactgcactgcaattgtctctaaaacaaaacaaaacaaaaagaacaagaagaaaccagccctctccaggctaggatgttactcccacccacacagacccccagaacctcacaaagcacacctctgctcttccaccagtcccactgtagcaagtttccatttcctgtccatcaaaccgtgttacatcttcaccctcatctgttctaagaataaaactaatgattttttcccccttatccaccctcccaatagaaaaaccataccgtt

SEQ ID NO: 225866 - DNA, 389 bp, Homo sapiens
agcacaggtgtttgggggtacagggactgaaaggtgaagcccattccattccagtaatagaataagctgtgaggaggacccaaagtcttgttctttaaaatggcccccaagatgtatgtttctccatgatgcactgtcctgaatcccgcagcctgtgtcagaaaacctgcctgctagtggacacgagagcgtgaaaggtcaagcacgatgctctcctgcagacacctctttcagtgcatggaaacagaccactgagccaagagagcttgaggctctggagacggtttttagaytaaaatctctcatcaggagatgagcaaatgcaatcagaaataaactccaagtgcccagcacaagccccttcctttcttagtggctgaggctgcacc

SEQ ID NO: 225867 - DNA, 389 bp, Homo sapiens
agcacaggtgtttgggggtacagggactgaaaggtgaagcccattccattccagtaatagaataagctgtgaggaggacccaaagtcttgttctttaaaatggcccccaagatgtatgtttctccatgatgcactgtcctgaatcccgcagcctgtgtcagaaaacctgcctgctagtggacacgagagcgtgaaaggtcaagcacgatgctctcctgcagacacctctttcagtgcatggaaacagaccactgagccaagagagcttgaggctctggagacggtttttagactaaaatctstcatcaggagatgagcaaatgcaatcagaaataaactccaagtgcccagcacaagccccttcctttcttagtggctgaggctgcacc

SEQ ID NO: 225868 - DNA, 583 bp, Homo sapiens
ggaagtacaatattttactgaatatttttaaggctgtaatctttaaagagaagtaaaagcaaatactgaagttgcctttagatgggygtgcgaacctgctttaggagaaggggtaaaactgtgtgcctgggagaggctgagggaggtcactgtcatagcatgtcatgtaacatggtcatgtcatggtacacatcacaccacaccatggtacatatgacatcgggccatggtacatgccatgtcatgtcatggtacacgggcggtggctggaggagacctgaaggatctatgagtgaaccattgggatgctgacaccccacagtgatatcactggaacaaatgaatcaggccctggtggaccctggtaagactggagacgaaggggcctttctgatcacctggtcttcatgtaatgaaatgttagatgactcctgtagaatactcaaggtcacaaagcttgtggcgtggaagtgccaggctgaaaatccacatgctctgactctccccaggacaactcccacattcctgatcagcctgagcacaagagaaccggggccactgttgtaaacttgtcctggattga

SEQ ID NO: 225869 - DNA, 583 bp, Homo sapiens
ggaagtacaatattttactgaatatttttaaggctgtaatctttaaagagaagtaaaagcaaatactgaagttgcctttagatgggcgtgcgaacctgctttaggagaaggggtaaaactgtgtgcctgggagaggctgagggaggtcactgtcatagcatgtcatgtaacatggtcatgtcatggtacacatcacaccacaccatggtacatatgacatcgggccatggtacatgccatgtcatgtcatggtacacgggcggtggctggaggagacctgaaggatctatgagtgaaccattgggatgctgacaccccacagtgatatcactggaacaartgaatcaggccctggtggaccctggtaagactggagacgaaggggcctttctgatcacctggtcttcatgtaatgaaatgttagatgactcctgtagaatactcaaggtcacaaagcttgtggcgtggaagtgccaggctgaaaatccacatgctctgactctccccaggacaactcccacattcctgatcagcctgagcacaagagaaccggggccactgttgtaaacttgtcctggattga

SEQ ID NO: 225870 - DNA, 636 bp, Homo sapiens
cctttgggcctatgaaaccttcccagactccctcagcccctggctcctcatttcctgtaaytcctgtgcagtgcatcacttgtgattctttaggtgcactctcgctcatgcatttctgagctgctgaaggaggctcttcgctacccaaagcacactggccccgtaactgtgttcagctcacttttgtgcccagagccatcagctacttcataattaccatggatactcttctgctctttccacatgaatcaccttgatttctagttgcctttttggataccaataagtaacacttatacccaactcactaagtgcctgagaggaatgtcgccccctccttcctcagtcaagtatcctcactggagcatgatctacagtcccgccgtctattcctgccttgcctatatccctgtgaatgcaattcttggttaactcttgtttagtgagaaggaagcttgttcattatcttcagtacactgctccttcacactttcaaaaaaagcacttaaaagtccctcattttagaggcttgatctgttttaaacataaggactggatgctggtatggccacagctctagcctgtctagaatagggaccgaggtggggggactgctggaacgtgtcaagtggttac

SEQ ID NO: 225871 - DNA, 636 bp, Homo sapiens
cctttgggcctatgaaaccttcccagactccctcagcccctggctcctcatttcctgtaattcctgtgcagtgcatcacttgtgattctttaggtgcactctcgctcatgcatttctgagctgctgaaggaggctcttcgctacccaaagcacactggccccgtaactgtgttcagctcacttttgtgcccagagccatcagctacttcataattaccatggayactcttctgctctttccacatgaatcaccttgatttctagttgcctttttggataccaataagtaacacttatacccaactcactaagtgcctgagaggaatgtcgccccctccttcctcagtcaagtatcctcactggagcatgatctacagtcccgccgtctattcctgccttgcctatatccctgtgaatgcaattcttggttaactcttgtttagtgagaaggaagcttgttcattatcttcagtacactgctccttcacactttcaaaaaaagcacttaaaagtccctcattttagaggcttgatctgttttaaacataaggactggatgctggtatggccacagctctagcctgtctagaatagggaccgaggtggggggactgctggaacgtgtcaagtggttac

SEQ ID NO: 225872 - DNA, 636 bp, Homo sapiens
cctttgggcctatgaaaccttcccagactccctcagcccctggctcctcatttcctgtaattcctgtgcagtgcatcacttgtgattctttaggtgcactctcgctcatgcatttctgagctgctgaaggaggctcttcgctacccaaagcacactggccccgtaactgtgttcagctcacttttgtgcccagagccatcagctacttcataattaccatggatactcttctgctctttccacatgaatcaccttgatttctagttgcctttttggataccaataagtaacacttatacccaactcactaagtgcctgagaggaatgtcgccccctccttcctcagtcaagtatcctcactggagcatgatctacagtcccgccgtctattcctgccttgcctatatccctgtgaatgcaattcttggttaactcttgtttagtgagaaggaagcttgttcattatcttcagtayactgctccttcacactttcaaaaaaagcacttaaaagtccctcattttagaggcttgatctgttttaaacataaggactggatgctggtatggccacagctctagcctgtctagaatagggaccgaggtggggggactgctggaacgtgtcaagtggttac

SEQ ID NO: 225873 - DNA, 636 bp, Homo sapiens
cctttgggcctatgaaaccttcccagactccctcagcccctggctcctcatttcctgtaattcctgtgcagtgcatcacttgtgattctttaggtgcactctcgctcatgcatttctgagctgctgaaggaggctcttcgctacccaaagcacactggccccgtaactgtgttcagctcacttttgtgcccagagccatcagctacttcataattaccatggatactcttctgctctttccacatgaatcaccttgatttctagttgcctttttggataccaataagtaacacttatacccaactcactaagtgcctgagaggaatgtcgccccctccttcctcagtcaagtatcctcactggagcatgatctacagtcccgccgtctattcctgccttgcctatatccctgtgaatgcaattcttggttaactcttgtttagtgagaaggaagcttgttcattatcttcagtacactgctccttcacactttcaaaaaaagcacttraaagtccctcattttagaggcttgatctgttttaaacataaggactggatgctggtatggccacagctctagcctgtctagaatagggaccgaggtggggggactgctggaacgtgtcaagtggttac

SEQ ID NO: 225874 - DNA, 298 bp, Homo sapiens
gtgggcttctttcacttagcataattcatctgagattagtctattatacaggcttgttaaactcaaaaaaaggtttattagatgctattggtgcccagcccacatcctgtyggtatttgctattctagtagagtccagtgacttctcctagcaaacacttgaatgtcttctgcctgagggtctctctggctacaagagtgggatcagcccacacatagggcagaggggaagtggcaagcagttaatgcccagtgaagcccacagtgatggatgaacagtgatggataaatgtcctggc

SEQ ID NO: 225875 - DNA, 542 bp, Homo sapiens
gtgtataaatattcacactaactgggataataaagactataaatagcctcatgtcagttcaggccagcatttgctgccaagtaagtctccccgcyctgtgcccccaaaaagaatttctggatttcagagccatttggatatgaaaatggtagcttagggattgtggacctgtatgaattttataccatctagagactgtaaatgaacagagacaaaacataggaaggaaccagaaggatgaggtcagtgaatttaacgctgatcttataaataagaaatggaggtgacaggcccaatgtcgctctgctggtcattggtggagctaaggtcagacaaggatctcctaccctcagcccagctcctccagcaggagttaacaggaacctccagacccagagtccatgaagctgagccgccacctccttcctagttccctgaaaaggtgagccctgcctttgggaatgcctccttatggctagtacaccgtgtgtggtgtgccctgccgtgggctggttctgttttctctgggagaggtatctgca

SEQ ID NO: 225876 - DNA, 506 bp, Homo sapiens
ttcttttctattgcagccctggctcctgccacatggaacagtttgaacaatctattccagccttagataggctgtgttcctcccccagaaggtgtagaagctgctggcagtgcctacccatgccctcaggccatgccacatcagggagcatgaactcactttggctgccagcacctgtgtctcttctcctgagctcacctcacccacatgcagatgtggccgtccaggggtatccaaattgtgtgcaacagtggatgataacacatgtggctaccccctcaccccttagaggaataactcaggcattgccccagagtctgcagcactggagccttagtcrcccacggtggtcacatgatcagtcctggtctttataccattacttcccgggatcacctcccaaatcaaatgtttatcttcaacattcttgttgtagggctgcttctgggaaaaccccactgaccactaaagctccaattaaccttaggttgggttctgggagaagc

SEQ ID NO: 225877 - DNA, 511 bp, Homo sapiens
ggaatcttcttttctattgcagccctggctcctgccacatggaacagtttgaacaatctattccagccttagataggctgtgttcctcccccagaaggtgtagaagctgctggcagtgcctacccatgccctcaggccatgccacatcagggagcatgaactcactttggctgccagcacctgtgtctcttctcctgagctcacctcacccacatgcagatgtggccgtccaggggtatccaaattgtgtgcaacagtggatgataacacatgtggctaccccctcaccccttagaggaataactcaggcattgccccagagtctgcagcactggagccttagtcgcccacrgtggtcacatgatcagtcctggtctttataccattacttcccgggatcacctcccaaatcaaatgtttatcttcaacattcttgttgtagggctgcttctgggaaaaccccactgaccactaaagctccaattaaccttaggttgggttctgggagaag

SEQ ID NO: 225878 - DNA, 511 bp, Homo sapiens
ggaatcttcttttctattgcagccctggctcctgccacatggaacagtttgaacaatctattccagccttagataggctgtgttcctcccccagaaggtgtagaagctgctggcagtgcctacccatgccctcaggccatgccacatcagggagcatgaactcactttggctgccagcacctgtgtctcttctcctgagctcacctcacccacatgcagatgtggccgtccaggggtatccaaattgtgtgcaacagtggatgataacacatgtggctaccccctcaccccttagaggaataactcaggcattgccccagagtctgcagcactggagccttagtcgcccacggtggtcacatgatcartcctggtctttataccattacttcccgggatcacctcccaaatcaaatgtttatcttcaacattcttgttgtagggctgcttctgggaaaaccccactgaccactaaagctccaattaaccttaggttgggttctgggagaag

SEQ ID NO: 225879 - DNA, 506 bp, Homo sapiens
ttcttttctattgcagccctggctcctgccacatggaacagtttgaacaatctattccagccttagataggctgtgttcctcccccagaaggtgtagaagctgctggcagtgcctacccatgccctcaggccatgccacatcagggagcatgaactcactttggctgccagcacctgtgtctcttctcctgagctcacctcacccacatgcagatgtggccgtccaggggtatccaaattgtgtgcaacagtggatgataacacatgtggctaccccctcaccccttagaggaataactcaggcattgccccagagtctgcagcactggagccttagtcgcccacggtggtcacatgatcagtcctggtctttataccattacttcccgggatcacctsccaaatcaaatgtttatcttcaacattcttgttgtagggctgcttctgggaaaaccccactgaccactaaagctccaattaaccttaggttgggttctgggagaagc

SEQ ID NO: 225880 - DNA, 531 bp, Homo sapiens
acagagaaaataaaggaaaaaataagatagtgtagatgatataaataaaacaaagacaaaatattagttgcttttgaagctgggtgaagtgcatatgggaagttctttttattatactgttatatttgagatgatctatactaaaaagtaaaacaccaacaaaacaacctgttcaagacacagtttcacagatcacgatttaattgatctgagatggaacccagccaactattagggtttttttttgtattgtattgttttgttatgtattgttttgtttgaacggagtctcgctctgtcgcgcaggctggagtgcagtgacgccatctgggctcactgcaagctccgcctcccgggttcacgccactctcctgcctcagcctcccgagtagctgagactaccggcgcccgccacgatgcccggctaattttttgtatttttagtagagacggggtttcaccktgttagccaggatggtgtccctgtcctgacctcgtgatctgcccgccttggcctcccaaagtgctggg

SEQ ID NO: 225881 - DNA, 567 bp, Homo sapiens
gaaagtcaaatactctgtgtgatgtgtgatgaaaaggtaaaaaaacagcattgaaattagggaatcgatgctttagttttaaaaaacattgatttacctaggaaagctatggcaacaattcaaataatgaggagaacaaacaaaacataaataaaaacagtactactgaacttaagttctatgtgcttgcatgcctgtgtttgtttatactgaataagctatagtaaaatattagccccctcaaaccttacagttaattcaacctattttatcagttacccatttataatcagttgatgacattgcaacattttaaaattatagagaaataatttataaaaattgaagtgatacttttgcagcagaaagtttaaagttgaaaggttttgatgtattgactacacacctgatattttgtataggccctaattttaattttaaccagaatagaatagctatatttttaaatgtttattttatatayacaaaagcaaagtcaggaggtaactatgtagagaatgcgcactcgtaggccaagcatggtgcctcatgtttgtaatcacagca

SEQ ID NO: 225882 - DNA, 607 bp, Homo sapiens
ttggttatcatcaccttggctttcttctgttcctaatgtgtatctcattctttcttaatgagataaccttttaacctacttgtccatttgcatgaaataatctttgcttatattctatctttcatgagattgtgtggttcacctattcagagtgaaattaccttctctattcctgtttcccaggctgggtccatttttgtttgtttgtttgtttttgttattgttttagctcacagaatctttttcttttttaggtcacttaattcaattttaattgtgaatgtatgtgtatgattatktaactaatgcctgttttctctactaaaatctaagatctgtgagagcaagcactcttctattttcgttcttggtctatgcttactacagaacctggaaagcaatagacacctaactaaagtctgtacaattatttagccaaagcataagtcatgaatgggagaccaagtccagaaatgatgagggataaggggatttgaagctgttttttacattgatgcaaaacataaaaaaatacagagttatctgaatagtgtttcctgtccttgaaaaagcaagcataatgatctctattagtctattttatccc

SEQ ID NO: 225883 - DNA, 599 bp, Homo sapiens
ttaccctacttgcaatctaacaagttattcttcaacagtttcatcaattctggaaaaagatgtgagattcctgtgtcagagaaaatggacagtttattactcacataacagtggtggccaggttatcagcatttgtgttggttcttccagtctcattccccactgaccaaggcagagccagctgacacctgcatatgtgtggattgcattatagaaaaggaagaacctattattttagaataattttataattatttttatgatggcaaaacacatctgccattttggtctaggtatagatgtcatctttgtcttccaaggctttaagcagacccttagctctgaagggatactaactctgtcttccaaagttactcactatataaacttatacttaagaaaattaactagaatggacagttgttgtctctgtttgcaagatgtstggaaacataagagacattgaaaattgtctctcaacatctataggcctcaaaatatccacttctgcactaaagcataatgagtgagaaaggagactcaattaaaataatgtttcttgagataggcaagagccagattgtaaaagagcttataca

SEQ ID NO: 225884 - DNA, 525 bp, Homo sapiens
gagaccctgtctcaaacaaacagcaaaaaaagatagcacaaaagggtgattacagtcaccaccgatttattttacatttaaaaaatactggaagaatataactggaatgtttgtaacacaaaacaaatgataaatgcttgaggtgatggacaccccatttaccctgatgtgcttactacacattgtatgtatatatcaacatatctcacgtgccccataaatatatacgtgtatatactcataaaattttgaaagaaagaaatatttgtaaattatgttttcatcaactgtatctaatgaacacaattaaaaaacaaactccctaagcctatgaaccccaatgaaccccaatcctcctacaaatgtaagtctgccttcaaagtgttactgaatcattatgaaagatttattcccagtatatatcccaaagtaaattcaatgtctattgactcgtaygtttcctcttgttgttactaatcttaagactcaacactgtcgtctaatatgtggctcaagctgcaaacc

SEQ ID NO: 225885 - DNA, 672 bp, Homo sapiens
tctatacttaatttatgggaagctgttatcatgaaaggatttgggtgtttttaatcaaattttttttctgcatctgttgagatgatcatatacgcttactgcactttttttctgtkaatatggtggatcaaatttaaaaacttacctgtaactgttagatttactattatcaaaaggatgaaagataacaaaagttggtgaggatgtggaaaaaggtagcccatgctgactgttggtgatattgtaaattagtacactcattttagaaaatagtatggagggtcctcaaaaaattaagaagagaattactatatgatctagccataccacttctggatatatatctaaaggaattaaaatacatatatcaaagagatatctgtgtcccatggtcattgcagcactctttacaatagccaaaatatggaaacaattgaattgcccatcaagggataagtagatttttgaaatgtggtgtttatacacaatggaatcctattcaggcttgaaaatccagtctatcacttgtgacctggataaatctagaggacattatgctaagtgaggtaagccaggcacaaaataaaaaatactacatgatttcacttatatctggaacctcaaaagaatttaactcaagaagttgagagtagaatgaaaattaccagaagc

SEQ ID NO: 225886 - DNA, 556 bp, Homo sapiens
tataaaacgttataatatgaataatttcgttttactattacatgttatgtaaatgtctgttgacttattcctttgaataatggcaactcacattctgaaatatttgataatgacagtcctcaaataaatagcaattttgacactcgaattagaacaatgaaataggccataacatagaagaatacattcattgacttaaaacccatcatcatgtattaatatgtctgagamagttaaaagctaatcaaatgcaattttaatatcaaagaatgtgtctgatgttaaagccaaaataataacacagtgaataaaataattaaaaaggaaataaaacaacaattagatactgcaaaatagcacagtttctgacaatgcagaaatgatgacccagtctaatcactgtattaaacctagaataatagttcagaaagtcgttttatacggttttgcagagtagatatttgcatattatattggaaattgaagcatagaattgaactctattagttcatttaccctcacttgttctaataaaatgtttctttacaaaccactt

SEQ ID NO: 225887 - DNA, 502 bp, Homo sapiens
aaacatatgtaattactagcatttacaataataaagctttccttttacaaagaatgaaggtaaaatttattgaaaaatcacaagacgtgcatgttatgaggctgtataaaatatttttgatatcactttaaaaattagaaaagaygtaccatttatgtctaagtcaatattcatttctgtatatttaaacatgcacagaaaataatattctgatagataaaaaattggtggctatcattaggatagaagaaggatggggacattcttatattaaggccttgtttaggaataaaaatattttaaaataaaataaaagtcatatggtcaaccatgttctactttacttccccttgtgtcatcaaattcagtacatagttatattttattcgatatttaaattttcatttttatcatcaagcatttttatttgaaatggaattatgataaacagttataggcacatgactttgagggttttagttttagttttgttttttaaatg

SEQ ID NO: 225888 - DNA, 555 bp, Homo sapiens
gtacctacacatttatagatataaagagacaggatatccacccttgtcatcttcttcagaakttgagactttattttttcctattttgagaaaggaagatctctaggtcaaaatgtaagtttcatgggaggtaagaaacatttcattaccctttgaaagggaccgcatggccccaccataaaggaatcctagctataggctctagagctaggctgtgtctcccagttcctgactgtcttattttccttatcttatcaggccactcacttgcagcatctttttacctaagaatcttggtgtttgtttcacggcacattaacagtggataaagggactagttctactgtgtcttcaagggaattgctagtaccttaattttcataagaacttggtaaacatttgttggttgtatgaataatatcggttatgtttgcaatggtagaccagaagacgtaatatagtccctcttatacttccattttctctcaaatcacacaatctatctcaaataacacatttattcattatgtcttcagacaaaatgtcctcatagtc

SEQ ID NO: 225889 - DNA, 555 bp, Homo sapiens
gtacctacacatttatagatataaagagacaggatatccacccttgtcatcttcttcagaagttgagactttattttttcctattttgagaaaggaagatctctaggtcaaaatgtaagtttcatgggaggtaagaaacatttcattaccctttgaaagggaccgcatggccccaccataaaggaatcctagctataggctctagagctaggctgtgtctcccagttcctgactgtcttattttccttatcttatcaggccactcacttgcagcatctttttacctaagaatcttggtgtttgtttcacggcacattaacagtggataaagggactagttctactgtgtcttcaagggaattgctagtaccttaattttcataagaacttggtaaacatttgttggttgtatgaataatatcggttatgtttgcaatggtagaccagaagacgtaatatagtccctcttatacttccattttctctcaaatcacacaatctrtctcaaataacacatttattcattatgtcttcagacaaaatgtcctcatagtc

SEQ ID NO: 225890 - DNA, 565 bp, Homo sapiens
gaaaaccaaaaacatggtgtgacttgttgtattctaatattgcctttattgtggtggtctggaacaaaacccacaatatctctgaggtgtgcctatatttgatcagaatgattggggataatttgtggagtgctgaaaattcagagagccactgtgtaccatagagaacagctggaaagcaacatgatgaaagtggcacttcataaagattaatctgggggtggtgtatacataataaaagattctgaaaatgcaaaggcagggaaaccagaaggtaatttccataatgcaagttggaagtttggtacgcaggtggtgactttggaaccagaggagagagggcaagtcttcatgatgcttcatagaaacaattagaactgrtgacagctcgtttttaaccgagtaaggttagaacttgttatcaatgtctctgtctccctgattttcaacctcgttggtcagaagatggtgagcattgtaatagaactgaggaatatccactgagatccagttttaaagataaagagaccagccataagcaggcattttgaacttgaaaggatag

SEQ ID NO: 225891 - DNA, 491 bp, Homo sapiens
caatttagaagaaaccagatataatttatagctatgagagaaaaacaatatatgcagcagtttaccaaatgagtacctggcaaaagataagacaacataatttgccaaaagagttactttcctttatgtgacaggagacagttcatygtcatattgcttcaaaaagacactgacattttctttatgaaaaaatgtttttttttcttaaacatggattttacctgaaactttcttttacatgtcatttgtcctgaacaatgcagaagtagttgctggggccaaacacagtatgatactgatcaatcaatggcatttttgactaatgatgtaaagcgcatttctgacacatttccagttgtttccattttatataatagcatcatgtgcattcagcataagaacagctgctcattaaatttgctatcaatctttcgttaggtacacttaaagatgttgaggaaattacatctgtaatgatgtaatctcccaat

SEQ ID NO: 225892 - DNA, 630 bp, Homo sapiens
atataccttagaacgctaaacatttacaacattaacaggattgatagaatactgttaatgacaggtaagtttagcaggatatgcaaatgaaagatttggggacaagatctcctccccttctagagtccatattcataaacctttgggaatttcatttacctaaataggtccttcttcaccatatcaaagtatctggtgtcagcctgcgtgacagggcatgaatgatggaaagcagccccagagtgggtctacctaacataacaggtcccatgaatggaaatcagctgagggaagcacagaacttgctgctgctgccattgctcattcactacttcatttcttactcaaactctaaacttcactccagattatcataaycagttccaccaaaaagcttaccacacgggtgttctgggaaattattagaaacaagaggctgtgagtccactgtataccagggctgcgtctgtgcaactgacttcatactaggctctttgtgtctgtacttgggttgtagttgtttttagagccacggactcatgttctctggtaaggagttttcatggccaagcccatctgccatgccctggaaaatataagaacagagaccttagccatggtccaaattgc

SEQ ID NO: 225893 - DNA, 597 bp, Homo sapiens
tttcttaatttgtaataatacgatcattagtgtaaacatttgtctctcattagactgtacacttcaaaaaatggtaaactatgtcaacttttgcttattctaacttctcaagatcaagaacagtgatggctaaatactaggatctcactaaatatttactgaataaatgaatgcatgaattttagacatcattaagtaaagaataaatggaaatttgtttccatgtgttcacagtactcaaaaattttaatttgttatttaatatctggtagaccaattttagtatttgtaatggtatatatatatatatatatacatgtatatatatatatatatactgttaaagtatgagactatgaggtgggaagaatcatctttgtaattggtacacacacacctatatatatatatagatagatatacacacacacacatataaacacaccaattggcatatatatatatatayacacacacacacatacaatatatacatatacatatatatatataccaattggtatatacacacacactgcaattggtgtatgtgtgtgtgtgtgtgggtatatatatatataccaattacaaatatta

SEQ ID NO: 225894 - DNA, 466 bp, Homo sapiens
tatgggataaccacccagctactttgagattgttgaaatgtctgctttctgatttccctgtccaggctgtctctgtcagattagagcaattaaatgataatgaggactgtacatagggaaaattaattctggggactgtaattagcatcctccctatgggaaacttatacatgtgtgtaagcactgaggaaaaccctgaaatatctgctagtataataaaaagaggcagttttgagatagaatgctggattaatttattatgaaccggaagcatgttgttgtaagagagacaaattcgattcctttaatgtgacttsgacattacatgcttgccttccttgcttactttgaatgtgatcaagttcaaaactagatacaagggggaggagagacaggcatttaactggatttctcaaagtgtattttctatgcaattctctagtttgtgtttgtgatattaaccaga

SEQ ID NO: 225895 - DNA, 621 bp, Homo sapiens
agccagtatcacccagatagcaaacccaggaaaaaacataacaaccaaaaaataaaactatagacaaatatccctggtgaacatagatgcaaaagtcctagctaaccaaatccaacatcatgttaaaaagataatcctccatgatcaagtgggtttcatagcagggatggtttaacattcacaagtcaataaatgtgatacaccacataaacagaatcaaaaacaaaaatcacatgatcaactcaatagatgcagaaaaagcatttgacaaaatccagcatcccattatgattaaaaccctcagcaaaattggcataaaagrgacataccttaaggtaataaaagccatctatgacaaacccacagccaacattatattgaatgtgaaaaactgaaagcattccttctgagaactggaacaagacaaggatgcccactttcaccagttctattcaacatagtactggaagtcctagccacagcaatcaaacaagagaaagaaagagcatctaaactggtaaagaagaagtcaaactgtcactgtttggtgatgacatgatcatatacctagaaaaccctaaagactcatccaaaaagctcctaaaactggtaaacgaattc

SEQ ID NO: 225896 - DNA, 559 bp, Homo sapiens
aaactaacccatccagtatgaaacactgtaaacttttcggtgcaatgaaaccctgtcaatgatactgtagggggcttgactgaaggttggcaccaaaaagagtcaaggtgtgaacaaaacaaagttytcatcaattgataattttaatgaattggcagatcaaaacagagctatagagtactagtttgcttcctgtctatctgaatgtcccttctaaatttcttttgctggcttcgtgtcctctactcacctgttaaatgttgggatttcctctcttctatcctcattctacattcttttccttcaaagtcttctctacccccatctcttcaactgtaacatctctgtggatgacttctatatctataccattagcttctaaacaaaaacaaaacaaaaaaatcaaataactaacagataattctcagcatggctacactttaacctacttgaatcttctccctcttctcctccttcacctccctctttcatatcccatctctttaagtgaaatcatcctcctcttaaatcatctaaactaaatatcccagtcatcctc

SEQ ID NO: 225897 - DNA, 561 bp, Homo sapiens
cagctggggagggcccgagacccgagtccagcagctagaggacacaatagaaaatacacaaaacaagagaaacccaggaaactctctaaacatgggccctgccactccttgcaccgggtcacctctgtgccatctccacaggcgtctgctcgccctgactagagacaggaaccaggagtgcccactgggtgagccacgaccttgagctcagtacaagcaggaagttcctgcttcattcaatccgractgacttcaggtaaatacaggggtcccaattgtgggccgaatcgtccagatgctcagggcggccagcctcagcctaagggaagcccagcatctcttttagttcaacagacagcagcttttcttcttctttggatggctgcactctcaagagttttgtttgaattttttttttttccccatgacaaattaagtcaagattttgtaaggggaaacttcttactcctccccatggtccctaccctccctgcaagaatccagaagcactgttgactgttacagattcccttttgtaaatgctacaatgcaatgaaacaa

SEQ ID NO: 225898 - DNA, 561 bp, Homo sapiens
cagctggggagggcccgagacccgagtccagcagctagaggacacaatagaaaatacacaaaacaagagaaacccaggaaactctctaaacatgggccctgccactccttgcaccgggtcacctctgtgccatctccacaggcgtctgctcgccctgactagagacaggaaccaggagtgcccactgggtgagccacgaccttgagctcagtacaagcaggaagttcctgcttcattcaatccgaactgacttcaggtaaatacaggggtcccaattgtgggccgaatcgtccagatgctcagggcggccagcctcagcctaagggaagcccagcatctcttttagttcaacagacagcagcttttcttcttctttggatggckgcactctcaagagttttgtttgaattttttttttttccccatgacaaattaagtcaagattttgtaaggggaaacttcttactcctccccatggtccctaccctccctgcaagaatccagaagcactgttgactgttacagattcccttttgtaaatgctacaatgcaatgaaacaa

SEQ ID NO: 225899 - DNA, 375 bp, Homo sapiens
tctttacttagttgtccttttcaaattgttacacattcaaaaattaaaacaatataaaatatatatattgagaagtctcattctcaccagatttctccccaagaaaacacacaagtatgttttcctgtgtgtcttaccagtatttcttcgtgcggcaaataactcaaaayctttataaatacaaacaaaacacatccatatgtgtcaaccaccaagtaccggcctccacagctgcttgttcgatgcaaagcttttctgagccagctgcttatgatagcattagtctgaatttgttgaatgcctactatgtgcgggggcagtatactaatcattttccatttactaaatcatttaatcttcaaaatgatccagata

SEQ ID NO: 225900 - DNA, 609 bp, Homo sapiens
agactggcctagctttccagcctacatctttctcccatgctggatgcttcctgccctgcaacatcagactcccagttattcagttttgggactcagactgactctccttgctcctcagccggcagagggcctattgttggaccttgtgatsgtgtgaattaatacttaataaactcctcactatggatatatatctcctattagttttgtccctctagagaaccctgactaatacagatttctgtaccaggagtggttccagaggaacagaatattaaaaatgaagttctttcgttggttttggggttcctggagttggctgcttaatatgattagaccccaaaacgctaaggattctacttctaacaatatggagaacaccaatagtccttggcataaactgtttagaaagttatgcaaaataaatacatttgacactcctgattcaccgcttgtaagaggcaaggagtttagtgactctatacataatacctttgaccatatgtggagaaccaaggaacataatgaagttggttggttgctcctaagttcattgaacaaagtgatgaaaaaaatgatgaacccagggattctgtctcctggcttcag

SEQ ID NO: 225901 - DNA, 612 bp, Homo sapiens
tggcaccactcaccatcacccctagtgatccattagcaaaatttttgcttcctgttcctgagacattacattctgctctcctagaggtcttatttccagaggaagaaacactgccaccaggactcacaacaaygattccattaaactggaagattgccacagggacactctgggctcctcctacctttaagtcaacaagctaagaatggagttacagtgttgactggggtgactgacccagactatcaagatgaaatcagtctattactccacaacgaaggtaaggaagagtatgcatggattacaggagatccgttagggcatctcttagtattaccatgccctgtgattaaagtctatgggaaactataagccctgtgattaaagtcaatgagaaactacaatagcccaatccaggcaggactacaaatggtccagacccctcaggaatgaaggtttgggtcactccaccagggaaaaaaccatgacctgctgaggtgcttgctgaaggccaaggaaatacagaatgggtagtagaagaaggtagtcatcataccagctacgaccacatgaccagtggcagaaatgaggactgcaactgtcatgaatatt

SEQ ID NO: 225902 - DNA, 483 bp, Homo sapiens
acttattcaatatagtactggaagtcccagccagagcaattacacaagagaaagaaataaagagtatctaattggaaaggaagaagtcaagctgtcctggttttcagatgacacgatcttgtatttcaaaaaacataaagactttagcaaacaarctatttgaactgatacacgaattcagtaaagttgcaggatacaaaatcaacatatgataatctgtagcatttctatatgtcgaaagcaaacaatctaaaaatgaaatcgagaaagcaatcccatttacaatacctacaaaagaaaccccgggaatctgccttttaaaatatatatatatatatatgatacatgtgtagttttgttacacagatacactgcacagtggtgaggtctgggattttagtgtagccatcgcctaaatactgtaacctgtacccattaagtaaattctaattccttactctcctcccaatcttccacccttcc

SEQ ID NO: 225903 - DNA, 478 bp, Homo sapiens
atagtactggaagtcccagccagagcaattacacaagagaaagaaataaagagtatctaattggaaaggaagaagtcaagctgtcctggttttcagatgacacgatcttgtatttcaaaaaacataaagactttagcaaacaagctatttgaactgatacacgaattcagtaaagttgcaggatacaaaatcaacatatgataatctgtagcatttctatatgtcgaaagcaaacaatctaaaaatgaaatcgagaaagcaatcccatttacaatacctacaaaagaaaccccgggaatctgccttttaaaatatatatatatatatatgatacatgtgtagttttgttacacagatacactgcacagtggtgaggtctgggattttagtgtagccatcgcctaaatactgtaacctgtacccaktaagtaaattctaattccttactctcctcccaatcttccacccttccacatat

SEQ ID NO: 225904 - DNA, 404 bp, Homo sapiens
ttttgttgcctctttatagctttcctatatatttaccacccatttctctcctctcttttcaggtaaaactccataaaacaattgtatctattgctgcctacaatttctcttctctcacaaattccaattgctccaagaaaacagctttcagtgaggtcaccaatgaccccacactgccaaacccaaaggtcagctctcagtcttcctttcccttagaactccagcaccatttgacatagttgattgctctattttattttaaataattttttatttaaaagaaacatatgcccctgattctctttccacctcttgtgttcagtcttcctttctacttcttcctcccttagaagtctcaggcttctaaaygttatgttccagggttgagccacactcacctgtca

SEQ ID NO: 225905 - DNA, 580 bp, Homo sapiens
ctgtgtcttcttgagcaatcaaaccctgttgtctgtcaccatcagaatgaacttaacataccaaaaatggaatgtagctcaatgctataggacagcaggtattcaaatcaacagtacctagtttttgtattactgtattaatacacacttgctcatatattttcttatcattgttgcataatggttagagtacggcctctgacttccctaagaatgtaacacatgtaacaattgtcataggraaaatatcttatcttctacattgaagtggcaccatagaagtatttcatttactcttcaactcctaatcctctcctaagcctctctgaagatgagactatttaatcattacaacaaatttattaacagattctaaagttacagaggcatatgtgcttttaattttttaaagttttgatctaaaatatttaatgagaatgtttgaaaaagtcaaacaattaaaaggtatataattaaaaggagcaatgtgtgaacaggtttaatatcaagaccgcatagagtcacctagctatgacattatggaattttctaccctctgctagtcaccactacagatctg

SEQ ID NO: 225906 - DNA, 575 bp, Homo sapiens
tcctgtgtcttcttgagcaatcaaaccctgttgtctgtcaccatcagaatgaacttaacataccaaaaatggaatgtagctcaatgctataggacagcaggtattcaaatcaacagtacctagtttttgtattactgtattaatacacacttgctcatatattttcttatcattgttgcataatggttagagtacggcctctgacttccctaagaatgtaacacatgtaacaattgtcataggaaaaatatcttatcttctacattgaagtggcaccatagaartatttcatttactcttcaactcctaatcctctcctaagcctctctgaagatgagactatttaatcattacaacaaatttattaacagattctaaagttacagaggcatatgtgcttttaattttttaaagttttgatctaaaatatttaatgagaatgtttgaaaaagtcaaacaattaaaaggtatataattaaaaggagcaatgtgtgaacaggtttaatatcaagaccgcatagagtcacctagctatgacattatggaattttctaccctctgctagtcaccactac

SEQ ID NO: 225907 - DNA, 607 bp, Homo sapiens
agactttcatccaggtactcaatagtggtcacaacaatgagggaaagacacttttgtactgagtgagctgagccgggtcctgcgactaaagaaccgcctgtctcatcaggccaatggcacccccattgagaaacgctgcttttgaggaaagatggaacaagttgttggtcactggggggagtcccaccttgactgatgacatgcttgtgtcattgaagactgaatggcccagagttttggaaaacaaactgctataaactatcttgtgagagctatgggtccaggcagtgctctggagaaagtgaacatacaaataggctgttgggccctgtgtccacygcaggtttttcttggagcaggcctgcctgagggtgtgtggaagcctccatgaatgaggctggaagcctatgggtcaaagccctccaagaaaccagaaggagctttcagctgctctccaagaagcatttcttttaagcttaagcctccaacagtaccttgttcaagtttgcctcacctagtcagatgccatcgccagggccacagggtctttgaggcttggtagcagccaccagcaatggcaccattagaggatagcgtgcccagcagg

SEQ ID NO: 225908 - DNA, 324 bp, Homo sapiens
tatcctttctgagccaacacatttttctaaatttaaaaatagtaataaataaaaatagaaaattagattgattctttttacttaaatgaatttatgttttaataacttaattcaactgaggctgtaagtctgacaaactatatactacgttgctgtcatggatactgtgggtgtcagctatatccccattcaggacctggtctcccagctgctgggactgctgctggcccacagatgtcagaggtcarccctctctgggaattgccctctgctactgcctcatccaaagtcagattccctccccaggggcatccagcacccaaa

SEQ ID NO: 225909 - DNA, 418 bp, Homo sapiens
ttatggcacccagtactctaggattctggtactggaataataacaaggtttgaatgtgtgggtttmtaaacaacttttggccaaccacactagaaaatttgagcaatctttctatcctctctatggaaaataatattacaaaaaaagtttttacataaagtggtgatcaaagatttggcaacaaaaaatgttgagataaagtgttatagagatgtatcaagcagttaattaaatctttttctggatttggttatttgttagctttttacaatttgtaatttgctgtgattgatttcttttttcactattttcattatttacataagaaccccaatttcatacctacttttgaattcataattgtatattatttttcttaaaaggggatccccaaattgcagtccccacaagatcggat

SEQ ID NO: 225910 - DNA, 607 bp, Homo sapiens
tttctacttagatctatgatctgttttgactcaatttttgtatatggtgtaagattacattgagattcttcttttttccttcagtacatggatatccaattgttttaatattgcttgttgaaaaaaaccctattctttcttcattgcctcggcagtgttgaaaatcaatgaaccttacaggtgtgggtctgtttttggactctgtatcctgttccattgatctacatatctattcttttgccagtgtcaacactgtcttaattacagcagcttacagtaagtcttaaaattgtgtggtgtgacttctccagctttattcttctcttataaaattattctagctattctaattctatggtctttccatacaaattttgcaattaccttcactatagctacacaaagttctgctgggattttgaatagaactgcattacatttaaaggtcagtttagggagaattgacatcgttcctatattgagtcttttaatccataaacatttttttgcctccatttatttatgtcttttttkattttttttattagagtttgttgggtttcaatgtagagatcttccatatgttttgatagttttatacctaaat

SEQ ID NO: 225911 - DNA, 626 bp, Homo sapiens
tttcagtctctttccaagaagatctgatgtcgttcgcagtcatttgggtgcattactgtcttttgtgaaactcaattataatcactttttttatttcctggaagccatatctttcccatttgttgtgtcacagtcttagccttctgggttctacaaagaaagatatgaaaacatcctccaaccygactctgaataactgtgagatttcaggaggttttcttagtcgttggtctttgataagcacagctttgagaggattaaatcttagctgctattcttccttcttctgagattgcttattgtcttcatagtcataactccaattacatcacactccgcagtgctcaaagcacttatgggcttttctcagcaggtcttatggtcctgctcctgaagagtagaaagcaatgtcactgagtaggtacagagctaataaatgaagagctaggatttcaatccaggtatgaattgaagtgcagtattctttccactctgactcccatacaccatcattttgaataagagtgtcagatggagggagccctgtttgaattgctgacagttagtaaagaatctagggtaaccccacatgaatggtgatgcctggattcaccacagtgaaggag

SEQ ID NO: 225912 - DNA, 419 bp, Homo sapiens
gaattcatttatcaaatctagcaatctttcagagaagtctttaggattttctaggtataagatcatatcattggcaaacagtgatagtttgactttctcttttccaatttggataaaagcaaggatttttgtcagttttgtttgcagcaatatttctagaatccagatagtacttggcatacaagagcactatagcatatttggcacacaaaatatcttttgaatkaatgaatgaatgaaaaagtgctttagatgcttaacgtctttccttctggatagcatattgtgatggtgtgaaaaatgaggcatgtatccattgctctctctctctctgccaccatgctactggacagtttcatctcctacatagtatgattttagaaattcagcaccatcttctccccagtacatgtcaccat

SEQ ID NO: 225913 - DNA, 578 bp, Homo sapiens
agaagaagtttaatgctgtgaattggtaacaccagcatttaaaggacagaggaagaagactagatactttgtttcctcataaatcataaatgtaccactccatgaactttcacaaagtgaatatgcccaaataacagcatctagatcaagaaagaggccattatcagcaccctacttgccccatttcaagtaatacacatccccaagggtaaccactgcactaatttctaacaatatagatcagtttgcctgattttgaacgtgacataaatgkaattccacagtaaatgctcttttgtgtccagcttctttgactcagcattgttttaatttatccatgttaattcccattgcaataaagaattctagtctgtggcagacacaccctgaaggcccacaatgagccatggccccttccctcaagtgaggaaagacctgtgacctgtctctaaccaacaggatatgtcaaagaagataaagtgtcattcccatcctgctggccttgaagaagccaccagctctgctgtaaattccccaaggagaaggccatgtggcagggaactgcaggctgccagtaa

SEQ ID NO: 225914 - DNA, 391 bp, Homo sapiens
gaattcaattgttttagattccacatataagtgagaacatgtggtttttgtctttctcagactcacttactttacccagtttaatgttctccaggtccatccatgctcctgcagatgaaaaaattttcttcctttttgtggctgaataatattcyattgcatatataatatggtttggctgtgttcctacccaaatctcatcttgaattgtagctcccacaattcccatgtcatgggagggaccaagtgggaggtaactgaatcagggggcgggtcttaccccatactgttctcttggtagtgaataagtctcacaagatctgatggttttataagtggtttccctttctgcttggctttcactctcgctttgcctgctgccatgtaaggc

SEQ ID NO: 225915 - DNA, 583 bp, Homo sapiens
ggaaattgtggcacatgctacaacatgaatgaaccttaaggaggttatgtgaaatacaccatagtcaaactcattgaaacagaaagtagaatgatgtttgctaggggcttggaggagaaaaaagtggaaagttgttgtttaatgagtaatagaggttcagttttgtgagatgaatagttctagagactggttgcacgacaatgcgaaggtatttaatatattactgaacggtacaacaaaaaacatatcaaacttctcattgggtctgtcggagaaagtcacattaaaaacagcaagctgaagtcaagccagaaaaggtcataggttttcagaaagcttatcacaagcaaaactttgctataaaagtgaaaatcagataatctcatctcaaatatttcaattacaaaggattaaattattgagctcyctgttttttcctttcttgaaataggaaatgttctaagaaataaaacccttaaaacataacaatgatcctggctgagttgtggcaatttcaccaggatttctgtgaaggacttgaattaacttattacttcccattgcatgtcaaagttcaggttta

SEQ ID NO: 225916 - DNA, 456 bp, Homo sapiens
cagggattatttgcagagttgtgtctccaacattttcatggagaccataagaaatatctcatgaggactcaccagtctgtgctctcaactataagtggtgcctctgggcatgatggtcccaccaaagtgtagccaccacctgctgaakttgacctccgctgatcacccaaaccctttgtgtaccaaaggtggctctgacttcctgatcttcatattctgaagccaggccatgttctttgccaacatgacataaatctctttaccagttgtattagtctgttttcacactgctgataaagacatacctgacactgggtaatttataaaggaaacaggtttaatggactcacaattccacatgactggggaggcctcacagtcatggaggaagatgaaggaagggtaaagggacgtcttacgtggctgctggcaaagacagaatttgcacagggaaac

SEQ ID NO: 225917 - DNA, 578 bp, Homo sapiens
gcatcactgcaggaaccgtgtagaatttgtcatttaattcatttgccttctcctctttycgagcccacctttgtcaaactgtcaagtgtctatgcctggatatgttaattaatgtgttattttctagggaatgacttttactcaataacttttcttccgtggcctctttaaagaccacttcttggtttctctaaaatctctagctactttgttagtatttactgcaaacaaaattatcttgtaaaatggagagatcaagtcaaattggtttcatctagttctaaattcccccttacccctatgttcaacccatcaatacaattctctaatgcaatttagggaatggtccctgtgcccagctccttatttttaaaattaacatcttcaagtatttagcctgcttgccttccctttttaattttgcctcatcaaatatatgctttcagaagcagtcccacattagagcctaaagtataaagaaaaaaaagaaccccatatacatatatcaaaataccttcttatagtttgggccaagtggagaagtcaataacagctctatattttttaaaaatatgact

SEQ ID NO: 225918 - DNA, 543 bp, Homo sapiens
aattctaaattagctagttgaacaagttagttctttgtgcctgatcttctttgaattcatctgtaaaatggacatattttgtcactttcattagggaattattatgaagattaaatgagatgtaaaaattaaatgcatggaaaggccttagaaaaattcctgactcataatagatgaaagtattaggcatcaatattttatcaacagaaattaacatgaaaaaaagggcaaactatttgrgtacaaccttattaaggtgcttatactagcattaatattttttctgtgaaatgaaattgttctaattatatgtaatataattttacattatatattttccataatattatttcactcagttttttgttactgcaaagccttgaattttataaaagccacataacattccatctggttgatatatactatgatatttagattgtttcagtttatcattgtaaatattataaatttctttgtcagaatgactttttacttctcatgatttgtttctttagagtaaattcccagaagtggtattac

SEQ ID NO: 225919 - DNA, 608 bp, Homo sapiens
aatgaacttaatagttgattatttcattaactttgacacaatcctgtaaggtagggcaattgtaattccttctgtaggttttcatattcttagtttattaggagaggaaccgtcaggacttagaaataaaaataaagacttggtagttggtatttggcaggagaaacaattctgagtaatcaactgggaattaacagatgcagaatctwagcacattaaaaataaaaattctaaaagattcactgtagagccagatgatattttatctattgtctgatatgttttcaatattctaaaacataacatcgtgatataaaaggacttctcattaaagatgacaaaggagaaagaataacaatgacatgccaggattctgctatctgatagttctgaagagcactttccataatattaatgtacttttgttgttgtgagaagaatctaatattgatttttgaaatgagacatttctttattgtggaatttagagtgtagtttaaagaattttttccatggaaagaaacccttcattgcacttgatttgagggtttctttaattattattattgtggatgaaaaacctttcaaataggcagacctcatgtaag

SEQ ID NO: 225920 - DNA, 656 bp, Homo sapiens
ctgcccacctctggggcagggcatagctgaacaaaaggcagcagaaacttctgcagacttaaatgtccctgtctgacagctctgaagagagcagtggttctcccagcatggcgtttgaactcagagaatggacagactgcctccttaagtgggtctgtgacccctgtgtagcctaactgggagacacctcccagtagtggccaactgccacttcacacaggtgkgtgcccctctgggacaaagcttccagaggaaggatcaggcagcaatatttgctgttctgcaatatttgctgttctgcagcctctgctgatgatacccaggcaaacagggtctacagtggacctccagcaaattccaacggacctgcagctgaggtacctgactcttagaaggaaaactaacaaacagaaaggaatagcatcaacatcaacaaaaaggacatccacaccaaaagcccacaggtcaccagcatcaaagaccaaaggtagataaaaccacaaagatggggagaaaccagaggagaaagctgaaaattctaaaaaccagagcacctcttctcctccaaaggatcacagctcctcgccagcaacagaacaaagctggacagagaatgactttgatgagctgacagaagtaggcttcagaaggtcggt

SEQ ID NO: 225921 - DNA, 489 bp, Homo sapiens
tgcccttctgctgccaataaataactcatggtggctgcgtaaacccagaggcaaagtactagtgagtgtagacatgcaatttgacttgttgctatctgggggaaagaccagsaaggagtggcatcccctggaggtcaggaggagggggtttaatgcctgcctgcagctcaagcctgggcgggagtgatactaaccatcacaccacaatgccccatcgtttgttccaccccaattcctttcccaaaggtcctgatccccttgcttcctctccagggggcagaaagcctctgatatctcaagctttccttttcctggaaagtggggagacaatacgtgtcgggggtggggggagttacacacgcacccgcaactggcggggagagacagcgtggtcggtgtagatgcacagtttttcgatggtcaggggcgtggtctcgcgcagcttggaggccagcagcatgcagaccgcacccaggagctgcaactgcg

SEQ ID NO: 225922 - DNA, 630 bp, Homo sapiens
caccaaatatgctgtaaggtccattatatatgtgttctgtgttttaaagtttttaaagcatattcatatacatgatcttacttaattcagagttttcatgagctagcattttatatacccccattttataattctttgccctttagtgtttcaacttgggagtaaaacacttgctaaagtgcacttagctagtaagtggaaaaactgggaactgcccccaggtcttgctgcaatgtgatctagggttctctccatcacctattcagatttcctgcccttctattaataatcgtgtttctcttctgcatagatacctctcacatgatgtggacaaaataaatgtttgatattgctactgctaatgatgatgatggttgaaaaatattcacctgactgatgactttacagtcagcctgccgagatagcagttagatctgatctgcctggacttcttaagaaagcatcaaggtttttgagtcctagttcttcttscaactctggacctgtagcacggacaggaactatggagcaacacaagtctctcttagataagagaattattcattttgtttctccagggaatgtgtattgagcatctattatgtgccagccactaggaacacgatgata

SEQ ID NO: 225923 - DNA, 417 bp, Homo sapiens
gggtctgtgggctatgtacttaactgtgtttttctggtactggttgctgttctttggtttctatgtttaaaattccctttagtttctatgcataaagcaggttttatactaggctgtgcagtttgtcctacaaggatctctggtaaggctgatctagtggtaattaattcccttagagcttacttgtctggaaaagattttatttctccttcgcttataaagctcagtttggcaggatatgaaattcttggttggaatttcttttmtttaagaatgctaaaaataggccaaatctctcttggcttgtaaagtttctgctgagaagttctctgttagcctgatggagtttcctttgtttgtgatctgccctttttcactagctgcctttaaaattttttttttttttggtgttaaact

SEQ ID NO: 225924 - DNA, 567 bp, Homo sapiens
aatgctattcatttaatatgaacctcccttcctccccaagcttgtttaaatgctgttcatttaatatgaacctcctttcctccccaagcttgtttaccagtgatcctcactgtgcactctctttgctgggcccaatggcctctttattttctcccacataagcctagttcatgcctacatctcctcctttctcacgccatgccttgtccttctcytcctcctcctccaccttctctgtctatccaaattctgcctctccttcagttcacacctcaaattctatatcattaattttttactttttcttttctatatacaaaagtgtacaaaccataacttgcttaatttccacaaggtgaacatactttgtaacaagcacctagatcagggaaaagaacgttaacagaatctcagaactaaactaaatcagtggtttaaaatcaaatgccagcagaggctgcgctttgtaaatatagttgagtaatgacttatctttaaaaaaaagaagatgggaatcataaaaaatgcactatgaatatggattatgcaaggaagatgacaaagaat

SEQ ID NO: 225925 - DNA, 373 bp, Homo sapiens
actggggcttgatttaaaacattttcttcataagtcatatcatggccttcttgttcttagaacatgagatagcattcaagactacccttggggsccattttaaacagtgacattaccaacaagaagcaaaagaatgccaaaaatttggttactaaattgaatgcaaaaggacaccgattttccaaaggagaatgtaaacaagaaaacaggttactactgccttgttcgacctcagctggggacacgcacattcagctcctcaaattttttactgctttgcacatgcccatgaaagactgcaaaagtgccacaggtatgattttggggttacaagtgaatttcagtgagtaaacaaattttcaaatatgaattc

SEQ ID NO: 225926 - DNA, 605 bp, Homo sapiens
tggctaacaaaatgactgtaaaaggaaataatagtgtttgacacattttcctttttacaaattctgagcctcttgccccagttgcaatcaatattagctgactcagtagaggaacctggtttccaaatgagtattattctttgggattcacaaagtaatgtctatgcaaacttaattgtaccatagatgtttctaatgcttaaaaaaatacaaataaaaaagcaaaccttgaagagactatgccctctaaaacttgctataatgctaagaaaaactttttaaattgaaaaatggcatatcctgaacttgttcctttaagggaccactaaatatayccttttacatataaacaacttaagtaaaatgaaaggaacaaaattcctcaatttgcagaatggctattgagtcaacaaccaaagagaatttgctacaagagaagacagatgttttcaactttaaaaaaattacataatatctaaacatatttcagatgggaaaaacagtttgtgagaaaggcctctgtgaaacaatttctacagcattatttatatttccaattatgtatagtacattgttggaataaaaaccagtgtagtagtgagaat

SEQ ID NO: 225927 - DNA, 556 bp, Homo sapiens
agaaactgaaaaaaaaaattgaccaggtaagaatggtttgacaatttaggtccagatgaagcaaaatacttttcagcgtacaaaatgttgacccctgaagctctagctatagtaagtaagttagtatgagtcattagaatggctagtgtggaattccactttgagcatgactaagttcccccaagcctgacaaccaactgctcccacccccaaataagaactataaactctgaacaaaatatggaatccaactacctaaaggcactgaagagtgaacaagcaagcagcttctgaaagaagttaacacttgaaagacttgcaactttttttctggccaaaagaactagaggacagagttcaaagcaacgacagccaatagaaagtgagaggtgtrctagaaaagtgagaggtgtgaagctccaaattttttgtaaaactcctgcccaaatctttgactaagtctttaaccatgtatgtgcggaatggactcaaagagcccaggtaaggataaaataactgtactgacatttgaactttctgcgaaacagtgtttaca

SEQ ID NO: 225928 - DNA, 398 bp, Homo sapiens
agggggcaacctattccagaactgcaagcactggagaaagtaaccaccctccagaggctatattttggtgtttttatttctcctttcaactgaatctgaaatgcctgatttaaggtgatctgctttggggacgcaccatatgtaattattctgattttctgttcttttagttacttatttcagtcatattgtgaatttccttttctcttgtcattggttctctccaaaccgaggcaggcggatcacagggtcagcagattgagaccatcctggctaacagggtgaaaccctgtctctactaaaaatacaaaaaaaattagccrggcgtggtggcgggtgcctgtagtcccagctactccgggggctgaggcaggagaatggcgtgaacccggaagatg

SEQ ID NO: 225929 - DNA, 471 bp, Homo sapiens
agtagatgttcaacaggagattgtgaagggagatgtttcagacaaaggcaacaggatgagaaaagtgtgtagctcttagcatttttaatgctactgaaatgttcatgattcagtagtgcttccatgtgccacatattcctatgggcatacccattctcactgcagctctttctcccttctttctcttatttctcaaatttcaggtaaatgagtgctatgttattgtatgtagaatcttgagttggctctaatttatttaaaaaataatttggaaatgcaacactcgtaccattgttaaatagtgtatggaacttctcacaatatatttaaatataacaatggcttagcactgcagctgagaactgattagtaagcacaaagaggtgtgagattggatactttagtgggcattgtcaagtaataaagtggcagtgwagtctagattctgagccatgcaggttggtctgagaa

SEQ ID NO: 225930 - DNA, 615 bp, Homo sapiens
agatgtattcctaggtatcttattctctttgtggctattttaactgggattgaattattattgatttggctttcagcktgaacattattagtgtatagaaacgatattgacttttatatattgattttgtatcctgaaactttactgaactttgtttatcaggtataggagccttttggcagagtcttcaggcttttggggttatagaatcatgttatcagcaaagaaagatagtttgacttatcttcctatttggatgtgttttatttctttttgtttatcagttctaggcgacttttggcagagcctttagggttttttgggtatagggtcacgtcatcaacaaagaaagatagcttgacttattttcctatttgggtgtgttttatttctttttcttgcctgattgctctggctaggacttccagtactatgttaaataggagtggtgaaagtgagcatcctggtcttgctccatttctcaatgtgtgtgatatggtttgctgtgtccacacccaaatctcatcctgaattgtagttcccataatccccatgtgtggtgggagggaaattcaatcatgggggaagtttcccccatgctattcttgtaagttc

SEQ ID NO: 225931 - DNA, 474 bp, Homo sapiens
  misc_feature (1)...(474): n = A,T,C or G
aagttggtagtactaagataaagagactatgatggttaataatctgtctcaatttgactaggctatggcatctagtgattttgtaaaaaaccagtctagatgttgctgagaaggtatttttcagatgtgtagactttaaacaaagcagattaccataatgtaggtgggcctcatccaatcaggtgaaggccttaagagcaaagactgaggcttcctgaagaaagagcaattctttcttaatactgcaacatagaaaccctgcctgagtttccaatctgaagattcaggctcaagagtgcgacattwactcttaccttaatttttagcctgccagcccgctcgacagatttcagatttaccaataacttaggtgccgattccttaaacacttttctctgatctctctctctctctaacatatatacacccatagcttatatatacatncaccatatataatncacacacaacaca

SEQ ID NO: 225932 - DNA, 504 bp, Homo sapiens
gaattctactctaactccataggaatgagaatgaaaattgattgctctatcatctcccagagatatctcaaaagagtgctccaaaatattttgtgctaagacacagatgttctcacattcacaaagcaaagtagtgctctaggattgattaatttggtcaattcggcctatttagttttcaaaagaaacctgttgttgttgttgttaatggtgtttctttgcattgcgtaactctaattagttatttgcttgatttttacctttgagccatttaaatttgttctggataaacatagtataagtaacatttgttaaaaatagaagctgtttcttttttttgcctttttctttcttgctttygttttacagtttagagacaaaacaatgggagatcttaacagatgacttaattatcaagaggtatcaattatgtaaatgagtctgatggtaaatagagcatcattttcttacaaagttgttacttcctatgggacaagggttctc

SEQ ID NO: 225933 - DNA, 486 bp, Homo sapiens
gtttcagggcaaaattggtgagcctctggtgaatcccaccaggtaggatataatttcaactaggtgggaagaaggtggtatctaggaccaatcctacaatgacaaagcctaagattacagtatcacagctctaaatagctacagcagagwcatgagtattttgttaaccaagaactggagaggttagtagagtaagaggctcccattaagaatctcttattaagatagactaaaaaagagagtcaagactctgggagctagtttagaatatagggtaagattacagtatcacagctctagatagctacagcagagtcatgagtattttgttaaccaagaactggagaggttagtagagtaagaggctcccattaagaatctcttattaagatagactaaaaaagagagtcaagattctgggagctagtttagaatacagggtaagattacagtatcacagctctaaatagctacagcagagtcatg

SEQ ID NO: 225934 - DNA, 486 bp, Homo sapiens
gtttcagggcaaaattggtgagcctctggtgaatcccaccaggtaggatataatttcaactaggtgggaagaaggtggtatctaggaccaatcctacaatgacaaagcctaagattacagtatcacagctctaaatagctacagcagagacatgagtattttgttaaccaagaactggagaggttagtagagtaagaggctcccattaagaatctcttattaagatagactaaaaaagagagtcaagactctgggagctagtttagaatatagggtaagattacagtatcacagctctaratagctacagcagagtcatgagtattttgttaaccaagaactggagaggttagtagagtaagaggctcccattaagaatctcttattaagatagactaaaaaagagagtcaagattctgggagctagtttagaatacagggtaagattacagtatcacagctctaaatagctacagcagagtcatg

SEQ ID NO: 225935 - DNA, 467 bp, Homo sapiens
aatattttcagctttgtaggccatatagtctctattccaacaacttaattctgtcatcattatgtgaaagcagacatagagatatgcaagcaaataagcatggctgtgttccagtaaaactttatgtacaaaagcaggcagtcactaaattcggctaacaggcaacaatatcccaaccctttttttttttgaacaacaacaacaacaacaacaaatattactactgctactgctactactaatactatgtgagatgcttactatgtgccaggcactatccagacattgtttccatttttaatttttttcataacactatgaggaatataccattattagcccttttttacagaggaggaaataggctcagaaagtttatcttgctcatagtcaaacagytcatcagtgtctggcaggatttatgctcaggcaatttggctccagagattgaatacccttaatcacag

SEQ ID NO: 225936 - DNA, 562 bp, Homo sapiens
gtccttctgctgggcaccctcttggtatcatgctctcttgtggagcatcctggctcctgggaacctgccagggaactatgggctgcactgaatgtgctcacacatactcttccactaggagcctccaaactgattccttggagtcctggtgatgataaacctacatggccacccatggcaaagtgaaataaaacatttctcccctgttggttacagtgtttggaaaatatcacatagtatggctgcacccagatayatgctagggtttcaaaagaaattattgtttcagttttcatccctctcactactcctcttgttgggtcgggagacactgtgaatggcagacatcattcagaagtctaagtgttgtgaatgggccaactcataaccctttgttctgttgctgcttaaggtcacgttccccctaggagcctcttattaatgattgctgctacaaatagatttttgtggctcacatctcattcatttattccataaatggaggttttgttctattatatttatttatttttgttgctcttgttgtactgttttcattggt

SEQ ID NO: 225937 - DNA, 413 bp, Homo sapiens
tgtctacctccaagtcagataatttaaactcttaattacatctgcaattcccttcacagccccaactagatttgtctttgatggactaactggaagaaggtcagtgtacaccaggggtaggaatcttaggggccattatagatctctgcctaccccacccattatcattcttttctaagtattatatgtttatttcttcaacacaatggttatttactactttttacttagcttacaaataaagattggtttccattttgttttccaactttactacattatgtaaaataatctgaataatatcaatgattttagattggttgtacattcacttayggcttaacagtcaaattttataaaatttcccaagattgtacattttctgtttacgaattatggagttagatgacaca

SEQ ID NO: 225938 - DNA, 474 bp, Homo sapiens
tccagctgtggtcattctactggatctcagcaaaacaaacttggttgcttacatttgttctgacctcttacatgagaaaagattcagaactgggtaatttcaactgagaaaacttggttaaatgaaatgaaataggtttagatacaggatgttgaggcaagtacaatatgatttgagagtcagagtttggaattaggagcctcaaatcagaccagatgatttttaagacaacactagaaacttgaaaatgcaaataatgaataggaccccatagacttttagggggaggcaagaaattttcaatgcactggattctattcaagttataaattgatcctgacagtaaataggagtgttttgtgctatatttgccttatggcaaacagrcttgagctgattttgctctctctgagaagtggctatgagttttgatcaagagtgcaaaggaaaaagttagtttgagggaaagaatca

SEQ ID NO: 225939 - DNA, 513 bp, Homo sapiens
gacctttcaaaatggcctcacttcctgttacctctcatgatgtgagcatccccacatttggacagggattctggggtttgcagatatgtttcctattcaacatggtacctaaatgccaaccaacaacattatggaattctctgccaaggaggcagaagttgattccagcggtaagagaaacaaattgcagaggcagcaacatccaagacaacaccagccaaataactggtgcacagtgcatcrgtgcattctattttatggatgatataaaagagatttttcaatggtaattttaattatttataatttttgccgtacatgctaacttcaggacataaactcttttaagttgaaatgtagttttttttttagaaagcaagtttattaagaaaggaaaggaattaagaatggctactcaataggcaaagcagccaaaatgtagtctttattattattgtatattttttgagacagagtctcactctgtcacccagggtggagggcaatggcgca

SEQ ID NO: 225940 - DNA, 418 bp, Homo sapiens
aaatatttagagccagaaagacatrcatccacatctctgaaattctcacatttcccacaagccactttctagttcctgagaagtagacacagaagagatactctgcttattaataactagtggtttagccccacttcctatatataattatttatctgacaaaatgaatgggcctttggcaagctttcacctaaggcctgaagcagtgtttggaggaatatgaaatgtggactgtctgcatcatacttactgggagtgctggctgaagtgcagattcttggctctaccacagatctaagaagttaggatgacgaggccagaattagacatttttttttgtaatgagtaattagtgagcagttctggcctcacctaaaaacaatttcaatagccgctttggccctcttttttctgagac

SEQ ID NO: 225941 - DNA, 561 bp, Homo sapiens
attctctgttttttatacaaaggcgaaacacacacagcggtttggttggttaggaactgaagaaaaatacacagaggagacaataaaaatcttcccctggccaacagactggagcgttcctgcaaggagctggtggaaacactgacgaaatgcctggtgttatttaattgtcattgttcctattgttttcctttccatacaacatgaattcttaatcattaactcacaacataagcaaatctgtctgtccactggagaaccctgaagaattagatgctaggacaaacagccaggcaacaactcatgtcttgctggtggctctgaagttcaagtcctgggtactgagctccctggcccagtaactaacatttttcccttttctgcagtcttttcttcctaaaattataatacccatacattaggttagatggtttytctggttatactatcatatttgtatttgaagtttaaacttctgtttggcaacctatttgtgtacttagaagacttgccttttctgtaaagaattgtcttaatgtttataaaatatttttgttcttc

SEQ ID NO: 225942 - DNA, 506 bp, Homo sapiens
attttctgttttttgatgaacataactggatgttgggatccaatgcctggaaatcaaagtaattaccattattgactcatttagttccagagagtgatggatgaacatttgccatcaggactcaattattcttattattcacaatcacatataattttgtacttgggttgggggcccaaggccaaaaatttctccttgaaggtcaacaagtcatgtgkgcatttgtaaattaaaaaaataaccacctgccattttaacaggatgattatatactctcaaaaagttttggagatcatttctacaacagtggccagaaaagcagaaatatattcagtaacttcaccgttactgaagtttgggttttctctattatacttgttatatataaatgattgtgggaaatacctatgaaaatgatcatatcagaataattctcatgggagcatagtttcttaatagaataaaatatatatcattaataataaagtatgattttgtatgttgct

SEQ ID NO: 225943 - DNA, 506 bp, Homo sapiens
attttctgttttttgatgaacataactggatgttgggatccaatgcctggaaatcaaagtaattaccattattgactcatttagttccagagagtgatggatgaacatttgccatcaggactcaattattcttattattcacaatcacatataattttgtacttgggttgggggcccaaggccaaaaatttctccttgaaggtcaacaagtcatgtgtgcatttgtaaattaaaaaaataaccacctgccattttaacaggatgattatatactctcaaaaagttttggagatcatttctacaacagtggcsagaaaagcagaaatatattcagtaacttcaccgttactgaagtttgggttttctctattatacttgttatatataaatgattgtgggaaatacctatgaaaatgatcatatcagaataattctcatgggagcatagtttcttaatagaataaaatatatatcattaataataaagtatgattttgtatgttgct

SEQ ID NO: 225944 - DNA, 506 bp, Homo sapiens
attttctgttttttgatgaacataactggatgttgggatccaatgcctggaaatcaaagtaattaccattattgactcatttagttccagagagtgatggatgaacatttgccatcaggactcaattattcttattattcacaatcacatataattttgtacttgggttgggggcccaaggccaaaaatttctccttgaaggtcaacaagtcatgtgtgcatttgtaaattaaaaaaataaccacctgccattttaacaggatgattatatactctcaaaaagttttggagatcatttctacaacagtggccagaaaagcagaaatatattcagtaacttcaccgttactgaagtttgggttttctctattatacttgttatatataaatgattgtgggaaatacctatgaaaatgatcatatcagaataattctcatgggagcatrgtttcttaatagaataaaatatatatcattaataataaagtatgattttgtatgttgct

SEQ ID NO: 225945 - DNA, 605 bp, Homo sapiens
ttccttgtccaaatccctatttcctgctgagaacttcctgacctggttcatactgcttacagcattatttacattatgaacttttaatgattgtgaggtttaaaaggattaatgattgtgaaagccccctttaagctaaatgctaaaatgatgtgattattttgtattataatgtatatgagtacacacaaaaatgtatattaaataagtctaatttcttgacttcatgtaagcctaaaggatatttcttgtatgcaataaagactcacaggaggaaaatattcagtaataaatctctgatctaggagtatcaatacaactaagtttggcttcatgcacaggtgacttgatggacatctacatgtattttcacccaagcatatcttcccagataagatgttacagtacctgaaatagtcaccattagggattctcttcttggasaaaatagctgtgctagtttctagctaaaaagaaatgttcttacaaacaggtagtttttatgagttgttaattcctttgaggggatctaattatcagattagtagctatcaattttggtaaaagaaagcaggacccaaaagggaagaaagactaaaaagcaa

SEQ ID NO: 225946 - DNA, 478 bp, Homo sapiens
aggaagtaaagagcacccctgcaaaattctacacaagaagatcatcccgaagacacataatcatcaggttttccaaggtcaaaataaaagaaagaatgttataggcagctagagagaaagggcaggtcatgactgaagggtttctgtggacctctcagaagaaaccctgcaagccagaagaaatttggggcctgtattcaacattcttaagaagtatatatgtcttcaatcaagaatttcatagccagccaaactaagtttcctcagtgaaggagaaataaaatccttttagcatcagcaaatgctgagggagttaccaaccttacaagtgwtcttgaaaggagcactaaatatgaaaaggaaagtgactgttaccagccactataaaaacacacttaagtacacggaccagtgacactgtaaagcaatcacacaaacaagctggcataatacccagctaatagcataatgacaggat

SEQ ID NO: 225947 - DNA, 554 bp, Homo sapiens
gtgcttctctgaaggtgcccctcttaaaagtttagaagtcaattaatcttaagacagggataaattttatgagccatattataagtaccaaagccactatcacctgaagaatgagataactgtaataaattcattatgtcttgtacttgacattttcaagcactaaaatccaaactcatttttggaggtctctaaattattttatatcaagtcagtaacaggttttacgacttggaataaatactcattagttgttagagtgcttatctggttttgtctcatttatttaaaaataatgtcatgaacctgaaaccataaatattaatagctgaaaccactgacacaaaatttatgtttaaaacaaatagctcttacatgagtaatagaagtttttgtgtccccacaactcaatatgctaaaagtttctttctcttcttgagacttgtagcaaccatgtgactttaaggaagttaaggtaaggaaaaaattgacttagtttytatccttttggcattcaagaaattgagaaacaatgcagctaaaaggtatgagtg

SEQ ID NO: 225948 - DNA, 608 bp, Homo sapiens
cagctattatttcagtttaaacagcaacaaaaatcatgttcattaattaagtgcttactatttgccaggaaatacacttagtattttgtatgactgccatatataaccctgacagcattattttactatgaattaggtactattgttgattatattcattttccaaatgagaagactgaagttttgagagtttaggtaacttgtccaagatcggtcacacagttcacaattaaaagagcaaatattctggaagattcaatcaggaggggaagaaagaacacttaaaaatttcaaagtcaaaaatatatgaagtttttatattatctacactcttctctcctccctatggcactaaagaaaaaggtcaagaatcgatgcaccaataacagaatcttctgtatcaaaagcagctgcataagtggttaagttggcaagagaagtgaatcattttaaaaaatgatgaaacacaaatcaatctgttttaatctttgttagaaaagaaagatattttgctagacattcctggtgctgacacaattattaccagaatatttatgaaagttgagcraaattggtccctagagagttaaaaacaacttaactaatat

SEQ ID NO: 225949 - DNA, 497 bp, Homo sapiens
gaattcttttaaaatatttgcctcataactgtatttttccagcctgcttttcagctcaaaggaagtatatgcactgagttgacttatcagtgtgcatagcagaaagggacccagtaagagaaagccccctgagaggccctgggacagctgagtgatccaccctggctgcctcctctccacctcattctcacacactaacctttcccaacccttttcattccaaggctcctagccagcgccccccacctgccttaggagataaccccagttccttcctcggattctttcatctgcaaggcctcagtgttcttgtccggccagtgataaggacattcaacgtcattttcctgtccctgacctttgaaagaaccctacccatcyggggcctgtgatgtagactcagactgagatgttccatcttggggatataatcagtgggaaagagagagattcctgagaggtcatcattcattcattcattcattcaagaaatattt

SEQ ID NO: 225950 - DNA, 557 bp, Homo sapiens
tgatagtttatgagttagtgtctctgcttatgtggaggttagcatgtattaccaaaacagaatgatgctttctttttaagtaaatttaaggcattgtttgcctgttgcatgttattttatttctgattagatatccaaacattgaatttttttttttttttttttttttccccctgagatggaatcttgttctgttgcccaggctggagtgcagtggcatgatctcacctcactgcaacttctgcctcccgggttcaagtgattctcctgcctcagcctcccaagtagctggggttacaggtgcctgccaccacacccagctaatttttgtatttttagtagagatggggtttcgccatgttggccaggctrgtcttgaactcttgacctcagatgatccacctgcctcagcctcccaaagtgctgggattataggcatgagccaccacacccagttcaaacaatgtaaatctgatggtgttttaaaaattgctgttattaggtaacttgctaattcatgaataaatgaactcaagtgaattaagggaaattagccc

SEQ ID NO: 225951 - DNA, 291 bp, Homo sapiens
caaaacagcaccagaaatctacagatgtggcagtgagcacaattgtttcacatcagtgagggatttctaggtgtcagcaaaaataggttcatatgaacttttctagttttgtcaaataytttatcctattttcattttttagataattgagaaccatgcctcttaccagcaaatgtatgtactccggtaaaatgtaaaagaaaactaagaatgtcccctgctgtcattaagttcatcctctgtaatgcttttaatttttaagagtttggggtcctgtgtgttttacagcaa

SEQ ID NO: 225952 - DNA, 291 bp, Homo sapiens
caaaacagcaccagaaatctacagatgtggcagtgagcacaattgtttcacatcagtgagggatttctaggtgtcagcaaaaataggttcatatgaacttttctagttttgtcaaatattttatcctattttcattttttagataattgagaaccatgcctcttaccagcaaatgtatgtactccggtaaaatrtaaaagaaaactaagaatgtcccctgctgtcattaagttcatcctctgtaatgcttttaatttttaagagtttggggtcctgtgtgttttacagcaa

SEQ ID NO: 225953 - DNA, 572 bp, Homo sapiens
cctaatgtatagcatggtgactgtagttaacctatactttaaatgtgatgagatatgagagcagttctcatcacaaaaaaaaggtaactgaagtgaatatgttaatttgattgtaggagctaaaatattttatatgtataatatgtagaaagttattttactcttatcaggtaaataagcaacaaatctaagattaacttattctattatttgaaggtcactacagttccagtaactttaccaggcaaccaatgaaataacttaagagaagttgtctgtttggataaagtgaatatagccatgcctaaatacagtactacctattaaacgcattcctcaaggcatatgaagcttattctaataagtttataattctaggttataattatgtatatttaatgtactmggttcattctcaactaatttgtagttcatgatctaaacaggcaagaagcccttagaacacattaaacacattgtacccacctccatggcaaaaggagtgagtgcttgtacatgtctctccctacaagtcctccctcccaccagaagacaaacggaaagctgctcca

SEQ ID NO: 225954 - DNA, 559 bp, Homo sapiens
taaagaaatactcaaattatccccagaaactaaatggaaataaaacaaccctcaacctgaacaaccacacagtccttgtcttttgttgacattgcctcaaaaataagtgctcttgagatggcaataggcatatttctgagttgtaaaatatcaagcatgaaattctacttgagagaagtctttcacctgctaaaactttatataaattaagtttaacagtttatttgaacaatgaacgattcacaaattgggcagccaaattcaggaattggggacattgaatgaggagacattcagagagctccgttctgtattgtgaacagacagcatttatagacagaaaaaataaagtgacatacaagagaagcttgatccatcacagctctttgtttaccttatttaaatatggtcagatcagctggcagcctgtgactcaagtttggctgttgtgattgattgtgacttagctacctattacaaaaktatacaccgatatgaggctttcagtttctatactaaggttgcagtttgttataacagactcaaagtatggaggcat

SEQ ID NO: 225955 - DNA, 477 bp, Homo sapiens
attttgcttccttttctatttgaatgccttttatttctttttcttattttattgctatgtctaggacttccagtactatattgaatagaagaggtgagagtgggcatccatgccttgtttctgagcttagagaaaaagctttcaatttttcattattgaatataatgttggctgtcagcttgccatatatagcatttactgtgttgaggtacatttattctatatctaatttgttgagawgttttatcataaaatgatgctgaattttgtcaagtgctttttcttcatctattgagatgatcatgtgtattttgtccttcattttgttaatattatgcatcacattcattgatttgcttatattgaaccatccttgcatctcagggataaataccactcaatcgtggtaaaagactcttttaatgttctgctagattcagtttgctagtatttattgagggttattttatctatgct

SEQ ID NO: 225956 - DNA, 469 bp, Homo sapiens
gaagacaaatttttccccagatggcggagggaggggatggtttcaggaggattccagcgcattgcatttattgtgcrctttctttctattattattacattgtaatatacaatgaaataattatacaactcaccatcatgtagaatcagagggagccctgagcttgttttcctgcaaatagacagtcccatctggggatgatgggagacagtggcagatcatcaggcattagattctcataaggagtgggcagcctagctcccttgcgtgcgcagttcacaatagggctcctgctcctatgagaattgaaccatgctgctgatctcacaggaggtggggctcaggtggtaatgtgagcaatagggagcagcggtaaatacagaggaagctttgttggcttacctgccactcacctcctgtggtgtggcctggctcctaacaggccactgactggtacccaggggctggg

SEQ ID NO: 225957 - DNA, 463 bp, Homo sapiens
gaagacaaatttttccccagatggcggagggaggggatggtttcaggaggattccagcgcattgcatttattgtgcgctttctttctattattattacattgtaatatacaatgaaataattatacaactcaccatcatgtagaatcagagggagccctgagcttgttttcctgcaaatagacagtcccatctggggatgatgggagacagtggcagatcatcaggcattagattctcataaggagtgggcagcctagctcccttgcgtgcgcagttcacaatagggctcctgctcctatgagaattgaaccrtgctgctgatctcacaggaggtggggctcaggtggtaatgtgagcaatagggagcagcggtaaatacagaggaagctttgttggcttacctgccactcacctcctgtggtgtggcctggctcctaacaggccactgactggtacccaggg

SEQ ID NO: 225958 - DNA, 546 bp, Homo sapiens
aggtgcggcagctcttgcctgtaatcccagcactcttgagaggccaaggcaggtggatcacctgaagtcaggagttcaagaccagcctggccaacatgttgaaaccccawcctacaaaaattagccaggcatggtggtgggtgcctgtaatcccagctactcaggaggctgaggcaggagaatcgcctgaacccaggaggtgaaggttgtagtgagacaagatctctttacactgggcaacagagcaagactctgtctcaaaaaaaaaaaaaaatcagaacaaaaagggcaaagttgttatttcctgaatttcctgataatgatcacacagccaaaaaaaaagccaagaaaagcagctgttaaaaaacaatagaaacaataagaaaatttagtatggtggttaggaaaaatttgatatctataatcaatagctttcctacagtatatgtgaaaaataactagttaaaacataaaatgatagggaaaacaatactctttaatgttaagaagaaagttaacaacaacaaaaaagaaaatgaactccta

SEQ ID NO: 225959 - DNA, 546 bp, Homo sapiens
aggtgcggcagctcttgcctgtaatcccagcactcttgagaggccaaggcaggtggatcacctgaagtcaggagttcaagaccagcctggccaacatgttgaaaccccaacctacaaaaattagccaggcatggtggtgggtgcctgtaatcccagctactcaggaggctgaggcaggagaatcgcctgaacccaggaggtgaaggttgtagtgagacaagatctctttacactgggcaacagagcaagactctgtctcaaaaaaaaaaaaaaatcagaacaaaaagggcaaagttgttatttcctgaatttcctgataatgatcacacagccaaaaaaaaagccaagaaaagcagctgttaaaaaacaatagaaacaataagaaaatttagtatggtggttaggaaaaatttgatatctataatcaatagctttcctacagtatatgtgaaaaataactagttaaaacataaaatgatagggaaaacaatactctttaatrttaagaagaaagttaacaacaacaaaaaagaaaatgaactccta

SEQ ID NO: 225960 - DNA, 253 bp, Homo sapiens
atatatacacacattaaattacttgcaaggagtaatatatatgtgtgtatggatatgtatatgtacatacatcatggaatactactaagtacacacacacacacacacacacattttatttatccaatcatccgttgaggggcacagattgattccatatctttgatatcatgaatagtgttgcaawaaacataaaagtgtggggatctttttggtataatgatttcttttcctttgagtagacacccagtag

SEQ ID NO: 225961 - DNA, 639 bp, Homo sapiens
cactgaaggcatgtgtgtcaggtcaagaacttggtcctgcacctggaggcttgatgaagggctttaggccaaggagtgatatggacagaattacctgttctcatcattcctctggcagtccctaggtgtgtaggatgggggctggcagttcccggaagcagaggaagtaggtacttggctatagcaataggtgatgccagagaaggtgaatctccaagtcaggcmggagcaaggagggaaggcaagcagagcaggaggttctgcagagggaatccactgaagttagtgactggtagactggtgagtgagggagagccctaagtctgtcttctgtgacattctgggggatggcatcgtcaaccgaggaaggaaagatggacaaaagagcagtgggtgttgtattggaggaattgtggggagacaatgcgtgttgtattggaggaaaggctgagcagttttgagggatttagtcacagtaatccatgactgcagttagcttataaagtcatgagaactattaaaatgagactactatccatatatttataacttcatttgggccttggacatggcctaatatgtttcactagtcaattgacaacccaaatcattaaaatactccgttattttcaaatgttg

SEQ ID NO: 225962 - DNA, 226 bp, Homo sapiens
aggaattccctgtctgcatatatgagcaaccaggrtcactgtaacattgagaggaaattttataaaaatcgtatcattgaaggagaaaattatgttattcatctacagcaatgttttaggatgtgtcagatttaaaatgtgtaagcattcatgcatgcaatcattattccttttacaaggaaaagaattttataaactgcaacttaggtctgatgcctaaaattgt

SEQ ID NO: 225963 - DNA, 634 bp, Homo sapiens
actatttatcatcttaggcctgtgaattctgaagcaatgccaattattaacctattaatttwaaaaaatatatactgagcacctaatataagcactgtgctgtctatggtggatcttagagctgccagggccattcagtcattgaacacagttttcttaggttctatgatgtataaggcacagtgctaagcgctacaaatacaaatactatttacaaagcccattgtggaatagaagtttacatacatgtggcacaatgtggtgaggcttatatgagagataggctcaaacctttgtagggatcctatgagggactcaaaatggtttaaggaggttaggaaaggctgcacacaggacttagatgatttgaggatgctgtatacagaaaacaagaggttgctgagtgagaagtttcctgtggctaaaagagttcaacaaaggacaggggaacctgtggaaatagtcagggaccagatgtaagaactatgtatgccctagtacccattcatatattatcctgtgcactgactgaaagccatcggagacttttaaagagggaaataacttgttcgattagttttcagggaaatgatttagggagcactaaggagggattgctgaagtggaaggtgat

SEQ ID NO: 225964 - DNA, 634 bp, Homo sapiens
actatttatcatcttaggcctgtgaattctgaagcaatgccaattattaacctattaattttaaaaaatatatactgagcacctaatataagcactgtgctgtctatggtggatcttagagctgccagggccattcagtcattgaacacagttttcttaggttctatgatgtataaggcacagtgctaagcgctacaaayacaaatactatttacaaagcccattgtggaatagaagtttacatacatgtggcacaatgtggtgaggcttatatgagagataggctcaaacctttgtagggatcctatgagggactcaaaatggtttaaggaggttaggaaaggctgcacacaggacttagatgatttgaggatgctgtatacagaaaacaagaggttgctgagtgagaagtttcctgtggctaaaagagttcaacaaaggacaggggaacctgtggaaatagtcagggaccagatgtaagaactatgtatgccctagtacccattcatatattatcctgtgcactgactgaaagccatcggagacttttaaagagggaaataacttgttcgattagttttcagggaaatgatttagggagcactaaggagggattgctgaagtggaaggtgat

SEQ ID NO: 225965 - DNA, 634 bp, Homo sapiens
actatttatcatcttaggcctgtgaattctgaagcaatgccaattattaacctattaattttaaaaaatatatactgagcacctaatataagcactgtgctgtctatggtggatcttagagctgccagggccattcagtcattgaacacagttttcttaggttctatgatgtataaggcacagtgctaagcgctacaaatacaaatactatttacaaagcccattgtggaatagaagtttacatayatgtggcacaatgtggtgaggcttatatgagagataggctcaaacctttgtagggatcctatgagggactcaaaatggtttaaggaggttaggaaaggctgcacacaggacttagatgatttgaggatgctgtatacagaaaacaagaggttgctgagtgagaagtttcctgtggctaaaagagttcaacaaaggacaggggaacctgtggaaatagtcagggaccagatgtaagaactatgtatgccctagtacccattcatatattatcctgtgcactgactgaaagccatcggagacttttaaagagggaaataacttgttcgattagttttcagggaaatgatttagggagcactaaggagggattgctgaagtggaaggtgat

SEQ ID NO: 225966 - DNA, 634 bp, Homo sapiens
actatttatcatcttaggcctgtgaattctgaagcaatgccaattattaacctattaattttaaaaaatatatactgagcacctaatataagcactgtgctgtctatggtggatcttagagctgccagggccattcagtcattgaacacagttttcttaggttctatgatgtataaggcacagtgctaagcgctacaaatacaaatactatttacaaagcccattgtggaatagaagtttacatacatgtggcacaatgtggtgaggcttatatgagagataggctcaaacctttgtagggatcctatgagggactcaaaatggtttaaggaggttaggaaaggctgcacacaggamttagatgatttgaggatgctgtatacagaaaacaagaggttgctgagtgagaagtttcctgtggctaaaagagttcaacaaaggacaggggaacctgtggaaatagtcagggaccagatgtaagaactatgtatgccctagtacccattcatatattatcctgtgcactgactgaaagccatcggagacttttaaagagggaaataacttgttcgattagttttcagggaaatgatttagggagcactaaggagggattgctgaagtggaaggtgat

SEQ ID NO: 225967 - DNA, 565 bp, Homo sapiens
atcaaaggtgttgtggatctaacttttgtttaggtcaggcatgtatgtgtcatgctggtatctaataggacattttagtggtttccattttctatgtatgtgactggaacagtaggaagcctgcacgatggtaacagatcctgctgtttctgagtcagtctatacagattgaagtagcttcaatcaggtaattttcaattgtatttgattttgttgtaattacaaaacccgaaaaycccaatattttctgaggttttactccaacatatgtgttagttgaagagccactctaataaggtgaaactacaggctcctcccattccacactgttctctacattatagtatacacatctactacagttcttattattctttctttctcctgccgaagtatgaatgcctccagatggggatctagtctaatacagtagaattcaacaagcatttatgatgttccaggcacagcgctagacacgcataatacagagaggagggggcaagtgctggtggaatgggcccccagcacagagcacaatatgtgaaatgtttggaaaaattagatc

SEQ ID NO: 225968 - DNA, 565 bp, Homo sapiens
atcaaaggtgttgtggatctaacttttgtttaggtcaggcatgtatgtgtcatgctggtatctaataggacattttagtggtttccattttctatgtatgtgactggaacagtaggaagcctgcacgatggtaacagatcctgctgtttctgagtcagtctatacagattgaagtagcttcaatcaggtaattttcaattgtatttgattttgttgtaattacaaaacccgaaaaccccaatattttctgaggttttactccaacatatgtgttagttgaagagccactctaataaggtgmaactacaggctcctcccattccacactgttctctacattatagtatacacatctactacagttcttattattctttctttctcctgccgaagtatgaatgcctccagatggggatctagtctaatacagtagaattcaacaagcatttatgatgttccaggcacagcgctagacacgcataatacagagaggagggggcaagtgctggtggaatgggcccccagcacagagcacaatatgtgaaatgtttggaaaaattagatc

SEQ ID NO: 225969 - DNA, 574 bp, Homo sapiens
aaagaaaattggagtgactatattaaaacagacaaagtagatttcacagcaaacagataaatattttagagatacagagggtcatttaagatgacataggaataaattcttcaatatttatggttctaaacactcatgaatccactatcagagcatcaatatacatgaagcaaaactgatagattgtaagaaaggaatagaaatattcacatttagactcagggatttcagcacccctctctcaataactgataggagaaatggatatagaaacagtaagcatatagacttgaacaatgctatcaaccaacttgatataattaaaattttcagagcatgctgctyaacaacagcagacagagttcttttcaagtgcacagggaacatttatcaagatagatcatattttgaaccataaaacaatctgaataaatttaaaaacattcaagtcttccaacatgttatctgaccatagtgggtttaataagacaactataacataaatatatctgaaaattttttgaataactggaaattatataaaaatttataaataaccatgggtcaaagaaga

SEQ ID NO: 225970 - DNA, 581 bp, Homo sapiens
ctaaatggtggattttgcctgaactgttctgggaccatctcttctcttccttcaatttttcaaggtgatcctattcattatcatgtctttaaatactatttacaggctgatggttcccaaatttatatttctacctaaaatatctctgaactctctactctaatctgataattgcctgtttgacatctccacttggtatttcgaacygaacttgttaaaaagtaacgtaattttcaataactttctcctcacctcctgaatttccccccttctcttctctattcccatctcagtccatggcatcggccattcccagttgatcatctcagaagcatgagtgccatcacaatctctctctctgccacctcacgtctacttcatcagcaagccctgcctgccacatcctgaggacagctgtgctcatcctggcttccccatctgcactgcccctgctccactccaacactgacggtgcagcctcttcagggtctcctccacccactctgcctctcttaatccaatctccacatggcacccaacaagaggaccattgctgccctgtttaaagtcactcgtggctt

SEQ ID NO: 225971 - DNA, 581 bp, Homo sapiens
ctaaatggtggattttgcctgaactgttctgggaccatctcttctcttccttcaatttttcaaggtgatcctattcattatcatgtctttaaatactatttacaggctgatggttcccaaatttatatttctacctaaaatatctctgaactctctactctaatctgataattgcctgtttgacatctccacttggtatttcgaaccgmacttgttaaaaagtaacgtaattttcaataactttctcctcacctcctgaatttccccccttctcttctctattcccatctcagtccatggcatcggccattcccagttgatcatctcagaagcatgagtgccatcacaatctctctctctgccacctcacgtctacttcatcagcaagccctgcctgccacatcctgaggacagctgtgctcatcctggcttccccatctgcactgcccctgctccactccaacactgacggtgcagcctcttcagggtctcctccacccactctgcctctcttaatccaatctccacatggcacccaacaagaggaccattgctgccctgtttaaagtcactcgtggctt

SEQ ID NO: 225972 - DNA, 587 bp, Homo sapiens
atcatcattatttaaaagtcaaggtcctgaaaataacactttaaactacacttaatttgactgtragagagtgtataatgtttctttagtcaggctatgtgttttgcctttctattcttggacacaaatatattgttgaagtcagaagttgaggctgaaaaatggcttgagtctaactcttctgaatttcagcgtgctatgctgctgtctatgctggttactatcaatatggtgaccactgggtctggtaatgcaccaaactactgaaagtgcaactggttagttagaagtaatagaattcctcactggcccccgttccacccacccacacacaaacttaatgattcaaagctttgccagtcatccattttgcaaatgtaggttatacaaaaaatccaagttgaataagtgtatgaatggccaatacaaaaaaagatagtaatggctaaaatgtattgagcccctactatatgccaggtgctattctaaatattctcaattaaccttcacaagtcatggagttagtgactactatactcctcattttgaagatggggaaactgaatcacaagcttacccaaggccat

SEQ ID NO: 225973 - DNA, 587 bp, Homo sapiens
atcatcattatttaaaagtcaaggtcctgaaaataacactttaaactacacttaatttgactgtaagagagtgtataatgtttctttagtcaggctatgtgttttgcctttctattcttggacacaaatatattgttgaagtcagaagttgaggctgaaaaatggcttgagtctaactcttctgaatttcagcgtgctatgctgctgtctatgctggttactatcaatatggtgaccactgggtctggtaawgcaccaaactactgaaagtgcaactggttagttagaagtaatagaattcctcactggcccccgttccacccacccacacacaaacttaatgattcaaagctttgccagtcatccattttgcaaatgtaggttatacaaaaaatccaagttgaataagtgtatgaatggccaatacaaaaaaagatagtaatggctaaaatgtattgagcccctactatatgccaggtgctattctaaatattctcaattaaccttcacaagtcatggagttagtgactactatactcctcattttgaagatggggaaactgaatcacaagcttacccaaggccat

SEQ ID NO: 225974 - DNA, 474 bp, Homo sapiens
aacttcttatttttaagggctaatgtggctgctttattattatgtgcacatttacacatagaaggtggtatagtatggtgaaaagatccctagactttagagcaagaagatacaggttctactcctgactgagaatctccmtgatctttggtaaatctcttagccattctcagcctattgtcttaaccataaactgacaggattggatcaggtgaagttcaatgttcagaatctttggactatttgaaaggtattttatttttgatggttataccctcattcaacaaagaaaggatgaaaacatcaacacataggcaggcagctgttgacactcagcacacacaaagactgtcctacaacttgtagccactctgtaaaaagtatcatagtcaggtacttgttcctaaaattcagtatgattctttccacacactacttttcacagctttgtgcttgactgactctagttacttt

SEQ ID NO: 225975 - DNA, 474 bp, Homo sapiens
aacttcttatttttaagggctaatgtggctgctttattattatgtgcacatttacacatagaaggtggtatagtatggtgaaaagatccctagactttagagcaagaagatacaggttctactcctgactgagaatctccatgatctttggtaaatctcttagccattctcagcctattgtcttaaccataaactgacaggattggatcaggtgaagttcaatgttcagaatctttggactatttgaaaggtattttatttttgatggttataccctcattcaacaaagaaaggatgaaaacatcaacacataggcaggcagctgttgacactcagcacacacaaagactgtcctacaacttgtagycactctgtaaaaagtatcatagtcaggtacttgttcctaaaattcagtatgattctttccacacactacttttcacagctttgtgcttgactgactctagttacttt

SEQ ID NO: 225976 - DNA, 402 bp, Homo sapiens
tgtaattccagtttcaaaattattcttccattccagattttaaaatggttgtgaagcaggatccaagtggtgattttttttgtgttttttttttgttctctactaatttagcctcctagagccattctgtccaatatggtggtcgctgaagatctatggctatttaaatttaaagtaaaatagattgacaatagataaaactaaaaatttaattcctctgtcacaatagccctgttcaaatgtttagtagctccatgttgctcgggacagccaggctggaaagcctaggtatagagtatttccatcactgcagaaagttctattggacagygatgatctagggtcattgtaatgatctgcttttgatcatctgttaatttgggttaaaacagtatgaattgg

SEQ ID NO: 225977 - DNA, 578 bp, Homo sapiens
ctatttaggatgtttgtcatttatagcttttagataaagcagtagcggattttaaggaaacagtagacagatccattttccttttcctccagtgatgttagtgatctaattagaagtcagtgttttagcagcttcctctctatgtgctttgggttctttttttctaagagacgcctatggacatgaacaaaagccggatgttgcactagggcttctgaacaagtgctctgcattagatacgtctggagtttacacaccacgctttcctctgtgcagaccaaatgagagcctgccgggtgttacgactccctgtgtccattgtcaaagctgtattttcactgccttgaaaagtgcccttctgccacttcattttatatccattaccagtggccactttttctatttatattgcttggaactaattgagattccaggtgcacaagtgtgtcacacgcaagggcttgggtacttgggcaagtgtaacaatagttcaggaagagatgatcagcagccaccctttctgggttgaggaaacctccaaaaaaamcgaatagaaagtatcaaatacataaatttga

SEQ ID NO: 225978 - DNA, 481 bp, Homo sapiens
cccaaacggatgaaaaaatgctaacatcagaatggtataaaaaaatttggctgagttttcagtggtggtggccaatttagcctggttctgtagtagggtcacaaaccttgaccaagcagagagtagtagaaaaggctagaaagaggggcttgaagackatgaattttgacccctgattttattattcaatttctttttttcatctaaagtagtcttccgtgcccaggaagcctcgcctcccaagaccagagtcagttggagccggttgttgttggaaaggagtgggttgggtaactggggtggaggcagggagacccccactctgctggatgtcctaggtggagaagaagaactgcacttcacagagtctggggtgtagtgggaaggggatgaggcaggagcagcaagctggggagatgggacccacctcagtccccagcttcattttcttctaatatttccccactggtggcattttctg

SEQ ID NO: 225979 - DNA, 422 bp, Homo sapiens
ttttcatgtatggaagtgccagtcrtgttgctaaataagctttaaaaattcagttttttctttcttaaataattaagcaaaacatgaggtcctcagtgctgacctgattttctcttctaaggtttgaggtactgtcattaactcttaagttcagagattgattaatttgatgccacgtggcttccttacctcctgctcatcttcgttgttgtctagagctgtcactaaataatgtacccaggctatatttaatgtctcacatttgctacccttgactccctgcccccataaggactaaaaaatcttgttttactgtcaaggcttgttaaaagataaggaaagaaggaggaagaaattaggaaaagaaagtaggagaataaaaagagaaggaggaaagttagagactcagacatgtggaattc

SEQ ID NO: 225980 - DNA, 569 bp, Homo sapiens
aacttaaaaaatatctagcccttgactttggggtccaaaatttgaataagcaatttataaaactaaactattttccagtaaattcacttgaattgattttgcatttacctttattgcttcatatgtcccatataacataaaaatgttgagtataaaatgaaatgaaaaatagttcagtgaaataataagatttggtttaattattttttacttcataaggccactgaaatgttttgataaatagatatagttcatcattttctgtacaatgcatggcttttgaaaataataatgatcccaggatctggaccccttatttgatggtctctattctttaccaartccttatttttttttgtttctttgctctttggagacaatattccctgggtgtttttctttttttctcgcttttgtatatcaacaaagggcaaaataataatttgttttgctctttctgaaattatatttttaaatgaatttaaatttctaaaaatgaatgttctttccaacacattggagtgaccagtaatcttccctgctttttattaagaagactgttgcaattt

SEQ ID NO: 225981 - DNA, 547 bp, Homo sapiens
cacaggtggtgggaatgtaaattagtacattcctcaaaaaattgaaacaagaactaccatctgatccaacaatcccactgcggagtatatatctgaagaaaatgaaatcagtatgtagaagggatatctgtactcccaggaccattgtagtactattcataatagccaagatattaatagaatcaacttaagtgtccaacaatggataaatggatgaagaaaacgtggtatatatacacagtagaatgctatttaacattaaaaagaatgaaattctgycatttgtgacaatatggatgaagttggaggatattatgttaagtgaaataagccagacacagaaagacaaatacagcatgttctccctcatatagggaatctaagaatattaaagtcataaataaaacagctcttacctttccagagaccgggcaagaggagtggagggatggggagagcatggccaatgtgtacaaagttacaagtacaaaggaataataagttctgttgtcctatcgcacattagagtgattatagtcaacaagag

SEQ ID NO: 225982 - DNA, 566 bp, Homo sapiens
ccatacaatttgccactattaatgctggaaatgctcccaacaagtagagaaaagtcatggcattataataaaaagttgaatttcttgatatatgctgtagattgacatttgcagctgcagttgtctgccatttcaagataaaagaattcagtgtaaggaccactgtaaataaataaaaggaaatttttgaaaccatagatgcaactacaccagcaggaaggaaaaccattcttcttttttttttgagaaatacctttttataccctattgaaaatgcagtttttatccatgtaatagtccattctaacactgctatgaagaactacctgagactggataatttatgaagaaaagaggtttcattgactcagtttcgcaggcttaacaggaagcgtggccrgaaagcctcaggaaatttacaatcatgatgtaagggtgaaggggaagcaagcaccttcttctcatgactggcgagagggcaagagtgaaaggggaagtgccacacatttttaaacgatcagatctcttgagaattcacttgctctccaagaaaagcacagggaaat

SEQ ID NO: 225983 - DNA, 597 bp, Homo sapiens
gatgtaacttgctcctcctttccttctgtcacaattgtgaggcttccatagccacatggaactgtgagttctccattaaacctctttcctatgtaaattgtccagtctccagtatgtctttatcagcagcataaaaacagactaatacatgataacattttcttttacagactgatgcaacatgaaagtttgaaacagcaaaatatatttaataataaacctttaatgttttcaagagatatttatgtaaagggaatcaggggaaacatggctgggcagttagtagggtctatcttcagaatggtcttgctttaaatcttaaggcactttagactgttgaaaatacattatagaataggaagaaatgrtaagcgctataatctaaaagttcactttgttagcatgacaggggacacatttaaagggagaagaaacaaagcagatattttgataaattgctattttaatatgccaggcaaggattatgaataaaaaccaaacaattcaagtgaattaaatattcaaaaccaaataggttaacctaaaaataattagtattaacatagtaaaatattcaatctatatttagacctaagt

SEQ ID NO: 225984 - DNA, 577 bp, Homo sapiens
tggggggaaggggatgtaccacctctttgatcctttggatgactcagccattccagtctgcaggctttggagagtccaagccaatagaggcagaggcagttacccagcacgactcagctgttttgtccaagtgtggccagactgctttaagagggatctagattcattcctcctcactcagtgtgtcttcccagcggcaggcttctagccagcccagcttatgttctatggctgccagagttctaatttttccctgtgttggagtgccccagggggcagcacaggctacaaccctggctgttcgggcacctcacatgatccagcctgtgagccttagacagctscccgaaattgcaggttgaacccaacacagcacagctgctctaccaaaactgctcgactgcttctttaaggaagtccctgatcccattccccctgactgggtgagatctcctaattggggtctccagccacctcctacaggcatgttcaggctggcaacaggtcagtacctccctgcccacaaagcttccagaggaaggggcaggctgccatctttgctgttcacagcttgtac

SEQ ID NO: 225985 - DNA, 577 bp, Homo sapiens
tggggggaaggggatgtaccacctctttgatcctttggatgactcagccattccagtctgcaggctttggagagtccaagccaatagaggcagaggcagttacccagcacgactcagctgttttgtccaagtgtggccagactgctttaagagggatctagattcattcctcctcactcagtgtgtcttcccagcggcaggcttctagccagcccagcttatgttctatggctgccagagttctaatttttccctgtgttggagtgccccagggggcagcacaggctacaaccctggctgttcgggcacctcacatgatccagcctgtgagccttagacagctccccgaaattgcaggttgaacccaacmcagcacagctgctctaccaaaactgctcgactgcttctttaaggaagtccctgatcccattccccctgactgggtgagatctcctaattggggtctccagccacctcctacaggcatgttcaggctggcaacaggtcagtacctccctgcccacaaagcttccagaggaaggggcaggctgccatctttgctgttcacagcttgtac

SEQ ID NO: 225986 - DNA, 567 bp, Homo sapiens
aacattaccctgagaccaaaaccagcaaggacacaacagataaatctacaagtcaatattcttaatgaatatagatgcaaaaatccacaacaaaacacttgcaagctgaattcaacagaactttagaaagattatttaaaaggtcaagtggwattcatcttagaaatccaaagatggtttaataatatatgcaaaacaatagaagtgatacaccataataacaaaaaggcggacaaaaaccagagacctcctgtagtcccagctactcgggaggctgaggcaggagaatggcgtgaacccgagaggcggagcttgcagtgagctgagatagcgccactgcagtccggcctgggagaaagagcgagactgggcgaaagagcgagactccgtctccaaaaaaaaaaaaaaaaaaaacaacccagagacctgttcaatagacacagaaaaatcatctgacaaaattcaatatcccttcatgataaaagctttcagcaaattaagtatagaaggtttatacctcaacacaataaaggccgtatatgataaatgtcagctaacatatactaa

SEQ ID NO: 225987 - DNA, 567 bp, Homo sapiens
aacattaccctgagaccaaaaccagcaaggacacaacagataaatctacaagtcaatattcttaatgaatatagatgcaaaaatccacaacaaaacacttgcaagctgaattcaacagaactttagaaagattatttaaaaggtcaagtggaattcatcttagaaatccaaagatggtttaataatatatgcaaaacaatagaagtgatacaccataataacaaaaaggcrgacaaaaaccagagacctcctgtagtcccagctactcgggaggctgaggcaggagaatggcgtgaacccgagaggcggagcttgcagtgagctgagatagcgccactgcagtccggcctgggagaaagagcgagactgggcgaaagagcgagactccgtctccaaaaaaaaaaaaaaaaaaaacaacccagagacctgttcaatagacacagaaaaatcatctgacaaaattcaatatcccttcatgataaaagctttcagcaaattaagtatagaaggtttatacctcaacacaataaaggccgtatatgataaatgtcagctaacatatactaa

SEQ ID NO: 225988 - DNA, 584 bp, Homo sapiens
aaatctattatacaacatagtgattaaagttaaaaaccaaatattgaattcatgaaaaatactgagagtgaattttaagtgttctcaccataataatggcaacgatgtgaagtaatgtatatgttaactagcttgatacacaatgtgtgtatatacatatatatcaaaacattactttgttcatgattaatatatacaattttatctgtcaattgaaacatattttgttaaatagagaaaacacatttttcaactcagaattttaattttaattttaatatgggaaatattaatraataagatttacaaaatgaaagatttttataaactcatttttttgagattgaagaaagttcttgagatcaaagcatttgaatataatcctagatatttttagtgtaacatacttcccatagaattatttatcttttcctttgcttatcagtgatatatacctgtccgtgaaatgaaatctcatgttgagcccctatatataaaacaaatttaatatgaaatattttgatggaagatgagctggggcctgtcctccttctccccttttggtaatcttatggttttatgaa

SEQ ID NO: 225989 - DNA, 584 bp, Homo sapiens
aaatctattatacaacatagtgattaaagttaaaaaccaaatattgaattcatgaaaaatactgagagtgaattttaagtgttctcaccataataatggcaacgatgtgaagtaatgtatatgttaactagcttgatacacaatgtgtgtatatacatatatatcaaaacattactttgttcatgattaatatatacaattttatctgtcaattgaaacatattttgttaaatagagaaaacacatttttcaactcagaattttaattttaattttaatatgggaaatattaataaataagatttacaaaatgaaakatttttataaactcatttttttgagattgaagaaagttcttgagatcaaagcatttgaatataatcctagatatttttagtgtaacatacttcccatagaattatttatcttttcctttgcttatcagtgatatatacctgtccgtgaaatgaaatctcatgttgagcccctatatataaaacaaatttaatatgaaatattttgatggaagatgagctggggcctgtcctccttctccccttttggtaatcttatggttttatgaa

SEQ ID NO: 225990 - DNA, 615 bp, Homo sapiens
tcattccacttctaatgtttcattgcacttataatacatttaaaatatttcattccacttataatagtgytttggcattttcagagaacatagcatcactcttattcaaaatataaataaaagttaaaatttttatttttacttaatgtagccttcaatggctacatatgaacctctagagagctgtatgtggctccagggtcaaatattgctagtctcaggcttgagaattatgagctcaattctctgtattgaccttagaaaagcaaaactgttatgctcatcctactatggaggaatgcccaaggctcatccttattttcttcttaataatccttgaatcacaccttagacatactactgtctagcatttgaatggacttacttctccaagtagttttcagcagaaaacttcctgccctgagaaagtcagtattgggtgttctttgaaagcttggttattttccctgacttatttatttcagaatatccataccttgggcatatatgttgccattgaagcagaaatccttttattttctgtgagcattagactttttgtgtttaaatttttgttaaaaataattgtacaatagtagagataatagtataatg

SEQ ID NO: 225991 - DNA, 615 bp, Homo sapiens
tcattccacttctaatgtttcattgcacttataatacatttaaaatatttcattccacttataatagtgttttggcattttcagagaacatagcatcactcttattcaaaatataaataaaagttaaaatttttatttttacttaatgtagccttcaatggctacatatgaacctctagagagctgtatgtggctccagggtcaaatattgctagtctcaggcttgagaattatgagctcaattctctgtattgaccttagaaaagcaaaactgttatgctcatcctactatggaggaatgcccaaggctcatccttattttcttcttaataatccttgaatcacaccttagacatactactgtctagyatttgaatggacttacttctccaagtagttttcagcagaaaacttcctgccctgagaaagtcagtattgggtgttctttgaaagcttggttattttccctgacttatttatttcagaatatccataccttgggcatatatgttgccattgaagcagaaatccttttattttctgtgagcattagactttttgtgtttaaatttttgttaaaaataattgtacaatagtagagataatagtataatg

SEQ ID NO: 225992 - DNA, 466 bp, Homo sapiens
cctccctagtagctgagactacaggcatgtaccaccacaacaagctaatatttatgtatttatttatttatgcatttattgtcccatgtttcccaggctggtctcaaactcttgggatcaggcratcctctcaccttggtctctcaaagtactgggattacaggtgcgagtcatgagtataggcacaaaaactctgtatggaggtttgtggtatggatggttccatcatccagataatgaacatagtatagatagtttttcaacccacatcctccaccttccctccctctttcattacctcctaaatttaatttttttaaaggactctttatatgttgtggatatttgccctttatcgcacgtagtacagattattaaaagtagtttttcattggtcttttaactttgattatgggttaatttttctcatgtaagtttttaatttgtaaagaaagaattatattgt

SEQ ID NO: 225993 - DNA, 486 bp, Homo sapiens
taattcatatctgtcagtatttttaaaattatttccctgtttattgaaacttccattaaataagtgtctgaaatctgtaaaaacaactcaagtaaaaaaattcctttaatttttaagagcaacaggtactttttgaatttgaataaagacacatatagatacgtgggttttacataagtgcctgtttgtaattttatggttgcacatggtgagtaaagttgtttgcagccaccactattgcattattaggaagccaagtaccagccacttttatagaataggactgcaataggcattttgtcactaatgaaataygacttgggggtactgtgatacatggaatcaaatatttcaccatactttcttgccttagcactcgacattcctaccattaatattgcttttctagctgaagcatattaaagatcaattgaaaagtacactagaccagatacacagaaatctgagttccaaccccatctcatc

SEQ ID NO: 225994 - DNA, 486 bp, Homo sapiens
taattcatatctgtcagtatttttaaaattatttccctgtttattgaaacttccattaaataagtgtctgaaatctgtaaaaacaactcaagtaaaaaaattcctttaatttttaagagcaacaggtactttttgaatttgaataaagacacatatagatacgtgggttttacataagtgcctgtttgtaattttatggttgcacatggtgagtaaagttgtttgcagccaccactattgcattattaggaagccaagtaccagccacttttatagaataggactgcaataggcattttgtcactaatgaaatatgacttgggggtactgtgatacatggaatcaaatatttcaccatactttcttgccttagcactcgacattcctaccrttaatattgcttttctagctgaagcatattaaagatcaattgaaaagtacactagaccagatacacagaaatctgagttccaaccccatctcatc

SEQ ID NO: 225995 - DNA, 588 bp, Homo sapiens
taactttcttttctcctggaatcacttccttttcactgaataaaatcattrccctttccatgatggaaggggtccatgaataaggcttatatcatattgacagctcaacattagtacttgttttcagaagaaggcatggatttactaaaaaatcctaaatgtttgtgccatgattctgctattaggtctaataagagactctataaagcatctctgtttatcagagacaccttgtatactattggatcttctaagtcatataagactcaagtagaagagcagtttggacttgctgcagaactttctcttgccctggtcttcttcaaatctggcagccatatgtgttattcagtacatgagtcacattagcagagaaaaatgtataaaatgtcttttaaataaaaaaactcataaagcattgtgcttcctttatagtgataggtaggcaaagtactcaacttgtcttttccattgaagagaatattgtgatatgctttagactacagaagtccacaaacttcactgaagatgagttcttaaattttcctggggtatatctctgacttgcttaggtcttactaaggcact

SEQ ID NO: 225996 - DNA, 588 bp, Homo sapiens
taactttcttttctcctggaatcacttccttttcactgaataaaatcattaccctttccatgatggaaggggtccatgaataaggcttatatcatattgayagctcaacattagtacttgttttcagaagaaggcatggatttactaaaaaatcctaaatgtttgtgccatgattctgctattaggtctaataagagactctataaagcatctctgtttatcagagacaccttgtatactattggatcttctaagtcatataagactcaagtagaagagcagtttggacttgctgcagaactttctcttgccctggtcttcttcaaatctggcagccatatgtgttattcagtacatgagtcacattagcagagaaaaatgtataaaatgtcttttaaataaaaaaactcataaagcattgtgcttcctttatagtgataggtaggcaaagtactcaacttgtcttttccattgaagagaatattgtgatatgctttagactacagaagtccacaaacttcactgaagatgagttcttaaattttcctggggtatatctctgacttgcttaggtcttactaaggcact

SEQ ID NO: 225997 - DNA, 573 bp, Homo sapiens
gacttgcttaggtcttactaaggcacttaagtatctgatgttgcttattaatcacgtccaaagatcctaatgtcaaaaatatagtgaacagtgtggcattctaatgtcaagatgatcaagatcaagagaattgtagactaggattatattatagcagagggcaggataattaacacagccctgaggcaagactctgaaggtgtgatattgaccttgtcaagtaaaagtaatctgcttattatggcttgtgtaaattggtacagagggcaaagcaatctccaggtcaattatctgcattccagattctaggaaactggggtgacttacttcaggatatatgccacatttggtatagcagctatagtcggagtcattatgtaaataagatcatgataattcaagatcaatttaccttccacacaagaagaaccaagataaatgagtaggtgaattttttaagtctttggtgatgttactaaattctgcaaacacyccagttatgtgacattgcttaaggttcactaatttggtaaggacgggaagtaccaaggacttcccacttggtaccactat

SEQ ID NO: 225998 - DNA, 416 bp, Homo sapiens
tcaggaactgagaaggtaatcacaaattgggtcaatgaacttattgtgccaaytctgattcaaacttgggacaattccctatttatcacatgatctccagtagctcctaatttgaccagtaaactacagtggcttttttgggttctcagtgatcaatgttaattaagacacaagaagtcttataacccatatgttcttgttattttattttccacagtgcaaagtcactgtacagttgtaagtccttttgaaagaagtcttgatgtaagagttacaatacacagaatataggcttatagcagcatatcaactcctctcctcaagaagattgcattagtctgttctcacactactataagatactacctgagactgggtaatttataaacaaagtaagtttaattgactcagaattc

SEQ ID NO: 225999 - DNA, 416 bp, Homo sapiens
tcaggaactgagaaggtaatcacaaattgggtcaatgaacttattgtgccaactctgattcaaacttgggacaattmcctatttatcacatgatctccagtagctcctaatttgaccagtaaactacagtggcttttttgggttctcagtgatcaatgttaattaagacacaagaagtcttataacccatatgttcttgttattttattttccacagtgcaaagtcactgtacagttgtaagtccttttgaaagaagtcttgatgtaagagttacaatacacagaatataggcttatagcagcatatcaactcctctcctcaagaagattgcattagtctgttctcacactactataagatactacctgagactgggtaatttataaacaaagtaagtttaattgactcagaattc

SEQ ID NO: 226000 - DNA, 574 bp, Homo sapiens
tgatcttactaataaaggtgagaaattatatgattatatgtcaacaaaaaaatttttgaaactccaatgcccatttatgataaaaactagcagcatactaggaatgaaagaaaacttcctcaatctgatagagtttctataaaaaaacattatgcatcatgagaaacattgaagaatcctgcatctttaactgataagtcagtaactgcttttaatgtcaataaagaaattggttaaactgtcacttactgtgttttaggactaagaccattgtataataacatgagaacttcaagaaatttgatacagaaaattggataggaagtcttytgggattacttccaagatacagaccaaagcccacttgatcgttaaaagaagattcaaccttcctaacagtgtctttctgcctgtagccaacaattcaagatggttaagagtcagaaactcatgtaatttcttggattgcaaagacctttttttttaaaaaaaaaaaaaaaaaactcaatctaagaatataactgcataatatttctgtcattgtaatttgataacctaatgcaattttcggaat

SEQ ID NO: 226001 - DNA, 481 bp, Homo sapiens
gtacatctttttaaacataaatgagtgcccaaaacacccaacggaacagggatggcaaagatgtcctgtagattgagaatggggagggggggaaataatcatctgtgttttctgaaatagaaatcttaagggggacagctgcctacatgtagagaattaccagggagtgggttctagactcctgaacattttttttggagcccagtcattcagggattcttcactcttygcttcttagcacatgttattgtcttaattgcaagctccacaaacctctgatcaacactgcccctcctaagagacgagcacacgtgcaatccctttggaaaagcttaatcagccctaattgagtcacaataccaactcaaattaattagactttcagaaagttgtcaacatccttcaagataacctgggctgactgctccatagccttcacaggggagtacgtgttcaaattctaaaagcttgaaattctacc

SEQ ID NO: 226002 - DNA, 481 bp, Homo sapiens
gtacatctttttaaacataaatgagtgcccaaaacacccaacggaacagggatggcaaagatgtcctgtagattgagaatggggagggggggaaataatcatctgtgttttctgaaatagaaatcttaagggggacagctgcctacatgtagagaattaccagggagtgggttctagactcctgaacattttttttggagcccagtcattcagggattcttcactctttrcttcttagcacatgttattgtcttaattgcaagctccacaaacctctgatcaacactgcccctcctaagagacgagcacacgtgcaatccctttggaaaagcttaatcagccctaattgagtcacaataccaactcaaattaattagactttcagaaagttgtcaacatccttcaagataacctgggctgactgctccatagccttcacaggggagtacgtgttcaaattctaaaagcttgaaattctacc

SEQ ID NO: 226003 - DNA, 481 bp, Homo sapiens
gtacatctttttaaacataaatgagtgcccaaaacacccaacggaacagggatggcaaagatgtcctgtagattgagaatggggagggggggaaataatcatctgtgttttctgaaatagaaatcttaagggggacagctgcctacatgtagagaattaccagggagtgggttctagactcctgaacattttttttggagcccagtcattcagggattcttcactctttgcttcttagcacatgttattgtcttaattgcaagctccacaaacctctgatcaacactgcccctcctaagagacgagcacacgtgcaatccctttggaaaagcttaatcagccctaattgagtcacaataccaactcaaattaattagactttcagaaagttgtcaacatccttcaagataacctgggctgactgctccatagccttcacaggggagtacrtgttcaaattctaaaagcttgaaattctacc

SEQ ID NO: 226004 - DNA, 537 bp, Homo sapiens
atacagaggagagaaatataaaaagttcctacttgatcgttgttgctgtaggttagcccaggccacacagaaggattgtaacagtgtatgagtgacagtctggagtccttggcacatatatttctactttactttgtcatgggygaccttgctattgacccccatttgttacattcttctactggttcccctacctagttctggtctactttacttctcccctgtgactgctctccttaaactctgatgagcatcctctgattatagctgaaagagaaaaagggaatttattaggaaggtacatgggtgccttgcagaagtcaagggcaggcaggtactggacccaggcactaaaaatgcaggaggatcctcacttactagaacatgtgcatttctgacattcttctttctttgtctttgcagaatggattcctctgctttgctggaggaagtatggtaggtggaagatgccaaaccacagtacccaagcttcacatgtgtctaataggtccaattatatcaaaaagactaacttcc

SEQ ID NO: 226005 - DNA, 539 bp, Homo sapiens
atatgtttaaaatctaatggagaatatacacaacatggaaggagagatgggtaatgtaagcagagaggtgggaactctaaggaaaaattaaaagaaaatattggaaataaaaaacacagtaacagaaatgaagaatcattttgataggctcattatttgaatagacacagccaaggaaagaataagatggctaatagaaacttcctaaactgaagtacgcacaggataaataagtaaatataatagagcagaacatccaaggactgtggggcaatttcaaaaggtgtaagattatctcagcttgaataccagcagaacaagaaagaacagaacagaagaaatatttaaattaataattgtggggaaatcctgatagtaatgacagacaccacatctaagaaatttagaaaacactaaataaaatgatttttaaactacaaataggtgtatcatattcagacttaagaaccaaagataaagaaaaagcttgaaagaatacagacagggaraacaaacaagaagccttccttataatgaat

SEQ ID NO: 226006 - DNA, 672 bp, Homo sapiens
attggtcagggatgaaatcataggagtcaaagttgtcttcttgcactgagtcagttcccrggtgggggccacaagataagatgagccagttaatctatctaggtgtgccagctgatccatcaagtgcagggtctgcaaagtatctcaagcactgatcttaggagcagtttacaaagggtcagaaccttgtagccttcagctgcatggctcctaaaccataagttttaatcttgtggctaatgtcagtccctacaaacacaatctagtccccagacaagaaggaggtctgctttggaaaagagctgttatcatctttgttttaaactataaactaagtttatcccaaagttagtttagtctaagcccaagaatgaacaagaacagcttggaggttagatgcaagatggagtcgattaagttagatctctttcactgtctcagtcataattttgcaaaggtgatttcagcactagtcttgtcaaacattgagaaatcacacatgtaagtacacagatccatcgttgtttattcctgcactctgtagtgaaccaattttcctggaaagttgcattctttgttctaaatcgtaattactatgactaaatgtcatagtaattacattattttgtcttaaatagcaataactttgtcctaacaataattcccaagtag

SEQ ID NO: 226007 - DNA, 426 bp, Homo sapiens
ctctcgtacacagccaacccctcctgagagctggctgactgtagggaaaataatttcctgattgactgtccaatcayacttcctgcttagccgcctctccaacactgtgttctttccagctttgtttactcttgcctataaaatgaaaagccctttctgcctaatctttgcagatcttgtcactggtgtattctccctattgcaataatctttttgaataaagtctttgcttattttagatttgtttttgacaataccaaagctattttctagacaaaattcttaaatttatttctttgttttctcatttccacttctcattattgcttacagtctttcaatcttaatatcatttgaaacaactggtggggaggctactttcttaagccaatctcagccatgagtcattttattcaactaagagat

SEQ ID NO: 226008 - DNA, 426 bp, Homo sapiens
ctctcgtacacagccaacccctcctgagagctggctgactgtagggaaaataatttcctgattgactgtccaatcatacttcctgcttagccscctctccaacactgtgttctttccagctttgtttactcttgcctataaaatgaaaagccctttctgcctaatctttgcagatcttgtcactggtgtattctccctattgcaataatctttttgaataaagtctttgcttattttagatttgtttttgacaataccaaagctattttctagacaaaattcttaaatttatttctttgttttctcatttccacttctcattattgcttacagtctttcaatcttaatatcatttgaaacaactggtggggaggctactttcttaagccaatctcagccatgagtcattttattcaactaagagat

SEQ ID NO: 226009 - DNA, 426 bp, Homo sapiens
ctctcgtacacagccaacccctcctgagagctggctgactgtagggaaaataatttcctgattgactgtccaatcatacttcctgcttagccgcctctccaacactgtgttctttccagctttgtttactcttgcctataaaatgaaaagccctttctgcctaatctttgcagatcttgtcactggtgtattctccctattgcaataatctttttgaataaagtctttgcttattttagatttgtttttgacaataccaaagctattttctagacaaaattcttaaatttatttctttgttttctcatttccacttctcattattgcttacagtctttcaatcttaatatcatttraaacaactggtggggaggctactttcttaagccaatctcagccatgagtcattttattcaactaagagat

SEQ ID NO: 226010 - DNA, 499 bp, Homo sapiens
ttaaatttatttctttgttttctcatttccacttctcattattgcttacagtctttcaatcttaatatcatttgaaacaactggtggggaggctactttcttaarccaatctcagccatgagtcattttattcaactaagagatatagctgggccatgatagcttcatgacaaatggaaaatctcatatatgttaatgcccagttattttatgaatctgagattgaaacatccgccaagtgtcacattaagcgtcttaagcagcttcatttacacctcccacaagctgcccctaaagtgaagaacgaaatggaagatgagaattcacaatgatgaggtagcatgaattaaataggagagattgaggaaaagttcttggagaaaaaagatatatatataaatatatatatattcatatatatgtgtgcaagtacatatatatgtgcatatatacacataaaaaaagaagacattattaatagttcatttacatctaaaaa

SEQ ID NO: 226011 - DNA, 499 bp, Homo sapiens
ttaaatttatttctttgttttctcatttccacttctcattattgcttacagtctttcaatcttaatatcatttgaaacaactggtggggaggctactttcttaagccaatctcagccatgagtcattttattcaactaagagatatagctgggccatgatagcttcatgacaaatggaaaatctcatatatgttaatgcccagttattttatgaatctgagattgaaacatccgccaagtgtcacattaagcktcttaagcagcttcatttacacctcccacaagctgcccctaaagtgaagaacgaaatggaagatgagaattcacaatgatgaggtagcatgaattaaataggagagattgaggaaaagttcttggagaaaaaagatatatatataaatatatatatattcatatatatgtgtgcaagtacatatatatgtgcatatatacacataaaaaaagaagacattattaatagttcatttacatctaaaaa

SEQ ID NO: 226012 - DNA, 472 bp, Homo sapiens
cattctttataatgagttttgcattttcttcaattttctccgggcagatatatttcaattccacataacataatagggaaattgtgttaagataatacacgaataaaaggtgccccttcattttctttttttcctaagggaaaaacaaaatacaagagatagtaaagtgaaactttgctaaaaaatatagcacraggttttcacattgctattattgggaaaaggctcaaaatccaccatacaaacagggctctctgtgtcattcaaagatactaagatttcaggatatataccagaaaagttcctttatcgtttctctttgtttattgttattattgttattattattgtcatcatcgcagtcatcactattatcattatttttgtgattgtcctcatcctcatgatgattcgtggccaggaagactagctcataaccaagtagatgtagcaacagatccaaaggagtaat

SEQ ID NO: 226013 - DNA, 561 bp, Homo sapiens
tgtatttttaaaactcagcacagtgaaagagggtggatgccaagtagatcttaaatgggaatctgcttttctgcttctacttgatagacttggaacaagatatctaacccctttgattgtcagttttctcatctgtaaaatggaagaattgtaaaacataaaattaaaagagaacaaataaaatactataagtgaaattgttgatacattattaattctcagtaaatgttagctcaactttgtctcccttttctgaaaaccaaatacccccaaatataaattgtcctagtgaaaccaggmtaaatacatttctgttctttcacctgattctcaggtgaaaggtcttttcagcttttatttattttttattctgaattgacaaataaaacagtaaagttgattaaggaaaccaaaccagtatttatgaagcactaacttcacagaaagtggggcatttgatcatccagtcattctcatgaggctcgtattattaccccatagaataggtgataaggacaaggcttaaagtaactcacctgacatatttaataaatctcagag

SEQ ID NO: 226014 - DNA, 638 bp, Homo sapiens
tttttatatgatggaatccagcaacaagaaatagtgtgattgatgatatccaaagttatgtcctgttacygtaagtagtggctggtatgaatttctctcaaatagcaagatgtatagagaataataatcggcaattccaagaagagaagtttggcatcatatatgtcacacattgcttcatccccatcatctttattaatagggcctcagttttattcagagagaaaatggccaggaaaaatgcataactgcccagagctccttgcagctaagagtagccatgtgactctttctgaccaatgagatggaaatggaagtctacgtgaagaataagctatgtttcttcacaatagaaagaaagacttgactggtggcccattgcattttgtcttttactcttcttcctgtatagtgatggatgcaatattaaaggcagtggagcaaaggattagaagaaactgagacacaatgactttctcaagcatcttccttatccctctactccctaactgcagattttgattaatgcaaaaacaaaaagtccacttgattaagctactgtatattggattttattatatgcacaaaaacctacagacagagcagccagtgagctattataagaaaatgtttcatat

SEQ ID NO: 226015 - DNA, 638 bp, Homo sapiens
tttttatatgatggaatccagcaacaagaaatagtgtgattgatgatatccaaagttatgtcctgttaccgtaagtagtggctggtatgaatttctctcaaatagcaagatgtatagagaataataatcggcaattccaagaagagaagtttggcatcatatatgtcacacattgcttcatccccatcatctttattaatagggcctcagttttattcagagagaaaatggccaggaaaaatgcataactgcccagagctccttgcagctaagagtagccatgtgactctttctgaccaatgagatggaaatggaagtctacgtgaagaataagctatgtttcttcacaatagaaagaaagacttgactggtggcccattgcattttgtcttttactcttcttcctgtatagtgatggatgcaatattaaaggcagtggagcaaaggattagaagaaactgagacacaatgactttctcaagcatcttccttatccctctactccctaactkcagattttgattaatgcaaaaacaaaaagtccacttgattaagctactgtatattggattttattatatgcacaaaaacctacagacagagcagccagtgagctattataagaaaatgtttcatat

SEQ ID NO: 226016 - DNA, 561 bp, Homo sapiens
ccattctggggcctggtgaactgtagccctcttctcattgctccacgaggcagtgccctagtgggtactgtgtgtgggggttccaaccccaaatttccttttcacactgccctagcagaggttcttcatgaggcctctgcctctgtagtaaaattctgcctggacatccaggcatttccacacatcctctgaaatccaggtggaggttcccaaatctcaattattgtcttctatgcacctgcaggaccaacaccagatggaagccacaaaggcttggagcttgcaccatctgaagcaacagcctgagctgtacactggcttcttttagccacagctggaggtgaagcagctgggaccctaggcaccatgtcccaagsctgcatagagcaggcggaccctgggcccagaccatgaaaccgtttttccctcctagccctccagtactatgataggaggggctgccatgaagatctctgacatgccttggagacattttcctcattatcttggtgattaatatttggcttctcattacttaggcaaatttctgtagcaggcttg

SEQ ID NO: 226017 - DNA, 561 bp, Homo sapiens
ccattctggggcctggtgaactgtagccctcttctcattgctccacgaggcagtgccctagtgggtactgtgtgtgggggttccaaccccaaatttccttttcacactgccctagcagaggttcttcatgaggcctctgcctctgtagtaaaattctgcctggacatccaggcatttccacacatcctctgaaatccaggtggaggttcccaaatctcaattattgtcttctatgcacctgcaggaccaacaccagatggaagccacaaaggcttggagcttgcaccatctgaagcaacagcctgagctgtacactggcttcttttagccacagctggaggtgaagcagctgggaccctaggcaccatgtcccaagcctgcatagagcaggsggaccctgggcccagaccatgaaaccgtttttccctcctagccctccagtactatgataggaggggctgccatgaagatctctgacatgccttggagacattttcctcattatcttggtgattaatatttggcttctcattacttaggcaaatttctgtagcaggcttg

SEQ ID NO: 226018 - DNA, 593 bp, Homo sapiens
gataatggctgagacaccttgcccttatgattacacattcaaacatggctaaagtgaaattaaaatatttaaccagtggtatggcatgggcaccagccaaacagaacagagcaaggccctggactttcctcgtcatgcctcacatcagccttttaggtgctggatcacaaaaaggccaggatgtcctggggtgggacaagagctgctggggccattcatggaacttggggaagcagctataatattatactttttcagacattttaacacaggtatggtgttatcaatagtaggggctgaatactaacccaacatataagaaacaccttagagtcctaagtattactttatttgaaggtttttattcttacatgaaagctacgaatgcttacagatctgaaaataaaaacaaattcccaccaatgctatcaataatcttttttattgttcttcttcacatccttataattcaacattttttgaggcagccaagyaataattcctggcttctccatagtagtgttaagctcatcttgcaatgaggagcccaaaaccatactatgttccctgctttcttcaataaataaagtgga

SEQ ID NO: 226019 - DNA, 554 bp, Homo sapiens
tgggaccacaggcacccgccaccacgcccagctaattttttttttttttttgtatttctttagtagagatggggtttcactgtgttggccaggctggtcttgaacccctgacctcatgatccccctgcctcagcctcccaaagtgctgggattactgccatgagccaccgtgcccggctgcgtattttatttttttggatggctaacatgctaagctgtatccatagccagatagataaaaggttcatgrgccagtagcttttctttacagcgtttttttgtttatttgtttgattgcttttattgttgtgattgtacagccaaagatgatattcagttcacaataaagtttattttacatcatttactctttcatttgtcttgtaaatactgtattgtcaagtgatagaaatttgtcctactaaccaaaatatttcctgctaaccagccccctttgttttaagccaatagaatcctcttttttaaaaaattcaaagctcattccaggagtctgtggggcgttctttctgaactgtagcaattcataatgctcc

SEQ ID NO: 226020 - DNA, 483 bp, Homo sapiens
gaagagggcctgagttagggaaggaagagacttggctgttagttgtgtacaggtgatagctgcagctcagagaatggccaagatggtcartgggctaatatggagaagtagtgggctgggcatggaattctggcagatgattgcacgtgggatcagtaaaaggaaagaaagagccaagcagagaaaggaagcatggctggagaggctggtggagaactaggcagcatttccaagaagaagggggtgactgatggcgtcagacactacagaggagggtgaagactgagaagaagccacacgtaggcttttggagacctctgaaagagttgtttccatgtccactgagagcagaagattgattgagagagggtgattaagggaatagggagaagtaaagacaacaacttacgatctggcagtgaaatgaaggtagtagtggtcactctaaatggttgaggggggctgattggggcaacagaaaac

SEQ ID NO: 226021 - DNA, 416 bp, Homo sapiens
ctattaagcagtgagcagttgaagaagtatccttaatatgcctgtctggagaacaatttcagtattgttatctcctccctgttacagggaaacttaataggtgtaaatgtggattttcaggatggtaaagacctgacgatgaatcgattatggaatatattaagggatgtagaaatctgtacttytgagctgtagttgtgtgcatgtgtatgtgtgtgttgggggaacggggaagacaccattgatatcctgttagaggcagagattgcagtgtggtaggttaataataaatattaaatatcccaataatagggtagcaaaaaagaaggaagtgagagatccccgtttgctgactaaaataggatctagcatattatgcttttaatacagtacattttttaggtacacaagaattc

SEQ ID NO: 226022 - DNA, 527 bp, Homo sapiens
aaaggaacaggagctctgcatcctgtcctgctcagtagaggaggaaaggagacagctcctccgggaaatctagaggaatttgcattctctgcytgagctggcttggggccagctttgtggaatcctggtgccagttctttttctgcttcaggggctattttttaaaaaaatcagtagttacattttatgtttaccaatagatttatatagcaaatgatatttgttttttatttaaagccacaatatcaagtgtctttttaaaaatataaataataatcctcatggtatgcagatgtagcagaaaattgtgcaggtggtatgtgggcaactggatttggggaaatgctgctgcatgtcatgcacctctccataggtaggtttttcccctttattttctccctcttttcagcaaaactctcccctctactttcccactgaaaaatagcaatggtgagttaaactagttagtctgatcatggtgtgggcaatgggtggttgggttaagattcttatttcatttgacttgt

SEQ ID NO: 226023 - DNA, 393 bp, Homo sapiens
aaccatgcacccaccactaccattagcatgtagaacatttctataaccctaaaaagttcmcatgttcattacagttagtctcccatccctagacaactaattgctttctgtgatgacagattcattttgcctgatgtcaaattccataggaatggaatctcatagtatctatcatttgcgtttggcttcttatattcaacatagtgtttttgaggttttttttttaatgtgcttgtaccagtttattttccttttttattggttagtagtattttatttggaatgtaccacagtttatccattcacctcttgatggacatttgagttgtttgtcatttttggcaaaacaagtatttatctcaagaagaatgtgactggagtgagacctagcca

SEQ ID NO: 226024 - DNA, 393 bp, Homo sapiens
aaccatgcacccaccactaccattagcatgtagaacatttctataaccctaaaaagttcacatgttcattacagttagtctcccatccctagacaactaattgctttctgtgatgacagattcattttgcctgatgtcaaattccataggaatggaatctcataktatctatcatttgcgtttggcttcttatattcaacatagtgtttttgaggttttttttttaatgtgcttgtaccagtttattttccttttttattggttagtagtattttatttggaatgtaccacagtttatccattcacctcttgatggacatttgagttgtttgtcatttttggcaaaacaagtatttatctcaagaagaatgtgactggagtgagacctagcca

SEQ ID NO: 226025 - DNA, 393 bp, Homo sapiens
aaccatgcacccaccactaccattagcatgtagaacatttctataaccctaaaaagttcacatgttcattacagttagtctcccatccctagacaactaattgctttctgtgatgacagattcattttgcctgatgtcaaattccataggaatggaatctcatagtatctatcatttgcgtttgrcttcttatattcaacatagtgtttttgaggttttttttttaatgtgcttgtaccagtttattttccttttttattggttagtagtattttatttggaatgtaccacagtttatccattcacctcttgatggacatttgagttgtttgtcatttttggcaaaacaagtatttatctcaagaagaatgtgactggagtgagacctagcca

SEQ ID NO: 226026 - DNA, 336 bp, Homo sapiens
tctcaaatttgcaaatactgcttagcataaaatctcctgcagaaaacttggacgtgaactgtatttatcagactgtttcacgttttctgacttcattagaacctgaaccctgacctttcaggtgcattatatgcagagtgacagttgttgttttatctttttctgagcattactgcataaatgacaaagaacagcaaagtcatactgaactgctgctggctgggttctcattgtgagtgattcactcccataaaacagcctctccacrcttatgattcaacatgtggctcagcaaaattagaaattactacatgacacagccttttgaagcccctc

SEQ ID NO: 226027 - DNA, 587 bp, Homo sapiens
gtctacaaacagcaggcaagtagggtcaatctgggcaggtgatgtgtttgtgcatgcatcagtgtcttgttccccctgcttttttttttcttaagctcagcatgaaaaagttaaaaacatttatyaagcacctcctatgtaccctgaagcttactgcaagatacatatttattatctccattttaaagcagaggaaatggaggctagagatatacagtgacttggccaagctcgcatggctggaaggggcagaactaggatttacacccaggtctctttggtactgagacactccacctgctatctttatctgccttttcattcagcctatggctacttttcttttaagtagcccctgctgccatatttctaagctgacttttccccaaacacagctctgaggaagtccatgctgggcccaggcacaagaaaactcaattcccagaggctaagatgctgctcttggttataagctctgcttgggtgagcgagctcctgctttctagttctctttcccttaccagcatcttgtatgaccagagtaggctttctccaagaagactagtgttagtaatggctaaaaaatg

SEQ ID NO: 226028 - DNA, 587 bp, Homo sapiens
gtctacaaacagcaggcaagtagggtcaatctgggcaggtgatgtgtttgtgcatgcatcagtgtcttgttccccctgcttttttttttcttaagctcagcatgaaaaagttaaaaacatttatcaagcacctcctatgtaccctgaarcttactgcaagatacatatttattatctccattttaaagcagaggaaatggaggctagagatatacagtgacttggccaagctcgcatggctggaaggggcagaactaggatttacacccaggtctctttggtactgagacactccacctgctatctttatctgccttttcattcagcctatggctacttttcttttaagtagcccctgctgccatatttctaagctgacttttccccaaacacagctctgaggaagtccatgctgggcccaggcacaagaaaactcaattcccagaggctaagatgctgctcttggttataagctctgcttgggtgagcgagctcctgctttctagttctctttcccttaccagcatcttgtatgaccagagtaggctttctccaagaagactagtgttagtaatggctaaaaaatg

SEQ ID NO: 226029 - DNA, 603 bp, Homo sapiens
tctggaggcacatggaaggagagggaagcatggagatgctgaagaaatagcacaaaacttgtgggaaaactctggggtactgcaggggaaggaatcttaactcagaaggaaatgtgagccagagacagatggggatggatggggagcctcaccaggggacaggcatgactcctactctttcctctatcccatgcattgcttcagggcatcagtgcctgcctggcataactgtgacatggaaaagtatgtgagcactttggattatcactacagttgaaaccaagaacaagcaatgtgagattgttatgggtgcattgtatccccagttcgcatgttgacatcctaaccgccagaacctcagaatgggactgtatttggagacaaggtctttacagaggtaattaaattaaataaggtcactaarttggtccctaatataatgtgactgttatctgtataggaagaggagattaggacacatataggtacagagacaagacattgtaaagacacggggagtgtagccatccacaagccaaaaggatcacaagaattgtgagaaaataaatttctactgttgttggatgactctgattttacaaa

SEQ ID NO: 226030 - DNA, 555 bp, Homo sapiens
gaattcagcagttcttgattatactcaagaatcacctggaaatttttgtaaacatactgctacccagtttccacaccctaccaaaattataatttatctggggttaggccccaggtattctttgttttaaaaacacttcaagtgaatctcacttgcagccaaaatggagaaccttcaattaccatttaagagtgtggctttaatcattctgagcaaactatcgcagggacagaaaaccaaacaccgcatgttctcactcataggtgagaattgaacaatgagaacacttggacacagggcgggcaacatcggacacagggcggggaacatcacacaccggggcctgtcgtggggtggggggaagaggggagggatagcattaggagatataacaaatgtaaatgatgagttratgggtgcagcacacctacatggcacatatatacgtatgtaacaaacccgcacattgtgcacatgtaccctagaacttaaagtataatttaaaaaaaaaaagaatgtggctttacctgtgagctttcaaaggctgtttaactc

SEQ ID NO: 226031 - DNA, 515 bp, Homo sapiens
gtctgccttgggtcccttgagattcaagaagctgaggaatgatcagcaatggatacaaacaaccaaaacagttcatcaaagcccaattcaaaggccttcacccagcataattttttcctttcttctttcagatctgaatgcatatgcttcccaaagaaatttttacaagagaaacttaaaccgctactgccaggagcrctggccattccagccatgcctcactgggaggccctgagcattctagccggcggctgcacagctgctggggcatctccatgaggaagagggcggtggacaggagtcatgaagactaattcggaaactcccctgaaggaggagaagacatctgagccatccttgtgccaccaagcaagagtcactccagctcctaaaaagccaccatgggaagagctgcctccaattaaagttcttgattgcaccagaggatgtgtccttctcttttcctttcccccttaccaactaatgtcttattatttttaaatatattgtcacat

SEQ ID NO: 226032 - DNA, 475 bp, Homo sapiens
agacaaatcaatgaaacagaaagcacagaaactggcacctatatacagttaattgatttttgacaaaagtgcggaggcaatttggtagagaaagggtcatcttttcagcaaatgttcctggaacaaatatatatatatgaaaagtgatgaacttcaatccatacctcatacagtataccaaaattaactcaaagtgaactatagacctaaatataaaacctaaaactacataatttttggaagaaaacatgggagaaaatttttgtttcttattggattggattgagtagtgtactccccaaaatcatgttcttctcagaacttcagaatgtgactttatttgatattgggccattgcaaatgtgattagktaaattaagatgaaatcatactggagtagagtgggtgcttaatccaatatggctgatgtccatataagaagagacacaagacacacagggagaatgccatgtga

SEQ ID NO: 226033 - DNA, 403 bp, Homo sapiens
ggtgctggtgcggacgacctctcggccagcagcagccgtcctctcctgccctcccaacaatccaggaactgccctaaataacagtactggggcattcagtaggggcctaatacatatttgctgatacgtattttagtaggcacctaatacatagtctaggcactgtattaattaaggtgtctagaatattacctgactcacagmagcgtctcagttttgagtgtggatgggtaagagacgaacttcacccactgcatgggttcaggtccagacactggggagggaggctcagggaaatgaccaggggtgtgggctgccaaggagggggcagctagcaaggagaaagcaaggagagtcggcctctcttggacaaaggggcctggcctgctctgcctctgcctct

SEQ ID NO: 226034 - DNA, 620 bp, Homo sapiens
tgccactgaccgttttgtctttgatcctggtaagaaggcagtcctgtgggccacactgtgtgaatgacaagatggcattcttctcaccaaagaaaggcaacattagcattatgttgggtccaaaaaatatcttctcccttttcaaataaactccttagtggagcttatttttaaaaaccacctgaatatcctaagaaaaaaggatgtaaaagaacaaaaatgcgttgcttgggagaagatgggtgaatgcaaaagttccttattaagttccttctcatgtgatgtatttttgcaactggaatcacaatatctccactgaaaatactacgttttggccaatggcttcatggcaaattaactcttgcaaaacctccaatacattctaggatgctctgtaattcactaagtgttgatctgaatarcatcaaccctttatagaaagatttagtacagactgaaaaatgattcaaattcagttctagaagtctgacaactatttttactcagtttgcatttcaacagcctgacaggggctctaatttatacttattcttagaactctatttagagcctgtagctacactttgtaacatgtcagaacatgaaggagaaatacacgc

SEQ ID NO: 226035 - DNA, 445 bp, Homo sapiens
ttaagagaaacaagtttgaagtatactagaaactctggttgtttccgtatgagagttcaatcacttctacttcctgatattttacaaatgcaattggagataacaccaatgatgcactaagctacaacatttgcattgtaccagctagtattagttttaacacgatggtatatttggaactacagctatttatgtagaaatggtgttgttctataaaacgttttatgcctacccaataatcagcttatacatamaagcaacagaataacacaatctttcaggtatcagagaacataacaaccgaatgtcttttccttaaaaattgcaggaaatattgtccagatcactgagaggtgaggtagtataaaaactcaagaataagaaattccaataaaaaagattaatactaagcattgaaggcaaagacaaaataagtgaaatatag

SEQ ID NO: 226036 - DNA, 405 bp, Homo sapiens
agaattccttctgcttttcaaaacttgggactttttatcttcacgggaaatctaacgtgtaggtgaactatcttctttaaccctgaatgcatctcargaaaagggtatcatgccactattgcagaatgggaagctgccctgtcccaggtacatgtatacccctgttgggctgacaacagctctcacatggaggaaaagattcagttccctcggtcagatccaactgtggccactccgtgcttttaacattataaaatcacctgcacaactattaggcttccaccacctgctgtgcctagaatcagcccctcttcatcaatatttaggttctgctcttgttggtagatttcgggtccagctttctctgtgctcaaagtgccctcttcttgtgctcagtttgccctc

SEQ ID NO: 226037 - DNA, 408 bp, Homo sapiens
tttagaattccttctgcttttcaaaacttgggactttttatcttcacgggaaatctaacgtgtaggtgaactatcttctttaaccctgaatgcatctcaggaaaagggtatcatgccactattgcagaatgggaagctgccctgtcccaggtacatgtatacccctgttgggctgacaacagctctcacatggaggaaaagattcagttccctcggtcagatccaactgtggccactccgtgcttttaayattataaaatcacctgcacaactattaggcttccaccacctgctgtgcctagaatcagcccctcttcatcaatatttaggttctgctcttgttggtagatttcgggtccagctttctctgtgctcaaagtgccctcttcttgtgctcagtttgccctc

SEQ ID NO: 226038 - DNA, 569 bp, Homo sapiens
aaggctgcagtgagctatgatagcgtcactgtacttcagtatgtacaacagagcaagaccctgtctcttaaaataataatattcaaccaatgggacacttttcatttattcaccagtgagcttttggccctggccacgtgccaggcagtgttcggggtgcttgggatacgtcagtgaacaaaccagacaatggctcyctgccgttgtgcagctgacattgtaatgtgtgtctgtgtaggtgtgaatatattgcccgttttggggggggtgcggcataaaataaatggtaaacataatttgtgtagaaaaaggtctatattatgggaacaaaatagatagtagtgtcaggggcttgggacatatacagaatgaagtaagatgtcagcctcactgagatactagcatttgggccaagacctgtaggtagagagggagcatgctaactcctatggtgagcctggcagggacgtgctgtggtccagaacttcaaggtcttcaagctatttttgcacacccataagcataagcccagaatatattcagtcccagttcctacttcgctcgtggtc

SEQ ID NO: 226039 - DNA, 503 bp, Homo sapiens
ggatatttgaaggggtgcagttgagataattatgcattacccttttttctttgatcctctactgtgtttagggtcctgaggtcaaggactatgaggaatatatgtggtggggtgttgattgattttctactttttggtgagtttcccaggaaatctattgggaatgccttattattttttgtttccattgattaggacaagggttactaatgtaaaggctgtggttttcatccagcatgccagttctgtttctgctctgtccagccaaccattttgcaagtatatcacagtactcacaaagcagagtgatggatcactgcagaattaagaaaaacaactcaacccaaaacatgttctgctaatggctcactagtaaaatcattccattatataatattyaaattccttcatataatacttgaccactctctgacattttcttgtatattttatctcagttttatcttcacaaggctggtcttagaggaattccaagtacagcc

SEQ ID NO: 226040 - DNA, 465 bp, Homo sapiens
gaattcaagccagctgcagaaatttgcataagtaaagaggagctgaatgttaatagccacgacaatggggaaaatgcctccaaggcatttcagagacctttgtggcagctcctcccattacaggcctggaggcctaggagggatgaatggttttgtgcatcgggtccaaggtatagctcaagctatggcttcagagggtgcaagccccaagccttggtggcttccatgtggtgttaagcccttgggcagagggcaagagttgaggcttaggggcctctgcctagatttcagagcatgtatggaaatgccttgatgtccaagcaggggctctgctgcaggggcagagcccytaatggagaacctctgctagggcagcatgaagggagcatgtcggggactatgctctcttggatttagtcatgctttgccacattactatatttgataatactctacaaaagtcat

SEQ ID NO: 226041 - DNA, 613 bp, Homo sapiens
  misc_feature (1)...(613): n = A,T,C or G
gtcatgcatcactcattactcaagggtttcttacaacctgtacccatgtctagtcaggattgcattatcaacattatgttaattgacagaagtttggctctattctctgtgaacattgaccctggccttatcaagacgagagagagcttttcacctcaccctgycctgaaatactcataaagcctcctacatgactttaactgtgaaggtaaccatgttctttcctcctctcttcatcttccaggaatgggcaataagaggattnctttggcagagcaaacatcccttcacttatttatgaattcacacatcccctcatccattcactcactcactcagcaaacattcatggagttgtcctaaatggaagtcatttgccaggagctgcatcatcaacttagcttagagatatgaatcatgctttgaatcttcctttcaaagacacttttctcttgccctcttcctgtcacaaaaacccacataactgtttgttatcttatttcctttgctggtctttgtcttttgtttcggaacaatttttgattaaaaagaaaaatttaaccagacaacaatggcctgggatttggatccctttacattagttaagccacat

SEQ ID NO: 226042 - DNA, 613 bp, Homo sapiens
  misc_feature (1)...(613): n = A,T,C or G
gtcatgcatcactcattactcaagggtttcttacaacctgtacccatgtctagtcaggattgcattatcaacattatgttaattgacagaagtttggctctattctctgtgaacattgaccctggccttatcaagacgagagagagcttttcacctcaccctgccctgaaatactcataaagcctcctacatgactttaactgtgaaggtaaccatgttctttcctcctctcttcatcttccaggaatgggcaataagaggattnctttggcagagcaaacatccmttcacttatttatgaattcacacatcccctcatccattcactcactcactcagcaaacattcatggagttgtcctaaatggaagtcatttgccaggagctgcatcatcaacttagcttagagatatgaatcatgctttgaatcttcctttcaaagacacttttctcttgccctcttcctgtcacaaaaacccacataactgtttgttatcttatttcctttgctggtctttgtcttttgtttcggaacaatttttgattaaaaagaaaaatttaaccagacaacaatggcctgggatttggatccctttacattagttaagccacat

SEQ ID NO: 226043 - DNA, 586 bp, Homo sapiens
cctggaaccaagtccagctaaacccaatcaagatcaacaatcctagcaaaggcaaattgatctccagactgatgacaataaataaatgtctgttgttatatgccactgagatgtttggagttgtttgttactcaacattagtgcagcratagctgaccaatgcactccataactagtgagtatggaggaaagagaggaaggtacctgatggagcttagtgtgcaagatgcttattagagttcccttgggaccaatacctgtggataggagataaggaagcaggattgggtgtgggaaaaaggtgaaactaaaatgccagcctgacaacagcctcagctgacttcctgggagctctagagataaaatgggtcataagtaatgttccacatttggccaaatgaccaggcctttatacacttgccattatcagtcagtgggtgagagctccctcagaaagggtgtgactttgggtgaggtggctttttgtggctgatgcagtctctgaaggagctgacagcagaacactgacaacagcactctcagaagctgagcagcaagtctttccttgagaaggactgggtagcgc

SEQ ID NO: 226044 - DNA, 548 bp, Homo sapiens
cattttcttaatccagtctatcattgttggacatttgaaacaggtgctggagaggatgtggagaaataggaacacttttacactgttggtgggactgtaaactagttcaaccactgtggaagtcagtgtggsgattcctcagggatctagaactagaaataccatttgacccagccatcccattactgggtatatacccaaaggactataaatcatgctgctataaagacacatgcacacgtatgtttattgcggcattattcacaatagcaaagacttggaaccaatcctcgtcactttctattactccttgttgtgtttagaagactgtagtcagtttttttcccaccctggaaggtagctgcctgacacagttggcatgctgccaagcctctttttaggttcttaataaagaaggctttctctgttctcttgcctcctggttaccccgaaatttaggcacatatttcagtgacagtttcctccaagacagatagtttttactggagacattctagatccctagcactaaaatccttaacataaat

SEQ ID NO: 226045 - DNA, 417 bp, Homo sapiens
actgtttactattgtcccatagttaaaatcatgcgtactattagacattggttactaaactgtcctgcccttgaatcaatcctttattgattgattcaagggaggggtgaaatgcataaaaaaccattcccaactgagtgaaggatgctctttcatgtacctaaaagagacctccctccatctgtctcctggtcagcagagctgcttttccaatgagccagtgagtttaatgttcctactgccatttatcatctttattcagtcagggtttgcatgtggttcaatggttatagaacgtagaattcctcccatayatcaccaattttctgccctccatgctgactcacaagtgttccatttagtgctccaattcttcttcttagaccatttaaagggagtctggctcacatctttttc

SEQ ID NO: 226046 - DNA, 552 bp, Homo sapiens
gcagattattcttttctgcatggaaagcccattttcttcctattgaaaagtcatacaaaaaggcaaataaaattcaaatggttgcttcatgagtatggaagttaactatggattacaaaagcttaatttcactggagatggagaaaccagtgtattcatattcacaacagggattagttgcaaagtgggytttttcttgtcaggagatagtgttttttttggacattgcttttgtggttgtggtttggtgtttcttttttggttgttgtttttttttctttttttttttttgactctcttttgtctgtacctcattgctgcccactttcttccttacctttctgatgtatgtattctttctttagatgataacagcatccatcaggtattattattgttattgctattattattattagtcttttaggccattttcatttccttaaagtactctgaagcaccttacaactcaaagcgtggtctggggaccagcagcatgagtgtcacctagaagcttgttggaaaggcagaatgtcagccccactccaggtc

SEQ ID NO: 226047 - DNA, 639 bp, Homo sapiens
cttctcctgcagagagttgttcctttgacaatggttgccagcacttcgcaattcaactggtagctttcagcaattccaattggtagcttgcactctgattttccagtgtcttgcaatttgcaagacattttttcctactacttggaagactagagttttgatatatttctgatcaaaattaactaactaattccattaccagtagagccaaccgtgggaagctgaggaagataattactaagtgaaatgctaagcagagcaagcagaagaaaggggtaggcatggtggatgaatctgggcttcatcctcattctgtatttacatccaaggatgagaagactcacacaggagtcttctcatgatcatagcataggcttatgattagtggtcactaagatagacttctctttctcaattaagtgtttgtactacttcagcttataatccattcattattgagattttttaaaaaarattttattgacacatactatttgtacatattcatgtatatagtgatgtttcaatacatataatgtatagtgatcagattagggtaattggcatatccatcattgcaagcatttttatttctttttattaggaacattcaatatcctcctcctagccatttgaaac

SEQ ID NO: 226048 - DNA, 614 bp, Homo sapiens
ttactgatgagtcacatataattattgttttattgacagatatcttctccactttctttagaaggctttggattgttgacctatatccaaacaactttcccagcctagggagctatttttaacttcgtcgttggcatttttaacatccaccagtttcttttactmttgtaataatcccaaattcatttattcaatggaaagcatttaattattttctgtgtgtataaagatattcctgaaaataggatgttagtagtagagtggcacagcagagtaatgtggaggttgtcagtaacttttgataagagacattcaagtggagtaaagtgacggagtagggtaaaagctatgtgaatgtggattctctctctgtctctcaaaatatcttattgtactgaacctgcctattttcggactacagttggccatggataactgaaaccatggaaagcacaactgaagataaaaggggactaccgtgaatatcagatgctcaataaatatttgctgagttaattaatgtataaatgaatgaagtgtagcacagtgctctagcaggcacgggccacagctgacgccccctatgctcacgtttgactgacctgaactatagg

SEQ ID NO: 226049 - DNA, 614 bp, Homo sapiens
ttactgatgagtcacatataattattgttttattgacagatatcttctccactttctttagaaggctttggattgttgacctatatccaaacaactttcccagcctagggagctatttttaacttcgtcgttggcatttttaacatccaccagtttcttttactcttgtaataatcccaaattcatttattcaatggaaagcatttaattattttctgtgtgtataaagatattcctgaaaataggatgttagtagtagagtggcacagcagagtaatgtggaggttgtcagtaacttttgataagagacattcaagtggagtaaagtgacggagtagggtaaaagctatgtgaatgtggattctctctctgtctctcaaaatatcttattgtactgaacctrcctattttcggactacagttggccatggataactgaaaccatggaaagcacaactgaagataaaaggggactaccgtgaatatcagatgctcaataaatatttgctgagttaattaatgtataaatgaatgaagtgtagcacagtgctctagcaggcacgggccacagctgacgccccctatgctcacgtttgactgacctgaactatagg

SEQ ID NO: 226050 - DNA, 553 bp, Homo sapiens
gaatgaagtgtagcacagtgctctagcaggcacgggccacagctgacgccccctatgctcacgtttgactgacctgaactayagggaagtaaacctgtcctgtaggctctggggtcttcaacgctggatcaaacacctgcatgaccccaaaagcaagggtcttcttaacacctaggcacctaattgacctcacctagtcctggccctccccatgtgtgatagagtctgattttttactaaacatgtgtaaacagagaagataatagagaaacaacaaaatgtgtcctagtgaactttgatttttatcccccataaatttaggaacatgcttttttttcatcttttcattgagtactgtactaatcagaacagaaatagagaaaagaatgcactttcttctcgggaatgcaggtgccttgagaaagggaaaatctatgattgccatatttttattagcggttatttgagtccacagtaataaaaaagttatgaaattgcacagtaaattttgaaaacctttagaatataattgttttctctacttgctactgtt

SEQ ID NO: 226051 - DNA, 553 bp, Homo sapiens
atacactactggtatgaatgtaaaatggtacagccactttggaaaatggtctggccattcatccaaatttaaacaaggaataactatgggatccagcaattctactcctaggtatatatccaagagaattgagaatgcatgtccacacaaacacacacaaaaaaacttgtatactaatattaacagcagcattattcataatagccaaaaagtagaagcaactcaaatgcctgttggttaataaataggtaaataaaatgtggtatatccatacaatggaatattacttggcaataaaaaaaagcaattacggacacacattataacacagagwaagcttgaatacattatgttaagtgaaagaaaccagctacaaaagatcatgtattatatgattctatttatataaaacatccaggataggaaaatatatggagacataaaatagattagtggttacctaagactagggggttttgagtaaaaattggttgtgactgctattaggtacaaggttattttgggggtgatgaaaatgtttgcacaactctgt

SEQ ID NO: 226052 - DNA, 482 bp, Homo sapiens
ctacagagtaaaattatttaccttggtcactatccgtgactcttctcaactactatttcaccaactggctttatccccagagttcactgtgatgctgcccagaaccttactatttcctttaaatttgggagaagagaagcctaggtgactggtaatttgccccaatactttctattctataacagactctctgtttttgagtggaaagttttattagttggggtaaaatatatgaamcataagtttaccattttaaccatcttaagtatatagtttagtgatattaagcgtatttacaattttgtgcaatcatcactactgtccatttccagaacattgtcatcatctcaaacagaaactccatacctctgcatttctgtcttccaccaacccctggtaacctctctcgtactttctgtctctatgaattggtttattctaggtatctcatttaagcaaaatcatacaatatttgttttttg

SEQ ID NO: 226053 - DNA, 549 bp, Homo sapiens
tttgtcttaactcatttaatccaaaaatgaccatatgacaaaggcataatttttatccccactaaagacaaagaaactgagacacagcaaggttaagtaactgcttcaaaacacataccctgcttataagaaggtaatgcagatgtaggatttatacccaggtagtctggccctggatctcaatctctagtcctgtgctctttaggatagaatagtctatatgaattaatgttaattatcccctactcatagtaacagtctggttttctttccacagacatgaaaggtggtttgtcattgttcttttggcttaaacatgaccctgacgaaattgagggtgcatctcaggastctgaatttctcttttgcagtaaatgaccttcctttttactgtctaaaaaatccaacacccttctccttgatgatatttagtttaagtccatcgtattccagcagaaaccagctgacttcactgcattgatgaacaatggagaaacagctggttaattagatatttctgattttcagtggattgtcagggatttgtga

SEQ ID NO: 226054 - DNA, 367 bp, Homo sapiens
tagatcttgctgcacacatgcaagaatttctcacrgttctggaggctgggaagttcaagattacctaggagtggaattgccagattgcaggtcatgagaaggtttatctctacataataatgccaaagtgttttgcagcattgttactaatttacattcccaccatcagaatataaagtatatgcttatccatatttttgccaatgcttggtgtttcagacttccgactttttgccagttttgtagatgaaaaatagcactttattatggtcttagttttcatttttctggttactaataaggctaggaaacttcttacatgtttattagccattcgtgttttctctcttagaggatacctgcccac

SEQ ID NO: 226055 - DNA, 548 bp, Homo sapiens
tactggccaaaaaaaatgaatacccactacattttctttggcttgtgtattagttatctgttgcagtgaacaaattattcytaaattgtggcaacttaaaacaattataaatatttattttacataatttctgtggctcaggaataccagggtagtttagctatgtggctctgaatcaaagactctcatgagattgctgtaaatatgacaattgggacaacagtcatctgagggattgactggggtaggaagatttgattctaagacagctctctcagtcattgccaagtcaatactggctgctcgcaagaggcctcacttcctcaccacatgtacctttgcataaaactgccagagtgtccttatggcctagtggctgacttccacccaagtgaataattcaagagagtgcaaggtggaagccacatgtcctttagtatctagcctcagaagtcacacaccagcaattccacaatctcctattggttccaactggtcaatcctatttaacaggggaagtgagcctcactgggggaaacttagaggct

SEQ ID NO: 226056 - DNA, 548 bp, Homo sapiens
tactggccaaaaaaaatgaatacccactacattttctttggcttgtgtattagttatctgttgcagtgaacaaattattcctaaaytgtggcaacttaaaacaattataaatatttattttacataatttctgtggctcaggaataccagggtagtttagctatgtggctctgaatcaaagactctcatgagattgctgtaaatatgacaattgggacaacagtcatctgagggattgactggggtaggaagatttgattctaagacagctctctcagtcattgccaagtcaatactggctgctcgcaagaggcctcacttcctcaccacatgtacctttgcataaaactgccagagtgtccttatggcctagtggctgacttccacccaagtgaataattcaagagagtgcaaggtggaagccacatgtcctttagtatctagcctcagaagtcacacaccagcaattccacaatctcctattggttccaactggtcaatcctatttaacaggggaagtgagcctcactgggggaaacttagaggct

SEQ ID NO: 226057 - DNA, 548 bp, Homo sapiens
tactggccaaaaaaaatgaatacccactacattttctttggcttgtgtattagttatctgttgcagtgaacaaattattcctaaattgtggcaacttaaaacaattataaatatttattttacataatttctgtggctcaggaataccagggtagtttagctatgtggctctgaatcaaagactctcatgagattgctgtaaatatgacaattgggacaacagtcatctgagggattgactggggtaggaagatttgattctaagacagctctctcagtcattgccaagtcaatactggctgctcgcaagaggcctcacttcctcaccacatgtacctttgcataaaactgccagagtgtccttatggcytagtggctgacttccacccaagtgaataattcaagagagtgcaaggtggaagccacatgtcctttagtatctagcctcagaagtcacacaccagcaattccacaatctcctattggttccaactggtcaatcctatttaacaggggaagtgagcctcactgggggaaacttagaggct

SEQ ID NO: 226058 - DNA, 505 bp, Homo sapiens
aaaattgcctgtcaaactaagtatttcctttgaaatgcacagtaaytaccaggagctggtatcatgcaagggctgggtttgtccctgtaaggattataacacagtagcttgcactaactagaatttggcacctgatgagaatctttactgtctgcctgattggagattggagagaggggttcaggacagggaggaaccagccagctgaggaggctgttgagttgtgattaaacctgtggacctgaaaggtgtcgctattggacaggaagacaccaacatgtgctttgttcctgcgtcttaccttcctgtcctggacaatcaagtgaaataaggattgcacagccagagaaacacaccgagacgtgctctttgtccacctggcttgcttctcacacctgctatgcttgtttctgcctcagacccacggaattggcgtatggaacacacacagctctccttttcagagaaaagaaactaatgcatttttctccaacaggacggaaag

SEQ ID NO: 226059 - DNA, 590 bp, Homo sapiens
tacatgcccgtgaagcagactttgcatcctgtccaagtcaagtctttaaatttttgcagccctgactgatgtctaatctaaccttatgaaatagcaaaccagaaacacctcaagtgagcctctcccaaatatgtgacccataggaactgtaagaaataataaatatttattatgtaaaacagataactgatatatgagtctcagtaaagtgcagactcatagattataattcagagtcaggttgtgccccaagaatatacattttagcaataatcccaaccatcaggaaaatgcaaaccaaaccacagtgaggtaccacttcagacccactaggctggctatattgaaaaagataataacaagcgttggtaaggatgtggaggaattagaatcctcacacactgctggtggggatacccaatggtacagccacattagaaacagtctggatattcctcaaaatgttaaacatagagttaccatatgatccaggaattctattcctaagtatatactcaagagatttgaaaatatgtctccacaaaaatctcgcacacaaatgttcayagcagcattatgcatgatagccc

SEQ ID NO: 226060 - DNA, 483 bp, Homo sapiens
aattaccactgaacaaaggaaaagaggaactaaagagttgctataatggtggcattagatatttttaacaagccaagctgtcctagagatatagatcttcactggtatttcctgttgatgatttatgatatggctacattgagtgtcctgtggcctcatatgcaggagacattattttgatttttttctttcattttttgagcttcattttattccacagagcacaatcaaagaaagccagagaggttcctgattaatataccacattccatctgagcaggttcctttggttgaagaagaagagggaaggggractgttaaggttcgtatggtagaacaataataaacaacaccagcactaaatcattctcatctttactgaaatactatcttttactcctcagtataatttctccttttctatgttcttcttcccaactgttgaaatcagcgtaaaactcgacattaaaataatttttgatt

SEQ ID NO: 226061 - DNA, 563 bp, Homo sapiens
ttatgttgattttgtatcttacaactttactgaatttattttttagttctaacagtttttcatgggatctttggggtttttaatatatgtaagattatgtcatctgcagtagaggtaattttacttttttctttcttattcgaataccttttatttatttttcttgtctgattgttcttgctagtacttccaatactatgttgaataaaagtgagagtgaacatccttgtcttggaccagacttagtgaaaaggctttcattttttccccattgattataatgtgagctgtaggtttttcataaatggcctttatcgtgttgagaaacttttcttctatatctaaactgttmagagttttaatcaaaaaagaacattagactttgctgaatgctttttccacatcaattgagatgatcatgtgtcttttatcattcattcttttaatgtgatgtagtatattgattaatttgccaatgttaaactggccttgcatgccagagataaatactacttggtcatgatgtaaaatctttttgatgtgttgttgggtttggtttacta

SEQ ID NO: 226062 - DNA, 415 bp, Homo sapiens
gcggtggggggtgaaaagtggaaaagaacacagaggaaggtgagaagacacagtggaagaagtgtggggggaggtcatcgtaggaaaaagaccaggtataaaagaatgcaagaaaattgaggggagagttatcagagggaaacttgctaagaaaaaaaaaaattaaggacacgggaggtaaagaggtgaggtcaggtggagcagcccaggatgaattaagaggtgggcaggaggtacggggccgaggccgtgatgcccagggtttagggccggcggcttagaagtgggcagcaggtattcggcagaccgatgtcgggsgagtcaatgatgtgcagaaagctccagacccagttccgggaaatcggggccaggaatctatgaggttcccaagtatagagaacacagcgctcttacc

SEQ ID NO: 226063 - DNA, 178 bp, Homo sapiens
tttaaatcttgagttctaatttkattgtgctatggtctgagagactgcttgttatgatatcatttcttttgcatttgctgaggaatacttgacttctgattatgtgatgaatttcagagtaagtgctatgtggcaatgagaaaaatctgtattttgttgtttttaggtgaagagttct

SEQ ID NO: 226064 - DNA, 554 bp, Homo sapiens
cttacaactaccctaagggagtatcactatcctcatagaatagatgaggaaaccaagactcagggagattcagtgtatttctcatggtcatatagccagtaaatgattgataaagccagatttctaatgaccactacacctattccttatatttaaagtttcttgaagggcaaagataaatgatagttttggtgtgatggagtttcccagttgaattctgtatagagaacagcaggtgtaatgaatagacatttctcttacggtgagaattttctcaatataaataggatatatggagatagagtaattagagaacatgatttgtattacatgcagctgttggttatacatccgttacaggagaaaggttattattcatgcagcattgggaacacatgcatgtttgttttgagtggctggctgttgatttggcaacgtattcttcygattcttccttgcaaatatgaactgtgctactgtttatttggattctgtgctttttaaaataccaagttattaactttttttgttttgtttctcatttgataacaatg

SEQ ID NO: 226065 - DNA, 602 bp, Homo sapiens
ttgtttttttagctacagactttatgttctgagaagtttaccctcctctcttttaaaagaaaatcttttctctctctyaaaaaacaagcacccaaccttagcaacaaaacaaagccaagcacttgtaggcttttaagattatttttgtcaggaatttaataacatttttttgtttttcaaacaaagagaaaatctgttgtctggattttaccttcccttgagtacataagctttagcaccaagctttcattttaatggtagaagaataaaggacttcttgagaacaaaaattattcagtaatatttaaaatgttttcctgcagatgtatttttaaaatatatatttccctacgattattctctgtcgttggtgtattaatcacagtagtgagtatttatttttaaaagaccaaaagaagcatttcagagtgtcccagggaatgaatgagaatggaaaaagaaagattccaaaaagaatgcagactgaaatttaaggtggaagggaacgtgatctgtctttgtgcacattactgatattcaatcactattggtccatggagtggaaaatatgaaaggaatgacttgaaatggcatgaattcat

SEQ ID NO: 226066 - DNA, 520 bp, Homo sapiens
tggtggtctctaaagggacctgcattaaataattccctgcttttcttctttctgaatgattcaataatttttttttttwaaaagtaaatactgaggccaaaataccacctttgttatggatacaggctgagttggctttgtgtgggagctaaatgggctttctaacagaaacctggcattagatacactaacctacaaggtcccaacttgcatacatgagaggccagcccagtaggatttacaacatggaaaagcaaagaatttgtgctttctgtggacaagttcatctcaggagaaagaacagttgagccaagtggagcattctcagttattctttacaaaagttactagttaggtttaaatgagttaagtgggtagagagagacctatctcctcatatgaagaaaatattagacacaagttaaaaaatcatttcccaataacaagtggaatattttaagaaaggaattcattcaaaagttcatcactacagagaaatccaccagatatgttacacatt

SEQ ID NO: 226067 - DNA, 585 bp, Homo sapiens
tggtttctgccccatcacaacaggtactaaaaaagcttccgcaaaagtaaaaattctcacattcccaatgtaatgctctctctccattcctcatcctacttaaatgctctgcagtatgtgatacttttgatttccttctaaaaaaaaaatctatcttcctgggcttttattacactattttttctttttctctaccattgattacctcttcttttaactatttttttctacttttactgaggaggttttgtttcttagaattttgtctttaagcttttctcttcctgctctgcagattttcctgggtgttttcatttattcttatggcttcaagtagcttctacatactgttaattcctaatttctaattcctgttacaccctgttagttctagaaacctatttctagctttatatttccacttagatattctgtaacatctcaaacatgtgccaaatgagttctgtcccctgttttcaatccaactattagataatctcccagtagctcattcatcctaacgaagtayatcaattctgccacaaaaataccttatatatccacatgctttctacagttgctgtg

SEQ ID NO: 226068 - DNA, 507 bp, Homo sapiens
aagcaacgtaatctgtggtctagaactacacacaatgcagaaaattctgatgacctgggctggacacagcatctgaggcttcacccactagaaaatatagctaaattcatatgctattcacccattaaaatgttcatttctcctctaaattccctctcaagaagtcaaaataaagaaaattgaacgcctttcaaaagaggctttaaactgttctaacacattgctttgtgaaataaagcaatgggcaggrgtgggatacaaaaggccaagccagcctgtttctcttgcaagaggaaagtgaagacattctgatcctcattttacaaaggaaaaacttttttttcttcattttaataatattttcttgtgacaaaaatgatgcatgttcactttggaagaacaaaagatacagatgatcaaaaagaaaaaagtttacactttaattttgtaatatatttttctatgcacataaaaacacaaacttgtagagttttgagggaacaccta

SEQ ID NO: 226069 - DNA, 642 bp, Homo sapiens
tgtctcatttaaaatagcaaaaaataaaatattcaggcataaacctaataagaaacgtacaaaataagcaaacaaataagatatgatttaaaggcataaaagtagacatcctatattccatattcttggataatacaattcagcatcataaacatgtctactctaagttaatatataaatttaatattatgctagttttaaaaaatcttatttttaagaactagcttataaagttatatagaaaaatagccaggtgcagtggtgcatgccatagtcccagctactctggaggctgaggcaggaggatcacttaagcccaggagtttgagaccagccgaggcaacatcaagaccctgtctctaaaaaataaataaataaataaaaggaagaataagtaagcaagaatagcaatgaaatgcctgaaaaagatcagtgatgagggctggtcctaccagatatgaaaatgtatcrtaagaaagtcaaactatccctgtttgcagatgacatgatcctatatctagaaaaccccattgtctcagcccaaaagcttcttaagctgataaacaacttcagcaaagtctcagtatacaaaatcagcatgcaaaaatcactagcatccctatacattaacaatagtcaagc

SEQ ID NO: 226070 - DNA, 642 bp, Homo sapiens
tgtctcatttaaaatagcaaaaaataaaatattcaggcataaacctaataagaaacgtacaaaataagcaaacaaataagatatgatttaaaggcataaaagtagacatcctatattccatattcttggataatacaattcagcatcataaacatgtctactctaagttaatatataaatttaatattatgctagttttaaaaaatcttatttttaagaactagcttataaagttatatagaaaaatagccaggtgcagtggtgcatgccatagtcccagctactctggaggctgaggcaggaggatcacttaagcccaggagtttgagaccagccgaggcaacatcaagaccctgtctctaaaaaataaataaataaataaaaggaagaataagtaagcaagaatagcaatgaaatgcctgaaaaagatcagtgatgagggctggtcctaccagatatgaaaatgtatcgtaagaaagtcaaactatccctgtttgcagatgacatgatcctatatctagaaaaccccattgtctcagcccaaaagcttcttaagytgataaacaacttcagcaaagtctcagtatacaaaatcagcatgcaaaaatcactagcatccctatacattaacaatagtcaagc

SEQ ID NO: 226071 - DNA, 543 bp, Homo sapiens
gcatgtatcagtacttctttactgccaaataatgttctattatataaatatactgcattttgtttatctagtcgcaattgatggacatttaagttgtttccagttttggtctattattgtttgctcttgtgaatagcacagcagtgaacatgtgaatgcatatgtctttttggtagaatgatttattttcttttggtatgtasacagtaatgggattgctgtgttgaactgtagctctgttttaagttctttgagaaatctccagacggctttccacgatggctagactaatttacattcccaacaacagtgaataacagttttcctttttctctgcagcctcactagcatctgttgtttttttttgactttttataagctattctgactggtgtaagatggtatctcattgtggttttgatttgtatttacttgatgattagtgatgctgagaattttttcatatgtttgttggccactgtgtatcttcttttgagaaatatctgttcatatcctttgcccatttttaagtgggttatttgg

SEQ ID NO: 226072 - DNA, 543 bp, Homo sapiens
gcatgtatcagtacttctttactgccaaataatgttctattatataaatatactgcattttgtttatctagtcgcaattgatggacatttaagttgtttccagttttggtctattattgtttgctcttgtgaatagcacagcagtgaacatgtgaatgcatatgtctttttggtagaatgatttattttcttttggtatgtagacagtaatgggattgctgtgttgaactgtagctctgttttaagttctttgagaaatctccagackgctttccacgatggctagactaatttacattcccaacaacagtgaataacagttttcctttttctctgcagcctcactagcatctgttgtttttttttgactttttataagctattctgactggtgtaagatggtatctcattgtggttttgatttgtatttacttgatgattagtgatgctgagaattttttcatatgtttgttggccactgtgtatcttcttttgagaaatatctgttcatatcctttgcccatttttaagtgggttatttgg

SEQ ID NO: 226073 - DNA, 543 bp, Homo sapiens
gcatgtatcagtacttctttactgccaaataatgttctattatataaatatactgcattttgtttatctagtcgcaattgatggacatttaagttgtttccagttttggtctattattgtttgctcttgtgaatagcacagcagtgaacatgtgaatgcatatgtctttttggtagaatgatttattttcttttggtatgtagacagtaatgggattgctgtgttgaactgtagctctgttttaagttctttgagaaatctccagacggctttccacgatggctagactaatttacattcccaacaacagtgaataacagttttcctttttctctgcagcctcactagcatctgttgtttttttttgactttttataagctattctgactggtgtaagatggtatctcaytgtggttttgatttgtatttacttgatgattagtgatgctgagaattttttcatatgtttgttggccactgtgtatcttcttttgagaaatatctgttcatatcctttgcccatttttaagtgggttatttgg

SEQ ID NO: 226074 - DNA, 447 bp, Homo sapiens
tatttacttgatgattagtgatgctgagaattttttcatatgtttgttggccactgtgtatcttcttttgmgaaatatctgttcatatcctttgcccatttttaagtgggttatttggtttttgcttgttgatttgtttgagttccctatagattctagatattaggcctttgtcagacacatagtttgcaaatatcttcccctattctggaggttttctgtttttccaatgacagtttcctttctgtgcagatgttctttaattaggacccacttgtctatttttgtttttgttgctactgcttttggagatttagccaaaaattatttgccaaggtcaatgtcaagaagaatattttccagtcttgttttcccagatttttatagtttgatgtcttacatttaaatctttaatccatttatcccagcaccatttaatgaataggg

SEQ ID NO: 226075 - DNA, 590 bp, Homo sapiens
tccaaaaccagataaaagcattacacgaaaactacagaatatatcttataaacataaatgcaaaacccttaaaatattagcaaactgaaggtagcaacatataaaaaggatactatatgatgaccaagcaggattcatccagaaatataaggttggctgaatataaaaccaagaaaagaaatttttaaaaaasaaaagtcctataataatttcaatgtatggagaaagaacatgacaaaattcaacatacattcaggaaaaaaattctgagaaactaggaataggagggaattttctcaacctgataaaaggcatctaaaaagctacagttaatatcataattatgaaagactgaatattttccccatatagttaggaacaagtcaagattttccactctcacatttatataatattatataatactagagagcctacactgtgtggtaagggttggaggaaaggcagatagattgaaaaggaggaagtaaaactgtctttactctcagatggcatgacggtctatgcagaaaatccaaactctacaaaatagctgctagaatgatttgaattacagaactgagtttatc

SEQ ID NO: 226076 - DNA, 432 bp, Homo sapiens
aggaaactggttagcctcatcatactcctctgtgtcccagcccccaatctcagtggcgacaggttccatgtcctgtagtgccgagttggtactgttttgggagtgcataccatagtgtacktaaggatcttagaaagcttagtggacagtccccctcaaccaccaggcctggctcttcaccacatacctacagcaactcagtgcgcgtgggctccaggagattctcccctgagagatctggtcccactctcacaattggtctcactgacttgactatggtcaggtcacttgtctgctaccttgtagcattcagtgactgcactttcctcttgtccttggcctttcctagctggaggtcaatgacccagatactacttgggaaacatatcttgcatttcacttttaaagcctgctggaaattctgcttgcagg

SEQ ID NO: 226077 - DNA, 414 bp, Homo sapiens
aaactggttagcctcatcatactcctctgtgtcccagcccccaatctcagtggcgacaggttccatgtcctgtagtgccgagttggtactgttttgggagtgcataccatagtgtacttaaggatcttagaaagcttagtggacagtccccctcaaccaccaggcctggctcttcaccacatacctacagcaactcagtgcgcgtgggctccaggagattctcccctgagagatctggtcccactctcacaattggtctcactgacttgactatggtcaggtcacttgtctgctaycttgtagcattcagtgactgcactttcctcttgtccttggcctttcctagctggaggtcaatgacccagatactacttgggaaacatatcttgcatttcacttttaaagcctgctgga

SEQ ID NO: 226078 - DNA, 619 bp, Homo sapiens
actcagagccatccagacatggtccccaaggatgtggaatgcaggygtattggcagaatgacctgctgagccttctagataggagagtccaaactgcagagcgcccattgcaccataacaccactggtgagccatggtggcccttgaatttctaaggaaggccttcaaagcctccacatttctgatgattttgagcccaacaatctgcagtataccagcccttaagctagctgcttgcataataaattcaggtctgaatacaccaatgccacatcactgtcagctccaaatgccctggaacaccattgtcatagagtgtgccatagacttctcccactctcaggggcatgtcattttggtcatggcaggctccaatgccaaactggaacatcttatccctgtttatcagcttattgccactctattaatattaaattatcaggaaaaaaaaaactattcctagaacatatcatggttttagattgtactctccagcttgtcctccagccatcatttcacaattagtaaccagttggaatgcagcacctgggtcagctcacctagccagtttctgaagaattttacctttgactatccactatactctttcacctaaaca

SEQ ID NO: 226079 - DNA, 619 bp, Homo sapiens
actcagagccatccagacatggtccccaaggatgtggaatgcaggcgtattggcagaatgacctgctgagccttctagataggagagtccaaactgcagagcgcccattgcaccataacaccactggtgagccatggtggcccttgaatttctaaggaaggccttcaaagcctccacatttctgatgattttgagcccaacaatctgcagtataccagcccttaagctagctgcttgcataataaattcaggtctgaatacaccaatgccacatcactgtcagctccaaatgccctggaacaccattgtcatagagtgtgccatagacttctcccactctcaggggcatgtcattttggtcatggcaggctccaatgccaaactggaacatcttatccctgtttatcagcttattgccactctattaatattaaattatcaggaaraaaaaaactattcctagaacatatcatggttttagattgtactctccagcttgtcctccagccatcatttcacaattagtaaccagttggaatgcagcacctgggtcagctcacctagccagtttctgaagaattttacctttgactatccactatactctttcacctaaaca

SEQ ID NO: 226080 - DNA, 527 bp, Homo sapiens
gtgacaagcccaatgataggtgcttgtaggaagggctgtgggagctgtggcaaccttgccaaaggggtcagaggacatacagtgaaagggacatctgaaccaagttcccagaagtcaaaatttaaccacatctagactcaaaattctttccaaagtagaatgttgaccaaagctgtttcccataattgctctgactagatgagtcacggaaacatgttgtctgccttctctgtcattacatcatttcacygtcttctcatggatggtgcattgtgacttcgtgcattccatggccattccatatggcaaccaaaggaagggcagggaatgaggacagagtgtctccctcaggcatgtgacttttctatggcaggcccctttacagtcacattatgccccatccttcctataacatgggagagtctttctttttaggatttagtggctcaacaggtttggaaggacttgggaaggggaggcttccctgagttctgttgtgggagaagacaggcaattcagtaggtcaa

SEQ ID NO: 226081 - DNA, 498 bp, Homo sapiens
gttgaccaaagctgtttcccataattgctctgactagatgagtcacggaaacatgttgtctgccttctctgtcattacatcatttcaccgtcttctcatggatggtgcattgtgacttcgtgcattccatggccattccatatggcaaccaaaggaagggcagggaatgaggacagagtgtctccctcaggsatgtgacttttctatggcaggcccctttacagtcacattatgccccatccttcctataacatgggagagtctttctttttaggatttagtggctcaacaggtttggaaggacttgggaaggggaggcttccctgagttctgttgtgggagaagacaggcaattcagtaggtcaaatggcaaaggtaaaaccacagtggagggcttctctgtggacagagactgaagggtgtggaggtatcgaagctgaacggcagcaggggtgcctgacagaatctcagctgccatcctcagggactcagaagcag

SEQ ID NO: 226082 - DNA, 494 bp, Homo sapiens
gttgaccaaagctgtttcccataattgctctgactagatgagtcacggaaacatgttgtctgccttctctgtcattacatcatttcaccgtcttctcatggatggtgcattgtgacttcgtgcattccatggccattccatatggcaaccaaaggaagggcagggaatgaggacagagtgtctccctcaggcatgtgacttttctatggcaggcccctttacagtcacattatgccccatccttcctataacatgggagagtctttctttttaggatttagtggctcaacaggtttggaaggacttgggaaggggaggcttccctgagttctgttgtgggagaagacaggcaattcagtaggtcaaatggcaaaggtaaaaccacagtggagggcttctctgtggacagagactgaagggtgtggaggtatcgaagctgaacrgcagcaggggtgcctgacagaatctcagctgccatcctcagggactcagaa

SEQ ID NO: 226083 - DNA, 401 bp, Homo sapiens
gattgttcttcattccctgaaggcttcaccactatgcagtatgactcagcagacaagcactgagcatctactatgtggcaagcacggttaagcatagaacatgtttattcttctttctgaagggtcttgagctggggagacagattaaactgttaatcacaatttaaggtggaatgcgttaggagccatcacaagtataaatgaagtattaggggagttattagcatctggtgggccttgaaagattaggattttgccaacatagagaaaagattagccagcattccatgcaaaggcatgacgttatgaaagggtgacccccaactcagggaaagtgaatgggtaaacatttctgaagwgaaagtgctgagctcactacacaaatgctacctgaaagtggg

SEQ ID NO: 226084 - DNA, 640 bp, Homo sapiens
gcatattcatatgtaagtctttgaatggatgtatactttcacttctcttgggttgatatctaggaatggaatggctgagtcacatggaatgtgtgtgtttaacttttaaagaaacggtcaaactgccttccaaagtggctaatgggtacaaaagtgcagttaggtagaaggaataagctctagtattcattagtacattagggaaattakagttaacaataattcgctgtatatttcaaaatagctagaagagaagaattggctatctccaacataaagaaaagataaatgtttgaggtgatggatacccctgttaccctgctttgatctttacacattgtacacatgcatcaagatatcacatgtactccaaaatatgtacaaatatgatatatcaatttcttaaaaggtggttaaaccatttttacactcttgccagcagtatctgagagttccagttgctttacatactcactgacacttgatatagtcagtctttttaaaattttttttgagatggagtctcgctctgttgcccaggctggagtgcagtggcatgatcttggctcactgcaacctctgcttcctgggttcaagcaattctgcttcctaagcctcctgaatacctgggactacaggc

SEQ ID NO: 226085 - DNA, 640 bp, Homo sapiens
gcatattcatatgtaagtctttgaatggatgtatactttcacttctcttgggttgatatctaggaatggaatggctgagtcacatggaatgtgtgtgtttaacttttaaagaaacggtcaaactgccttccaaagtggctaatgggtacaaaagtgcagttaggtagaaggaataagctctagtattcattagtacattagggaaattatagttaacaataattcgctgtatatttcaaaatagctagaagagaagaattggctatctccaacayaaagaaaagataaatgtttgaggtgatggatacccctgttaccctgctttgatctttacacattgtacacatgcatcaagatatcacatgtactccaaaatatgtacaaatatgatatatcaatttcttaaaaggtggttaaaccatttttacactcttgccagcagtatctgagagttccagttgctttacatactcactgacacttgatatagtcagtctttttaaaattttttttgagatggagtctcgctctgttgcccaggctggagtgcagtggcatgatcttggctcactgcaacctctgcttcctgggttcaagcaattctgcttcctaagcctcctgaatacctgggactacaggc

SEQ ID NO: 226086 - DNA, 640 bp, Homo sapiens
gcatattcatatgtaagtctttgaatggatgtatactttcacttctcttgggttgatatctaggaatggaatggctgagtcacatggaatgtgtgtgtttaacttttaaagaaacggtcaaactgccttccaaagtggctaatgggtacaaaagtgcagttaggtagaaggaataagctctagtattcattagtacattagggaaattatagttaacaataattcgctgtatatttcaaaatagctagaagagaagaattggctatctccaacataaagaaaagataaatgtttgaggtgatggatacccctgttaccctgctttgatctttacacattgtacacatgcatcaagatatcacwtgtactccaaaatatgtacaaatatgatatatcaatttcttaaaaggtggttaaaccatttttacactcttgccagcagtatctgagagttccagttgctttacatactcactgacacttgatatagtcagtctttttaaaattttttttgagatggagtctcgctctgttgcccaggctggagtgcagtggcatgatcttggctcactgcaacctctgcttcctgggttcaagcaattctgcttcctaagcctcctgaatacctgggactacaggc

SEQ ID NO: 226087 - DNA, 423 bp, Homo sapiens
aacattcctttcaatcaatgatggctcttctagaaatttatcctgtggagtaacagagatgtgtgcatacttgagcaagattttcatcataaggttatttttaatagcaaaaactgaaaatagagcaaatgcccaacttargctacaagtcaaattatggcacattcatatcatcatttaaaattatggcacattcacaccatcatttaaaatcatggcacattgataccatcatttaaaattatgttgcattagaatatttagtaatgtggcacattcgcaatgcataagaggaaaaaaagcaggtcacaaactaagaaccagaatgattttaattttttaagtcaaattttcatgtgataagagtacacaggtgatctttattttcttttgtgcttttctgtatttcaagttttctgtaat

SEQ ID NO: 226088 - DNA, 547 bp, Homo sapiens
caaattatggcacattcatatcatcatttaaaattatggcacattcacaccatcatttaaaatcatggcacattgataccatcatttaaaattatgttgcattagaatatttagtaatgtggcacattcgcaatgcataagaggaaaaaaagcaggtcacaaactaagaaccagaatgattttaattttttaagtcaaattttcatgtgataagagtacacaggtgatctttattttcttttgtgcttttctgtatttcaagttttctgtaatcaatctatattacttttgtaataaaaaaatttaaaaacagacacctggataatttagaaacattatctaatgatgaaagcaytttggaaagaggatgcacatggctaaaagcagaaagaaacagaagtcacatctcagatgaatatacttcagaccttttggccatatgggaaaacattaatacatttcttacaaagatcacaaaactggcacagaaacatacagcaccaatgctttcagctgcttaaatatttgttaggtatatgctatagta

SEQ ID NO: 226089 - DNA, 535 bp, Homo sapiens
gaattcttacttattattgcttctgaaaatggagctcaaagcctccctctgcattcactttcttgcctctcccaggcactatcccccaagacaaataatttgtaaaagacgtctgttaagtattgaagacttcagtattggtactttaagaatgaaattttaaagagttttttacagtttgataattttccagaaaaactgatattctgggccaggtaagctctttcttaattaagctgcaaataagtattaatctgtcttagtcttttttctgttgctatagcagaataccagacagtgggtaatttataaggaaaataagtctatttggttcatggttctggaggttggaaagtccaaggacatggtggaagcttctgaggagggctttcatactgtgtcataacatggtggaaaagcagaaagcaagtaagcaggcatgaaaaaggcagcaagagcaagctgagctcacttttataacaaccatgttgcccaggctggtcttgacatcytgtgctcaagcaattcccttgcc

SEQ ID NO: 226090 - DNA, 527 bp, Homo sapiens
gaattcaaaaatagctgtaataacaaaactcagcaaacttcaagaaaacacagagaagcaattcagaaatttatcagaagcattcatcagataaatagaaataattaaaaaaacaaacaaatcctagagctgaaaagtataacaaacaaaatgaaaaatgaaacagaggacatcaactgcagaattgatcaagcagaataatcagtcagcttgaaggcaggctatttgaaaatacatagtcaaaggagaaaaaaggaaaaaaatgaaaaggaataaagaaaaaattacatgacccatgggacatcatcaaaagagcaaatctacatgtaactaactttaaagagagagtaaagaatgaaaagggatagaaagcttattcaaataaataataatagaaaagcttccaaatcagaagaaagatacaaatatccaggcacaggaaggtcaaaggtcaccaatcagattcaaccyaaataagaatactccaatatatatcataatcaaattctcaaaggtcaaagacaaag

SEQ ID NO: 226091 - DNA, 602 bp, Homo sapiens
tgatttccatcctttaaaaacatgttgtagattatgcatgagtacattgcggttattcttttaatgcatgagcgtgtctgttattttcttaatattctgcaccacagaacaaatacattcggagtgtctgaaatcagagcaaatacataacttgtcttcgtaattttcttttcttcctcactgatcagagcggcttctgttttccatcttctttgttgaatcaaggcagcttgtgctttgtgtgtgccattataattcatctaaactaaatcatggcaacactttctcactgtctgatatatggcaggaaatacytgccctctcctcctgttctcttagtctccagctgaagcgaatgaatggaatctgctggctgttctatcttttaatctaagaaacaacttacttctcttttcatttccccttctgaaaatacataaacaatatattttatacataatccaggggtttgaaatagtctaattagaaagtttacttttaccattttcttttgtctttttatcttgagaggtaaagtcaatgactcagcacagctcatcctcagctgccaaccatgtgtgatcaattctacatgtttatcc

SEQ ID NO: 226092 - DNA, 628 bp, Homo sapiens
tcatctttgccttaatttaccaaattaactttttttttttaatttttttttttgagatggagtctcgctctggagtccaggctggaatgcagtggtgcaatcttggctcacggcaacctccgccttctgggctcaaatgattatcctgcctcagcctgctgagtagctgggattacagatgcacaccgctgcgtccagctaatttttgtacttttagtatagacagggtttcaccatgttggccaggctggtcttaaactcctgacctcaggtgatccgcccgcctcagcctcccaaagtgttgggattacaggcatgagccaccgcgcccagcctaactattattaacactttattatcattaggtatattcttctagtgaagttaaatacagctgtatctgctgttayaatacaatacatgtgttcttcaaaaacctatactctgaaaaaatgcatgatcaacttacaggcttattaggaaagttgggttaagggcagattactcaaaacctattttgaaaccagagcaccagcaaaaacagcatttggtaccctgggatataacttggacatctaggtcagcagcagggctgacggctgccccagggcataggaaaagtagacaa

SEQ ID NO: 226093 - DNA, 550 bp, Homo sapiens
taaataatgagtgaatcttggtgaagggtacatgcmtgtccattacacgattcttactttttttaagttttaaaactttttaaaactgtctcttttcctttcttttcttttcttctttttttttttttttttttgagacagggtcttgctctgtcacacagactggagtgcagtggtgcaatcagagctcactgcagccttgaactcctgagctgaagcaatcctcctgcttcagcctcccaagtagctgggactacaggtgcacaccaccatgcccagctagttaaaaaaatttttagtttgagaccagcctggccaacatggtgaaatgctgtctctaccaaaaatataaaaattagccaggcgtggtggcgggcatctgtaatcccagctgctcgggaggctgaggcaggagaatagattgaacccgggaggcggaggttgccctgagctgtgattgtggcattgcaccctagcctgggccacagagggagactctctcaaaaaaaaaaaaaaaagtttttataaagacagcatcttgcccaagatg

SEQ ID NO: 226094 - DNA, 438 bp, Homo sapiens
acccccatgtgtggaaggagggacttgtggggaggtgattggatcatgggggccgttcccccatgctgttcttgtgatagtgagagagttctcatgacatatggtagtttaataagtgtctggcatttcctcttcgctctctatctcctgctgccatgtaagatgtgmcttgcttctccttcaccctctgtgatgattgtaagtttcctgaggacccccagccatgcataaccatgagtcaattaaaacttcctttataaattacccagtctcaggtagtttctttataacagtgtgaaaatgtactaatatactcatgttgagatacaatccccaatgttggaggtggggccttgcgggaggtgtttgggtcatggggacagatccctcataacttggtgctgtcccactgatggtgagtgagttctcaggagatct

SEQ ID NO: 226095 - DNA, 396 bp, Homo sapiens
gtgtggaaggagggacttgtggggaggtgattggatcatgggggccgttcccccatgctgttcttgtgatagtgagagagttctcatgacatatggtagtttaataagtgtctggcatttcctcttcgctctctatctcctgctgccatgtaagatgtgacttgcttctccttcaccctctgtgatgattgtaagtttcctgaggacccccagccatgcataaycatgagtcaattaaaacttcctttataaattacccagtctcaggtagtttctttataacagtgtgaaaatgtactaatatactcatgttgagatacaatccccaatgttggaggtggggccttgcgggaggtgtttgggtcatggggacagatccctcataacttggtgctg

SEQ ID NO: 226096 - DNA, 424 bp, Homo sapiens
acccccatgtgtggaaggagggacttgtggggaggtgattggatcatgggggccgttcccccatgctgttcttgtgatagtgagagagttctcatgacatatggtagtttaataagtgtctggcatttcctcttcgctctctatctcctgctgccatgtaagatgtgacttgcttctccttcaccctctgtgatgattgtaagtttcctgaggacccccagccatgcataaccatgagtcaattaaaacttcctttataaattacccagtctcaggtagtttctttataacagtgtgraaatgtactaatatactcatgttgagatacaatccccaatgttggaggtggggccttgcgggaggtgtttgggtcatggggacagatccctcataacttggtgctgtcccactgatggtgagtgag

SEQ ID NO: 226097 - DNA, 424 bp, Homo sapiens
acccccatgtgtggaaggagggacttgtggggaggtgattggatcatgggggccgttcccccatgctgttcttgtgatagtgagagagttctcatgacatatggtagtttaataagtgtctggcatttcctcttcgctctctatctcctgctgccatgtaagatgtgacttgcttctccttcaccctctgtgatgattgtaagtttcctgaggacccccagccatgcataaccatgagtcaattaaaacttcctttataaattacccagtctcaggtagtttctttataacagtgtgaaaatgtactaatatactcatgttgagatacaatccccaatgttggaggtggggccttgmgggaggtgtttgggtcatggggacagatccctcataacttggtgctgtcccactgatggtgagtgag

SEQ ID NO: 226098 - DNA, 540 bp, Homo sapiens
taaaaaaaacaacaaaattacttatgcaatgcttcatttgcatagcattttcaggggtgttaaccaacattacaggggctgtatttttttgtttgtgttttgtttgagacagcatcctgctctattgcccaagctggagtgtagtggtgctatcatagctaactgcagcctccacttcctcccagtttaagcgatccttccacctcagtctccttgagtagctgggactacatgcctggctaatttttaatttcttgttcagacagggtcccactrtgttgcccggactagtttcaagatcctgggcttaagcagtcttcctgctgtggcctcccaaagtactgggattataggcatgagccatccctgcctggcctatttttttttttttaagtctgttttggtaagagatagaggaatactattctaatggatattcctttcaagggctttgtatgtattttataggagtataagttctgcccttgaaggtgtttctggaggagctgagattttagggtctaattactttttgtctac

SEQ ID NO: 226099 - DNA, 540 bp, Homo sapiens
taaaaaaaacaacaaaattacttatgcaatgcttcatttgcatagcattttcaggggtgttaaccaacattacaggggctgtatttttttgtttgtgttttgtttgagacagcatcctgctctattgcccaagctggagtgtagtggtgctatcatagctaactgcagcctccacttcctcccagtttaagcgatccttccacctcagtctccttgagtagctgggactacatgcctggctaatttttaatttcttgttcagacagggtcccactgtgttgcccggactagtttcaagatcctgggcttaagcagtcttcctgctgtggcctcccaaagtactgggattataggcatgagccatccctgcctggcctatttttttttttttaagtctgttttggtaagagatagaggaatactattctaatggatattcctttcaagggctttstatgtattttataggagtataagttctgcccttgaaggtgtttctggaggagctgagattttagggtctaattactttttgtctac

SEQ ID NO: 226100 - DNA, 534 bp, Homo sapiens
ggaaatgacatagcactttgtttttctaaatcaaattaatctggctatgagtcctctcttggtatgggtgggcgaaaatgcaatctgtcctttttctcctccaaaccaaatgtgttaaggcactaggcatgcagtctcccctggcatcccgtggctacaactactgccatcttagtctgggatggggtctgctgcacacaaggcatggatctgtccctaataggaaagctcacgcctctaccctctcyccctgggttctgtcctccacctccaactcaaagcaccagtttgcagtgctgcctctggggtaactcagtgtacttgggcctcccctgggagaggggcctaacagtctcttgtttcaagggtctgacagtccttaacactaggtcctgaatcacaggccctatgaacccttgtctccaacaaatccatcagcttacctcctaactacatttagaacccagccatttctaccatcgtagcccaagccattttctctcacctggatcatcgcaataactgtctaactgg

SEQ ID NO: 226101 - DNA, 581 bp, Homo sapiens
tgggtctagatttgctttataaaacatgggtatgggaaatgacatagcactttgtttttctaaatcaaattaatctggctatgagtcctctcttggtatgggtgggcgaaaatgcaatctgtcctttttctcctccaaaccaaatgtgttaaggcactaggcatgcagtctcccctggcatcccgtggctacaactactgccatcttagtctgggatggggtctgctgcacacaaggcatggatctgtccctaataggaaagctcacgcctctaccctctccccctgggttctgtcctccacctccaactcaaagcaccagtttgcagtgctgcctctggggtaactcagtgtacttggrcctcccctgggagaggggcctaacagtctcttgtttcaagggtctgacagtccttaacactaggtcctgaatcacaggccctatgaacccttgtctccaacaaatccatcagcttacctcctaactacatttagaacccagccatttctaccatcgtagcccaagccattttctctcacctggatcatcgcaataactgtctaactggcctccctgcttct

SEQ ID NO: 226102 - DNA, 544 bp, Homo sapiens
aaacatgggtatgggaaatgacatagcactttgtttttctaaatcaaattaatctggctatgagtcctctcttggtatgggtgggcgaaaatgcaatctgtcctttttctcctccaaaccaaatgtgttaaggcactaggcatgcagtctcccctggcatcccgtggctacaactactgccatcttagtctgggatggggtctgctgcacacaaggcatggatctgtccctaataggaaagctcacgcctctaccctctccccctgggttctgtcctccacctccaactcaaagcaccagtttgcagtgctgcctctggggtaactcagtgtacttgggcctcccctgggagaggggcctaacagtctcttgtttcaagggtctgacagtccttaacactaggtcctgaatcacaggccctatgaacccttgtctccaacaaatccatcagcttacctcctaactacatttagaacccarccatttctaccatcgtagcccaagccattttctctcacctggatcatcgcaataactgtctaac

SEQ ID NO: 226103 - DNA, 544 bp, Homo sapiens
aaacatgggtatgggaaatgacatagcactttgtttttctaaatcaaattaatctggctatgagtcctctcttggtatgggtgggcgaaaatgcaatctgtcctttttctcctccaaaccaaatgtgttaaggcactaggcatgcagtctcccctggcatcccgtggctacaactactgccatcttagtctgggatggggtctgctgcacacaaggcatggatctgtccctaataggaaagctcacgcctctaccctctccccctgggttctgtcctccacctccaactcaaagcaccagtttgcagtgctgcctctggggtaactcagtgtacttgggcctcccctgggagaggggcctaacagtctcttgtttcaagggtctgacagtccttaacactaggtcctgaatcacaggccctatgaacccttgtctccaacaaatccatcagcttacctcctaactacatttagaacccagccatttctaccatcrtagcccaagccattttctctcacctggatcatcgcaataactgtctaac

SEQ ID NO: 226104 - DNA, 570 bp, Homo sapiens
ataaaacatgggtatgggaaatgacatagcactttgtttttctaaatcaaattaatctggctatgagtcctctcttggtatgggtgggcgaaaatgcaatctgtcctttttctcctccaaaccaaatgtgttaaggcactaggcatgcagtctcccctggcatcccgtggctacaactactgccatcttagtctgggatggggtctgctgcacacaaggcatggatctgtccctaataggaaagctcacgcctctaccctctccccctgggttctgtcctccacctccaactcaaagcaccagtttgcagtgctgcctctggggtaactcagtgtacttgggcctcccctgggagaggggcctaacagtctcttgtttcaagggtctgacagtccttaacactaggtcctgaatcacaggccctatgaacccttgtctccaacaaatccatcagcttacctcctaactacatttagaacccagccatttctaccatcgtagcccaagccattttctctcacctggatcatygcaataactgtctaactggcctccctgcttctgctattg

SEQ ID NO: 226105 - DNA, 511 bp, Homo sapiens
ctttacccattttgctacaacatcccaagagattaaaatcttacatgaacccacaggagactggcgtttctcttaagtgtgttcttcagagtgctagccctgtaaaatttttctcaaaaagagagttctgttgtagaatgagttgggaaacactgcatgctmtatctatacctcccacccactttgaagagatactttgttgatgacatattaatagctccagaagtctttcaagaaaggaacctgaaacacgatttgggagatgctaccaaagactgggttccataaggaaacagctggctttttatctaataatggatttaaatagtccatgagttctcattggcagctaaaagtacaatggtcagtggccaccccattgtcctgcagatggatggttgtgcatctggtgatcagagggagagctccctgtccttagatgctgggaaatgctgtgtggagctaaccaaccatggttctgatctcctggatcacaaaatgagtgaccagg

SEQ ID NO: 226106 - DNA, 495 bp, Homo sapiens
actttacccattttgctacaacatcccaagagattaaaatcttacatgaacccacaggagactggcgtttctcttaagtgtgttcttcagagtgctagccctgtaaaatttttctcaaaaagagagttctgttgtagaatgagttgggaaacactgcatgctctatctatacctcccacccactttgaagagatactttgttgatgacatattaatagctccagaagtctttcaagaaaggaacctgaaacacgatttgggagatgctaccaaagactgggttccataaggaaacagctggctttttatctaatwatggatttaaatagtccatgagttctcattggcagctaaaagtacaatggtcagtggccaccccattgtcctgcagatggatggttgtgcatctggtgatcagagggagagctccctgtccttagatgctgggaaatgctgtgtggagctaaccaaccatggttctgatctcctggatca

SEQ ID NO: 226107 - DNA, 363 bp, Homo sapiens
agggtcttgctcatctatgtgcctgtggttggggatgaagggagggggaattcrtaatgccccccaaagagggctgtggcaaaaatgtggcccgagacattccttctcacagagacaaatgtccatatcccctttacggacctcttgagagttagaatcctgtctgctaatgtgagacccacaaaggttgccttgtgcttttattcagcacagaactgactttctgtagttttccagatgtgccctcattgttcggccagcacccctcacataccgtgggacttcctggcatcctgcaaagtgagcacaccccttccaagttacaattggagacctttccatcctattggtttgactcaaatg

SEQ ID NO: 226108 - DNA, 363 bp, Homo sapiens
agggtcttgctcatctatgtgcctgtggttggggatgaagggagggggaattcgtaatgccccccaaagagggctgtggcaaaaatgtggcccgagacattccttctcacagagacaaatgtccatatcccctttacggacctcttgagagttagaatcctgtctgctaatgtgagacccacaaaggttgccttgtgcttttattcagcacagaactgactttctgtagttttccagatgtgccctcattgttcggccagcacycctcacataccgtgggacttcctggcatcctgcaaagtgagcacaccccttccaagttacaattggagacctttccatcctattggtttgactcaaatg

SEQ ID NO: 226109 - DNA, 494 bp, Homo sapiens
acattatattaaatgtgttttctgatcctattaaaaaggtaaaatagtttttctctattaatagagttaattaaaaatattttcaaatgttaaattttcgttgcatttctttctttttattttcttggatttaatttcttaatttttatttgtttgggcctttgcatttagagacatgaataaaatgagcaygtaattttcctctcaaaaaataagaaaaaattaaaatgttccttgcatactaaagtataaacaaaaatgaaataaatgaaattgaaaaataaaatgttccttaggattttcttagaaaaaaaatcttcctacaaaatcaacaaaccttagaactaagaaaaacaaatgagaaaaatacacaaagaaataaaatcagaagtgaaagaggagaaactccaactcatgccatagaaatgtgaagaatccctatagaatccctatgaataattatatgtcaacaaagccaggtgtggtggtgcatg

SEQ ID NO: 226110 - DNA, 363 bp, Homo sapiens
tgccaatctctgcctttaactggaaccaccwtggcctcctccgaaccactggagaatcctcccccttctcccttagctgctcccccttctcctcctcttgtctctctctcaatttcttccttttttgtaccttgcacaggtaattgtgagacggtgagggaaagcccttgagtattcggttccaaacactccccagcagttctcagcagggcacaaaggatcgcggtgaatgtcacattgagactgctccagctgcacctgccggcaggcctggcccctccggttcaccagggggtcaccgagcgctcgcatattctccgatggcaaggagagcgactatgttttcagttcacagtgagatta

SEQ ID NO: 226111 - DNA, 363 bp, Homo sapiens
tgccaatctctgcctttaactggaaccaccatggcctcctccgaaccactggagaatcctcccccttctcccttagcygctcccccttctcctcctcttgtctctctctcaatttcttccttttttgtaccttgcacaggtaattgtgagacggtgagggaaagcccttgagtattcggttccaaacactccccagcagttctcagcagggcacaaaggatcgcggtgaatgtcacattgagactgctccagctgcacctgccggcaggcctggcccctccggttcaccagggggtcaccgagcgctcgcatattctccgatggcaaggagagcgactatgttttcagttcacagtgagatta

SEQ ID NO: 226112 - DNA, 363 bp, Homo sapiens
tgccaatctctgcctttaactggaaccaccatggcctcctccgaaccactggagaatcctcccccttctcccttagctkctcccccttctcctcctcttgtctctctctcaatttcttccttttttgtaccttgcacaggtaattgtgagacggtgagggaaagcccttgagtattcggttccaaacactccccagcagttctcagcagggcacaaaggatcgcggtgaatgtcacattgagactgctccagctgcacctgccggcaggcctggcccctccggttcaccagggggtcaccgagcgctcgcatattctccgatggcaaggagagcgactatgttttcagttcacagtgagatta

SEQ ID NO: 226113 - DNA, 363 bp, Homo sapiens
tgccaatctctgcctttaactggaaccaccatggcctcctccgaaccactggagaatcctcccccttctcccttagctgctcccccttctcctcctcttgtctctctctcaatttcttccttttttgtaccttgcacaggtaattgtgagacggtgagggaaagcccttgagtattcggttccaaacactccccagcagttctcagcagggcacaaaggatcgcggtgaatgtcacattgagwctgctccagctgcacctgccggcaggcctggcccctccggttcaccagggggtcaccgagcgctcgcatattctccgatggcaaggagagcgactatgttttcagttcacagtgagatta

SEQ ID NO: 226114 - DNA, 424 bp, Homo sapiens
aggggaccaaaggaggctggtctcaactgtttggggctgataaagcttgtgtttcttcaataaagctatcttgctaaggatctgggtgtagaacaaattctttggagggcatgtccataggcagatgatgcacccacaagcatttggggaaacacccaattggggaaacacccaccaaaacagctcttctttgagaaactccgtgtaatatgatccttcaaaaaggacaaaaaccgattcatctgccagaattmgcttctcctttcacactggttcattctctcatctgattggcgctggctgggctggagcccattctcctggattctgggaattaagctttccccagcagctacactaaagacaatgtagtcccattggctgaccaactcccagattcatgcaccaaagacacctgcaacct

SEQ ID NO: 226115 - DNA, 660 bp, Homo sapiens
tctatgcaaaaaattaaaagctgcagaaatggtaaaaaataaatatacaggactttgtgtatttttttaatcattctaaaatataattgactgtctaaagcaaaaatagtaacaacgttttgaagggtttatgacgtagaaataaaatgtgtgaaaacaataacacaaagtatagggaggggtattcaaggaatattgttgtaagtttcttaaactatttgtgaatttcagaattttacttaaaggagacgtgataagtttgagatatatatcataagccagagggcagctaagaaacttttagtaagaaatataagcagtaaattaatagcataaataaaatggaatcatttttaaaagctcaattcaaaaygggcagagaaaggaaaaaaaccacaaagaacagatgaaacaaatagaaaacaagtagcaagatagtaaattgaaatttaactgtattagtagttacatcaaatgaaaatggtttacacacatcaattaaatgagaaatcatcaaattggatgaaaaaggagacctatttgtggcctaaagaaatattttatatataaagatacaaatacatcagaagtaaatggccagagaagaatagttcatgcaaataataatcaaaagaaagcaggaatggccatattaaaatc

SEQ ID NO: 226116 - DNA, 549 bp, Homo sapiens
tgcagcatgaaatcttatgtccaaaataactaaataaagagactgagacaggcagatcacttgaagccagaagttcgagaccagcctggccaacatagtgaaatctcatctctaccaaaaataaaataatttattttgagttcaggggtacatatgcaggtttattatacagataaactcatgtcacaggggtttgttgtacggatgatttcatcattcaggtactaagcctagtacccaatagttattttttctgatcttctccctcctcccaccctccatccttaaggaggcccaagggtstattgttcccctttgtgtccatgtgttctcatcatttagctcccatttgtaagtgagaacatgtggtaattggttttcttcctaaagaggacatgatcacattcttttttatggctgtatagtattccatgacatatatgtaccacattttctttatccagtctaccactgatggggatttaggttgatttaatgtctttgctactgtgaatagtgctgcaatgaacttatgtgtgcatgtgtctt

SEQ ID NO: 226117 - DNA, 585 bp, Homo sapiens
atagcacatttgattcaaaaaacatactgtagttctaccacagaaggaaaaaaaatcaggtaataayattttcacaacatgatgctgaatgtttatccaatttataaatttcccaagctacattagaaagaatcaaagtgcttgggttctatgtaccacagatggtattgccattgagtggtgtcatttgttcttagtttacagcaaatttaagcttcattctgaggtgttttaggaagactattaatttcatcctgtctgataagaacaaaagcaattgcaaatggtaatacaaagagacctatgatttccatgaaatgaaagtagagctatttgacccccagcccccaccccaaaattaaacgtggaaagatgatgacaaatgttataacatgatgaaaacactgggaatcattctaaggaaaagacaaatcacgtaacatgaacagggctatgcccatctattcaattaataacgatctgcacaaaaggacagaaggcggttgatgaaacataaaacctttccagtgtgtgactaaagtatcagtttcagtatcagatgctcattagcctaatcagaaaaag

SEQ ID NO: 226118 - DNA, 586 bp, Homo sapiens
gcctctttgaaatgccacattcgcttccagcttaagtgtcttgagactgtcgcggtgtctgcagctgcggcttctccagcgccctccggaggctttgcttcgggtttgtctaatacaacacagggggaaatcatttgatcgtggacgtttcacgtttctttgtcttcaaaaatgaagaggacattttgtaaaattatcacacaaagatgagaaatagattagagaaccaactttgggttgtaaatactaaagaattccaaatggtaatgtatgartggctaaaaagcagtgacacttatctaacgcgttattactttattccataaaaggaacaaacctaaattgaaggaatattcatttcccccttattggatttaatagaacccttttcatttttaatgggaaataatcaatgtgacctatagatgtttcaattttttttttaaataaataaacctcctctttagggtgatttctggtgggattgaggaaaatgaacgggtttagggttatcttggcccaaagtctatcttggatttgccgctagttcactgtgtgactgcgtcaggaaacaagctctgaaaaa

SEQ ID NO: 226119 - DNA, 586 bp, Homo sapiens
gcctctttgaaatgccacattcgcttccagcttaagtgtcttgagactgtcgcggtgtctgcagctgcggcttctccagcgccctccggaggctttgcttcgggtttgtctaatacaacacagggggaaatcatttgatcgtggacgtttcacgtttctttgtcttcaaaaatgaagaggacattttgtaaaattatcacacaaagatgagaaatagattagagaaccaactttgggttgtaaatactaaagaattccaaatggtaatgtatgaatggctaaaaagcagtgacacttatctaacgcgttattactttattccataaaaggaacaaacctaaattgaaggaatattcatttcccccttattggatttaatagaayccttttcatttttaatgggaaataatcaatgtgacctatagatgtttcaattttttttttaaataaataaacctcctctttagggtgatttctggtgggattgaggaaaatgaacgggtttagggttatcttggcccaaagtctatcttggatttgccgctagttcactgtgtgactgcgtcaggaaacaagctctgaaaaa

SEQ ID NO: 226120 - DNA, 525 bp, Homo sapiens
tgattaattagactgggaaacaaaggagggaacgacggccctgtgcttcctccgccggctgcctctgtggatgcgtgggccgctggcttcagtcctgcttttctttctgatggcccttgttgtttacgctaagtatttttgcaggacgmctgaggtgggctggggtcactctgtgttctcctcccgtggcagggcttcactctcctcccccttctctgttggggtttcgctgtcctcatcagatggggatctcatcctcattagatgacttcttgtgcagcttccatgcctggttatttactcttgtggcactgagaggtttgtacatatctttaagccagagtggctgtctgaatgagaaagattcatcctgagtctcacttcgtgaagagcatctcctctgtggcagaaatctgaaaatgccccttgagaatccttctccatcttcttgtgatgaccatcggtgagaataaatctcaatgaggcaaaaaattataatcaaagtcgttagtatttcggtcacaa

SEQ ID NO: 226121 - DNA, 525 bp, Homo sapiens
tgattaattagactgggaaacaaaggagggaacgacggccctgtgcttcctccgccggctgcctctgtggatgcgtgggccgctggcttcagtcctgcttttctttctgatggcccttgttgtttacgctaagtatttttgcaggacgactgaggtgggctggggtcactcygtgttctcctcccgtggcagggcttcactctcctcccccttctctgttggggtttcgctgtcctcatcagatggggatctcatcctcattagatgacttcttgtgcagcttccatgcctggttatttactcttgtggcactgagaggtttgtacatatctttaagccagagtggctgtctgaatgagaaagattcatcctgagtctcacttcgtgaagagcatctcctctgtggcagaaatctgaaaatgccccttgagaatccttctccatcttcttgtgatgaccatcggtgagaataaatctcaatgaggcaaaaaattataatcaaagtcgttagtatttcggtcacaa

SEQ ID NO: 226122 - DNA, 481 bp, Homo sapiens
tttatttctcacactccatagattggaagtctgagatcagggtkccagtgtggtcacattctaggcagagctagggagagctctctcctaggtttgagattgccaacttgtaattgtgtcttcccattgtggaaagagagctagagcactcattggggtctcttttctgagtgtgctattctcactcatgagggctccattatcacaccctcatgaactaattacctcccaaaggccccaaataccatcacattggtgattagatttcaacataagaattggggatgtgaacgcaaacatttagttaataacagtaggaaaatctagatgggagtgtatcttcaaacaaagagaaagttgaacatgcagcaattagttcacatcctcatttatagcagaaacctagagaatctccatgctacttggatagtatcttcctttcaccactatggtagagtcaaagtatgatatatacatatat

SEQ ID NO: 226123 - DNA, 428 bp, Homo sapiens
agtattatcccatgaagagtgtctaagatgaaccaccactatttcacctgtggaacattaaaagcacacacacacaacaaaatagcataacaaaacaaatctacccaacatagactttgtgaatctaagtcttcagggatgtgggaaacaaatgcctgagggtagttcctttgmagattcacagacaacttgtatgtaggtaactatcctttttaatttggcatttatagcaatttctattttgaatttcttagcattttttaaaatatcaagtacttatataaacaagaaggactatgtcttctttaggtatttctataggcacgtttacttgatcagcaaatatttattagagagcctgttttactaggattgataattcaacagtgaaccagacagaaaaggtctgtctctcatagttcacattc

SEQ ID NO: 226124 - DNA, 338 bp, Homo sapiens
acatatgttgaagttattttattggatattaaaggaataaagaccttaaaccattaaggttttgaagacacttaggttacatttctctatataaactcattcatatgttacgaattcagaatggcatctgagatcctagatccsataatttgggtcttcttactgaaggataaatggccaaagaggaaaaacaaaatattctgttaatctaggcaagcatgtgatagctctgaatacaggaatgttccagtaaactctaatggaactaaggcaggacacctgtaaaaattactttgtgagtgtagtcgatgctttctctcgctgttcacaaccacagt

SEQ ID NO: 226125 - DNA, 568 bp, Homo sapiens
gttattttattggatattaaaggaataaagaccttaaaccattaaggttttgaagacacttaggttacatttctctatataaactcattcatatgttacgaattcagaatggcatctgagatcctagatcccataatttgggtcttcttactgaaggataaatggccaaagaggaaaaacaaaatattctgttaatctaggcaagcatgtgatagctctgaatacaggaatgttccagtaaactctaatggaactaaggcaggacacctgtaaaaattactttgtgagtgtagtcratgctttctctcgctgttcacaaccacagttttagccaagagaacaaggaaatgccaatcccaagtacacctcagagagtagcagtaaaggcatgaaagaaagtcaggtttgggcagaagaagctggctcgcaatgcatttgcaagtaaggatgcaattgattccaggaggtggtgtggagctgggatggttcttcatatttgtcccaaatagaggcaaggaccaggacttaatcttctcacattagccagccagtgactgtaggcagatct

SEQ ID NO: 226126 - DNA, 587 bp, Homo sapiens
  misc_feature (1)...(587): n = A,T,C or G
nnnnnnnnnnnnnnnnnnnngctattctagattttctatgtacaaaatcatgctttttgtagatgcttttttattattgctagtgagcaataataaaagttttatatatttatttccaattcctatactgttgaggacctttagtatactgctttacagaagtagtactactagacactcttgtctcattagcaggggatgtttttatgaattgtctattgaatatgatattctttttggttttctttatcgaattgaatttttttattcctagtttatcatgaactttatgattattatggattcccacgtgcataccatacaatttactttattggtgtatggttccagggacattagcatatgtatacatttgtataaccaccaccacaatcagaatacagagcaattctataattccaagatattccatggcgctgtctttgttgtagccaaaactttgcctgatcycaattcttggcaacaactaacctgttcttctttcctgtagttttaccttttccagaatatcacatggaatcatacagtatataacctaacactggcttctttcatccagaataatg

SEQ ID NO: 226127 - DNA, 644 bp, Homo sapiens
aggactgaagaacctttagaggaagctgaacaaaccccctagagggatacaggcagcctgaaccaatcccacagggagaaatccaagtgagtgaataagcacacttgctctttttcttcaatattcttctgaggctcttctgtttgtgcaacccaagcagaagccagagaagcagggacgttgttgcaggctagtttcctgatgaaaaatgggaggaagagagagagtagatctgctggggctgatcgattcgttcatactcacagaactgtctttgcagatcctgtaccctaaatttgatttgatataagaaactgtggaaggcttaggcaaaatattagrcctcacaatctcaagtgagattttcttttagtctcttctgatgttttgtctctataattagattttaaaaaatctttttctaccacttaagtcttattttgattaactgaatttaagttattgtttctcttccatgaatctttgaatcagtagcctgcaaattacactaattttttagatctggcaaactaattttcttttctgtttagtttttcatgaactaaaggcaactttacccaaacctctatcttgtaggtctgagcccaatactttgaatcatagcaagttgatgttggccacag

SEQ ID NO: 226128 - DNA, 530 bp, Homo sapiens
gacagctttgaatgtcaagctaagaaatagggtaacatatactttagttaattggaagtcactgaataggagggagcgatgattaaagttgtatttcaacaagaatttaactttatatatgttttagaagtcatccgtaataactccagtgaagagtaataacgacctgaattagtggatttgttagaactctaggcgtggtgatcactggaatggtaaacatagaatcattttgagatatattattgaggtaaaatcagtaaatataacattaattgatcatttcacycatcagtttaaaacccttcaatggttttcacctactacacttagcatacattttatagtctttatcttgacctacaaaatccttaataacttaaaccttgcttacctgtttccgtcctgtcatcttatgtcacttacttctgccctttatgcactgctccattcataataatttccttataacttctctaaagctcttagtttcttttccctaagtgctttcactgagacaatgaattcac

SEQ ID NO: 226129 - DNA, 573 bp, Homo sapiens
ggcattacattttaaccatattgaacaagtgagacttagttgagggcgagcacacacagttttatttctccacatattttaaaaataatgctctaaatttttgagaggcatgtggggttggggaattgaataaagttttgttcccagtccatgtcaatcacaagtagaatctcttttcagtaattaaataaacctcctttgtttgctgttaaagcttcgttttaaaattcaggttaacatttctacccaattccaactccatcttacctcaggtcataaagcctgcagaggggctgctacttctttctttctttccttctctgtctacctaattctgcatctgctatttttggttcatcagggttggaggaggtgggataagtgattgtggaataataaagtgctgaatggttcttatatgactgaagacatatcttttggtgttggtactgaggcgggaaattaaagaaagataamatttaaaagaaagtgaaataagttgtcctgtattaggctgacttgtcccaaagtcagcaataggcacagcccagacccaggaaatgtcttgataat

SEQ ID NO: 226130 - DNA, 620 bp, Homo sapiens
ttctatattctgttctttgtgagtgattcactaaatccagctcacccacaagatggaatggagaagattaagtttcacttcatggggaggagggggaatatctatgtaaattatttgacatccgtttaaaagaaagatttctttttttccactatttattatatcaatatggattcatgttcattgaactcatgatggtgggttataatccagtactatgttctttattgctggaattgctttagctttggccattactttcctactttctgacactacaagagatccacccttattttgtatttgttttctcagtgcctagaatcaactgtttctctaattgcccttattctttttagttgaaacttatctttagaatccaagtttaggcactgagtatgcttaatagttttgcagtatygttgcttcttggcctcctagaaaatagaactaggtaaaattgtatgtatatgctaacacatttatatacatatgcctatgattatttttgtatgtattcaaatgtacgtattttaagctaaacatatttatatatttttaaacatgcctctgatagaatgcacttatatgaaccacattttatttcatttattcctcgc

SEQ ID NO: 226131 - DNA, 401 bp, Homo sapiens
actaaattaatttttttcactcacttatattcctcacaaaactgtaaatgttatgaaagagaaattccatccatctaagttacttttgcactcagggtgtccagtttagccatactacataagtggattataaattgtaaaataagaaataatataatgcatagcttactttgaaatcacttatgaacaaacagaaccttattaggtgaagaatacacacagccaagtttaaattattgtgacagtacaawgttctcaaaggtcgtctgtgaattactagtatccttactgtaatttaaatcgagatgcaaaatgacaggtgaaagtttccaacaccaaatcttttaacatctattgtagcaatagtcctatataatctcattattgctgcaacagttata

SEQ ID NO: 226132 - DNA, 604 bp, Homo sapiens
gttcagccttttgattccttcaacagagttaagtgaagaaagaaaatgaattacattgtaaaagacagttatggggcactaatgttcagaaagaacagtgggtatgaacatcatgtagatatccaactgtgttaaaaagaatcttggtaaagtggaccccagctgtgttattctagatgcccattttcacttaatgaccattagacaggcaataaagccattagtggatgtctgtaatgtaagaaacaactttcaggtaaatcaagttttaaatgcctaagcttgtaaggygaaataaacaaaagtatgacaaaaggttatttttcaattaatgtaaaccttctataaactgtttttcatactaacctatccctagtaaaattcatatgtaattatatgaattatatataatttaataaaatagtaaaataaatatgtaacaacattgttcattatataacaacataaaatgaaagtaccttaaagcaggaaggagtgttagtgaaaactcgctcactcatttatcacgcattctcttaaatcatgaattctatctacaattaagtaaacaggtgaataaattgtcatctgtttagcctctgct

SEQ ID NO: 226133 - DNA, 422 bp, Homo sapiens
catcgatctatttatgtatataatatatacacagatagataggtatagagagatatatggtttactcatatgtctatatctattcatctacctgtatggagaaagagagagcacaacttagcctaatttatagttagaaataaataggccatgtattgaatctatcagtcagattaagcaccttacccacctcatatcctaccatgaattccttggtattagaggaaatatatatgtttagctttttttgtaccatgagaaagtgagggaacattagctgtccatrtatctatttatgaaacttgtatctttgtatttatgtatacatatctattactttgcttgcagtgtatcatggacaggaaataaacttttggaaatattgaaaaagtaaaaagatgatgagcttacaatggccagag

SEQ ID NO: 226134 - DNA, 496 bp, Homo sapiens
agtagaaaacatttgggaaagatatattaaaggactgttatctaaaaatataaaaagaactcttaaaactcaacaaaaagaagtatcccatttgcatacatactgaaaacattgattgaattcagtkgaatattacatattggactctatgccaggttattgggtataaaaatgaatagacactttgcaacttctattcagaaaataaaaataagaaaaataattactcaactaggttactaggacaaaaaacaggtgatatatgtaaaattagagaagttcaaaaaattagtaatgacaattagagccacattacaggtcacgcaaagagggagaatttccaggtgacctatgaaatgggaagtatttatgcgaaatgtaaacggatggagaaaattgtacttaataagagacagtgcatatgtgataagccattttgataatgggatgaagaatgtgaaagccacacagacaaatatttctgggcaataagaaa

SEQ ID NO: 226135 - DNA, 548 bp, Homo sapiens
tcaagttttgattttattatctaatgttataatctgactatacatacacatacagttttcctctgcaatattcacattcccaagatagcatttgacttcaaaaatgagatctgaacatgaatatataaatacaatatcagtgaaggcatggagttttatggataaatatgaattaactatactatacaatttttaaatgtatttaagttgaatatagataagattaatctaggcaaaattgagaagtaataaaatattttaatagttattttaatcattcttttgtgtttctttcccttcttcactcctagttttggagacctacaaaaaatcattttctaagtaaagcttctttggaggataagattcctaagcaaaatcatgaactgtgaattggaagtcagccaggtgcagatggagagaaggcattgaagcctaaggagcascatgtgcaaaggcacagaggtgtgagaaagaatgacctcaccaggaaagtgccattagtcatgctgtcactgcttgcaagttaagaaattggctgtgttttc

SEQ ID NO: 226136 - DNA, 548 bp, Homo sapiens
tcaagttttgattttattatctaatgttataatctgactatacatacacatacagttttcctctgcaatattcacattcccaagatagcatttgacttcaaaaatgagatctgaacatgaatatataaatacaatatcagtgaaggcatggagttttatggataaatatgaattaactatactatacaatttttaaatgtatttaagttgaatatagataagattaatctaggcaaaattgagaagtaataaaatattttaatagttattttaatcattcttttgtgtttctttcccttcttcactcctagttttggagacctacaaaaaatcattttctaagtaaagcttctttggaggataagattcctaagcaaaatcatgaactgtgaattggaagtcagccaggtgcagatggagagaaggcattgaagcctaaggagcagcatgtgcaaaggcacagaggtgtgagaaagaatgacctcaccaggaaagtgccattagtcatgctgtcactgcttgmaagttaagaaattggctgtgttttc

SEQ ID NO: 226137 - DNA, 496 bp, Homo sapiens
agtagaaaacatttgggaaagatatattaaaggactgttatctaaaaatataaaaagaactcttaaaactcaacaaaaagaagtatcccatttgcatacatactgaaaacattgattgaattcagtggaatattacatattggactctatgccaggttattgggtataaaaatgaatagacactttgcaacttctattcagaaaataaaaataagaaaaataattactcaactaggttactaggacaaaaaacaggtgatatatgtaaaattagagaagttcaaaaaattagtaatgacaattagagccacattacaggtcacgcaaagagggagaatttccaggtracctatgaaatgggaagtatttatgcgaaatgtaaacggatggagaaaattgtacttaataagagacagtgcatatgtgataagccattttgataatgggatgaagaatgtgaaagccacacagacaaatatttctgggcaataagaaa

SEQ ID NO: 226138 - DNA, 609 bp, Homo sapiens
ccttcctccataatatttgagagaaacaaattccacagaaagcaaatcagacccttctctactgatttcatgtagagatttaatgcaaaatgagaaatatatctttgttcttctaacactcaattcaatgactcttctgccgtgtgtgtgtgtgtgtgtgtgtgtgtgtgtgtgtgtacacacacgcatatagggattcatgcatatattttggttggatttttaaacaaagtaatttaatatgactaagctatatatgattatatgttttctatggaatataatgcatactaaaacatagatttgcaaataagtcatcaattacatccatttaataattaagaatcctctcaggtagacctagaaacatagattcaattataacaccatctataatgacaggaaacatcargtattatctggaatttagtctttgggcaatgatgtactctggataaatgaaaaagtggggttgcacaaatgtgggcatttaattgggaaaaggagaacaataagatttgacatacatttttattttacctaacgtacatcttctcttgctttatgatcagtgtgataccaaaaaaatgcattatcaatgacatttaa

SEQ ID NO: 226139 - DNA, 575 bp, Homo sapiens
gactgaaaaaacaagtggtaaaaatatttaaattcacagaaaaagagaaaaaatataagaaccatgaggcttgaaaaagtaggtgataaactcaatgacttagcatgcacatgataacaattatatcaggagacaagaaaacagataaaaggagagagatatgttaaggaaataacagatgaaattcctcagagctcataaaatacctaagtctgtgtgttgaagtggtcatctaattccagacaggactaatgagagaaaatacaaatcttggcagatcctagaaaaattcctgacattaaaaaaaaaatttaagtaaaaatttcctgttcctaatggcacatcagatgcaagtgaactctcaaacatttctagtggataggtgaattactgctgcatttctggaaagcaatctgttaacgtcgcttaaaataagacgcacatccccatccttcttccctgtagtccyatccgtgggaatctatcacaaagaacttcaaaaaatacaaatggctgagaatataattatgtttatcactttatcacagcactatatctgtggtattccagtaaat

SEQ ID NO: 226140 - DNA, 453 bp, Homo sapiens
aataaaatccctttcatcacagatataataaaatatttagacattttagtttttttataagatgttgctgaatttgagagagatgagaaaacctttcaaactatatttatttaaagatctttgtccctttgaatgttttggtagaaatgcaaccaaggattcttacaattagaagagatgtgtgaactgcattgctcacaatatcctaaccatcttttattttcatgcacaagacatctcagggagattaaaaataaaagtatgttttaactcttaaaaagtttaaacataatcataaaactctcaatctgtgtgtatttttatgacagtttttattgcaactctttttcttactcttgcatttttccaaatttcttggccaccttctaaaaggtagtagrttctgagcttccttgtcctagggagacttttttttgccaggaagtatgtctt

SEQ ID NO: 226141 - DNA, 540 bp, Homo sapiens
  misc_feature (1)...(540): n = A,T,C or G
tgtaacaattttttcttactgtaagaagaccaagaaatgtatactgtcacacattttttaaaacaggacagggaaagactgcaggcttgaaaggaagatggggtggaaagaggggtactgccaagaggcagtttcagaaggaagaatcttcaagacaaaatcgcggtgcaaatataggcaagggatgcacaggagaagcgagcaggagggcggctttattcgtagagattgggaaggaacagttttatgaaaatacattgaaacttagatctacgtctttttttgtggccattttgcaaaggtgaaatatactctcgcacacacccaaaatcatcagaacacagagactgatgataccacacatgaaaatgttttttactcacatartaaggattcaagataaaagcagggcttnctcnatagttggtctaaaattggcttgaggagagaagggaaaggagactggcttgggttttgttgtgactttgatgtggggcttgggtaagccgtggtttgaacttccctccaccagcgcctaag

SEQ ID NO: 226142 - DNA, 540 bp, Homo sapiens
  misc_feature (1)...(540): n = A,T,C or G
tgtaacaattttttcttactgtaagaagaccaagaaatgtatactgtcacacattttttaaaacaggacagggaaagactgcaggcttgaaaggaagatggggtggaaagaggggtactgccaagaggcagtttcagaaggaagaatcttcaagacaaaatcgcggtgcaaatataggcaagggatgcacaggagaagcgagcaggagggcggctttattcgtagagattgggaaggaacagttttatgaaaatacattgaaacttagatctacgtctttttttgtggccattttgcaaaggtgaaatatactctcgcacacacccaaaatcatcagaacacagagactgatgataccacacatgaaaatgttttttactcacatagtaaggattcaagataaaagcagggcttnctcnatagttggtctaaaattggcttgaggagagaagggaaaggagactggcttgggttttgttgtgactttgatgtggggcttgggtaagccrtggtttgaacttccctccaccagcgcctaag

SEQ ID NO: 226143 - DNA, 520 bp, Homo sapiens
ggtaatatatttttagaacagatatgaattggaaaataaacctgaactgcaagatattaataaaaatatttagggtggttgtgcagaaaagtcaacatagcaggctttaggctactgtctttggaaaagcccacttgcgaggttggcccttggctggtatctggaaacttactggtaaacagttccctacacagatataaaccttttcccaaatgaaaagaatgattcactgtgcctatgctgtttgtacaaacaatgtggtttatattgaacacctgttttccttctgggagtctggaattttggtgcatgccaggcagaagaagcctatgtgatctgctcccaatagaaacattagatgctaagtatctaacgagcttctctggtaggtaaaacttcatgtactgtcatacctgttgttgcaattttttkctggaggaattaagtatttcttatgtgaccctaacttggagaaaactttcggaagcttgagcctagttttctgagaattcatcccatg

SEQ ID NO: 226144 - DNA, 646 bp, Homo sapiens
gctgatgtcacacctgttgctgcaattttttgctggaggaattaaatatgtcttatgtgttgcagcaagttacccagaactagctaagatcactgatgaaggtgattacactaaccaacagattttcaatgtacacaaaacagccttctgttggaaaaagatgcaagctgagaaaagtgggaaattctggccttctccattattatcaagcctctaaagattctggagatacccctatctcagccccacagtccatgtgacttttaaaaaaatatatatggaggaaactgtgaaagccatatcacccagacattcctagctagagaggagaagacaatgcctsgcttcaaagcatcaaaaaacaggttgacttgtctaatgcagccagtgagtttatgttgaagctaatgctcaattaccattctgaaaatcctaggaattatgctaaacctactcttcctgtactctatacatgaaacaacaaagcccagatgacagcacaagagtttagagtttacagcatggtttattgaatattttaagcccagtgttgagacctactgctcagaaaataagattcctttcaaaatattactactttttgagaatgtacctggttacatccaagaactctgtgggagataca

SEQ ID NO: 226145 - DNA, 599 bp, Homo sapiens
gtaaatgtaatctgcaattcagaaacaattgagaatgatgatcttagagatggcaaatgaagccaagagtgaatgagatcattcattgagggtacacagagaagtaagagaatcaataatacaaactgagaaagcaacttttaaaggataggacaattaccaaagatagacaggccatcatttaaacaataagaaaacccaggaaaaactactatcatagaagtcaagtcagggagggtggggagtattcaaagaagtgagcatggttggcagtgtaaaatgcctcacagatgcttcrccaaatttgaagaggagttgctgtatttggctattaagagataaactaggcgaaagcatgatggcggggtcacaagagaaatgaaaagagatagaggactaaaaagcaatggcaatgagtatattcatttattcatgaagtttggctgagaaaaagaaagctaaggtggtagttttatgaggacagttaatcgtaaagtaaaagtttgtttttattttgttttggtggaagagttgagcatgtcacaagcaaaggataagccaaaggcagtaaaagagagattaaaaatatgcgaagggat

SEQ ID NO: 226146 - DNA, 599 bp, Homo sapiens
gtaaatgtaatctgcaattcagaaacaattgagaatgatgatcttagagatggcaaatgaagccaagagtgaatgagatcattcattgagggtacacagagaagtaagagaatcaataatacaaactgagaaagcaacttttaaaggataggacaattaccaaagatagacaggccatcatttaaacaataagaaaacccaggaaaaactactatcatagaagtcaagtcagggagggtggggagtattcaaagaagtgagcatggttggcagtgtaaaatgcctcacagatgcttcgccaaatttgaagaggagttgctgtatttggctattaagagataaactaggcgaaagcatgatgrcggggtcacaagagaaatgaaaagagatagaggactaaaaagcaatggcaatgagtatattcatttattcatgaagtttggctgagaaaaagaaagctaaggtggtagttttatgaggacagttaatcgtaaagtaaaagtttgtttttattttgttttggtggaagagttgagcatgtcacaagcaaaggataagccaaaggcagtaaaagagagattaaaaatatgcgaagggat

SEQ ID NO: 226147 - DNA, 599 bp, Homo sapiens
gtaaatgtaatctgcaattcagaaacaattgagaatgatgatcttagagatggcaaatgaagccaagagtgaatgagatcattcattgagggtacacagagaagtaagagaatcaataatacaaactgagaaagcaacttttaaaggataggacaattaccaaagatagacaggccatcatttaaacaataagaaaacccaggaaaaactactatcatagaagtcaagtcagggagggtggggagtattcaaagaagtgagcatggttggcagtgtaaaatgcctcacagatgcttcgccaaatttgaagaggagttgctgtatttggctattaagagataaactaggcgaaagcatgatggcggggtcacaagagaaatgaaaagagatagaggactaaaaagcaatggcaatgagtatattcatttattcatgaagtttggctgagaaaaagaaagctaaggtggtagttttatgaggacagttaatygtaaagtaaaagtttgtttttattttgttttggtggaagagttgagcatgtcacaagcaaaggataagccaaaggcagtaaaagagagattaaaaatatgcgaagggat

SEQ ID NO: 226148 - DNA, 595 bp, Homo sapiens
taaatctgaaaataaaaaggaggaaaattgggtttcacacctgatagattctctttttgggtgtgagctaagatattagatcatttgatatgagtgacaggtttgggtatattggaacagaaaatagaattcattcattcattcagctaatgttactgagcatctactatatgctgccactacattaagcactcaggtacaaagacaaacgggttatggttctatcrgggaaacagcaaaataaataggtgattacaattaagtgccttgatggagatgtgcacaggtgctttgcaagcatacaggagatgtagctaattgagggtatgggggactccacatggaagagcagccaattaagaactaaggaaagaatattctaggtaaaagtaacagtaaggaccttaggtataaagcagcagatatatccaggaatagcacatagcatttggtctaacggcagtctaggatattagcagggatatggctgcagagacaggaacagccaagttgaagaggaccctgcagagaccacaccaaaagagctttgctgtgatcctctgggtaatgcaaactgaaggtttttaacaggaaa

SEQ ID NO: 226149 - DNA, 595 bp, Homo sapiens
taaatctgaaaataaaaaggaggaaaattgggtttcacacctgatagattctctttttgggtgtgagctaagatattagatcatttgatatgagtgacaggtttgggtatattggaacagaaaatagaattcattcattcattcagctaatgttactgagcatctactatatgctgccactacattaagcactcaggtacaaagacaaacgggttatggttctatcggggaaacagcaaaataaataggtgattacaattaagtgccttgatggagatgtgcacaggtgctttgcaagcatacaggagatgtagctaattgagggtwtgggggactccacatggaagagcagccaattaagaactaaggaaagaatattctaggtaaaagtaacagtaaggaccttaggtataaagcagcagatatatccaggaatagcacatagcatttggtctaacggcagtctaggatattagcagggatatggctgcagagacaggaacagccaagttgaagaggaccctgcagagaccacaccaaaagagctttgctgtgatcctctgggtaatgcaaactgaaggtttttaacaggaaa

SEQ ID NO: 226150 - DNA, 595 bp, Homo sapiens
taaatctgaaaataaaaaggaggaaaattgggtttcacacctgatagattctctttttgggtgtgagctaagatattagatcatttgatatgagtgacaggtttgggtatattggaacagaaaatagaattcattcattcattcagctaatgttactgagcatctactatatgctgccactacattaagcactcaggtacaaagacaaacgggttatggttctatcggggaaacagcaaaataaataggtgattacaattaagtgccttgatggagatgtgcacaggtgctttgcaagcatacaggagatgtagctaattgagggtatgggggactccacatggaagagcagccaattaagaactaaggaaagratattctaggtaaaagtaacagtaaggaccttaggtataaagcagcagatatatccaggaatagcacatagcatttggtctaacggcagtctaggatattagcagggatatggctgcagagacaggaacagccaagttgaagaggaccctgcagagaccacaccaaaagagctttgctgtgatcctctgggtaatgcaaactgaaggtttttaacaggaaa

SEQ ID NO: 226151 - DNA, 595 bp, Homo sapiens
taaatctgaaaataaaaaggaggaaaattgggtttcacacctgatagattctctttttgggtgtgagctaagatattagatcatttgatatgagtgacaggtttgggtatattggaacagaaaatagaattcattcattcattcagctaatgttactgagcatctactatatgctgccactacattaagcactcaggtacaaagacaaacgggttatggttctatcggggaaacagcaaaataaataggtgattacaattaagtgccttgatggagatgtgcacaggtgctttgcaagcatacaggagatgtagctaattgagggtatgggggactccacatggaagagcagccaattaagaactaaggaaagaatattctaggtaaaagtaacagtaaggaccttaggtataaagcagcagatatatccaggaatagcacatagcatttggtctaacggcagtctaggatattagcagggatatggctgcrgagacaggaacagccaagttgaagaggaccctgcagagaccacaccaaaagagctttgctgtgatcctctgggtaatgcaaactgaaggtttttaacaggaaa

SEQ ID NO: 226152 - DNA, 510 bp, Homo sapiens
aaaatgggtgtggcagagttagttaagactttggtaactatgctgttgacattatatctaaagtactaaatttaaacctaagtactacatttaaacctaggcagccacatttttaaatgaacaataacagaattgtccaaaaaggcagctgaaatacctgggcagtctggaacctatgttatgaggaatggctaatgtaacttaatattttagcttagaaaacaaaacaaaacaaaaamctatgggaagactgagagtcatttacaaatctttgaaaaactatcttgcaggagtgtagacttgttcttattcttcagaggatgtaactaaaaccagtggattttaaggaagtttcaggaaaagagaataagaggcatcatatgatgttttaacaattttaacaattagaacttcccgataatgaaacagaaaagcctcagattccttatctgtgagctaaaagcattatattcctcaatctctcagagccattgctaaaatcctatgttt

SEQ ID NO: 226153 - DNA, 505 bp, Homo sapiens
ttcaaattcagatttgcaatgccattacagtctggtcttttcatcatgtcatggccccataaagaggtagtgtttgtgctagaccttgaaggatgtggaattggcatgtatgagaaggagcacattccaagcacatagtctgaggaaaggcataaagatgcctgtgatctaggaggaaycagtgccttcagcccagtatcaaggaacatgaagtttgagctaatcatccatttacagacaagagaatgcaagaacttatcctatcttgtctcaatttcttacttaccttagtcaacactacaacacatacttccctttaccaacaatagaactgactttctcaaaattttctaaatgtcccccattagctctaatccccaaacctaatgcccttcctctcaatcctttcattatccctctagatattctggatcagtgactagcagattattctgcatgccactcccatcctcaaaatcctctacctccttgtctgacctagcta

SEQ ID NO: 226154 - DNA, 554 bp, Homo sapiens
acattcaaaatagcagttaaaaatacaggcaatatatgattaaaagccaaaatctgaaacatacacaataaatacttcagaagtttttaaaagaagttgatcaacatgggctacagagtccctaaaatgagaaggatttagatggaaaaagtgagatgaaagagctatatactggtcacaggcttgaatcagaaatgattatttaatgagagtgatacagctgaagcaaaatatttgagcaataaataaaaaaaaaagtaggatacctagggaaggayctggataaagaaagcttaacatgttaggctcaggagtctaagaactgggagctattccaagttattaaagaagagatatgatgaaaatagggacttaggaatattagtcaagtggcagtctctctgacagaggatgttttctgttactttcaggtgtgaatttgcaattctaactctcgaggcttaaaaatttttaatatacctgtacttcctttgtgacttagactatatcttgctgctattcccaacctgactagattccttgtctcgtagcct

SEQ ID NO: 226155 - DNA, 554 bp, Homo sapiens
acattcaaaatagcagttaaaaatacaggcaatatatgattaaaagccaaaatctgaaacatacacaataaatacttcagaagtttttaaaagaagttgatcaacatgggctacagagtccctaaaatgagaaggatttagatggaaaaagtgagatgaaagagctatatactggtcacaggcttgaatcagaaatgattatttaatgagagtgatacagctgaagcaaaatatttgagcaataaataaaaaaaaaagtaggatacctagggaaggacctggataaagaaagcttaacatgttaggctcaggagtctaagaactgggagctattccaagttattaaagaagagayatgatgaaaatagggacttaggaatattagtcaagtggcagtctctctgacagaggatgttttctgttactttcaggtgtgaatttgcaattctaactctcgaggcttaaaaatttttaatatacctgtacttcctttgtgacttagactatatcttgctgctattcccaacctgactagattccttgtctcgtagcct

SEQ ID NO: 226156 - DNA, 591 bp, Homo sapiens
caagttaataaatgtgatatatcacaaaaaacagaattaaaaacaaaaaccacatgatcatctcaacagatgcagaaaaagcactggacaaaatccagcatcactttgtgataaaaactctcaacaaactagacatagaagggacttacttcaaaataataaaaaccacacatgacagacccacagccaacatcatactgaacggggagaagttgaaagcattctccctgagaacaggaacaagacaaggctgccgacatgcaccactcctattgaatatagttctggaagtcctagccagagcattcgggcaagagagaaataaagggcatccaaattggaaaagaggaatccgaactattgctgttttcagacgacatgatcgtatacctagaaaatcctaaagactcctcccaaaagactcctagatttgataaacaaattgagtaaagtctcaggttacaaaatcaatgtacacaaatcagtagcactgttgcacaacaaaatgaccaagctgagartcaaatcaagaactcaatctcttttacaatagctgcaaaaacaaaacaacaactaggaatatacttaaag

SEQ ID NO: 226157 - DNA, 588 bp, Homo sapiens
aaatgaacttgaatgtgtatgtcagacctgtggacatgtcaccttctcaaatccaaagcaacagaaaaacaacattaaggaaaaaaaaaatgagagatctaaactttttgaaattgaaaagtagagactcttttacttatttcttattataataagcatggcttattataatttacaaaaatacagggtacaaaaatagatggcaaaggataaaaacaaaacaaagaatatatggaaaacacatggagggtgcttaaatagtaagccaagaaatgcaagttaaagcagatttaagatgtactcttgtacctattataattgcaacaaaagaataatcaaaataaagtggtattgaggttgcagcaacaaaataatacaaggtgctaaaatatatgacaaaggataaacacacaataaagtataaatagaaaacaccattacagacattaaaatggtaataatcattttaaaaagyaacatggaaaactacttggagccacgaaaatgtttatacccataatctcattgctaaaaaattttgcataataacaaaacaacaaataacaaaactgtgacaagcacacacaa

SEQ ID NO: 226158 - DNA, 547 bp, Homo sapiens
ttagtgcaaaatgtgacttcccaaatgattactttcttctctagattgatcagaatatgtaaacaaagagaaactggagaaaaagcacatcattcctgcacatcctaaggaattatcgtgggtcatgtgtctttgctcatatgtaaataatccatagttgaggctttatcagtgtttttagaacttgaatgataaaagggcaattgaactcagcagtgtccacattgttttccttgaaaaatgtgcaaataattttttctgtcctttcaagggaaaacagtgtgatgagcacttactcccctgagagagggctccaattcctgactaatacgtgctggaatgggtgctccactcctgatgcagagagctccttggatgaagctgtgagaggtgagcttctcctagcatctgtgccacttasagggggacctgccctgccctgcaaacccccaggctcctgtgcattcaccaccataaccagggaatccaggagagctgatgagtccttctggtattgtcagcctcaggtacacaaggtggctacagt

SEQ ID NO: 226159 - DNA, 527 bp, Homo sapiens
ttaagacctgaacctgaacctcctggtatttttctacccacctatcagacatgctaccggtttccccttttcttctgtgcatctccctgttacatggaactaggaagcaggaagcccacagatcaccttgattaatctggtatcaggagctgttttcatcaccatggaaacatgacactcctatggaaaatggagaaacctctgatctttgtattttaaaaatttttttaaaaaacaccctagaataatgttctttctgaaaacaacaagatacatgtacaaacacacgattatattacacatcttgtatgtggttgaattttactcatcatgcttgtaaaaatattaatttatgctcaaagcaaaggtttctagacataagattatacaatgagagggcttaagtgccactggaagaaacttcagggtaatagacttctaaaatgcacagattgttctaagaagaacatgtatcccaagaagtctttgcaaacrgatattcctttatgcttatttcttacccaggt

SEQ ID NO: 226160 - DNA, 585 bp, Homo sapiens
gacagctgagtgtcatgaagaaagcacgagattagaagtcaatgttgtgaatagagcctagttcacgacccattagctgcatatatttgggtaaattatttgcctttttgcgcctgtttcctcttctgtaaaatgggagtaatgaaatttatttacttattcaggctctgaggattaaagctcatgtttataaaacttcctggcatttggtagccccttgcccaatggtagctgctcttcttatcttgccaccttccctctctgcagcctacctactccccaatacacgatctgcacagaggaagaaaaatggttcttaatgtcacttcataccactcttcctggctctrtagcatcctaaacaaggaggggttttggttcctaggggctgctgggattttctccagacaaatttgactgcctggctgctgctgttgtataagcagaaatttaactggggtttcaccaagtgcgtctgacagagaagataatggctagggagttgaataagtatgcaagggagtcatgatctggaagacccgggggatcttggctttacaagtgaggagggtcatgggccctgga

SEQ ID NO: 226161 - DNA, 585 bp, Homo sapiens
gacagctgagtgtcatgaagaaagcacgagattagaagtcaatgttgtgaatagagcctagttcacgacccattagctgcatatatttgggtaaattatttgcctttttgcgcctgtttcctcttctgtaaaatgggagtaatgaaatttatttacttattcaggctctgaggattaaagctcatgtttataaaacttcctggcatttggtagccccttgcccaatggtagctgctcttcttatcttgccaccttccctctctgcagcctacctactccccaatacacgatctgcacagaggaagaaaaatggttcttaatgtcacttcataccactcttcctggctctgtagcatcctaaacaaggaggggttttkgttcctaggggctgctgggattttctccagacaaatttgactgcctggctgctgctgttgtataagcagaaatttaactggggtttcaccaagtgcgtctgacagagaagataatggctagggagttgaataagtatgcaagggagtcatgatctggaagacccgggggatcttggctttacaagtgaggagggtcatgggccctgga

SEQ ID NO: 226162 - DNA, 585 bp, Homo sapiens
gacagctgagtgtcatgaagaaagcacgagattagaagtcaatgttgtgaatagagcctagttcacgacccattagctgcatatatttgggtaaattatttgcctttttgcgcctgtttcctcttctgtaaaatgggagtaatgaaatttatttacttattcaggctctgaggattaaagctcatgtttataaaacttcctggcatttggtagccccttgcccaatggtagctgctcttcttatcttgccaccttccctctctgcagcctacctactccccaatacacgatctgcacagaggaagaaaaatggttcttaatgtcacttcataccactcttcctggctctgtagcatcctaaacaaggaggggttttggttcctaggggctgctgggattttctccagacaaatttgactgcctggctgctgctgttgtataagcagaaatttaactggggtttcaccaagygcgtctgacagagaagataatggctagggagttgaataagtatgcaagggagtcatgatctggaagacccgggggatcttggctttacaagtgaggagggtcatgggccctgga

SEQ ID NO: 226163 - DNA, 602 bp, Homo sapiens
aacatttggcagaatacactcattttttaaattaatctgataatataaggtaagtggtgtcaatggtttttgtttttatttcattttcagtttcttatacctactgaggttaaatatatttttatatatttattagctatttgtatttcttctgagaattgccaatttctatcttgctaatttttctattgggaagttttctgttggaatgttctctattggaactgttatgaatatttacatattttaattctttaagtgtcatttcactgcaaatttttttccattcatttgtcctttttttcccaatagatttttgaggaacacatggtgtttggttacatgaataaattctttaatgatggtttctgagattttcatgcacccatcrctcaaacagtgtacactgcacccagtgtgttgtcttttatccctaacccccctcaccctttcccccgagtccccaaagtccattgtatcattcttatgcctttgtatcctcatagcctagctcctactttcaagtgagaacataggatgtttggtttttccatttctgagttactccatttggaataattgtcttcagttccacccaggtt

SEQ ID NO: 226164 - DNA, 522 bp, Homo sapiens
ttattttctttttgcatgttgaagatatcattctactgttctctggtttccattttattcctcctaggttcattatttgcagtaattgtgttctagaaactcactgttaacactgaattattaaatattgaaccactgctcctagagaaaataaaaggtgaggttccatgagcatgtggtcacaacattttcattagcttatcaacacataaccttgttttgtatgtgtttctgtttaaaaacaccttatttaatctwtattcttgattaattaacattgaacttgcagaccacagcactgtactcatatctgaatgcagcttctgtaacatgtgtattttcccccaaagacacatcatagtcttcttgttcttaggaccactaacagtattttagcactatgcttgaggagaattttaaaccacaaaatcaccaacaaaaagcacagaaatcgaaaaatatgccactaaatagactgtgaaaaagacaaatgtttatagtataagagctaataaaagaagg

SEQ ID NO: 226165 - DNA, 522 bp, Homo sapiens
ttattttctttttgcatgttgaagatatcattctactgttctctggtttccattttattcctcctaggttcattatttgcagtaattgtgttctagaaactcactgttaacactgaattattaaatattgaaccactgctcctagagaaaataaaaggtgaggttccatgagcatgtggtcacaacattttcattagcttatcaacacataaccttgttttgtatgtgtttctgtttaaaaacaccttatttaatctatattsttgattaattaacattgaacttgcagaccacagcactgtactcatatctgaatgcagcttctgtaacatgtgtattttcccccaaagacacatcatagtcttcttgttcttaggaccactaacagtattttagcactatgcttgaggagaattttaaaccacaaaatcaccaacaaaaagcacagaaatcgaaaaatatgccactaaatagactgtgaaaaagacaaatgtttatagtataagagctaataaaagaagg

SEQ ID NO: 226166 - DNA, 496 bp, Homo sapiens
aaatgtttatagtataagagctaataaaagaaggcagagggttgtgttgtttgatcttggctagaaagtatgtatgagataactcagatattttgccacattgtgcatctccctgaataaccatgaaagtgctgcaagaatggattttggggttactaataaattttagcaagtaggcaaattttcaaatattgaatctgtgaataatgagcaccaactataattggtccttttttaaaaaaatcttattcttcaggttttgtgctcttcagtttcactctaatagtatatatgtcaattttatttttaaaattttttgataaaattttgattttcktagacttcataaatctggggcttaatatttctcatcagttctttaagaatgctcagccatttcttcttcaagtattctgtcacccattttctctctctttctttttctgggactctagacatatttttgaactttttactttgttatttatgactccta

SEQ ID NO: 226167 - DNA, 526 bp, Homo sapiens
ccttccatatgattaatacccatttgcatcaactctaaagtggaaaactgcatacactttattcatttttctatcagattgcttgatgtttacctataaatttctatggctttttgtaagttagaaagagtaatctttgtctgtcayatatatttcaaatattttttccagcctatcatttgttttttgactttgcatttggtgtatggacatttttatcagtttcattgagctgtaatttacatacaataaaattgacctgttttaagtgtacaatgtggtagattttgacaaataggtacctgtatgtaaccatcaccacaatgatgatatagaagtttcattatcccacatattttacctatgcttctttgtaaccaatcttttcccacctctagccctgtgaccactgatctggttttcttgccttttctggaatttcatataaatgaaattatgcagcatgtagtcatttgtgcctgtcttttttcactgaacataataccttgagatcccatgttgtgtg

SEQ ID NO: 226168 - DNA, 536 bp, Homo sapiens
gaatggtaactttggtacagtgtgtgagttcaccatgttggctgcatttattttttgaattttcatttaaacagattttttttctaattcataacactgacaattagcatgcagctgcacttagtgtttaaatagctggaaattcatttagattcgcctctttgtcaattacattttttgcttagtctgttaaaatgcaaaccgttggttcatattcatcattaggctcatatctctgactttacatactaattttatgtaaacgtcagtgcatgttattagcttttcatttccccttccaatatgatgatgtttgagttttaaattaaatccttttagtgggtgcagtggcaagtgtattggacttatagttattttcttgctctttctcacttgctctcagactaaaaattctgaattacaatatttgtgaatttctttatctatgacagtcttgtggtcactgtcactgttttgtttttatctatggattattatgcytaagtgtggtttaagcatgttggtagagctagctg

SEQ ID NO: 226169 - DNA, 572 bp, Homo sapiens
ctctatgctcttagttggggagatagatggcaaggatgggaatgggtggaattgagaatgttcaccagggacctacttatgtgccaagttctatgctaaatattctatatatgtttctaacaagcccaccctgtgttggagagaattactaacaactgataagtgaattctgactgatacagagattcctcttcaacgtacatagagactctgctgtgagaagcaacttgcttctagatcaacactactagtgtctgcccttagggtgactagctgcccggctcagctgaaaacctctgtccagtacgtgtcaaagctttcaccaactggcttgtgacttcagtttcctccactgtcagctactttgaaaaatgtccacccatttgaggtgtccctgtggcacccaccaygtaaattgtataaatgctacttggcctaaattataatgaaacaatttcagatatcccatcaaatctggtgaaaacccatatagttgttcacatgaaataaggcataaacagagagtaactggttttgttcacatacattttacgtaatccttagggttacaa

SEQ ID NO: 226170 - DNA, 618 bp, Homo sapiens
ctggtatagcttggatctcttttcctgttgcatcattcaagttccactgattctcttccatgagtcccatgacatcttgtctcatgccattctgcacgaggatgggacttttaaaacactgtgactatctctagatgatcttcagtcatagcctatgcaaaacacagtccacactgaatatagtcattatggagtctttgcttcctttctctacactctgcaaagtgctgatgcttttttacatattagtcaaagggataatatttgattctttccttgattttgcaagtttctctttaatgtgagctgaggtcttgcctatgttctctctgccagctgcactatctctgggatcagcatcctgcactgagttcatgggaggaggatataaaatttcttttaatgacaaaagccactacctgcttagaatatgggcaaagacatatccatcgctcactctgatcagtttgtcagagtgagctacacatagcctcrataccttcaaggctacaagtgtgatgttaaagcactcccaagttgacaaggactgtcttccctcacagaggtttcctggtatgtgtttctccagaactgttcttgtcatcagattcatcattc

SEQ ID NO: 226171 - DNA, 619 bp, Homo sapiens
aaaccttgaatttcctttgcaattttgaagaggaaatccataggtgacaccttccctgacaaaggaaagaggaactaaaggccataaggggtggggaggagggggcattgaggtcatagaacaaaaggaaatcccattttctaatctctacaagatagtcgtgttgctgatctctcctgctgcaatagagcaataaaacatgtcctggaaggtcagcagatattacagcagtgggaaaagcaggatataattatcaatgatcaaggcactcagtgggtccatctcaattttctcctctttcattcttccaaccaaatgatagaaaattgatrtcaattccaaagccacttatgtatttgtggcacgataacgaatcatccattcaaacatctttcatagttatttcctaatgagctgacactctatgtgaaggttgctgttcatttgtatagtcatccctgtgcttaaaatactaaggaaaacttgtcccttcttattggcctcaaggatactgattccataatggttataaaaggcacagaagttgtgttttgcattcctttttccaccaaactcaaatgcataattgctcttgcttttcagtcactgattcaacaaa

SEQ ID NO: 226172 - DNA, 566 bp, Homo sapiens
ctgcctaattgagactgctgtataaagaaattctgttatctgcccttaactagagacattttaaattcaatatctagacccctcaaaaagtggtcactacatttacatcttacttatgctaaagtcagcctaccaccttcagatttagagaattaaagtccctcagataactgggggaggttaaaaaacaaaaacaaaaaacaggaggcataaatgataaggtgctaaatttttcttctttggtacctgccaagtagaacccagtggayaaaatatggagcaagtgttgaatgttgcttgcacttcttatatgcctaaattagtatgcctgacataataatttaaccaaacaagtttttcaacttgcaagatagggatgaaaaggtccactaattcatagggtggcttcatggtttaattagatttgaagaagccaagataatcctgagatcctccaaggaggatgtataagaaatgatatggttgtttttcagagcatttaatgaagaactgtgctcatctcctctgccactgggatattcctgcctgggatcagagagtggtaa

SEQ ID NO: 226173 - DNA, 500 bp, Homo sapiens
ggtatattctttcagtggaatctactacaaaatgcaatcttagagaaaatcacacctgacttgtggctaatgaatattttctttttcagtttccaattttggaccacttacccattttagtttctttytttaatgagttgcctttcattcaactcagcaggacaaaaaatgtaaacacaacgagttctgaatgttcagatgtgaaggaattaaaaaacaggcagccacaccaccaaaaacctcagtgaaaactctacggagagccccagagtactcattagtcctccatgccactatcaagtaatgcagatttcagtcgtggcaatgccactatgtgacttgagccatttatttttcctactttgaatcttagagccttaatctaaaaagtgaggaaagtgaagaaagtgaagaatttggggcctatattagtttgctagtgctgcccaaccaagtaccactgactaggtggcttaaacaatggaagtataattcctcac

SEQ ID NO: 226174 - DNA, 500 bp, Homo sapiens
ggtatattctttcagtggaatctactacaaaatgcaatcttagagaaaatcacacctgacttgtggctaatgaatattttctttttcagtttccaattttggaccacttacccattttagtttctttctttaatgagttgcctttcattcaactcagcaggacaaaaaatgtaaacacaacgagttctgaatgttcagatgtgaaggaattaaaaaacaggcagccacaccaccaaaaacctcagtgaaaactctacggagagccccagagtactcattagtcctccatgccactatcaagtaatgcagatttcagtygtggcaatgccactatgtgacttgagccatttatttttcctactttgaatcttagagccttaatctaaaaagtgaggaaagtgaagaaagtgaagaatttggggcctatattagtttgctagtgctgcccaaccaagtaccactgactaggtggcttaaacaatggaagtataattcctcac

SEQ ID NO: 226175 - DNA, 548 bp, Homo sapiens
ctgagtgggggtggggcaggagccaaggagtagttgtgtccccacaggaaaccagagcagcaacaaccgcttctttttatatctcaggtgagctctgtttccatatataactaaacagaagacttggggtcaaatatctgaaatagagatattttaaacattcctaatatgcctctgttcagaacaacaaaaaaaaaaaaacaaaaaaaactctgcctaaactttacattcagatatacccagggccacatgaaagaaagcatttgtgttgactttgcactgctccycttgggtaatactgctttgcagtctgttcctcttaggtcattcacaaccaaataacgcccccctcctttgtggctccggttaaatttcatatttgcttaagaaaaacacagaatcttgggaaattttagcctattacagacattaaggaggaacagtctatctgcttcttatttctcttaaaacacacacaaactgcagtgtgggcggccaatgttaccctggtgatttccttccctctgttctcagctaaaattgtgcaa

SEQ ID NO: 226176 - DNA, 171 bp, Homo sapiens
attcaatcccataccttcaggaagcataaattgcactgagatttccaagtagtcctagaagatccatattcctatggcttcctctgctcctaggtctctgcttatttgtggtatcttgacttcrtacatatggatccaaacgagatgctgagtttctgcatcggcctttgt

SEQ ID NO: 226177 - DNA, 412 bp, Homo sapiens
tgagctatttatccttaaggaaccctttcctttagtttcaaaaatatctattaaaaaatgaggatgatgcctcagtctcaaaaagaccatgaaaacacaggctatagtggcagatggatgcctttaccaactgtaagagaaatgggaatgatgctgccmgcccccggtgaactgagatcagtgaattcacccagcatctgatcccaggaagacgacctcagggggtactatattgcttcttcaagaagacttctgaaatttgtcccaatgtctaaggaattaaaatgtgctttaaagaaagggtaaaattgaagcattttacttcctattttgcttctgtctatttgctcaggaattttccatagaggcttgaacaaataatttactacagggtttatatattcatgcaaat

SEQ ID NO: 226178 - DNA, 364 bp, Homo sapiens
tctggaagcaatttgagatgttcatttttatcactgtacataaaaatctgattaacaagtactcttcagtgatcttattgtctttcagaagcatctctgctttcttacattttaaattgcactttaatttttaaaggaatctgcctttcttggggactctttaaagagtttgctggtctatttattgatggaaagttcacaggacataattttttcttcttattctgattgtctaaagaaataagtgataccttttttatgtgcctgactatgttaatcctaaaattgatkgcctaattcaaaagttacaaacgaggcccagggggtggtttttctttttcttttcttttttcatttgggtcaa

SEQ ID NO: 226179 - DNA, 550 bp, Homo sapiens
tcgaataaaattgtttcaaatgcaatgttgctaaattaatataaacttactcttttaagtctgtatgtgaaactaaatgaataaattagatagtagaatttgcctatttgtttttttcctgtttatttacatttaattaataaagacaatagraggatgaggtttcagtattctcttcaaattttattttaagtgatgttaattacagtatttgaagggaaggttctaattccacacaaaatggaagaatataaagtgtgttcattaaactgctaaaaaatagagtggtgagaatacaacagaagtccaatttagattctgagtgttgtcaccatgttattacaatcacacagcctcttccaaacttatagctggagctcccggtagctatttcctactctggtccaaggaccaaaaaccacaatgtaaaactgaattaagtcctgaattattggcttcatcacatgcaccctcttccacctcaaaatggcaaaaaagaaacagttaccacaccctgcagaccttttggtgtaaaagaggtgttgatgaa

SEQ ID NO: 226180 - DNA, 346 bp, Homo sapiens
tgtcattggctaaatcaggtcatacggccacatccaatttcaagagggcagagcatttttctccttccatgtacctagaggagtgttrgaaatattcggtgaatagccctgatgactacccagtcctatcacacaacaagtagttaatttagtttccttttgacatgcaaaaaatacttacctctttcctaagggattataacccaaaattttaaccaaaccaactggattctatttcaagtccaggatctctgagtgatgcctttggtcaccttggtcctgacatgtaccctgttattacagagacctatacattcataaggtaagttgtttgtctctccttaca

SEQ ID NO: 226181 - DNA, 595 bp, Homo sapiens
ccaaaaacaggttttagcagcaagaagagttatgggaaggagaaaggaagaggcttcgctagcaaaggtggccttgttatgtagatgaagcctcataggtagcagccctcagagagaacagatggtgaaagtctcttttcagacattgaaaggtgtcagactcaatctcccctagatctaggaaaggcctagaaagggaagtcatgactacattaatggagattctttacagatgcaaatttcccccacaaaagacaggtttgcaaggccatttcagtctgttgcccttgaggcaaccatttgaaaataaataatcaggaccaaataatcaaaaaaataatcagggtctttatttgtcgtrtgatgttatatcagagtcagattgcaaagtcagtcaggtaatactgggttcattaaaaaaaaaaaaaactcatctaatgagatttttatggtttgtagggtataatcctccaggctccttcattgggaatctgggcaagagaaaaaaaacctgagtttccttcttacaaccactcagtagaacatggaaggtttaatttgcatgcaagtgccatgatccccatggtagaacctg

SEQ ID NO: 226182 - DNA, 509 bp, Homo sapiens
caattatgcctacataatgaaacttccataaaatcctttaaatggtgagttttggggagcttccaggtaggtgaagacattgaaattctgaaagaatggtatacctggaaaggacgtggaagctctgtgcctgcctccccatacctcgccctgtgcatctcttccatttggttgtttctgagtgttcctttataataaaggggtaataataaactacttacctgagttctgtgagtcattacagcatattatcacacctgagaggaaggttgtggaaccctcaaacttatagttggctgagcagaaatatgagtcgtagtctggcatgattgagctcttaactcatggggtctgcactaattccaggagttgatatcagaactgaattsttagatactcagttggagtcagagaattagaattgtttggtgtgggaaaatttccacatatttggtgctagaacatgtcacatggccaaatgagaaatatctacattgttaagatgagcc

SEQ ID NO: 226183 - DNA, 324 bp, Homo sapiens
agatgacctgagatcagaaaagagaggtgctcattatttatgcaggcagttggttatttaacacatctttaactcttaaaattacccttccaaaacttgtacatctctgaggagacatttctagagatggaactcccattttgactaaagcttttgttaaaatcagaggggcagggctataactgcccagccaaattcttgattcgatgcaaaatacaagtaggttgggttcttatgcctragcctatagaaaactctacataccctgtcttcatgtaatgaaattggtcttctccttgaatgcagttttcaagctgctgaatt

SEQ ID NO: 226184 - DNA, 480 bp, Homo sapiens
tgcaatatcacttggctaaygtttttctagacctgctgcacacaaactctggttttattttccccaggcacttctttcagccactctcccatttgttgatttcctgttgtctttgagggaaccatccagactccagacccgaaccttcaatgtcctctgtgaaactaatcaacatccctagcttctcctctttagaacaagagagaagcattcattattcccaataagtttctatttcagtttatttaattaactagaaattaattgcacttaccttcttttcacttcctcaaattataattaccttctaaggcccagcacaggcttcacttcatgagcatttccacaactaacatgaaaactcacttttctaagttactttcctagctgacacttactataactttgcaactctatcgccccacttgccaagtagattgcaaagttcctgcagattgtgtattctgtttgccaatgaat

SEQ ID NO: 226185 - DNA, 623 bp, Homo sapiens
agccattttgtgttagatgccagtgatggcaagacaccaaccttgcccttccattgtttgcatctgtttaaacagacatgcttcctagatacaatgcaagacagtatctgtctattggtttctctctgaaaaccatgcatcagtgttcctgacttacatgggagaamacaaatatgtgtacatatatttaaccataaataggaactcaattatattgggtgaaggaatgactgaataagtgagaagagaagggagggaaaaagaaacaaaagagggatagagaaatagaaggaagaaacatggtcccctaagaggcccttgtggtttttccctgatagcaaagtcatttttacactaggatgccagcctgtgttcgcctttttacactcgggaccttacttggcgaagtatagcaaatgagtttagatgatcatccccatagtagctttttcagtattttcagatttgatgtctgtttccatggaaatagttttggcaagaccgaagctaagaataagagacataccatgagaatttcacgttccaattgtcaggcaaaagctgaaagtcacacttttgtcttttcaataacttggtgctttaaactcagcaggagagagttt

SEQ ID NO: 226186 - DNA, 514 bp, Homo sapiens
ctctctccaccccgcaggattattcttaatccaatgcttcaatctcctgtcattgctgctttactcagaagctcccacacagaaaacacaatgatttgcaattatgttccttttcctcagaattagatggaatccttggcaagcagtgaagtgaccacactgataatggtgagcaaggggaaagcagcagtacatttcaggagtactgagtgcaggaaaacttgactaatctatgatgtggtaccgaggtgaaaatgtgtcagatcctttgctaactttgaaagttggccgcctcatccaaaaagctgtctttgacccatgatgcagttataacagctgcattmtggatcatctgaaacactttggaataaaaatatttgtgacaggccgggtgaagtggctcacgcctgtaatcccagcactttgggaggccaaggcctctacttggtatggagggcaatttaaaactttcaaattgtctacttcttgaattttccatttaacaatttcagac

SEQ ID NO: 226187 - DNA, 580 bp, Homo sapiens
atgcaattaacaggcccactatagttacagtgttctcactgcctgtgaggatcttaagatatgctgttctactttatagatgtagcccaatgcgtaacagtgtgagtaccataactattgaatagatcaaataagtaggtggctgagtgctcctcacaatatgtaaggagatatgtatatatgtartcgatgtgttctgaaagaattgtggctaatttttgtaaacttgaactatattttattaatttacttattttgtaaacttgaattttattcaagatggaaaggtaatggctatttcaaacaaacccgagataaatgcttttgagaagttttttttaatgaatcattcctctgctttataagaagggatcagaatcatcttttgcatttaattgtgggccatatgaaaagctaaggatgatcatatgcagaagagcaaaagaattaggttttactggaggttcatatagctcagtaacataaattgatttcccctcacagcatccggcttgaaaaatagatgtcctctaagcaatcacattgttcttaaacattctctttttgtttttctaagtat

SEQ ID NO: 226188 - DNA, 515 bp, Homo sapiens
acacactggcaatgttgaaagatggagggaaagtcattattcactaggaattgcttatttctggtcatgatttgtagaagtccacatagggcccgttctcctgccttctcagcaagagaagattaccaaggtaacttggatctaagcaatgacacctgcacttccccaggaggaaaaggggatcacagactaggaggagagtttattctctaattcattctccaccttcaatgctctcaggactccagccttctctctctgaaacactgaggttgaggggtacttcacatgtgtgaagggctgtggtggccatgtaaggtgaccatcccctacctcttccaggctgtgayggggaccttctctgctgctgtgaagcagaaggggaggcccagggtccaggttacttccagcctctcctacatctgacattggcaaaatgctccacatcagcttgtgtgttatgttttgccttaaaacagagctatcggtctcttaggtttcctaatgacgttcta

SEQ ID NO: 226189 - DNA, 602 bp, Homo sapiens
ggcccaggagtgtgcccactctggatggaccctctgggggtgttctggtcttggctgtttttatgtttacctctccacccccagcccctttcacaggctcagatctcagctccatcccatgccaactggctaactgagcaggcgacttcctaagctcaatttcctcatctggaaaatgggaccatgccacctgctcccaagggctgccctaaggaatatgtgaggggctttcgcagcagctggctcagccctctttcttttccttcctccatgattgtgggggaggcaaggaacacacctgaaagagacaagggacactcagaagcaatccaygcacaatcagctctgcggtactcttcaagatgtgctgactcagaagcttgttacagcccagaacattcaaagggcctccagtaagctagagaagtcatttcgtgtttactataaaaaggaaccttgaaagtcagccagtcaaccctcctattttatggatgaggaaactgaggcccaggtatgctttgacttgtctcagtcactcagcaaataatttacagagctgagaggagaatgcgggttcacataaaagacattcaaacgaacag

SEQ ID NO: 226190 - DNA, 642 bp, Homo sapiens
gattggatcaaaagtcaacatggtcaccaagcaaagcggctttgtttcctctccccaggttgttaactaagtcagatacctgatcctacacacagcctatccgagccagggccaagccatctgtcaatttgtttcagctacacgacgagaagtaatttttaagggatcacacactaaggtaagacagcgtkaactttaaatgcccagtgacctgatagtgagctgacagtgcagcccctcggctggactgagaggcagggagcccaggctgtgatgattctctggaaacggccacagataccctcaattcgtgggttctggagctggccagtttcagatcagtgaccactagggggcgatgtgcttctagagtgcctgggaggacagtagagggtggtccacaagaatggggaagtcaccagttcctgtggccccatgctaactttccatctttccttgattaaccgattagaaataaaatggcaacaataactctccatcaaacacgattggcttggtctaaaggataactcagagaaatgggggcagagtggatgctatttgccaggagaaaaaagggggaaaaatccagacctcctgtccccagtaccacaaagggtagctgaggggctcgaactgtcc

SEQ ID NO: 226191 - DNA, 575 bp, Homo sapiens
actgacttagcaaggcgaggggcacggaccaagaaaagaagcaatagatcacattttcctatttgtttatgaaagtacagtcttattttcagcctaaagaaatggacacttctcagcataggcggacgtgattggttgtggtatgaatccttttcctaaccaggatccataatatcacagacaaggtaatatagcactgtgaaggatgtgtctttcttcaaatggagccatgagagatggtggttttttaagttgatttgatgttggatgtagtaagtcctgtgggagagaatttttttaaataaaaaatactgtttaaaagtgtctcttctaacttgatctctaccttttcccctctccacttctaactgccccccaccagctacactttcccagtttgaaataatgaacaataccttttgctgacagaccaaaccttagttcctgtgggcaaatgaagggttttttccccccaacaatgaacaattttcttgaaaagtctctcaaagatgttcttattgkaataaccctccttcaacccaaacaggctaaatgattggataaatgttacacaa

SEQ ID NO: 226192 - DNA, 615 bp, Homo sapiens
aaatacaagcttcctttcttttctctcttacaacatgttttaagtttcactgttattttctaaaattttcctttttaaagtaagggttcaggaagtgaatgattctttgtaactgtgtatttaatctgtcagtattcaatacttgttttaattaaaatgagtaagctcaataaatacagattctattgttagtatatctgaaaagtcttggtatagaaggtttagcaatacaaattcatgttttcaggaatatattcagtactgtaaacctagcattggaaattcatcaaccactgtcatttkatattacttcagtagtattcagaatttttttttcaaatatactttttgtcaaataatcctacctactttgtataaaattatggtgctatgctattacaaataaatttacacatattttaaaaatttctactgttgaaaggtttaagcaaaataaattagatacaaaaacaatgttattagtaaaagtgaacaaggtcagtgagtaaaagcaagacagaaatagaatggtaaaataataagaaaattaatcatccaaaaaaaagtatgtctcaaaagataacatcttgcagctttagggcccttccagtatta

SEQ ID NO: 226193 - DNA, 548 bp, Homo sapiens
ggaatggccttttataaaacaatgagaactcatgagatttgttcactatcatgacaacagcatgggaaagacccggccccatgattcaattacctctcaccaggtccctgtcatgacttgtgggaattataggagctacaattcaaaatgagatttgggtgaggacacagccaaaccatatcaatgagttagagaaggatggggtgaagtagatggcaacggaaaaggcagatgttatcctattgtttttctttcttagttacctttttagtggctttttagagaatgaaaggaaaaaaatagtggtacctagaggatccttaagtttataaaaggaatatggggagacaaacatttatatactgagattgaggagccaaagaagagakaaagctataaagtataagagagaaaaggagcaaggcctccttcctaatgatctcattggctttgcccaagcactcagataagatacttcttcaatgtacagaggattttgcacacatccctcagctatgtatgcccagtgaagaaacactatcagtaaa

SEQ ID NO: 226194 - DNA, 599 bp, Homo sapiens
gtaacatccctgtttaaccctgcttctactctttgttctaaagtcttcttcatctgatattaataaagccactccagatttcttctgatcaggcttggatggtatatcttttttgaattcttttactttcaccctatgtataagtttatattagggtaggtttattgtagaccattagtaagtgggacttacatatttatcaagtctggcaatctctgccttttaatggacatgatgagatcatttacatttaatgtaaattttatagaattgggtttaaacctattgttaggytatcatttgtgattttgatctaattttctttgtccttttctctttttctgcttcctttttggattatgtttatgattcccttttatttcatttatagactagttatacttctgtgttttatatttttaatggttgcttcagaattaaaatatacttttattttcttttacatattatggtctacttgcaattaatactgtgtcagtttacatatagcataaagaccttttagttacattaagtttcctctctctctttctttgtacaatctttatcatatattttacttgtaaaaattttgtaaa

SEQ ID NO: 226195 - DNA, 635 bp, Homo sapiens
tcagtagttttaaaccagggttgagttttcttgttgccataattactttcagtgtttcataggcttcaaattcccccaatggtaaattgctgatatcttatgacttgactgagatcaggatgaccagagaatggttttcattgttcctcctccatcttctgtgccactgaagcaggtctctcccaagctatctccatccctctgcaatagattgctatttcttgttattcaggacaatactttgtgagcagagagtagagttcttgattcttctgctccagtgtcagcatttggcagaaactgtgcatctaaatttcatgggcagggcagtctcagtgtgccaggctgtccttttttttgactgggactctctctgtcttctgtcacccaggctggtgtgaccatagctcactgcagcttygacttcccagactcaagagatcttcccacctcaacctgatgagtagttgggtctacagacatgtgccaccatgggcagctaatttctttttctttgctcttctttctttttttcttttttgtagagatgaggtcttgccatgttgcccaggctggtcttgaactcctgggctcaaatgatctgccaaagtgctgggactacaggtgtgagccac

SEQ ID NO: 226196 - DNA, 480 bp, Homo sapiens
tgggggtgatggtgataaaaataatggctactgttttcaatgtctgtctaaacaccaacattttgcttcatttgatctccttagcaactccacgaggtagatacgaatatttcctcatttttcagatgagggcattaaattgtaaatatgttatgtcacttgcttaccacrgcatggctagaaggtaggaaaagcaaagtgcaaaactagatctgcctaataatatcaatttcaatctcatacaaagcaaagtaaaaacataagacaaaggggcacttaagttatattttagttaagccccatcttgaaggtaaactggaattagtcattttggagtcatttgtgtgctgcaggaagggagagcagaaagatatgtgatgcttgaatttcagagctttttgaggacaacccaggccccagcccggataccgctgctggaggcctgctcccagcatgtcttccagaagctgggtttgctca

SEQ ID NO: 226197 - DNA, 521 bp, Homo sapiens
tcattaacttcacatctgggtgtgtaagaggcatgtggatactcagccaagatctgccatcaaccctactcaccagatagtgagacacatcagaagttatacgtggaaactaaacattgagaacacaaggacacaacgaagrgagcaatagacaccagggcctacttgagtctgaaggtgggaagagggtgaagattgaaaagctacctaatggtaccattggcaaatgttattatgccaattacctgggtgacaaaattatctgcgcatcaaactcctgcgacacacaatttacccatgtaacaaacctgcacacgtccccactgaacctaaaagttggaagaaaaaaaagaaatttccaagtcaaattacctaaagcatgcatgctcatgataggtgattgatagctttaaaagcccaatgtggaatgaagtactgatgcacgtcacaacatggataaacctcagatgcattatgcttggtgaaagaagccagacactaaagaacatatactccacaat

SEQ ID NO: 226198 - DNA, 589 bp, Homo sapiens
tagacatatatatttgattttttccaaagaagcaaaattgactcagtagatcaatgataggcttttcaatgaatggaactgaaacaaccagatatccctatgccaaaaaatcttaacttagtccatactcattccaaataccaaaactactcaacttggccatagaacaaaagtaaattctaaaacttttaacatttctgtgagaaaacataaaagaaatcactatgactttaaktttggcaaaattaccttggataaagcactaaacttttgatctattaaagaaaatattgataagttaaacttcatcaaaattttaaaacattgccctttgaaaacatttttaaaagaatataaaaagacaagccacaggctgagagaaaataattgcaaagaatatgtataatactgaacttttatccaaaatctataatgaactttcaaaactcactaataagaaacccatatacatgggcaaaaaaacttgaacactgtcccagagaagatatacatatggtaaacgagcacacggaaaaaatattcaacatcataattattaggaaaatacaaaataaatgcacaatgagat

SEQ ID NO: 226199 - DNA, 589 bp, Homo sapiens
tagacatatatatttgattttttccaaagaagcaaaattgactcagtagatcaatgataggcttttcaatgaatggaactgaaacaaccagatatccctatgccaaaaaatcttaacttagtccatactcattccaaataccaaaactactcaacttggccatagaacaaaagtaaattctaaaacttttaacatttctgtgagaaaacataaaagaaatcactatgactttaagtttggcaaaattaccttggataaagcactaaacttttgatctattaaagaaaatattgataagttaaacttcatcaaaattttaaaacattgccctttgaaaacatttttaaaagaatataaawagacaagccacaggctgagagaaaataattgcaaagaatatgtataatactgaacttttatccaaaatctataatgaactttcaaaactcactaataagaaacccatatacatgggcaaaaaaacttgaacactgtcccagagaagatatacatatggtaaacgagcacacggaaaaaatattcaacatcataattattaggaaaatacaaaataaatgcacaatgagat

SEQ ID NO: 226200 - DNA, 420 bp, Homo sapiens
agataatctctactttgtaagaaatttatcacagtattttaaagcccttcttgacttaaattctacctctttacaatggcataaaggaagcaatattaagaacgaattatatctgtagtcagtcttgaggctagayaatcatcaatgctacatttgccaggcatctcccagaatcttttcagaggttctaaactgtcaggcaaagatgtaactctccatgggaattagacaggagaggagaaatatgaccagtctctcacccttattaatgcctgtgcagaccagggtcctgttagcatattccaataatccaacttatttagaggacccctttctaacagtttctctttctgtgggacacacacacacacacacacacacacacacacacacgcacacatatgactgatagggaggaag

SEQ ID NO: 226201 - DNA, 397 bp, Homo sapiens
atctctactttgtaagaaatttatcacagtattttaaagcccttcttgacttaaattctacctctttacaatggcataaaggaagcaatattaagaacgaattatatctgtagtcagtcttgaggctagacaatcatcaatgctacatttgccaggcatctcccagaatcttttcagaggttctaaactgtcaggcaaagatgtaaytctccatgggaattagacaggagaggagaaatatgaccagtctctcacccttattaatgcctgtgcagaccagggtcctgttagcatattccaataatccaacttatttagaggacccctttctaacagtttctctttctgtgggacacacacacacacacacacacacacacacacacacgcacacata

SEQ ID NO: 226202 - DNA, 609 bp, Homo sapiens
atctacatacaaaaattagtagcaattccaaacaaataacctagctgaaaaaaaatcaaggaaacaatcccacttataatagcattttttaaaagtacttaggaataaatttaaccaaggaggtgaaatatttatacaytgaagatagtaaaatattaatgaaagaatttgaagcagatacaaataaatgaaaaggtatcctatgttcatggatggaaaaaaatatgcttaaaatgtccatactatccaaaacaatatatagatttaatgcaatctctataagaactccaatggtattcttcacagaaatagaaaaaacaatcctaaaatttgtatggaaccacaaaaataccctgaatagctagagcaatcttgagaaagtaaaacaaagttggaggcgttacattttataatttaaaattatattgcaaagctatggtaatcaatacaatgtggtgctggcatgaaaacagacacataggctaatgaaacggaagacagttcccagaaataaatccaaacacgtatggccaaataatttttgacaagggcaccaggagaaaacaatggggaatggataacctattcaataaatttttctgggaaaac

SEQ ID NO: 226203 - DNA, 600 bp, Homo sapiens
ttcattctccctatgatcaggaataaggcacggatatcccctcttactatttctattccagatcatactggaagtcctagccagtgaaatgggttataaaatgtaaatacagttgagagtaagaaataaaactttccttgtttacagatgattatataagtaaagaacctcaaagaagaagacagaaaaactcctagaattaactagagattatagtaagtttgcagaattgaattactttcttccacattagcaaaaaagattgaaatttgagattttaaaaattaaawtagcacccccaaaaagagaagtgcttaggtataaatgtaataaaatatgtataggatctatacacagaaaactacaaaacaccaatgagataaagcaaatttgatctaaatattaataaacagagacatagttcatattctttggtaggaaggttcaggactgttaagatgttgattcttcctaaatttaccagtaggtttacctcagttttaatcaatattccacaagctattacataaatacctacaaactgattctaaagttcatatggaaaggcaaaagccaaaaatagttaaaaaaaaaaaacaa

SEQ ID NO: 226204 - DNA, 599 bp, Homo sapiens
cacatgtggcaagggcagtccagattctaaaaggaaaaagggaattagggacctctgagaacaaatcagggacacaggaaggctggtagctcaaagaaatgagaaattgaattaaaaagttttcattgaataggttagacctcccagccatcacacttcattgtcacctgctggaaaaagatcacactaggtgagatcagccctttgagtgagagtcgtgtgtatgagagaggaaggggaaagaaaggaaaggaagaaagagccaatttatctaggtcagatttctattctcagataagccacctcttttaactgtacttaattacttcttttttcatttcaaacatttactacagggccttcagggataytgagagtttccttcataggtatgcagtgatatttgatacagatttttaatgtattacaattgataaggcaaagagcccactaagttataccctccacaaagacgttccaaacaagttctggagatttttgcctaagtaaataagaacagagctgtgcatagtgtttttctgctgcacataatggaatcttacaagcaacctgagcaataaggtcggggcaagggcttc

SEQ ID NO: 226205 - DNA, 599 bp, Homo sapiens
cacatgtggcaagggcagtccagattctaaaaggaaaaagggaattagggacctctgagaacaaatcagggacacaggaaggctggtagctcaaagaaatgagaaattgaattaaaaagttttcattgaataggttagacctcccagccatcacacttcattgtcacctgctggaaaaagatcacactaggtgagatcagccctttgagtgagagtcgtgtgtatgagagaggaaggggaaagaaaggaaaggaagaaagagccaatttatctaggtcagatttctattctcagataagccacctcttttaactgtacttaattacttcttttttcatttcaaacatttactacagggccttcagggatactgagagtttccttcataggtatgcagtgatatttgatacagatttttaatgtattacaattgataaggcaaagagcccactaagttataccctccacaaagacrttccaaacaagttctggagatttttgcctaagtaaataagaacagagctgtgcatagtgtttttctgctgcacataatggaatcttacaagcaacctgagcaataaggtcggggcaagggcttc

SEQ ID NO: 226206 - DNA, 582 bp, Homo sapiens
tgttacagcagcccaaaatgaactaagacactctctttccctaattgttccaattcatctgacaattatattttgaatcctcaaagtatttgggcaaaccytttcacattttcttcattagttgaaatatttactgtgttactaatatgatatagagtataacaggtattcaataaaaactggaaactggttagattttttagaaactggtttttgattactacgcagcaaccactctgatcaacatggtcattattttagcatttaactaaatgtgttagtttcatgtgtttcattaaaccctgaagagaaaggtagatacaggtttgaaagtacacagaatatgaactctaacttcaaagcatttaaattctgtcaagggtaacagctgtgaaaacaaatcaagtacaattgaaaattaaataaaaaatgataaaagaagtgaaatcagaatatcatgagtacacagatgaaaacatagttaatttagggttttatggtgtatttaagcaaggaagtggcattcgagttcagacttagagaatgaaaataatttaacaacaaaatgtgaagatgttgaaa

SEQ ID NO: 226207 - DNA, 582 bp, Homo sapiens
tgttacagcagcccaaaatgaactaagacactctctttccctaattgttccaattcatctgacaattatattttgaatcctcaaagtatttgggcaaaccttttcacattttcttcattagttgaaatatttactgtgttactaatatgatatagagtataacaggtattcaataaaaactggaaactggttagattttttagaaactggtttttgattactacgcagcaaccactctgatcaacatggtcattattttagcatttaactaaatgtgttagtttcatgtgtttcattaaaccctgaaragaaaggtagatacaggtttgaaagtacacagaatatgaactctaacttcaaagcatttaaattctgtcaagggtaacagctgtgaaaacaaatcaagtacaattgaaaattaaataaaaaatgataaaagaagtgaaatcagaatatcatgagtacacagatgaaaacatagttaatttagggttttatggtgtatttaagcaaggaagtggcattcgagttcagacttagagaatgaaaataatttaacaacaaaatgtgaagatgttgaaa

SEQ ID NO: 226208 - DNA, 543 bp, Homo sapiens
aggtagatacaggtttgaaagtacacagaatatgaactctaacttcaaagcatttaaattctgtcaagggtaacagctgtgaaaacaaatcaagtacaattgaaaattaaataaaaaatgataaaagaagtgaaatcagaatatcatgagtacacagatgaaaacatagttaatttagggttttatggtgtatttaagcaaggaagtggcattcgagttcagacttagagaatgaaaatmatttaacaacaaaatgtgaagatgttgaaatacatcatgcatcatgcattcagtgaggggctaattggaaatgggcagagggctttgggggctgtagtaagaaatgtgtcagaattgaatgtcacctctgtgctgactcttgcggacacaaatcaatgagaattaatggcctgctttgtggggtatatagtacaccagggagtatctattacattgaacccagtcctgttcttttctggcacaccataaattgcaaacacttatagaatagaattgtaacccaggagctcccttgggattgct

SEQ ID NO: 226209 - DNA, 543 bp, Homo sapiens
aggtagatacaggtttgaaagtacacagaatatgaactctaacttcaaagcatttaaattctgtcaagggtaacagctgtgaaaacaaatcaagtacaattgaaaattaaataaaaaatgataaaagaagtgaaatcagaatatcatgagtacacagatgaaaacatagttaatttagggttttatggtgtatttaagcaaggaagtggcattcgagttcagacttagagaatgaaaataatttaacaacaaartgtgaagatgttgaaatacatcatgcatcatgcattcagtgaggggctaattggaaatgggcagagggctttgggggctgtagtaagaaatgtgtcagaattgaatgtcacctctgtgctgactcttgcggacacaaatcaatgagaattaatggcctgctttgtggggtatatagtacaccagggagtatctattacattgaacccagtcctgttcttttctggcacaccataaattgcaaacacttatagaatagaattgtaacccaggagctcccttgggattgct

SEQ ID NO: 226210 - DNA, 382 bp, Homo sapiens
ctctatgaacacaagctcagaaaggaaagggtcagaaagaacccccttcttgccaccatattcctttgatctccattagattaatactccagcctgcagaagcacatacaaatatattactgaaggagtagaggaattttagaaaggaatttaatacaaataaatatgatgtaaaagttctagttactgtgaactttctcttaaatctcaaattctaaacaatttggaataatggtgagccaagggaaaagcctgaagagaactttttagagagaccgggaaagktgtttactaagtggggagattggtatcttagccccagttcaatggtaacctctagagttgattatgggtagtttttaaacatctcatcagtaatagc

SEQ ID NO: 226211 - DNA, 626 bp, Homo sapiens
agaacacaggtattaaatttttaaaaaatacttcctaattattttaggacattttatataaattatgctgagtctccttgtactttttgtacacatgtagtggaaacatacaatggtgtgcttctgcacttctcttcccaactccatgtttagtgacatcacatagggagcttcaaattggccatggcaagagtctttatatcatagaaatcaaccacactaaaaagagcttgatataccttagcctacttttcattaaaacaggaaacagctgaccatttcttgcttctatgtgtcagtagctattacaccatgaataggacaaaaaatttagaaaacattctttcagtatttgataactattattagattcaacaaagaattcattcacatcattgatgratgagtgaaattctagcatgtcttcactgtttcatttttgtcttactcattaacataaataaaattatcaaccaatattcacatcagaactacattcacttgtcaatgacatgaagagtttctttgctgaattggatagtaatcaagcatttattcatagtctgatattgtgatgctgttgttggattataaaaatgatagtggatttataaagaaatggcaaa

SEQ ID NO: 226212 - DNA, 606 bp, Homo sapiens
attagattcaacaaagaattcattcacatcattgatgaatgagtgaaattctagcatgtcttcactgtttcatttttgtcttactcattaacataaataaaattatcaaccaatattcacatcagaactacattcacttgtcaatgacatgaagagtttctttgctgaattggatagtaatcaagcatttattcatagtctgatattgtgatgctgttgttggattataaaaatgatagtggatttataaagaaatggcaaatcacatggaaattactatggttagktgcactttgcaaaaaataatattgcgtatcttattatttgtactgtctatatcaaaaatttataataaagttaaataggtataaatatggaaacactttccagaaagagtcaattgttaattatttaccagcacaccactggtatgagtattattacctgcatcttacagagtaggagactggggctcagaaagtgtacttacctgcccaaggttgaaccactagtaagtgcaagagatatgactgactagaactcaggattgcctgaataaaacacatactcctttcttcaatgttttgacttagggttgacacctaa

SEQ ID NO: 226213 - DNA, 606 bp, Homo sapiens
attagattcaacaaagaattcattcacatcattgatgaatgagtgaaattctagcatgtcttcactgtttcatttttgtcttactcattaacataaataaaattatcaaccaatattcacatcagaactacattcacttgtcaatgacatgaagagtttctttgctgaattggatagtaatcaagcatttattcatagtctgatattgtgatgctgttgttggattataaaaatgatagtggatttataaagaaatggcaaatcacatggaaattactatggttaggtgcactttgcaaaaaataatattgcgtatcttattatttgtactgtctatatcaaaaatttataataaagttaaataggtataaatatggaaacactttccagaaagagtcaattgttaattatttaccagcacrccactggtatgagtattattacctgcatcttacagagtaggagactggggctcagaaagtgtacttacctgcccaaggttgaaccactagtaagtgcaagagatatgactgactagaactcaggattgcctgaataaaacacatactcctttcttcaatgttttgacttagggttgacacctaa

SEQ ID NO: 226214 - DNA, 606 bp, Homo sapiens
attagattcaacaaagaattcattcacatcattgatgaatgagtgaaattctagcatgtcttcactgtttcatttttgtcttactcattaacataaataaaattatcaaccaatattcacatcagaactacattcacttgtcaatgacatgaagagtttctttgctgaattggatagtaatcaagcatttattcatagtctgatattgtgatgctgttgttggattataaaaatgatagtggatttataaagaaatggcaaatcacatggaaattactatggttaggtgcactttgcaaaaaataatattgcgtatcttattatttgtactgtctatatcaaaaatttataataaagttaaataggtataaatatggaaacactttccagaaagagtcaattgttaattatttaccagcacaccactggtatgagtattattacctgcatcttacagagtaggagactggggctcagaaaktgtacttacctgcccaaggttgaaccactagtaagtgcaagagatatgactgactagaactcaggattgcctgaataaaacacatactcctttcttcaatgttttgacttagggttgacacctaa

SEQ ID NO: 226215 - DNA, 394 bp, Homo sapiens
caggaattctgcagcacacagatagtatagttactgggatgatcaaactgtttttttcatacctcaataagtcaaagctcctcattataccagttatgttctacttccttgttccagctatcatgcaagagtccttgaaacaatcttggttgcaatctacaaccttggttacatcaattgccaagcccttagtgtgttgtgcctatgtattttattaatatattaatacaattacttgttaccacaatttcaatatgcaattattacacccattttatagcttgaattatttcattaagcacactcaccttaagaagttgatccaaaagtgaaacttttctaaagagcccaccctaacccycccaaaattgcactgtagcttctaatacacatt

SEQ ID NO: 226216 - DNA, 406 bp, Homo sapiens
tatctttccaggaagctcactgcacaagtttacaaaaattgttttcctcgttaaaaagttgagcaaataacattcccaagacattatgctttattagtcaagtcagcagtagcacatccagcccacactggtttccatattctccttctaatttagtaatgtatttacttaaataatgcctttttcatattttggggtgtaagatattaaaatcttttcaaaccctaatgaaaatatgatacctgcatacataggaaygctatcctcatccccctcaaggttccccagattttccttccacttttcttcttttcccagttggtaactgggatctctcataatgaaccttatggatatatttcaggccacagtattatatttgtgtaaagtaagtaaaaggaggagg

SEQ ID NO: 226217 - DNA, 573 bp, Homo sapiens
aagtaaaaggaggaggaaagctgaagttacagaaattcttctcattctactttctctctcctttccaggaaaaaagtagtaattatggatgattagaaagcaaatgctaggtgacctgttaagaagagaaggagaagcccaaagtcaatactctttataaatcaattcataccatggactgaaggatttgtaggaaaaaaatgaaacttcatacaatctcaatttaattttcttgcccatgtttgcacagtaagtggcagaactagaactagaacctaaaaacactcggatacaaacttaatggtctttccactacactgtgatgctttttattaccttcyaacactctatgagagtataggtgaagccccaggctctgctgtgatcagcagctgatctgaatcagcctaattttttgccaagccacttctctgcaactgagaaaagactataaattcatttaaagaaaatataaatgaaatataggctgcttcttggtaggaagacagtgtagtgtacgggaaaatacttggatttagactaaaaggtctgattttgaatcatgattggacc

SEQ ID NO: 226218 - DNA, 199 bp, Homo sapiens
ccatgaattattcaatgatgtccaccatgactcagagaaaggaagaaaatcctctgccttcctcgagtggctatgggaggccttaagaaatatactcccctgtcacccaactcactagagggccaattgatcctaaaaggtaaktttattacccagtcagccacaaatcaggagaaagctccaaaagtgagccctgggc

SEQ ID NO: 226219 - DNA, 578 bp, Homo sapiens
gagaacagagttcaccccatctttctcttccaccttctcccatgtgaggatgcagcaagaaggcccttaccagacaccttgaccattcacttcccagcctccagaactgtgagaaataaatttataatgtttataaattacccagtctgtggtattttgttatagcagctcaaacagactaagacaggkagcaaagtagcctatgaatgaaggcttaatctaagcgggagatcctggagcccaggttggttagctgtcattctattcacacaggcaggagtagatgggcttcctgggatggaggatttagtgatcacagatggtgatttgaataaatgtgcataaggcattgagaagtgcgatgtatgttttacaggtcaggttctccaagaaacagactgtaagactctgatatttgtgcacaggaagtatttattataaagtgttcttgggatcaacaccggggaggaaacaagggaagtaggactgaccaaagcaaaaggctggactgtgatgaagggaagtataacagtgacttcagccagtcctataaggagctctgaaactgagatggccct

SEQ ID NO: 226220 - DNA, 349 bp, Homo sapiens
ataggaacctacactgtgcatggcccttcttttttccttttttcaattgtcatcatcattgtcatcatcatcakcagcagcagcagcattgttgtagtcattaccattattacccatccagttatttccactaacactgaccagactggctgtcaagatcacacagtgacaaaacagatgaaagccctttaatttgataagtttgaaagaacaatgggaaaagagtctgtaaggctaactactggtttttcactaccttgataatcaaatgaatcatttctccaggaaagattaagcctacttgagagtaaccattttctaaatgacgtgatgatgttgttaggaaagc

SEQ ID NO: 226221 - DNA, 424 bp, Homo sapiens
gatcaggattccggtgtaagtgatttacttagaaaatacttccagggaaagccagatagagagggggaagaacgcaagtggagtgccaccccaggcaaagtgccagcctcagcctgatcccacaggggagctctggaggacaaattatgcctctgagttgtccccactcaaggcaggggagctgggctttcagatgcctgcactggcagttagcagtctctggtgaagggctgccctggaggaaggraacacaaaaacctaaacccccaggtccttctggctctccacacttgtgagcaaaatgattcgagagactgagggcagagggcacagtaaaagtgcacagagggggtgagtggggagcaacacacagctatggcattggaaggatggaaagtgcctaggatgaacaccaagagggctg

SEQ ID NO: 226222 - DNA, 574 bp, Homo sapiens
gagagtgaatttgcttgaggtctccacttgggattcagtgattggaagtggaaaaatgaatgactcaaggtatctttgttgatggaggccaggctagggagaatcaaaactgcaaatcccaccagagcagggttctctagttctcctgtgtctatccctttctttgattggctacgcaaaccacagcagagaatrcatgtgtttttttgtttttgtttttttgagacagagtttcgctattgtctcccaggctggaatacaatggcgcaatcttggctcactgcaacctccatctcctgggttcaagcgattctccaacctctggagtagctggggtttcaggtgcccaccaccacacccagctaattttttgtaattttagcagagacggggtttcaccatgttggccaggctggtttcaaactcctgaccttcagtgatccaccagcctcggcctcccaaagtgctgggattacaggcatgagtcaccatgcctggtcgcatgtgtttaccccactttttgaacccctacaaagaggtttgcatttggcaaataatccacacctagcagagg

SEQ ID NO: 226223 - DNA, 605 bp, Homo sapiens
ttgaggtctccacttgggattcagtgattggaagtggaaaaatgaatgactcaaggtatctttgttgatggaggccaggctagggagaatcaaaactgcaaatcccaccagagcagggttctctagttctcctgtgtctatccctttctttgattggctacgcaaaccacagcagagaatacatgtgtttttttgtttttgtttttttgagacagagtttcgctattgtctcccaggctggaatacaatggcgcaatcttggctcactgcaacctccatctcctgggttcaagcgattctccaacctctggagtagctggggtttcaggygcccaccaccacacccagctaattttttgtaattttagcagagacggggtttcaccatgttggccaggctggtttcaaactcctgaccttcagtgatccaccagcctcggcctcccaaagtgctgggattacaggcatgagtcaccatgcctggtcgcatgtgtttaccccactttttgaacccctacaaagaggtttgcatttggcaaataatccacacctagcagaggaaaagctagtgctcactctttttataaaaatgttgacatagtctt

SEQ ID NO: 226224 - DNA, 632 bp, Homo sapiens
gaatctcaataaacaccatgaatgactttaaattactctcctttcagctttgtccagattcagaaattacaaagcaataatgtgcttcccgatttatctactgaagtgatatgagttgcgcctgttatagtgggaaagcttccttggacatctatattttcccatatcaccaagagggagtgaaatsaagacacctggtcatctaaaatgtgacctaacatactcttttacagatacatgcatttttatataaatggatttttagaatagtactgtgtattccctgatgtgaagataagttcatgagtaagcctgtggtttccatctctctccttgctcttgtcagagccgtaggtgcaactatggtttgtgaattaggaaggcagttggcccctcacacctatatggtaaagtgtgaatgaggagtcatgtgtacacagagctctgtaactctccaggtgcacagaagcacctgccacatccccaggtgcaagtgggtataaaggcaagtgtgttgtggagtcacagggggcttttgggcattggtgctttgctccactcccatctccctgccgccaaatcatcagaggcttcctctggcctgatacagctgggctctgggaaggtaagtg

SEQ ID NO: 226225 - DNA, 381 bp, Homo sapiens
ggaattctgggacccccctagacccctggttgatgtaaatcctataactatccatgggtcctaggtgaagaaacacttgggctgatgtacagggtacttgcatgtagccaactgcaaactagatttactgatagcagtaagtcactcagggaaatttacagtttattttatatgatttggagtggtagttaatagaatgaatgacagaatcagcattccaggggtatagaaagactggaataaggtactgaaaacagggtgaaatatamtagtacaagtgacaacatcctgcatttgggttccaggtatcagctgcatgaacagagaatgggaaaagtcttgataatggttcagtgtgataaggacctagggaagcactgt

SEQ ID NO: 226226 - DNA, 314 bp, Homo sapiens
acaaataattactactttttctttgaggaataaattgtatttgtcttcaggccttaaagtctcatctgtcttttcaaatctctctygccacctcacccccacaaattccaatctccctctgcttttgttcattattaaaccttcatcacaattcaagtgaaaggtgtcctggaactctctgttctttttttgaagagttcatcccctgtgtcctccaggcacaggtgagtcactgagctgggaggtggctctgtggagtacggactgtaccaccaagtggccttgcacaagtttttgataacacctaccagagc

SEQ ID NO: 226227 - DNA, 314 bp, Homo sapiens
acaaataattactactttttctttgaggaataaattgtatttgtcttcaggccttaaagtctcatctgtcttttcaaatctctcttgccacctcacccccacaaattccaatctccctctgcttttgttcattattaaaccttcatcacaattcaagtgaraggtgtcctggaactctctgttctttttttgaagagttcatcccctgtgtcctccaggcacaggtgagtcactgagctgggaggtggctctgtggagtacggactgtaccaccaagtggccttgcacaagtttttgataacacctaccagagc

SEQ ID NO: 226228 - DNA, 470 bp, Homo sapiens
cttttgcttgctttttaactggttgtttgttttttaatgttgctataattgcatgttagttttaagggtactttgtatattttagtttgcagtcctttatcagatatgggtttgccaatattatcactcagactggggcttgccttttcattttcwtctgtctttcacaaagaagatgtttttaattttaatagagtcccgcatttttcttttacagatgatacttttgtattgcatctaaaatttctttgttccaacttcatttgttgaaaagatgattctttgaattgcctttactcttttgtgaaagaccagttggctctacatgtgtggatctgttaccgggctttctattctttttcagtgatttattaatatgtacctattttttcaccagtaccagactgttctgactatggtagcttaggaagtcttgaagttgagaagggtcggtcctgcaactttgttct

SEQ ID NO: 226229 - DNA, 386 bp, Homo sapiens
agaagctggccagctacaaattaaacattaagattcccttgcagctggggttctacgtgtgtttctgtttctccatgcagatatattcacagaagacttgggrgcagaagtgagcaataacacacggtggcaccacaggtgagaaggagcctcctgggagcatgtttgagaaaattaatatgactcatgttctggagcagaaccatgagaagagggtttcaggggaaagaattggcaatcacatcctgcaagtccttgtagaaggaaaacctttggaagatcatgagcggaaagacatcatctgacttaaatgttaaaggaattgctttgggtgatgtgttgaagagattctaatgtggtagggtggaaacagaaaggctagttag

SEQ ID NO: 226230 - DNA, 386 bp, Homo sapiens
agaagctggccagctacaaattaaacattaagattcccttgcagctggggttctacgtgtgtttctgtttctccatgcagatatattcacagaagacttgggagcagaagtgagcaataacacacggtggcaccacaggtgagaaggagcctcctgggagcatgtttgagaaaattaayatgactcatgttctggagcagaaccatgagaagagggtttcaggggaaagaattggcaatcacatcctgcaagtccttgtagaaggaaaacctttggaagatcatgagcggaaagacatcatctgacttaaatgttaaaggaattgctttgggtgatgtgttgaagagattctaatgtggtagggtggaaacagaaaggctagttag

SEQ ID NO: 226231 - DNA, 386 bp, Homo sapiens
agaagctggccagctacaaattaaacattaagattcccttgcagctggggttctacgtgtgtttctgtttctccatgcagatatattcacagaagacttgggagcagaagtgagcaataacacacggtggcaccacaggtgagaaggagcctcctgggagcatgtttgagaaaattaatatgactcatgttctggagcagaaccatgagaagagggtttcaggggaragaattggcaatcacatcctgcaagtccttgtagaaggaaaacctttggaagatcatgagcggaaagacatcatctgacttaaatgttaaaggaattgctttgggtgatgtgttgaagagattctaatgtggtagggtggaaacagaaaggctagttag

SEQ ID NO: 226232 - DNA, 386 bp, Homo sapiens
agaagctggccagctacaaattaaacattaagattcccttgcagctggggttctacgtgtgtttctgtttctccatgcagatatattcacagaagacttgggagcagaagtgagcaataacacacggtggcaccacaggtgagaaggagcctcctgggagcatgtttgagaaaattaatatgactcatgttctggagcagaaccatgagaagagggtttcaggggaaagaattggcaatcacatcctgcaagtccttgtagawggaaaacctttggaagatcatgagcggaaagacatcatctgacttaaatgttaaaggaattgctttgggtgatgtgttgaagagattctaatgtggtagggtggaaacagaaaggctagttag

SEQ ID NO: 226233 - DNA, 506 bp, Homo sapiens
ggagggaatactttctcaattctctacttaatattctttagctcttctgtctttccrtctccccttgggagtgaatacagagcacacattcaagggtaaaatgaagagaaagtagtaaggttgcaggagaaggaagacagaccagtcatatgggaaaaggagcaattctaggattaagtaataactgagagcacatgtttagtgcaaagcttttgaaataaagaatctgaatgccacactaattccctgttttaaaattgaaatttgagcaattgcagatgaatttatggacagtactttctggcataggacaaaaacagtatggaatatagaatacgaccagtagaagctgaggaaaagaaataattatcgtcaccacatctgattgaagactttcacatttcacaataaaaaaaatctgcatttgtaaatgattgcgccccactgattattttgcagaaatgttccagattgggttgaacgaaattgaatttatttcttatttg

SEQ ID NO: 226234 - DNA, 589 bp, Homo sapiens
caagttttgccgaatgactagtaaaacattcattcatttaacatacatattgagaatgcactgtgttccaggcactgtattaggctctggggctatcgcagcaaacaaagagattttatttcaaagaataaggtgtgtattttactctgtggcagtttggtgttgagcacatgctggtgaaacatgaaaatggaaagayggggatgaaaaagtttcagtgtcgagatggtgaggtagatcatgtgagaggtcaaaatgttgattatgttgtagagagaactgagatattgttccttgaaatcttgaactgctgtgccatattccctttagcaacttcagtttttgcttccttgtctcatggctgcaattctgcctctggccctgcctgtctcctttgtccatcactaatgcctatggcacttattggacctctcactgtggcttggatgttcgcttaaattgtttctgtcctttgatatttgtctgatattttaatgcaggcagttgggggagggaagaagaaatgatttacccgttcttaaggttggtaattattgattagaggtaatctataaaagaaaagagaata

SEQ ID NO: 226235 - DNA, 478 bp, Homo sapiens
atctgaaagcagatgtgtaagctactggccagccagggattatagaaggcttttctccttgttgcagttctaagaaatctaggatcagtgaaaagtctgtgcagagacgctctattttactcacaagatttttgggcagacatactccacagctatggttttattttcctccaattttatcatattctttctctcatctagcagcatctgtgtttcaagttatttttcattcatttctttatatcytgggacactggaatataatgttcaaagatcagtttaatattttctgggaaatctaatagtgctgaatgacatacttattggtcactgtaatatatttaatgacagaaacaaagatactggatcaacttctgctttttattctgacctaggcagctcctgcacctctttctgactcaacacaaaatgggtgaaccttaaaaatgactcatcagttttttcctaacccatgtct

SEQ ID NO: 226236 - DNA, 575 bp, Homo sapiens
attttactcacaagatttttgggcagacatactccacagctatggttttattttcctccaattttatcatattctttctctcatctagcagcatctgtgtttcaagttatttttcattcatttctttatatcctgggacactggaatataatgttcaaagatcagtttaatattttctgggaaatctaatagtgctgaatgacatacytattggtcactgtaatatatttaatgacagaaacaaagatactggatcaacttctgctttttattctgacctaggcagctcctgcacctctttctgactcaacacaaaatgggtgaaccttaaaaatgactcatcagttttttcctaacccatgtctactgcttgtgaactctaataagatctctgaaaggaaaaatcaaatgcttaaaaaaaaagatttcttgcctcaatttaagccttcttaattgaataggtagcatttccaaacatgcaagatatcctcataaagctaaaactctgcttaatctataatcttgaaattgttccagaaaacacacagaaattccacaggaagcaattaagccaa

SEQ ID NO: 226237 - DNA, 487 bp, Homo sapiens
agtgcagatgatggcagcagcatcccgtctgcagtggccactgcgaagatgctggctacagtggagaaggtgcagccagggctgcgagctccacagagctagcagaagccccgatctcttctgagttgtgagggtgagagccccaccctcctgggcacagctgtagccacccagctcctgctgcagactgggctttcctgtgctcttgggggcctgggaaacccccctgcccccacagactcagaaatgcctggtcctgccacccatcttgtccatacacttgggacagtgctgaggtaaygcctaaggtttttgcctagccacaccatagaattggtgtggcggctgaccatggcgagtgatggagacccggacctatagagagaaaaagctgtaggctttattgagcagagtgaaagtacagagcttccatagtgtggaaggggtccagaatgggtagccagagttagattatatgactgccttg

SEQ ID NO: 226238 - DNA, 619 bp, Homo sapiens
tttttattatttcagtctctattatatatctctgataaatttttgaattctttatttatattttctggaaytttactgaatttactttaaaaagttattttgaattacttgttaggcagcttgtacatcttcgtctctttagggtcagtcattggcatatcatttcgtttggtgaggtcatatttccctcattgttcctgatacttttggttcttcatagatgtctgcacattgaatagaagggtatttatttcatctttgcagcctgcctctgtctgtgactacttttctacagtagacctgactagaaactttgagcagaccatttgttttggtctccaagcctatcattgccatagccgttgtagcactagagagtggtttaaaccggcatctgctatggccagcagcaaggttcacatgttgattgctgtgggccccactcccattcttcatttagaattgactcctggtcgactagccctgctaacattcccaatatttccagagcgagccacctgtaaagtgtcacagaatggtgaggaagtcaaatgtctttctccaatttacactttccactgtagaaaccaccgtcagtccagaagaattctccacaagt

SEQ ID NO: 226239 - DNA, 526 bp, Homo sapiens
ctttaaaaagttattttgaattacttgttaggcagcttgtacatcttcgtctctttagggtcagtcattggcatatcatttcgtttggtgaggtcatatttccctcattgttcctgatacttttggttcttcatagatgtctgcacattgaatagaagggtatttatttcatctttgcagcctgcctctgtctgtgactacttttctacagtagacctgactagaaactttgagcagacyatttgttttggtctccaagcctatcattgccatagccgttgtagcactagagagtggtttaaaccggcatctgctatggccagcagcaaggttcacatgttgattgctgtgggccccactcccattcttcatttagaattgactcctggtcgactagccctgctaacattcccaatatttccagagcgagccacctgtaaagtgtcacagaatggtgaggaagtcaaatgtctttctccaatttacactttccactgtagaaaccaccgtcagtccagaagaattc

SEQ ID NO: 226240 - DNA, 513 bp, Homo sapiens
gaactttactgaatttactttaaaaagttattttgaattacttgttaggcagcttgtacatcttcgtctctttagggtcagtcattggcatatcatttcgtttggtgaggtcatatttccctcattgttcctgatacttttggttcttcatagatgtctgcacattgaatagaagggtatttatttcatctttgcagcctgcctctgtctgtgactacttttctacagtagacctgactagaaactttgagcagaccatttgttttggtctccaagcctatcattgccatagccgttgtagcactagagagtggtttaaaccggcatctgctatggccagcagcaaggttcacatgttgattgctgtgggccccactcccattcttcatttagaattgactcctggtcgactagccctgctaacattcccaatatttccagagcgagccacctgtaaagtgtcacagaatggtgaggaagtcaaatgtctktctccaatttacactttccact

SEQ ID NO: 226241 - DNA, 513 bp, Homo sapiens
gaactttactgaatttactttaaaaagttattttgaattacttgttaggcagcttgtacatcttcgtctctttagggtcagtcattggcatatcatttcgtttggtgaggtcatatttccctcattgttcctgatacttttggttcttcatagatgtctgcacattgaatagaagggtatttatttcatctttgcagcctgcctctgtctgtgactacttttctacagtagacctgactagaaactttgagcagaccatttgttttggtctccaagcctatcattgccatagccgttgtagcactagagagtggtttaaaccggcatctgctatggccagcagcaaggttcacatgttgattgctgtgggccccactcccattcttcatttagaattgactcctggtcgactagccctgctaacattcccaatatttccagagcgagccacctgtaaagtgtcacagaatggtgaggaagtcaaatgtcttyctccaatttacactttccact

SEQ ID NO: 226242 - DNA, 400 bp, Homo sapiens
ttttgtagaagttgtcagggcatccccagtcttatttgtaaaggttttgtttttggtatgttttccttgaaaaagaaatttgtcctttgcagttatgtctatttgctattattttaccaatttcaggttagcatactatccatttccattgtttggtgactaaaagtttkataagactaccttctaagtctttattcaaactgtagttaaaagagttgaatggcatgaaacctagtagagaaacctgctatattcagtaaggcacccccttactgccagcagacctcctctacatggagctttcagattcaactcaaaaccattaaacatctgtacagaatctcaggtcctgtcatgatcacaagaatatgagaaactaatctcatattctcattcctgg

SEQ ID NO: 226243 - DNA, 413 bp, Homo sapiens
tcttttgaacacttttggctgttgtcgtgcagctcttttaatcatttrccaataattttgtgaatgtctcctattgtgccatgccctctgctagatgctgcggatctaaatgtaatcaagatagaaatggatcttgcccctgtggagaatacaccctatggcagagacagacaaccattaaaccaatgaatgaaatagtgtgcagtaatgggtaataactatggaatgaaagggagagatttctctagataaggtggtctgggaagcatctgaaagtgtcatttattgtaagaaataaaattgagaagtaatgtggcttgcaaggagctgagggaatttttcaggcaaaagaaactgtaagtgcagtgatcctgaggtagaaaagagttttggcatattctcataagatcaca

SEQ ID NO: 226244 - DNA, 492 bp, Homo sapiens
ttccatcgattcaactatccatccgtccattcatccataactttggttgttcagaaagcaaaggattagaagccagaggttttaggagaggagatagaacagaaagttggataacagtcagaaagctgctgaagtaatccagacaagagataacagttgctttgactgtgcaggtgaaagtggagatagaaaacagtgggcagaacaagacgtatttcagagatagaacagayggcacatgctggtggattgaatgtggaaaacgagggacagaaaggaaggaagggtgactcctgagtctctcgcttgaccaattagaaatccagcattttctatcatgggaaaggcaggaggaataaaagatgtttggaacttaaaagatggtattcaaaatcatgggaatgaattatggtatccagaagagaataagagaaagaagagagcccaggaactcaacatttagaaggcagggatatgagagagccaacaaag

SEQ ID NO: 226245 - DNA, 559 bp, Homo sapiens
tgctggcaaccacagcaccaggtgtcccatttggctgtgcttcgcatggatcaaatactcagaaaacaggcatgggtcagctccacagctgaagcacaacagaaatttgaatccctttgccacaaaactccttttttttagcctttaattatcttttaaatgttttcttaaatacctttctttctgtagaacatgataattcagaagcaattttcttgtcatcatgttttctttcttcttgtaatttttcaagtacttgggtgatgataaagggaggtgggggcacatgctatgaaaaggttttgttytaaaacaagttgtgcagctaactttttgagttatttaatgaaaatatttatcttctctcaaaaatgggagtattaaatgtggggttacactgaccgcaaaactgtaatgaaatgatctctgtgaagccctaatttcaaccatttgatgaaaagcaacttgaacaaatgaagaccaaggttttatttatttatttattattttttatttttataaagtgctgggattacaggcatgagccgctgcgcccagc

SEQ ID NO: 226246 - DNA, 543 bp, Homo sapiens
actgaagttgttagaataataaaactactataatcatcaatatctatrtagatcataaaaacagcaccttggattttcatttcttttactttctgactcctaacaactatttgtgttactttatctcaggtaaccagctccacagtcagtacagataactgcaccagctgcagtgcaaaatcttttgactctatttgtacctcctattcatggttacttgcaatacaccttcactttccttcttcttcagcttagtgttcatagtcaaacacaattgttgctttaattacacaatcacccaacttgcctctctctttatcgtcaactgatgtactttccaatctactcacctattattttataagatttaaaggtattttgatggtgggacacaatacagtcacactcagacgtattaaaggtagaattttttgttaccttcagctccaagccagagaaatatgtcaggcagagttgtgcagtgttgcacctcagtgcagggaaacagcaagctgaaactgtaatgagccacttatgtatggc

SEQ ID NO: 226247 - DNA, 520 bp, Homo sapiens
taatttttttttccaagtgagttttaaccaacatgaccttaacgtcccacaacagcttggcagaatgttagtcaggtttcctcctgactatggctccccaaactcttttttcttagagcattttatgtagaaaacatcacagatacttaatttgccccttcaagatataagttttctcacagcttcttgccaatattacaaaccacraacacatttttcaaggagctgaaaaagcatcattttaaaatgttgtcactaagagaaataagaacccctatctttcagtctctataggaaggtaagaacctaaattccatgagcaccaattagcaaatacagatggcctaatcacatatgataaacttccttcttgacattctcccctattggaatagtcttgaataaagtctttatttaattctgtcctccaaatttttctttgacgatctacagcaggaaacaagttccatgacacagcaacataataagaactagaaaacgctaattaccattgtaactt

SEQ ID NO: 226248 - DNA, 520 bp, Homo sapiens
taatttttttttccaagtgagttttaaccaacatgaccttaacgtcccacaacagcttggcagaatgttagtcaggtttcctcctgactatggctccccaaactcttttttcttagagcattttatgtagaaaacatcacagatacttaatttgccccttcaagatataagttttctcacagcttcttgccaatattacaaaccacgaacacatttttcaaggagctgaaaaagcatcattttaaaatgttgtcactaagagaaataagaacccctatctttcagtctctataggaaggtaagaacctaaattccatgagcaccaattagcaaakacagatggcctaatcacatatgataaacttccttcttgacattctcccctattggaatagtcttgaataaagtctttatttaattctgtcctccaaatttttctttgacgatctacagcaggaaacaagttccatgacacagcaacataataagaactagaaaacgctaattaccattgtaactt

SEQ ID NO: 226249 - DNA, 542 bp, Homo sapiens
aaatgggaataggcattatcactgctgacagaagcagtctttggtgaaagggactgtggagggtatttatctgagagaagtaaaagtcatccaaggttaaagaaagctccctgatttcccaaggcttacactctaagaaggaaaggcctgcaaggctaattgtaatccgtttacaacaattatgggaaagaatgacacaacataatttggaatctttgaaccatgttgcttgtgcttcactgttgcttttcagtgctgttgggagtgatttcrtttgcctgagccattctgtctgccgtttctttgaaactagcccttgtactcattctattccttttatacttttttttttattactgtgagagaatagtaataggttttatataaaggctgatgggtctacttaattgctgattgtactattccccttatttcacatctacagagcttggcaagcaaacagatgccattatcagagctatttctttgttattcaaggtctattgttgccatcattctaaaagtaatattcaagagcagag

SEQ ID NO: 226250 - DNA, 542 bp, Homo sapiens
aaatgggaataggcattatcactgctgacagaagcagtctttggtgaaagggactgtggagggtatttatctgagagaagtaaaagtcatccaaggttaaagaaagctccctgatttcccaaggcttacactctaagaaggaaaggcctgcaaggctaattgtaatccgtttacaacaattatgggaaagaatgacacaacataatttggaatctttgaaccatgttgcttgtgcttcactgttgcttttcagtgctgttgggagtgatttcatttgcctgagccattctgtctgccrtttctttgaaactagcccttgtactcattctattccttttatacttttttttttattactgtgagagaatagtaataggttttatataaaggctgatgggtctacttaattgctgattgtactattccccttatttcacatctacagagcttggcaagcaaacagatgccattatcagagctatttctttgttattcaaggtctattgttgccatcattctaaaagtaatattcaagagcagag

SEQ ID NO: 226251 - DNA, 632 bp, Homo sapiens
aagctgtggtatctccactgagaagccttttaaaaagtagatagatgttttgtcagttttatgtcctaggaatgtctttctgaaatacctgggagctatccctttgaaatgtcagcaacaagagagagagaacaaccctatttcccagtttctgtgggagggtggaagtctaacttcagyaggcaccttattcaaagttgcaaaaatacctcctgtcataaagacatgagaagtttgtttttttcctctggatgaagccaattaactaacatagattgttgttccaattgccatgataaagttatgatgaacaatgtgtgacaaaaggtgctgtccagtcctcttacttgaggattattgtttatcttgaaaataggtatgcaatgagttgtatctgcttggtcgtttaaaagggagagattcctttctatttttgcaatcttttagcacattgcctgtgatggacatcacattggtttaatgcctattcagtaataaatatgttttttctctactaccttggtgggaggaatattgggtggaaagaatgttttgtttttaattgtatttccccaacactctatacacacaatcaggccattatactgagctcttcatttccagtctatttc

SEQ ID NO: 226252 - DNA, 632 bp, Homo sapiens
aagctgtggtatctccactgagaagccttttaaaaagtagatagatgttttgtcagttttatgtcctaggaatgtctttctgaaatacctgggagctatccctttgaaatgtcagcaacaagagagagagaacaaccctatttcccagtttctgtgggagggtggaagtctaacttcagtaggcaccttattcaaagttgcaaaaatacctcctgtcataaagayatgagaagtttgtttttttcctctggatgaagccaattaactaacatagattgttgttccaattgccatgataaagttatgatgaacaatgtgtgacaaaaggtgctgtccagtcctcttacttgaggattattgtttatcttgaaaataggtatgcaatgagttgtatctgcttggtcgtttaaaagggagagattcctttctatttttgcaatcttttagcacattgcctgtgatggacatcacattggtttaatgcctattcagtaataaatatgttttttctctactaccttggtgggaggaatattgggtggaaagaatgttttgtttttaattgtatttccccaacactctatacacacaatcaggccattatactgagctcttcatttccagtctatttc

SEQ ID NO: 226253 - DNA, 559 bp, Homo sapiens
gtaaaggagactgggaagagccaaagaggagagaggagaaagccaatctaaatgtaattgctgtgactcagtctctctagagatccccacaaagccttcgattgtccccctgcactctatggtgtttgtatatgccatatccattaacctgtctcccacaggcctcccacacagtgacatagctcttgacatacctgatgaagctgaaacaagacccttattaagctacacctctttgcagtcaatggctgggggcaaataaataaataaataaatgagtagagagatgacgtatggtgcctaatggacatcttaagaaaataagtagtattatcaccccctttttaacaattactgaatcattcatcagagacacacagtaacttgacaaaagttacaagtttgyaagtagtgagctcgattccaagactgaacctgatcttaataaagttaattcatttactatccactccatcctggggctcagtttcctcacctgcaaaaatgaatttcaactcaatgttctcataaaaatatttatttatgttggtaaaatgct

SEQ ID NO: 226254 - DNA, 646 bp, Homo sapiens
ctgaacttacagtccactttaggtagccacgtttcatttatgattgatgactaacactcacagaaggtggactgtcagcctaaaaattattggtgttctccaaacaggctgcagtggagcagaaattacacctgaaagcattacctaattatatgtgaaaaggggactattaatgactacaagcagaatttgctcaaatgccgtgaattcaaacctatttttgcccataggacaataatacaatcaaacatttctaatattttctcttctgcacaccaaaagaaattaatatctttagttacgcttttctctgtttacttgagtttatcttcattaaccatatattaagagactattagaatagacttaaaaccaagaagaaatagaataaattatttttcaagttctttccccccattaatctacacagaaatgcattattataattgtatcttaattttttataaagccttctctaaataaaggatgtactttaagagtaaagattttttacttggcttaatttagctaatacaatatcagtctgttttccccaatayattttttggaatttgtgactaaacacgttttcttcattattttggacactataaacaacaggaccaaaaatgcattcctctttcaa

SEQ ID NO: 226255 - DNA, 604 bp, Homo sapiens
agacatttaaaaaagtgagggaacaccactgagagaagaggtccagtgactgatcttgatgtattataatattaataggtggtcaaatgaggaggaattagcaacaatatatgacaaaaagtgacaatgttgtcagagaaaaaattggagagtgatatcctggaaagcaaatgaagaatacatttcaatgagtaggagtgattatctatcagatgcaactgatagcacaagctaaatgaagactgagaattgacccttaggtattatcagctgccacctggttacgttgttacttgaccctaatttttggtgtgttcacggagaggaggtagtgctagatgctcaggactgagaatgttatttttcaagcatcggtctctgcattgtcttcaagctaggggaaaccctggcctttaccagagaggagcagagtcttctacacgtccaaaggatattgggaattcaacgttcttcaatgtatcaatgtagatatctccttatcattctcagtgtctccttaccattttctctcccaatcggagatatataatatggcatggcaaacgtgtagggtytgaaatccaaccatctctggaatttccca

SEQ ID NO: 226256 - DNA, 548 bp, Homo sapiens
tttggtcttgctgattctttattttttttctattttatttatttatgctctaatagtaattatttcctttcttttgctgccttagggtttagagcttttctttttctagatgttttaggtagaaggttaagttattggtttgagatttttcttttctaaggtaggtatttactaccataaatttccttttaagtatacttcatctccaaatgtaacactgcattttcatctttattcacattttatctttattaataattttccttattatttcttatttgacccattggttatttagragtctgtcgttgttaatatccaaatatttattaatttattaagattctgttaataatttctaatttatttttattacgatcagaaaatgtgctttccagaatttcttggctctttcctgaacatgtgcacagtcctaggcatgtaaatggcttcctgggtgcccagaagtatgttggagatttaaaagtaaaagtcttatagatatctcattttcttttaagctttctggtaagtctattgtttgcccc

SEQ ID NO: 226257 - DNA, 373 bp, Homo sapiens
ttgaaccattcttccatcactggggtaaatcttacttgatcattatattttattttttgatgtattgttggtttcagttttctggtttctttttttttttttttttttttttggaattttctgtctacgttcatcaggtatattggcctgtagttttctttctttattgtggctttgatttgggtgtcarggtaatgctgacatcatagaataaattagaaaaaattcccacctcctcaattttttgatatcaattttttaaaatgggtgttaatttttctttacaagtttgggagaaatcagcaataaagccacctgatcctgggcttttcttgttggaagtctttttaacaatgattcaatctcatcattc

SEQ ID NO: 226258 - DNA, 540 bp, Homo sapiens
caaatgagaagcaaagtcacatcttacatggtggcaggtaagagagtgtgtgcaggaatctcccttttataaaaccatcagatctcatgagacttactcactatcacaagaacagcatgggagaaagaccagcccccataattcaattacctccgattcggtctcacccacaacatgtggggattatgggaactacagttcaagatgagatttgggtgggaacacaagaacagcacaagaaagacccacccccattattcaattacctcctacttccacaggcactggcagtggtggatcctggcaagccagtccttaggcctccagacagtgtccttagttccctctggtggcagtggtgggacagatgagcaggcctttgagccacatgttccaygtgtggtgttgacagtggtggtagtggcagtgtactaacttttgcactcctaaatggtttgcatgagtgtcagaagagacaaccgtgggctgcgtgaggtgggcccataaacccaggtggcaaatatgggcgtgcagtgctgg

SEQ ID NO: 226259 - DNA, 551 bp, Homo sapiens
aatgttctcaaggttcatctgtattgcagcaygtatcagaattatgttgcaatgctaagctattatctaggtactgtaattgacattatcatggaaaggtcagataccttcattcttgcttcttttttttattttattattattatactttaagttttattacttgtctctattttagctaaggagattaagtcatttgagtgctttgtgcatagcagagctttctcaaacacagtaataagatttagctgataataatatcggtgcccttttaatgtataacaaaaatttccaaagtcagaagtcttaaaaattatttcaaagttcaaagtgtatgttcctgcatatgcccatttaaatagtttcaatattgtttaatcaaaattctactcctctttcaattcaagtgttaaaaacatgtattataatcattattcttttcacaatctgtttactgcattatttggttgtgatcttggattgaatttatttcttatgagagatcttctaaaagcctgaagatatagcattctatatttccaagaagatta

SEQ ID NO: 226260 - DNA, 595 bp, Homo sapiens
atcaaaatgctcaagtgaattgttcaacttaattctctaagtttaattaagacttcatatggtttaaataacaggtatctttaagaaaaatttagtttatttattattgaatctatcagctgatgtaatttttaaaactatattaatgttcacattgtttaataactcatttagttgtctgaacattttaaagcatctgaaaaagcacaagcaaagacctttcaatgcagaaaatactattttaaatattaaattagaattatattattttcttaaaataagagaagyggaataaatgatgtcttctgtatgatcaaggcaagaaataacattattttgaaacttatctctttcatttttaactaactaaatagcactatttggcttagaagctccttatgattgttaaaattttaaaaaaatgtgttatttttccatgactttgttatacatctgtctttattatattcacaagaaacagaaatgatatcttcattttagttttccacacaataactttcaaaacatttcaaaaaccagaaaaagcggaagcctcattctataacttcagtgatctaagtaaagataaataaca

SEQ ID NO: 226261 - DNA, 518 bp, Homo sapiens
gctgatgcctgtaatcccagcactttgggaggctgaggcgggtggatcacttgaggtcaggagttcaacactagcctggccaacatggtgaaactctatctctactaaaaatacaaaaaaaaaaaaaattagctggatgcagtggcaggtgcctgtattcccagctactcgggagactgagrcaggagaattgcttgaaaccaagaggcagaggttgcagtgagctgagattgtaccattgcactccagcctgggtgacaagagagaaactccatctcaaaaaaaaaaaaaatagagaaaagatttggcaaacatgcaggtgagcaggaaacagagccaggtgtcccacagagcctgtcatcgggctgccccatcaccactgtcaccaggacatgcccagcaccaccactgcttccaagccaggcagcacatcttcctgctgcactcatcattcttcaactttggctctgtcttggatgcacttcctcaaagttttttattatttagggtttgtttaa

SEQ ID NO: 226262 - DNA, 617 bp, Homo sapiens
cattcacaacagatagtttaaaaagttggtggatgcgtccaagatggccgaataggaacagctttggtctacagctcccaatgagatcaatgcagaagatgggtgatttctgcatttccaactgaggtacctggttcttctcattgggactggttggacagtgggcacagcctatggagggtgagcagggtggggcatcacctcaactgggaagtgcaagaagttgggggatttccctttcctaggcaaaggaagccctgagtgactgtacctggaggagcagtacactcctgcccaaatactgtgcttatcccatggtcttcgcaaccagcagaccaggagattccctcccatatctggcttggcaggtcccatgtccatggagccgtggtcactgctaacacaacagtctgagatcaacctgggacatggsagcttggtgaggggaggggcgtctgccattgctgaggcttgagtaggtggttttatgctcacagtgtaaacaaagctgcagggaagcttgaactgggcggagcccactgcagctcagcaaggcctactgcctctatagactccacctctggggacagggcatatctgaacaaaaagcagcagac

SEQ ID NO: 226263 - DNA, 390 bp, Homo sapiens
aacactttgggaggctaaggagggaggattgttggagcccaggagtttgagaccaccctgggcaacactgggaggccccagctctacaaaaaatttaaaaattarccagccttggtggtgggtgcctgtagtcccaggtacttcggaggctgaggcagaaggatcgcttgagcccaggaggtcgaagctgcagtgagctatgattgcaccattgcactccagcctgggtgacagagcaagaacctgtctctaatagtaataataataataataataatacagaaatcatggggcattttgtcaacaacttaatctcaaatggttccagaaaaaagaaagtactgtgtttgcaacttttctgtaatattgagattgtttcaaaatttcttt

SEQ ID NO: 226264 - DNA, 581 bp, Homo sapiens
atggggaggttatcctgtgattcagtttataatcacaaggatccctgcaagagctagcaggagggccagagtcagagagagactggaagatgctaggtcactggctttgaagatggaggaagagacccagaccccaggaaaccaggagatttccagaaactagaaaaggcaaggaagcaaattatcctctaaagctttcagatgaaatacagtcctctgacaccawgatttaagcctgatttgaggacttctgaagtccagaactacaagaggatgaatctgtgttgtttgaaaccactacatttattacagcaacaataaggaacaaacacagcgacacctggggcactcagtgctaaagccggtgaaggaccaggcaaactgggaccagtggtcagcctagatcccagggaccctctgtaagctgaggctgatctacaggaagggcagccattgtccttcccgggtggtttagggggaggctgcatatgtgggctggagcagggaagggtgggtgcagcagaggagtgatgatgaaaatgctgggaacagtatggaatctgaagcgctgcccctccctc

SEQ ID NO: 226265 - DNA, 581 bp, Homo sapiens
atggggaggttatcctgtgattcagtttataatcacaaggatccctgcaagagctagcaggagggccagagtcagagagagactggaagatgctaggtcactggctttgaagatggaggaagagacccagaccccaggaaaccaggagatttccagaaactagaaaaggcaaggaagcaaattatcctctaaagctttcagatgaaatacagtcctctgacaccatgatttaagcctgatttgaggacttctgaagtccagaactacaagaggatgaatctgtgttgtttgaaaccactacatttattacagcaacaataaggaacaaacacagcgacacctggggcactcagtgctaaagccggtgaaggaccaggcaaactgggaccagtggtcagcctagatcccagggaccctctgtaagctgaggctgatctacaggaagggcrgccattgtccttcccgggtggtttagggggaggctgcatatgtgggctggagcagggaagggtgggtgcagcagaggagtgatgatgaaaatgctgggaacagtatggaatctgaagcgctgcccctccctc

SEQ ID NO: 226266 - DNA, 545 bp, Homo sapiens
gaaaagaattcttttcttgccagaccagaaagaaaggaaatgttttgaaagacttactgttttttgttttgttttgttttgttttgttttgttttgtttttgagacggagtcttgctctgtcaccaggctggagttcggtggcacaatctcggctcactgccacctccgcctcctgggttcaagtgattctcctgcctcagactcccgagtagcygggactacaggcacgcatcaccacgcccagctattgaaagacttactaataactaatatgatacactaggcttgtgtctgtgtctcaacagctgagagaagcctctggcttcagcttatgcatcttcaaagcctcagatgtctcaatgccctggaagtagccaaattaaatctgacaatgattaggagagtaagaatgttacagtacatgctcttccttgtaaaaggccggaattaggtctgggttgcccctggcttcccgtttgtagcacagatagattggaagtggtgttggaaacagctctttatgtagaccatgagttgggagttc

SEQ ID NO: 226267 - DNA, 596 bp, Homo sapiens
gaaccaacataccacaatttgcatgcctgctctgctcataatggacttttgggaggctacctgtttaggctgttataaatacaccttctatgaacattcttatacatattttttaaattatttttgttcatttgactttttggtgtgcaattctatggatttcaacatgtgtatagatctatrtaactaccacaatatcaagatatagttggttctatcaccccaaaaactctcacctactgtccccttagaatcacaatcccctcccctttccccagtcccttacagctactgatctgtcttccattactatggctttggtcttcttgagaatgccatatagatggaatcatatagcatgtaactgttggagactggattccttcaccaagataattcctgtggtattcaccaacacaacaggcatgcaccaccataagttcgtctctgtcaacaacagatcatatatatgacggtggttccataagattataaaaccttatttttcctgtaccttttctggtttaggtatgtttagatatacacaaatacttatttatcagaacctatccctgtcactacacagcgcctgtctg

SEQ ID NO: 226268 - DNA, 345 bp, Homo sapiens
acaccgtatttcattatcaaagcaagtcacaacgtaagcccagattcaaggtgagcaaagatagcctccacttctcagtggagaaaactacaaggaattggtggccatcttttttttttttttttttctttgagacggagtttcactcctgtttcccaggctggagtgcaatggcgtgatctcggctcactgtaacttcygcctcctgggttcaagcgattctcctgcctcagcctcccaagtagctgggattataggtgtgcaccaccacctgtggctaattttgtattttttgtagtgacagggtttccccatgttggtaagtctggtctcgaactccagatc

SEQ ID NO: 226269 - DNA, 562 bp, Homo sapiens
agatctgcctggattttcttcctttgttgctgttactttggggctttgcctgcctactcctgccccggtgcccacctgtattattctgttctaatgctgctaataaagacataccagaaactgggcaatttataaagggaagaggtttaatggactcacagttccacgtgactggggaggcctcacaatcacggaggaagacgaagaaagagcaaaggcacatcttacatggcagcaggcaagagagagtttgtgcagggaractcccatttaaaaaaccgtcagacctcatgagacttattcactgccatgagaacagtatggtggaaaccacccccattattcaattatttccacctggttctgtccttgacacatggggaattattacaattcaaggtgagatttagatgaggacacagtcaaaccatttcaccacctgctctgatccttaccctcctgcttcatcccctttgaagactgacgggtgaggtgcccaccccatgctgctgactgtccacctccctcctttctggcaggattttactgaggatgatgtaaa

SEQ ID NO: 226270 - DNA, 463 bp, Homo sapiens
cagggtacaaagtcaacaataattcataattctatatactaacaataactacttggaaattaaattttaaaacacagtactatttaaaatagtgtgaaaaatatgaaatcttttgggtagaaatcttacataatatatacaaattctatatgctgaactaataaamtgctgatggaagaaatagaagacctgaataactggagagatatatttgtttattgatttggaagactcatcagagtaaagatgtcagttctccccaaattgattgaaagatccaacacaattctaattaaactcccaataggatttttttgtagaaatcattaagttgattctaaaatttatacagaatgacaaaggaactagaatagccaaaacaattttgaaaaagaacaaagttggaaaagccacacaacctgataaagttatcatattcaaaatagtataatattatagaaag

SEQ ID NO: 226271 - DNA, 509 bp, Homo sapiens
gtcttaggttatttatttatctcgtttttgatgtattggtgtgaattacatcactgaagtactttgaaatatgtagctttgycatggaatacgctataaggaagaaagaaatcacgtcctttgtggcaacctggatgcagctggggaatattatcctaagatcattatcacaggaacacagaaacaaatcctgcatgttctcaacttataagtgggagctaagtgttggatatacgcggatataaacatgggaacaacagaagctgggggactagcagaagagagggagggagggaggaagggagggaggctagggttgaaaacctcaaataaccacgaagccttattgagcaaatgcaaagtgtctggcgtgtttggctgggtgaggtggctcacacctgtaatcccagcactttaagaggctgtagcaggtggaaggtttgagcgcaagagcttgagaccggcaacatggcaagacgtcatctttacaatttttttttttaaattag

SEQ ID NO: 226272 - DNA, 509 bp, Homo sapiens
gtcttaggttatttatttatctcgtttttgatgtattggtgtgaattacatcactgaagtactttgaaatatgtagctttgccatggaatacgctataaggaagaaagaaatcacrtcctttgtggcaacctggatgcagctggggaatattatcctaagatcattatcacaggaacacagaaacaaatcctgcatgttctcaacttataagtgggagctaagtgttggatatacgcggatataaacatgggaacaacagaagctgggggactagcagaagagagggagggagggaggaagggagggaggctagggttgaaaacctcaaataaccacgaagccttattgagcaaatgcaaagtgtctggcgtgtttggctgggtgaggtggctcacacctgtaatcccagcactttaagaggctgtagcaggtggaaggtttgagcgcaagagcttgagaccggcaacatggcaagacgtcatctttacaatttttttttttaaattag

SEQ ID NO: 226273 - DNA, 509 bp, Homo sapiens
gtcttaggttatttatttatctcgtttttgatgtattggtgtgaattacatcactgaagtactttgaaatatgtagctttgccatggaatacgctataaggaagaaagaaatcacgtcctttgtggcaacctggatgcagctggggaatattatcctaagatcattatcacaggaacacagaaacaaatcctgcatgttctcaacttataagtgggagctaagtgttggatatacgyggatataaacatgggaacaacagaagctgggggactagcagaagagagggagggagggaggaagggagggaggctagggttgaaaacctcaaataaccacgaagccttattgagcaaatgcaaagtgtctggcgtgtttggctgggtgaggtggctcacacctgtaatcccagcactttaagaggctgtagcaggtggaaggtttgagcgcaagagcttgagaccggcaacatggcaagacgtcatctttacaatttttttttttaaattag

SEQ ID NO: 226274 - DNA, 565 bp, Homo sapiens
tgtagctttgccatggaatacgctataaggaagaaagaaatcacgtcctttgtggcaacctggatgcagctggggaatattatcctaagatcattatcacaggaacacagaaacaaatcctgcatgttctcaacttataagtgggagctaagtgttggatatacgcggatataaacatgggaacaacagaagctgggggactagcagaagagagggagggagggaggaagggagggaggctagggttgaaaacctcaaatarccacgaagccttattgagcaaatgcaaagtgtctggcgtgtttggctgggtgaggtggctcacacctgtaatcccagcactttaagaggctgtagcaggtggaaggtttgagcgcaagagcttgagaccggcaacatggcaagacgtcatctttacaatttttttttttaaattagctaggtgtgctggtgcacacctgtaatcccagctacttgggaagctgaggggtgaggattgcttgaacccgggagccggaggttgcagtgagctgagattccaccactgaactccagcctgggcaac

SEQ ID NO: 226275 - DNA, 505 bp, Homo sapiens
agaataatggccccaaagatgtacacatcctaatccccacgtggcagacagaataatggccccaaagatgtccacgtcctaatccccatgtggtagacagaataatgaccccaaagatgtccacatactaatccccatgtggtagacagaataatggcctcaaagatgtacacatccttatccccacgtggcagacagaataatggccccaaagatgtccacatcctaatccccatgtgggagacagaataatggtcccaaagatacccatgtcctaatcctcatgtgatacagagaataatggtcccaaagatgtccatgtcctaatactaggtagcagacaggataatggccccaaggatgtctacatcctaatccccatgtggttgacagagtaagcacccccttccccccctcaaaaaaaaatccacatcctaattctagaaatctgtaaaaacctgtcatggctaaaawgattttgcagatgtgattagtttaagaatca

SEQ ID NO: 226276 - DNA, 484 bp, Homo sapiens
acttttatatatttcatttcatttgattccttataaatttgtaaggaagatagagcttgtattatgtcagtgaagttgaaaatagagcacagaaaaattaagatacagcacccccaaaactgagaacttctgacataatacactgttggaaatatttatttcagagtgaagaaaatattggaagttaggcttgttaattggtctgcatggttcataattactctttcttattaactatttaaggaacatgagaccaggaagttaaatacccaggtatatgcagatgtatatctagaattggtaccaaagtaaatacaggcataccttggagatactgtaggttccattatagactaccacaataaagtgaatatcaccataaagcaaggcacacaaatattttgrtttaccagtgtatgtaaatattatgtttatattctactgcagtctattaaatgttcaatagcgttatatttaaaaaacc

SEQ ID NO: 226277 - DNA, 592 bp, Homo sapiens
tagtgcctagtttataagcagacatatgtatagtataaactatatagtttatattcagagtacaaaatccaccgtggccactatttttttcccttttttgagatggagtctcactctgtcacccaggctggagtgcagtggcacgattttggctcactgcaacctctgcctccctggattcagcgattttcatgcctcagcctcscaagtggctgagattacaggcacacgtcaccacacccagctaatttttgtatttttggtagaaatggggtttcaccatattggccaggctggtctcaaactcctcaccttgtgatccgcccgcctcggcctcccagagtgctgggattacaggtgtgagccaccccacccggccaccttggccactattacaaaagtaaagctaaataatactgaagtatatgttccatgttttgtaaggactgttgatttggaaacagtgtattctaacaataaattttaaatgtaactaatagtatatgtttctgaataaataggttctacttctaatataaagtgtcatatttgttttaaaatcattgctcaagttgtatagttgttttgggca

SEQ ID NO: 226278 - DNA, 592 bp, Homo sapiens
tagtgcctagtttataagcagacatatgtatagtataaactatatagtttatattcagagtacaaaatccaccgtggccactatttttttcccttttttgagatggagtctcactctgtcacccaggctggagtgcagtggcacgattttggctcactgcaacctctgcctccctggattcagcgattttcatgcctcagcctcgcaagtggctragattacaggcacacgtcaccacacccagctaatttttgtatttttggtagaaatggggtttcaccatattggccaggctggtctcaaactcctcaccttgtgatccgcccgcctcggcctcccagagtgctgggattacaggtgtgagccaccccacccggccaccttggccactattacaaaagtaaagctaaataatactgaagtatatgttccatgttttgtaaggactgttgatttggaaacagtgtattctaacaataaattttaaatgtaactaatagtatatgtttctgaataaataggttctacttctaatataaagtgtcatatttgttttaaaatcattgctcaagttgtatagttgttttgggca

SEQ ID NO: 226279 - DNA, 592 bp, Homo sapiens
tagtgcctagtttataagcagacatatgtatagtataaactatatagtttatattcagagtacaaaatccaccgtggccactatttttttcccttttttgagatggagtctcactctgtcacccaggctggagtgcagtggcacgattttggctcactgcaacctctgcctccctggattcagcgattttcatgcctcagcctcgcaagtggctgrgattacaggcacacgtcaccacacccagctaatttttgtatttttggtagaaatggggtttcaccatattggccaggctggtctcaaactcctcaccttgtgatccgcccgcctcggcctcccagagtgctgggattacaggtgtgagccaccccacccggccaccttggccactattacaaaagtaaagctaaataatactgaagtatatgttccatgttttgtaaggactgttgatttggaaacagtgtattctaacaataaattttaaatgtaactaatagtatatgtttctgaataaataggttctacttctaatataaagtgtcatatttgttttaaaatcattgctcaagttgtatagttgttttgggca

SEQ ID NO: 226280 - DNA, 592 bp, Homo sapiens
tagtgcctagtttataagcagacatatgtatagtataaactatatagtttatattcagagtacaaaatccaccgtggccactatttttttcccttttttgagatggagtctcactctgtcacccaggctggagtgcagtggcacgattttggctcactgcaacctctgcctccctggattcagcgattttcatgcctcagcctcgcaagtggctgagattacaggcacacgtcaccacacccagctaatttttgtatttttggtagaaatggggtttcaccatattggccaggctggtctcaaactcctcaccttgtgayccgcccgcctcggcctcccagagtgctgggattacaggtgtgagccaccccacccggccaccttggccactattacaaaagtaaagctaaataatactgaagtatatgttccatgttttgtaaggactgttgatttggaaacagtgtattctaacaataaattttaaatgtaactaatagtatatgtttctgaataaataggttctacttctaatataaagtgtcatatttgttttaaaatcattgctcaagttgtatagttgttttgggca

SEQ ID NO: 226281 - DNA, 562 bp, Homo sapiens
ttagcagtaggtcttgacagtggactgaaaatattcagtaagccaacctctaaacagatgtgctgtcatccaggagactgttgttccatatgtagatagcaagcagattagatatagcataattcttaagagctctaggacttttttgagtggcaaatgagcattagcttcaacgtcaagttaccagctgcattagcccctaacaagagagtcagtttttatttatttatttatttatttatttatttttaaaagagacaagagtctcgccttkttgtccaggctggccttgaactcctgggctcaagtgattctcttaccttggcctctcaaagtgctggaataacaggtgtggccccagcctgacctttgaagcaaggcattgattttccctctctagctgtgaaagtcctagatggcatcttcttctaatggaaggctcttttgtctacttaaaacaccttgtttagtatagccacctccagcaatgatcttagatatatattctggataacttgctacagcttccatgtcagcacttgctgcttcactttccactttt

SEQ ID NO: 226282 - DNA, 562 bp, Homo sapiens
ttagcagtaggtcttgacagtggactgaaaatattcagtaagccaacctctaaacagatgtgctgtcatccaggagactgttgttccatatgtagatagcaagcagattagatatagcataattcttaagagctctaggacttttttgagtggcaaatgagcattagcttcaacgtcaagttaccagctgcattagcccctaacaagagagtcagtttttatttatttatttatttatttatttatttttaaaagagacaagagtctcgccttgttgtccaggctggccttgaactcctgggctcaagtgattctcttaccttggcctctcaaagtgctggaataacaggtgtggccccagcctgacctttgaagcaaggcattgattttccctctctagctgtgaaagtcctagatggcatcttcttctaatggaaggctcttttgtctacttaaaacaccttgtttagtatagccacctccagcaatgatcttagatakatattctggataacttgctacagcttccatgtcagcacttgctgcttcactttccactttt

SEQ ID NO: 226283 - DNA, 542 bp, Homo sapiens
agtctgtctccaactccgtgtttcttttggggaaaaaaaaaaaaggagaggaaggctgggcacagttgctcacacctgtcatcgcagaactttgggaggccgaggcgggtggatcacaaggtcaggagatygagaccagcctggccagcagggtgaaattccgcctctactaaaaacccaaaaaattagccggccatggtggcagacacctatgatcccagctacttgggaggctgaggcaggagaatcgcttgaaaccaggcggcagaggttgcagtgagtcaagatcacgccactgcaattcagcctgggtgacagagcaaaactctgtctcaaaaataaaagggggaaatattcgattaataaacaacagcctcacatgtgctcaccactgggttgaagcaaagccttcttccaaaagcaaaaattggaaaaatatgctaccgacagactgcccctaaaggtaatattaaacagggactccaaaggcagaagagaagctgacccaatgcgacatgaaaattcaggaaggacacaacagc

SEQ ID NO: 226284 - DNA, 526 bp, Homo sapiens
ctaataagtctgtctccaactccgtgtttcttttggggaaaaaaaaaaaaggagaggaaggctgggcacagttgctcacacctgtcatcgcagaactttgggaggccgaggcgggtggatcacaaggtcaggagattgagaccagcctggccagcagggtgaaattccgcctctactaaaaacccaaaaaattagccggccatggtggcagacacctatgatcccagctacttgggaggctgaggcaggagaatcgcttgaaaccaggcrgcagaggttgcagtgagtcaagatcacgccactgcaattcagcctgggtgacagagcaaaactctgtctcaaaaataaaagggggaaatattcgattaataaacaacagcctcacatgtgctcaccactgggttgaagcaaagccttcttccaaaagcaaaaattggaaaaatatgctaccgacagactgcccctaaaggtaatattaaacagggactccaaaggcagaagagaagctgacccaatgcgacatgaa

SEQ ID NO: 226285 - DNA, 569 bp, Homo sapiens
cttccgttgcactacagtgtcagagttggttgctgcagagagcacatatatttcaaattgctgctctgcatgctacgaatcacaataacatagttactgtttgtcagtatgtgtgtgtgtgtgggcaccacacatattgccctggcatcttatttatttctctcattaccagtgcatacttacctatcatgttaaaacaagaaaaggagaaaagtggactttatatgtaacactttakaggcatagtggaatgtatattattattaacaaattagatagcaaagcattatatttgttatgctagaagactatggctgtgctaaaagaatataatatatgtcaacattgccagactgggcacttctcacaatattcccaaccaacaggaataaaactaaaggtcagaaaaaaaaaatagtaaattaaaacaaaattttatcacagcagaatttcttctcaaaaacaaaaaatggaaattaggctataattaaagtaagtttttcaatggcttgttagccaagcaaggaaaaccattaccaacagtagttaattaaattatgttttattat

SEQ ID NO: 226286 - DNA, 569 bp, Homo sapiens
cttccgttgcactacagtgtcagagttggttgctgcagagagcacatatatttcaaattgctgctctgcatgctacgaatcacaataacatagttactgtttgtcagtatgtgtgtgtgtgtgggcaccacacatattgccctggcatcttatttatttctctcattaccagtgcatacttacctatcatgttaaaacaagaaaaggagaaaagtggactttatatgtaacactttagwggcatagtggaatgtatattattattaacaaattagatagcaaagcattatatttgttatgctagaagactatggctgtgctaaaagaatataatatatgtcaacattgccagactgggcacttctcacaatattcccaaccaacaggaataaaactaaaggtcagaaaaaaaaaatagtaaattaaaacaaaattttatcacagcagaatttcttctcaaaaacaaaaaatggaaattaggctataattaaagtaagtttttcaatggcttgttagccaagcaaggaaaaccattaccaacagtagttaattaaattatgttttattat

SEQ ID NO: 226287 - DNA, 569 bp, Homo sapiens
cttccgttgcactacagtgtcagagttggttgctgcagagagcacatatatttcaaattgctgctctgcatgctacgaatcacaataacatagttactgtttgtcagtatgtgtgtgtgtgtgggcaccacacatattgccctggcatcttatttatttctctcattaccagtgcatacttacctatcatgttaaaacaagaaaaggagaaaagtggactttatatgtaacactttagaggcatagtggaatgtatattattattaacaaattagatagcaaagcattatatttgttatgctagaagactatggctgtgctaaaagaatataatatatgtcaacattgccagactgggcacttctcacaatattcccaaccaacaggaataaaactaaaggtcagaaaaaaaaaatagtaaattaaaacaaaattttatcacagcagaatttcttctcaaaaacaaaaaatrgaaattaggctataattaaagtaagtttttcaatggcttgttagccaagcaaggaaaaccattaccaacagtagttaattaaattatgttttattat

SEQ ID NO: 226288 - DNA, 356 bp, Homo sapiens
ttgccagactgggcacttctcacaatattcccaaccaacaggaataaaactaaaggtcagaaaaaaaaaatagtaaattaaaacaaaattttatcacagcagaatttcttctcaaaaacaaaaaatggaaattaggctataattaaagtaagtttttcaatggcttgttagccaagcaaggaaaaccattaccaacagtagttaattaaattatgttttattatggtaaccaaagatgtgtccatagaaaataaactttaaaaaagactattagcctttcagygagagtaattgctctaaaagttaaggacattgggagtaatatcaagtcattttggaaagaagggtgaatgatt

SEQ ID NO: 226289 - DNA, 356 bp, Homo sapiens
ttgccagactgggcacttctcacaatattcccaaccaacaggaataaaactaaaggtcagaaaaaaaaaatagtaaattaaaacaaaattttatcacagcagaatttcttctcaaaaacaaaaaatggaaattaggctataattaaagtaagtttttcaatggcttgttagccaagcaaggaaaaccattaccaacagtagttaattaaattatgttttattatggtaaccaaagatgtgtccatagaaaataaactttaaaaaagactattagcctttcagtragagtaattgctctaaaagttaaggacattgggagtaatatcaagtcattttggaaagaagggtgaatgatt

SEQ ID NO: 226290 - DNA, 573 bp, Homo sapiens
ccgctaagatgcgttacagttgatagtggcaaaaataactgtggagcagaaagacttgagttggacaaatttacaaagcttgttaaatgtcaggtgtttaaagcctgattatttattgtattatttattagcaggtactttgcagaaaatatttaaatctgtcatgttttagtgaackattatataatagtgtcagcagtgattttgacttgcatttgtggacttcatcatcaaatcctatgaatttttgttagatatagaggcagaatatactgaattgccattatacagagcaatttaatgacttggcagtggtaaagttttatttcagttttttgcgctgaggaatgagattgaaatttttctgaataatattgccctcaactgttaagtcaaatgcttaatagctttgaaagttggcttttcctatagatttcataatattttgtaacaaattcacctaaaattacaaggcagaacagtgattataagtgaaccttatactgtggtaaggtcacttctacaagaataatgaatcatgaaaatcaagagaaagaacaaatagtaggaaaa

SEQ ID NO: 226291 - DNA, 564 bp, Homo sapiens
tgaaaataggctcctaagattttaaggattktaaggtttctgctgataggtctactgttagcctaatagagttcccttcgaaagtgacctgaccctttcctctaactccgttaaggcttttattttcatgttgaccttggagaatctgataactgtgtcttggtgattgttgtcctgtatagtacttcacaaaggtactctaaatttcttgaattggcatgttggccactctaatgtgattgaggatatttttgtgtggattatattcccaacaacttttccaatttttttttttagatggagtctctctctgtcccacagggtggagttcaaaggcacaaccttggctcactgcaacctgcacctcccaggttcaagcaattatgctgcctcagcctcccaagtagttgggactacaggcatgcaccaccacacctggctaattacgtatttttagtagagactgggtttctacatgttggtcaggctggtctcgaactcccaacctcaggtgatcagcctgcctcagcctcccaaagtgctggggttagaggcatgagccac

SEQ ID NO: 226292 - DNA, 564 bp, Homo sapiens
tgaaaataggctcctaagattttaaggattgtaaggtttctgctgataggtctactgttagcctaatagagttcccttcgaaagtgacctgaccctttcctctaactccgttaaggcttttattttcatgttgaccttggagaatctgataactgtgtcttggtgattgttgtcctgtatagtacttcacaaaggtactctaaatttcttgaattggcatgttggccactctaatgtgattgaggatatttttgtgtggattatattcccaacaacttttccaatttttttttttagatggagtctctctctgtcccwcagggtggagttcaaaggcacaaccttggctcactgcaacctgcacctcccaggttcaagcaattatgctgcctcagcctcccaagtagttgggactacaggcatgcaccaccacacctggctaattacgtatttttagtagagactgggtttctacatgttggtcaggctggtctcgaactcccaacctcaggtgatcagcctgcctcagcctcccaaagtgctggggttagaggcatgagccac

SEQ ID NO: 226293 - DNA, 564 bp, Homo sapiens
tgaaaataggctcctaagattttaaggattgtaaggtttctgctgataggtctactgttagcctaatagagttcccttcgaaagtgacctgaccctttcctctaactccgttaaggcttttattttcatgttgaccttggagaatctgataactgtgtcttggtgattgttgtcctgtatagtacttcacaaaggtactctaaatttcttgaattggcatgttggccactctaatgtgattgaggatatttttgtgtggattatattcccaacaacttttccaatttttttttttagatggagtctctctctgtcccacaggstggagttcaaaggcacaaccttggctcactgcaacctgcacctcccaggttcaagcaattatgctgcctcagcctcccaagtagttgggactacaggcatgcaccaccacacctggctaattacgtatttttagtagagactgggtttctacatgttggtcaggctggtctcgaactcccaacctcaggtgatcagcctgcctcagcctcccaaagtgctggggttagaggcatgagccac

SEQ ID NO: 226294 - DNA, 564 bp, Homo sapiens
tgaaaataggctcctaagattttaaggattgtaaggtttctgctgataggtctactgttagcctaatagagttcccttcgaaagtgacctgaccctttcctctaactccgttaaggcttttattttcatgttgaccttggagaatctgataactgtgtcttggtgattgttgtcctgtatagtacttcacaaaggtactctaaatttcttgaattggcatgttggccactctaatgtgattgaggatatttttgtgtggattatattcccaacaacttttccaatttttttttttagatggagtctctctctgtcccacagggtggagttcaaaggcacaaycttggctcactgcaacctgcacctcccaggttcaagcaattatgctgcctcagcctcccaagtagttgggactacaggcatgcaccaccacacctggctaattacgtatttttagtagagactgggtttctacatgttggtcaggctggtctcgaactcccaacctcaggtgatcagcctgcctcagcctcccaaagtgctggggttagaggcatgagccac

SEQ ID NO: 226295 - DNA, 451 bp, Homo sapiens
tccttttttcccttcttcacctagccaactcctattcacacttcagaactcagctcaggtcagatgaggtggttcatgcctgyaattccagcactctgagaggccaagacaggaggattgcttgaacccaggagtttgagaccagcctgaacaacctgatgtaaccccatctctacaaaaaatacaaaaattagctgtgtgtggtggcatgtgcctgtagtcccaccctgaagtaggaggatcaattgagcatggaaggtcaaggctgcagtgagcagtgattgtgccactgcatttcagactgagctacagagaaaaaaaaactcagctcaagaaaaagcattcctccaagaagccctccctgttgttcctctggaatcccacagtccccatccttcccctgtagttctgaccccatggggctggcagtagatacatccaactttgtctc

SEQ ID NO: 226296 - DNA, 448 bp, Homo sapiens
cttttttcccttcttcacctagccaactcctattcacacttcagaactcagctcaggtcagatgaggtggttcatgcctgcaattccagcactctgagaggccaagacaggaggattgcttgaacccaggagtttgagaccagcctgaacaacmtgatgtaaccccatctctacaaaaaatacaaaaattagctgtgtgtggtggcatgtgcctgtagtcccaccctgaagtaggaggatcaattgagcatggaaggtcaaggctgcagtgagcagtgattgtgccactgcatttcagactgagctacagagaaaaaaaaactcagctcaagaaaaagcattcctccaagaagccctccctgttgttcctctggaatcccacagtccccatccttcccctgtagttctgaccccatggggctggcagtagatacatccaactttgtct

SEQ ID NO: 226297 - DNA, 429 bp, Homo sapiens
tcccttcttcacctagccaactcctattcacacttcagaactcagctcaggtcagatgaggtggttcatgcctgcaattccagcactctgagaggccaagacaggaggattgcttgaacccaggagtttgagaccagcctgaacaacctgatgtaaccccatctctacaaaaaatacaaaaattagctgtgtgtggtggcatgtgcctgtagtcccaccctgaagtaggaggatcaattgagcayggaaggtcaaggctgcagtgagcagtgattgtgccactgcatttcagactgagctacagagaaaaaaaaactcagctcaagaaaaagcattcctccaagaagccctccctgttgttcctctggaatcccacagtccccatccttcccctgtagttctgaccccatggggctggcagtagataca

SEQ ID NO: 226298 - DNA, 451 bp, Homo sapiens
tccttttttcccttcttcacctagccaactcctattcacacttcagaactcagctcaggtcagatgaggtggttcatgcctgcaattccagcactctgagaggccaagacaggaggattgcttgaacccaggagtttgagaccagcctgaacaacctgatgtaaccccatctctacaaaaaatacaaaaattagctgtgtgtggtggcatgtgcctgtagtcccaccctgaagtaggaggatcaattgagcatggaaggtcaaggctgcagtgagcagtgattgtgccactgcatttcagactgagctrcagagaaaaaaaaactcagctcaagaaaaagcattcctccaagaagccctccctgttgttcctctggaatcccacagtccccatccttcccctgtagttctgaccccatggggctggcagtagatacatccaactttgtctc

SEQ ID NO: 226299 - DNA, 452 bp, Homo sapiens
tcccttcttcacctagccaactcctattcacacttcagaactcagctcaggtcagatgaggtggttcatgcctgcaattccagcactctgagaggccaagacaggaggattgcttgaacccaggagtttgagaccagcctgaacaacctgatgtaaccccatctctacaaaaaatacaaaaattagctgtgtgtggtggcatgtgcctgtagtcccaccctgaagtaggaggatcaattgagcatggaaggtcaaggctgcagtgagcagtgattgtgccactgcatttcagactgagctacagagaaaaaaaaactcagctcaagaamaagcattcctccaagaagccctccctgttgttcctctggaatcccacagtccccatccttcccctgtagttctgaccccatggggctggcagtagatacatccaactttgtctcccctagact

SEQ ID NO: 226300 - DNA, 446 bp, Homo sapiens
tagccaactcctattcacacttcagaactcagctcaggtcagatgaggtggttcatgcctgcaattccagcactctgagaggccaagacaggaggattgcttgaacccaggagtttgagaccagcctgaacaacctgatgtaaccccatctctacaaaaaatacaaaaattagctgtgtgtggtggcatgtgcctgtagtcccaccctgaagtaggaggatcaattgagcatggaaggtcaaggctgcagtgagcagtgattgtgccactgcatttcagactgagctacagagaaaaaaaaactcagctcaagaaaaagcattcctccaagaagccctccctgttgttcctctggaatcccacagtccccawccttcccctgtagttctgaccccatggggctggcagtagatacatccaactttgtctcccctagactagacagc

SEQ ID NO: 226301 - DNA, 462 bp, Homo sapiens
tacctcacatgactagaagtccaggtgtaattcaatggctcaattaaattgtcacgkacctagatggttttcattttcctgctgttttatactcagcttgttgttgatagttgctaaattaattcacttaaataatcatttagcacttaaaatgtattaggcaatattctataagcacaggaaatacagcagtgagcaaaacaaagttcattgccttccttcacggagctgatattttagtggggataagggagaagacagtcaaacaaataggtagaatttatagggtgtcagaagacgttaagttttatggaaaaaaataaagccatggaagggacgggaagggctgggttggattattttaagtggggccatcagagaaggcctcagtgagctgatgtttgaatagaatcttaaaggaaataagaatgcaaaggcagacatttggggaaagagtattgc

SEQ ID NO: 226302 - DNA, 462 bp, Homo sapiens
tacctcacatgactagaagtccaggtgtaattcaatggctcaattaaattgtcacggacctagatggttttcattttcctgctgttttatactcagcttgttgttgatagttgctaaattaattcacttaaataatcatttagcacytaaaatgtattaggcaatattctataagcacaggaaatacagcagtgagcaaaacaaagttcattgccttccttcacggagctgatattttagtggggataagggagaagacagtcaaacaaataggtagaatttatagggtgtcagaagacgttaagttttatggaaaaaaataaagccatggaagggacgggaagggctgggttggattattttaagtggggccatcagagaaggcctcagtgagctgatgtttgaatagaatcttaaaggaaataagaatgcaaaggcagacatttggggaaagagtattgc

SEQ ID NO: 226303 - DNA, 462 bp, Homo sapiens
tacctcacatgactagaagtccaggtgtaattcaatggctcaattaaattgtcacggacctagatggttttcattttcctgctgttttatactcagcttgttgttgatagttgctaaattaattcacttaaataatcatttagcacttamaatgtattaggcaatattctataagcacaggaaatacagcagtgagcaaaacaaagttcattgccttccttcacggagctgatattttagtggggataagggagaagacagtcaaacaaataggtagaatttatagggtgtcagaagacgttaagttttatggaaaaaaataaagccatggaagggacgggaagggctgggttggattattttaagtggggccatcagagaaggcctcagtgagctgatgtttgaatagaatcttaaaggaaataagaatgcaaaggcagacatttggggaaagagtattgc

SEQ ID NO: 226304 - DNA, 462 bp, Homo sapiens
tacctcacatgactagaagtccaggtgtaattcaatggctcaattaaattgtcacggacctagatggttttcattttcctgctgttttatactcagcttgttgttgatagttgctaaattaattcacttaaataatcatttagcacttaaaatgtattaggcaatattctataagcacaggaaatacagcagtgagcaaaacaaagttcattgccttccttcacggagctgatattttagtggggataagggagaagacagtcaaacaaataggtagaatttataggktgtcagaagacgttaagttttatggaaaaaaataaagccatggaagggacgggaagggctgggttggattattttaagtggggccatcagagaaggcctcagtgagctgatgtttgaatagaatcttaaaggaaataagaatgcaaaggcagacatttggggaaagagtattgc

SEQ ID NO: 226305 - DNA, 602 bp, Homo sapiens
tgtggcatgtgagaaaaagaggattcgtagttcacaccaggttcaatgaccagtaaagatgaagtatatttgttcatgmacatctattttatttggaattaaaaacctttcctggaagcccttagcagattttttttttctttttttgtgacagagttttgcttcttgttgcccaggctggagtgcaatggcacgatctcggctcactgcaccgcatcctctgcctcccaggttcaagcgattctcctgcctcaacctcccgagtagctgggattacaggtgtgcaccaccatgcccggctaattttgtgtttttagtagagatagggtttctccgtattggaacaggcaggtgatctgcctgcttcagcctccgaaagtgttgggattacaggcatgagccactgcgctcggccaacagatttttttcttaaatcccatcaaccgtgactggtatccatccatgtcctaggtacaagtgagggtgagagagcaaggatgttcctttcagccatgatagtgggaggtgaactctgtaaggaacaggttgtgagtggggagtggctattggttaggtaactaatagtctatttgtcattgccc

SEQ ID NO: 226306 - DNA, 602 bp, Homo sapiens
tgtggcatgtgagaaaaagaggattcgtagttcacaccaggttcaatgaccagtaaagatgaagtatatttgttcatgaacatctattttatttggaattaaaaacctttcctggaagcccttagcagattttttttttctttttttgwgacagagttttgcttcttgttgcccaggctggagtgcaatggcacgatctcggctcactgcaccgcatcctctgcctcccaggttcaagcgattctcctgcctcaacctcccgagtagctgggattacaggtgtgcaccaccatgcccggctaattttgtgtttttagtagagatagggtttctccgtattggaacaggcaggtgatctgcctgcttcagcctccgaaagtgttgggattacaggcatgagccactgcgctcggccaacagatttttttcttaaatcccatcaaccgtgactggtatccatccatgtcctaggtacaagtgagggtgagagagcaaggatgttcctttcagccatgatagtgggaggtgaactctgtaaggaacaggttgtgagtggggagtggctattggttaggtaactaatagtctatttgtcattgccc

SEQ ID NO: 226307 - DNA, 602 bp, Homo sapiens
tgtggcatgtgagaaaaagaggattcgtagttcacaccaggttcaatgaccagtaaagatgaagtatatttgttcatgaacatctattttatttggaattaaaaacctttcctggaagcccttagcagattttttttttctttttttgtgacrgagttttgcttcttgttgcccaggctggagtgcaatggcacgatctcggctcactgcaccgcatcctctgcctcccaggttcaagcgattctcctgcctcaacctcccgagtagctgggattacaggtgtgcaccaccatgcccggctaattttgtgtttttagtagagatagggtttctccgtattggaacaggcaggtgatctgcctgcttcagcctccgaaagtgttgggattacaggcatgagccactgcgctcggccaacagatttttttcttaaatcccatcaaccgtgactggtatccatccatgtcctaggtacaagtgagggtgagagagcaaggatgttcctttcagccatgatagtgggaggtgaactctgtaaggaacaggttgtgagtggggagtggctattggttaggtaactaatagtctatttgtcattgccc

SEQ ID NO: 226308 - DNA, 602 bp, Homo sapiens
tgtggcatgtgagaaaaagaggattcgtagttcacaccaggttcaatgaccagtaaagatgaagtatatttgttcatgaacatctattttatttggaattaaaaacctttcctggaagcccttagcagattttttttttctttttttgtgacagagttttgcttcttgttgcccaggctggagtgcaatggcacgatctcggctcactgcaccgcatcctctgcctcccaggttcaagcgattctcctgcctcaacctcccgagtagctgggattacaggtgtgcaccaccatgcccggctaattttgtgtttttagtagagayagggtttctccgtattggaacaggcaggtgatctgcctgcttcagcctccgaaagtgttgggattacaggcatgagccactgcgctcggccaacagatttttttcttaaatcccatcaaccgtgactggtatccatccatgtcctaggtacaagtgagggtgagagagcaaggatgttcctttcagccatgatagtgggaggtgaactctgtaaggaacaggttgtgagtggggagtggctattggttaggtaactaatagtctatttgtcattgccc

SEQ ID NO: 226309 - DNA, 586 bp, Homo sapiens
tatttgaatcttcttttttcttgcataatctaactagcaatctatcatttgtatgtgtccttgcaaagaaccaactttttaattttgctgactccttgtatggcttttttggtcctgatttcattaccttattctctaacctttgttatttccttctactagctttgggtttggtttgttcttttctagtgtgtttggctattttagcttgttaatttgagrtctttctctctttttatgtaggcatttagtgttataaactctcctcttaacattgttttttctgtatcacagacgttttggtatgttatgtttctattttcatttgtttcaggaatttctttaaatttctgccttaattctgttatttacacaaaagtcattcacgagcagatgtttagtttccatgtacctctgtggttctgcgagttctcgatattgacttctaattttattccacagtggtctgagaagatacttaatatagttgtgatttttaaaaatttattgaggcttattttatgactgagcatgtggtcaattttggagaatgttccatgtgcaaatgagaaaaatgtacattcta

SEQ ID NO: 226310 - DNA, 586 bp, Homo sapiens
tatttgaatcttcttttttcttgcataatctaactagcaatctatcatttgtatgtgtccttgcaaagaaccaactttttaattttgctgactccttgtatggcttttttggtcctgatttcattaccttattctctaacctttgttatttccttctactagctttgggtttggtttgttcttttctagtgtgtttggctattttagcttgttaatttgagatctttctctctttttatgtaggcatttagtgttataaactytcctcttaacattgttttttctgtatcacagacgttttggtatgttatgtttctattttcatttgtttcaggaatttctttaaatttctgccttaattctgttatttacacaaaagtcattcacgagcagatgtttagtttccatgtacctctgtggttctgcgagttctcgatattgacttctaattttattccacagtggtctgagaagatacttaatatagttgtgatttttaaaaatttattgaggcttattttatgactgagcatgtggtcaattttggagaatgttccatgtgcaaatgagaaaaatgtacattcta

SEQ ID NO: 226311 - DNA, 586 bp, Homo sapiens
tatttgaatcttcttttttcttgcataatctaactagcaatctatcatttgtatgtgtccttgcaaagaaccaactttttaattttgctgactccttgtatggcttttttggtcctgatttcattaccttattctctaacctttgttatttccttctactagctttgggtttggtttgttcttttctagtgtgtttggctattttagcttgttaatttgagatctttctctctttttatgtaggcatttagtgttataaactctcctcttaacattgttttttctgtatcacagacgttttggtatgttatgtttctattttcatttgtttcaggaatttctttaaatttctgccttaattctgttatttacacaaaagtcattcacgagcagatgtttagtttccatgtacctctgtggttctgcgagttctcgatattgacttctaattttattscacagtggtctgagaagatacttaatatagttgtgatttttaaaaatttattgaggcttattttatgactgagcatgtggtcaattttggagaatgttccatgtgcaaatgagaaaaatgtacattcta

SEQ ID NO: 226312 - DNA, 586 bp, Homo sapiens
tatttgaatcttcttttttcttgcataatctaactagcaatctatcatttgtatgtgtccttgcaaagaaccaactttttaattttgctgactccttgtatggcttttttggtcctgatttcattaccttattctctaacctttgttatttccttctactagctttgggtttggtttgttcttttctagtgtgtttggctattttagcttgttaatttgagatctttctctctttttatgtaggcatttagtgttataaactctcctcttaacattgttttttctgtatcacagacgttttggtatgttatgtttctattttcatttgtttcaggaatttctttaaatttctgccttaattctgttatttacacaaaagtcattcacgagcagatgtttagtttccatgtacctctgtggttctgcgagttctcgatattgacttctaattttattccacagtggtctgagaagatacttaatatagttrtgatttttaaaaatttattgaggcttattttatgactgagcatgtggtcaattttggagaatgttccatgtgcaaatgagaaaaatgtacattcta

SEQ ID NO: 226313 - DNA, 537 bp, Homo sapiens
tggagaatgttccatgtgcaaatgagaaaaatgtacattctatggtttctgggtggagtattctgtagatatctattaggtctgtttggtcaagagcccaatttgagtccacagtttcattgttagttttctgcctaataatctgcctaactaatctgcttactgctgtcggtggggtgttgaagtcctccacaattattgtacagctgtgtatctcttttcttaggtctagtaatatttattctaaaaatctgggtgctccaatgttggctgcatatatatttaagacagttaagtcttcttgttgaattgaacacttcatcattatataatgycattctttgtattttttttactgttgttagtttaatgtctgttttatcttatacaagaatagcaatacctctccttttttgtttttcatttatgtgatgaatctttttccatccatttactttgagcctgttggtatcattacacatgagatgggtctctcaaaggcagcagaagtgtcttgtttttttatccagtttgcca

SEQ ID NO: 226314 - DNA, 617 bp, Homo sapiens
tgcatcagtaacaaagcatttaattktcagtgaggtttttcttccagggtgtttgtttcttttcctctttgcaaaggttaacagagattcaagtgacccaaaatatatgctcaacctgtgttttacttaagtaaacacagtaattttttaaaaaacattttgtggtttatggtattttgttttggccttcagttgatggggggggcggttgattttcatacatcgtgtaaaataagggtcctgtttctcgcttttgcatccggatatcatttttctcaaagctattcattgatcagactctgccttccacgttgtggtgttctttatcaaagtcagttgactgtgtccatatttgtgttgtttttgtcctccctgtttttgtccatagttctaggtatttctttttatgcaagtaccatatatctactgcataactacaacttggcaatttaatttgatatcaaggattatgggttctcactttgattgtatttctcaagattcctttagatattcattgcttttgtggttccctgtgatttttagcactatgtatttatttctgttaatttttttacaacataaagggccataattaggggtacatttttatacat

SEQ ID NO: 226315 - DNA, 617 bp, Homo sapiens
tgcatcagtaacaaagcatttaattgtcagtgaggtttttcttccagggtgtttgtttcttttcctctttgcaaaggttaacagagattcaagtgacccaaaatatatgctcaacctgtgttttacttaagtaaacacagtaattttttaaaaaacattttgtggtttatggtattttgttttggccttcagttgatggggggggcggttgattttcatacatcgtgtaaaataagggtcctgtttctcgcttttgcatccggatatcatttttctcaaagctattcattgatcagactctgccttccacgttgtggtgttctttatcaaagtcagttgactgtgtccatatttgtgttgtttttgtcctccctgtttttgtccatagttctaggtatttctttttatgcragtaccatatatctactgcataactacaacttggcaatttaatttgatatcaaggattatgggttctcactttgattgtatttctcaagattcctttagatattcattgcttttgtggttccctgtgatttttagcactatgtatttatttctgttaatttttttacaacataaagggccataattaggggtacatttttatacat

SEQ ID NO: 226316 - DNA, 617 bp, Homo sapiens
tgcatcagtaacaaagcatttaattgtcagtgaggtttttcttccagggtgtttgtttcttttcctctttgcaaaggttaacagagattcaagtgacccaaaatatatgctcaacctgtgttttacttaagtaaacacagtaattttttaaaaaacattttgtggtttatggtattttgttttggccttcagttgatggggggggcggttgattttcatacatcgtgtaaaataagggtcctgtttctcgcttttgcatccggatatcatttttctcaaagctattcattgatcagactctgccttccacgttgtggtgttctttatcaaagtcagttgactgtgtccatatttgtgttgtttttgtcctccctgtttttgtccatagttctaggtatttctttttatgcaagtaccatatatctactgcataactacaacttggcaatttaatttgatatcaaggattatgggttctcactttgattgtatttctcaagattcctttagatattcattgcttttgtggttccctgtgatttttagcactatgyatttatttctgttaatttttttacaacataaagggccataattaggggtacatttttatacat

SEQ ID NO: 226317 - DNA, 611 bp, Homo sapiens
atctcatgggccttttgctttgcatttctctgatgawtactgaggtagagaaatgtcctgtccgttggttgctataaaccttcctttgagatgtgtgttttcatgccctttgccctttcttcactgagtttttgttttgctgatttatttgcttaacatttttgaggtagatcctggaaatcagacttcatgagatgcatatgtggggacattttctcccattgtgtaggctttctgtttactctgttggtaatttcttctgctgttcagcagctcttttatatattaggtcccacttgtcaataattgttttagttgcacttgcttttggggacttaggcatatccatgctgtgccaaatcctctgtcaggaagtgtgtttcctaggttcccttgcaggcttttaatagtttgaggtcttgcatttacagctttcattcatcttgcgttaatttctgtacatggtgagacacaggggcccactgtttttcttctgcaactggctagccgttttatcccagcaccatctattgagaggagggagttctttctccaaagcttgtttgtgtggtttttgttgaagatgaagaaatagtgtcaacctggtgttt

SEQ ID NO: 226318 - DNA, 393 bp, Homo sapiens
ctggcaatcaccgatctgttgctttcctatagttttgccttttctagactaatatatgaatggaaccatacagtatagaatcttttccrtctgccttttttttgcttagcataatcgttttgagattggtccattcactagcttacagttaagtttcgttcaatttttggccagtatataaagctgctgtgagcatttatgtaacatgcttcgttgtagatgtatcttttcatgtttcttgggtaaatacctaggactggaatttctgacttgttggaaataatattcttaactttggaaaacagtttcacagtttcttaaaaagtgtctgtatacttttccatttctagagatctgagagttccatttgctgtacattgttgccagcactgg

SEQ ID NO: 226319 - DNA, 393 bp, Homo sapiens
ctggcaatcaccgatctgttgctttcctatagttttgccttttctagactaatatatgaatggaaccatacagtatagaatcttttccatctgccttttttttgcttagcataatsgttttgagattggtccattcactagcttacagttaagtttcgttcaatttttggccagtatataaagctgctgtgagcatttatgtaacatgcttcgttgtagatgtatcttttcatgtttcttgggtaaatacctaggactggaatttctgacttgttggaaataatattcttaactttggaaaacagtttcacagtttcttaaaaagtgtctgtatacttttccatttctagagatctgagagttccatttgctgtacattgttgccagcactgg

SEQ ID NO: 226320 - DNA, 393 bp, Homo sapiens
ctggcaatcaccgatctgttgctttcctatagttttgccttttctagactaatatatgaatggaaccatacagtatagaatcttttccatctgccttttttttgcttagcataatcgttttgagattggtccattcactagcttacagttaagtttcgttcaatttttggccagtatataaagctgctgtgagcatttatgtaacatgcttygttgtagatgtatcttttcatgtttcttgggtaaatacctaggactggaatttctgacttgttggaaataatattcttaactttggaaaacagtttcacagtttcttaaaaagtgtctgtatacttttccatttctagagatctgagagttccatttgctgtacattgttgccagcactgg

SEQ ID NO: 226321 - DNA, 570 bp, Homo sapiens
gcaaataatctgttcttatgttcttaaaagacatgatttaagtgtatccaactagattcttagtgagtctgtgtttactcctactcaaatgaaagcttttaaattctttcccactttttgaagtatttaactcttctgtaatawgcagtgttttcttattaactttaaagttgtgttaagcaaacgtgtttaaattaatatttcaatttcaaaaaccctaatttgaaacaataaattttatcattgtatacattatgagcttttaagaataaccaaaaaaatgagggtggatgttttatgtggaagttatgtgtatcccttttctgcttttggctaaggacagataccttagaattagctttatggcgcagtcatctatctgattatttcagttaatatcatcttaatataatacaggttacttgagaagaaaaactcttaacccagtattggagagatgccaggtaggatactaaccttgatagaggatttcatgtgagaaagaaaaaggaaaatattttccattaaaagttgagtttttatctaaaattctcttgattttctaaaaaa

SEQ ID NO: 226322 - DNA, 570 bp, Homo sapiens
gcaaataatctgttcttatgttcttaaaagacatgatttaagtgtatccaactagattcttagtgagtctgtgtttactcctactcaaatgaaagcttttaaattctttcccactttttgaagtatttaactcttctgtaatatgcagtgttttcttattaactttaaagttgtgttaagcaaacgtgtttaaattaatatttcaatttcaaaaaccctaatttgaaacaataaattttatcattgtatacattatgagcttttaagaataaccaaaaaaatgagggtggatgttttatgtggaagttatgtgtatcccttttctgcttttggctaaggacasataccttagaattagctttatggcgcagtcatctatctgattatttcagttaatatcatcttaatataatacaggttacttgagaagaaaaactcttaacccagtattggagagatgccaggtaggatactaaccttgatagaggatttcatgtgagaaagaaaaaggaaaatattttccattaaaagttgagtttttatctaaaattctcttgattttctaaaaaa

SEQ ID NO: 226323 - DNA, 570 bp, Homo sapiens
gcaaataatctgttcttatgttcttaaaagacatgatttaagtgtatccaactagattcttagtgagtctgtgtttactcctactcaaatgaaagcttttaaattctttcccactttttgaagtatttaactcttctgtaatatgcagtgttttcttattaactttaaagttgtgttaagcaaacgtgtttaaattaatatttcaatttcaaaaaccctaatttgaaacaataaattttatcattgtatacattatgagcttttaagaataaccaaaaaaatgagggtggatgttttatgtggaagttatgtgtatcccttttctgcttttggctaaggacagataccttagaattagctttatggcrcagtcatctatctgattatttcagttaatatcatcttaatataatacaggttacttgagaagaaaaactcttaacccagtattggagagatgccaggtaggatactaaccttgatagaggatttcatgtgagaaagaaaaaggaaaatattttccattaaaagttgagtttttatctaaaattctcttgattttctaaaaaa

SEQ ID NO: 226324 - DNA, 482 bp, Homo sapiens
tgtgtatcccttttctgcttttggctaaggacagataccttagaattagctttatggcgcagtcatctatctgattatttcagttaatatcatcttaatataatacaggttacttgagaagaaaaactcttaacccagtattggagagatgccaggtaggatactaaccttgatagaggatttcatgtgagaaagaaaaaggaaaatattttccattaaaagttgagtttttatctaaaattctcttrattttctaaaaaaacttaatttttctaaaaatatgttgaagaattatatataaaattcactttgctatatatatagagcaagtgaataataggtacacatttctaggaataccccaaatattagaacctatatactaaaatcacatcaggaaacaaataatagcgccccagacattccattcaagcctcctgttggttactattcctaactccccagagacatgcactatcatc

SEQ ID NO: 226325 - DNA, 540 bp, Homo sapiens
ctatttgttatctattattataaagcaactaccataaacttaatatcttaaaacagcacccatttacttaggtcagaactcagggcaggctcaactgtgctctctgtttaaggtctcacaggattcaaatcaaggtgttacctgggtggaggctccgggggtgaatcctcttctggggcattcagrtgtgggaggaattcagttctatgcagttgtagggctgagctcgccattttctttttcttttttttttttttttttttttttgagacagagtcttgctctgtcgcacaggctggagtgcggtggtgcagtctcggctcactgcaacctctgcctcctgggttcaagtgattctcatgcctcagcctcccaagtggccgggattacaggcgtgcaccaccatgccggctaattttttttttttttgtatttttagcagaaacggggttttaccgtgttagccagcatggtctcgatctcatgacctcgtgatcctcctgccttggcctcccaaagtgctgggattacaggcatgag

SEQ ID NO: 226326 - DNA, 540 bp, Homo sapiens
ctatttgttatctattattataaagcaactaccataaacttaatatcttaaaacagcacccatttacttaggtcagaactcagggcaggctcaactgtgctctctgtttaaggtctcacaggattcaaatcaaggtgttacctgggtggaggctccgggggtgaatcctcttctggggcattcagatgtgggaggaattcagttctatgcagttgtagggctgagctcgccattttctttttcttttttttttttttttttttttttgagacagagtcttgctctgtcgcacaggctggagtgcrgtggtgcagtctcggctcactgcaacctctgcctcctgggttcaagtgattctcatgcctcagcctcccaagtggccgggattacaggcgtgcaccaccatgccggctaattttttttttttttgtatttttagcagaaacggggttttaccgtgttagccagcatggtctcgatctcatgacctcgtgatcctcctgccttggcctcccaaagtgctgggattacaggcatgag

SEQ ID NO: 226327 - DNA, 426 bp, Homo sapiens
caggcgtgcaccaccatgccggctaattttttttttttttgtatttttagyagaaacggggttttaccgtgttagccagcatggtctcgatctcatgacctcgtgatcctcctgccttggcctcccaaagtgctgggattacaggcatgagccaccacaccctgctgagctcaccattttcttactgcctattggcttgggtcactctcagttcctagaggccactctttggtttttgctcctggctctttttatcttcaaagatagcaacagtgtattgaaatgttcccttgctatgaatttcccttttgctactagctggagaaaactccagctttcaaagaggttatttgattagattaggcaaatctcccttttgattaatgcaaaggcagttgattggtggctttaatcacatctgcagaa

SEQ ID NO: 226328 - DNA, 588 bp, Homo sapiens
ctgagctcgccattttctttttcttttttttttttttttttttttttgagacagagtcttgctctgtcgcacaggctggagtgcggtggtgcagtctcggctcactgcaacctctgcctcctgggttcaagtgattctcatgcctcagcctcccaagtggccgggattacaggcgtgcaccaccatgccggctaattttttttttttttgtatttttagcagaaacggggttttaccgtgttagccagsatggtctcgatctcatgacctcgtgatcctcctgccttggcctcccaaagtgctgggattacaggcatgagccaccacaccctgctgagctcaccattttcttactgcctattggcttgggtcactctcagttcctagaggccactctttggtttttgctcctggctctttttatcttcaaagatagcaacagtgtattgaaatgttcccttgctatgaatttcccttttgctactagctggagaaaactccagctttcaaagaggttatttgattagattaggcaaatctcccttttgattaatgcaaaggcagttgattggtggctttaatcacatc

SEQ ID NO: 226329 - DNA, 426 bp, Homo sapiens
caggcgtgcaccaccatgccggctaattttttttttttttgtatttttagcagaaacggggttttaccgtgttagccagcatggtctcgatctcatgacctcgtgatcctcctgccttggcctcccaaagtgctgggattacaggcatgagccaccacaccctgctgagctcaccattttcttactgcctattggcttgggtcactctcagttcctagaggccactctttggtttttgctcctggctctttttatcttcaaagatagcaacagtgtattgaaatgttcccttgctatgaatttcccttttgctactagctggagaaaactccagctttcaaagaggttatttgattagattaggcaaatctcccttttgattaatkcaaaggcagttgattggtggctttaatcacatctgcagaa

SEQ ID NO: 226330 - DNA, 544 bp, Homo sapiens
agtggaacagtgataatgactctttgggttttagattcctcatctgttgaatgaggattatgcytaattaaatgttagcttttattattagatatatgcataacttttcctttagaattttggtgattataatccctcctattttctccctttctggtactcatataaaacagacgttacaccttctggatcagattttcatgtcattctacctctttctcttgctttccatctttgttctttattactgcatcctgggagaatcctagttgcctaacactaaaaacagattggtgaagattaaaaacaaatttggagcatggggagccttacaatacttatttattggagcacgtagcctaaaaccattgctatagttggtacagaataaatactggataattaattaaatgaactgtggaatatttaacttcttggtatttttttatgatacaactttaatctcagaaattttgttcattctgttgtgttttatagatacattttgacagattatttcaatctattaaataaaagttttgaa

SEQ ID NO: 226331 - DNA, 544 bp, Homo sapiens
agtggaacagtgataatgactctttgggttttagattcctcatctgttgaatgaggattatgcctaattaaatgttagcttttattattagatatatrcataacttttcctttagaattttggtgattataatccctcctattttctccctttctggtactcatataaaacagacgttacaccttctggatcagattttcatgtcattctacctctttctcttgctttccatctttgttctttattactgcatcctgggagaatcctagttgcctaacactaaaaacagattggtgaagattaaaaacaaatttggagcatggggagccttacaatacttatttattggagcacgtagcctaaaaccattgctatagttggtacagaataaatactggataattaattaaatgaactgtggaatatttaacttcttggtatttttttatgatacaactttaatctcagaaattttgttcattctgttgtgttttatagatacattttgacagattatttcaatctattaaataaaagttttgaa

SEQ ID NO: 226332 - DNA, 451 bp, Homo sapiens
taagtcgctgttgttgatcatgtatataatgaaargtttatgggcacataacagttaaaagatatactaaagttatgagtactctgcctttttccaaaataggtttatggagactcataaaaatacataagcaataggataaaactaaaaataagtaaggaaatttggcaatggaaaatttagataggataaatatgaagataatagagagtccccccaaaaatatgtaattccagtcaaaccacaaatttggccccataccttttcaacagtcaatacaaagaaggaaatatgagcccttaatctgattcttactatttataacatcacttgatataatgatataataataagacatcccttgatagaatgcaatgaaaaattgtcttaaagtagccaccttgcagtagaaaaataccagtttcatagggctgtttcttatagcagcctt

SEQ ID NO: 226333 - DNA, 451 bp, Homo sapiens
taagtcgctgttgttgatcatgtatataatgaaaagtttatgggcacataacagttaaaagatatactaaagttatgagtactctgcctttttccaaaataggtttatggagactcataaaaatacataagcaataggataaaactaaaaataagtaaggaaatttggcaatggaaaatttagataggataartatgaagataatagagagtccccccaaaaatatgtaattccagtcaaaccacaaatttggccccataccttttcaacagtcaatacaaagaaggaaatatgagcccttaatctgattcttactatttataacatcacttgatataatgatataataataagacatcccttgatagaatgcaatgaaaaattgtcttaaagtagccaccttgcagtagaaaaataccagtttcatagggctgtttcttatagcagcctt

SEQ ID NO: 226334 - DNA, 270 bp, Homo sapiens
tgagttaggagtaaggttgacatctttttataaaagttgagaaatttaacaaaakcatgcatctcattataaagaaatccgctaaagagagtatctgtgaagaaggccaagattttcatcaggaaacacttttagggtgctctgtcataggtaaatggctggtcattgttgcaacattgttttcatgatgatacaaggatacgttaaccttgtctggaaattttacactaaaaatccatctaggagatacaaccagatatacttcctgaa

SEQ ID NO: 226335 - DNA, 270 bp, Homo sapiens
tgagttaggagtaaggttgacatctttttataaaagttgagaaatttaacaaaatcatgyatctcattataaagaaatccgctaaagagagtatctgtgaagaaggccaagattttcatcaggaaacacttttagggtgctctgtcataggtaaatggctggtcattgttgcaacattgttttcatgatgatacaaggatacgttaaccttgtctggaaattttacactaaaaatccatctaggagatacaaccagatatacttcctgaa

SEQ ID NO: 226336 - DNA, 270 bp, Homo sapiens
tgagttaggagtaaggttgacatctttttataaaagttgagaaatttaacaaaatcatgcatctcattataaagaaatccrctaaagagagtatctgtgaagaaggccaagattttcatcaggaaacacttttagggtgctctgtcataggtaaatggctggtcattgttgcaacattgttttcatgatgatacaaggatacgttaaccttgtctggaaattttacactaaaaatccatctaggagatacaaccagatatacttcctgaa

SEQ ID NO: 226337 - DNA, 424 bp, Homo sapiens
catagtagcctactaggtgggggtagtagagacatcatcaaggtgaacaaaggctagatcatgtaggcttctaagcaagggaaggagtttgggttctgttcggtctgcaatgagaagtttttgcaaggtttaaacatggaaatgctacacatcttaattcaccccctgttcctcaatgtatttactcatcatttagctttaattccttttacttcacttaagctttaactccagcctcttttctttggttatctttgtatttcttgacattaagtcctgctgcttttcttttrccctaaattctgtcagtcctctgacctttcttatctacctgccaatgatacggtctagcctctttggatgacatccgtgatttattttttctttccagagattctcttttatagacaaatcactcagccca

SEQ ID NO: 226338 - DNA, 424 bp, Homo sapiens
catagtagcctactaggtgggggtagtagagacatcatcaaggtgaacaaaggctagatcatgtaggcttctaagcaagggaaggagtttgggttctgttcggtctgcaatgagaagtttttgcaaggtttaaacatggaaatgctacacatcttaattcaccccctgttcctcaatgtatttactcatcatttagctttaattccttttacttcacttaagctttaactccagcctcttttctttggttatctttgtatttcttgacattaagtcctgctgcttttcttttaccctaaattctgtcagtcctctgacctttcttatctacctgccaatgatacggtctagcctctttggatgacatccrtgatttattttttctttccagagattctcttttatagacaaatcactcagccca

SEQ ID NO: 226339 - DNA, 444 bp, Homo sapiens
tgcagagtgaactttgttgtatataacagtgctgtgcagtgtaaatataatgtgagcaacataagtaatttttctagtgggtatgttaaaaatttgaggaaaaggaaacatttgggaacaattgtagtaaattttatttaattcagtaatccaaaatagtaatatttcaaattttgagatactttttccccattaagattttgraatccagtgtgcattttatgcttactgcatacctcgatttgaactaattacatttcacttgttcagaaaccacatgtcgctagtagctaccatggcaacttgaagtgtcaggggagcaaactctagaaagtttcacagaagcattttagtgttcctaggagagtataatagaaaaatgaattgattatctgataattagtttccgataattagttgagtattcccccaatttttaaaagt

SEQ ID NO: 226340 - DNA, 444 bp, Homo sapiens
tgcagagtgaactttgttgtatataacagtgctgtgcagtgtaaatataatgtgagcaacataagtaatttttctagtgggtatgttaaaaatttgaggaaaaggaaacatttgggaacaattgtagtaaattttatttaattcagtaatccaaaatagtaatatttcaaattttgagatactttttccccattaagattttggaatccagtgwgcattttatgcttactgcatacctcgatttgaactaattacatttcacttgttcagaaaccacatgtcgctagtagctaccatggcaacttgaagtgtcaggggagcaaactctagaaagtttcacagaagcattttagtgttcctaggagagtataatagaaaaatgaattgattatctgataattagtttccgataattagttgagtattcccccaatttttaaaagt

SEQ ID NO: 226341 - DNA, 444 bp, Homo sapiens
tgcagagtgaactttgttgtatataacagtgctgtgcagtgtaaatataatgtgagcaacataagtaatttttctagtgggtatgttaaaaatttgaggaaaaggaaacatttgggaacaattgtagtaaattttatttaattcagtaatccaaaatagtaatatttcaaattttgagatactttttccccattaagattttggaatccagtgtgcattttatgcttactgcatacctcgatttgaactaattacatttcacttgttcagaaaccacatgtcgctagtagctaccatggcaacttgaagtgtcaggggagcaaactctagaaagtttcacagaagcattttagtgttcctaggagagtataatagaaaaatgaattgattatctgataattagtttcygataattagttgagtattcccccaatttttaaaagt

SEQ ID NO: 226342 - DNA, 582 bp, Homo sapiens
ttaagaagcatcttagtctaattgataaaaacgtttccttaattttgtctcttgtctgattttgtaatttcaaaatatatttagcattcaaagaaaatgtttatgttacactgcaaagctttcttagttggtattttccttgttyggttctttgcagtgagcatatattgagcattaattaggtatccagcattatcattggcattaggaatagaaaattaaagaagacctgcttatggtcttaagtagatatagccacaaataattgcaaaactatacgattaaatttaatgtggttacatttagattaaataccctacagtgtttttattgatacctctttctgattagatgacaattcaatgtgaataacttcaaatgtctgaaaggttcatgatgcaaatcctttcaaatgattttactgtgtagtcagaaaaaatttaaattcttatacaacaatttcattgttttactgttaattatagcgaaggaagatgcaaactgtgcagtgtgcgacagcccgggagacctcttagatcagttcttttgtactacttgtggtcagcactatcatggaatgtg

SEQ ID NO: 226343 - DNA, 582 bp, Homo sapiens
ttaagaagcatcttagtctaattgataaaaacgtttccttaattttgtctcttgtctgattttgtaatttcaaaatatatttagcattcaaagaaaatgtttatgttacactgcaaagctttcttagttggtattttccttgtttggttctttgcagtgagcatatattgagcattaattaggtatccagcattatcattggcattaggaatagaaaattaaagaagacctgcttayggtcttaagtagatatagccacaaataattgcaaaactatacgattaaatttaatgtggttacatttagattaaataccctacagtgtttttattgatacctctttctgattagatgacaattcaatgtgaataacttcaaatgtctgaaaggttcatgatgcaaatcctttcaaatgattttactgtgtagtcagaaaaaatttaaattcttatacaacaatttcattgttttactgttaattatagcgaaggaagatgcaaactgtgcagtgtgcgacagcccgggagacctcttagatcagttcttttgtactacttgtggtcagcactatcatggaatgtg

SEQ ID NO: 226344 - DNA, 582 bp, Homo sapiens
ttaagaagcatcttagtctaattgataaaaacgtttccttaattttgtctcttgtctgattttgtaatttcaaaatatatttagcattcaaagaaaatgtttatgttacactgcaaagctttcttagttggtattttccttgtttggttctttgcagtgagcatatattgagcattaattaggtatccagcattatcattggcattaggaatagaaaattaaagaagacctgcttatggtcttaagtagatatagccamaaataattgcaaaactatacgattaaatttaatgtggttacatttagattaaataccctacagtgtttttattgatacctctttctgattagatgacaattcaatgtgaataacttcaaatgtctgaaaggttcatgatgcaaatcctttcaaatgattttactgtgtagtcagaaaaaatttaaattcttatacaacaatttcattgttttactgttaattatagcgaaggaagatgcaaactgtgcagtgtgcgacagcccgggagacctcttagatcagttcttttgtactacttgtggtcagcactatcatggaatgtg

SEQ ID NO: 226345 - DNA, 582 bp, Homo sapiens
ttaagaagcatcttagtctaattgataaaaacgtttccttaattttgtctcttgtctgattttgtaatttcaaaatatatttagcattcaaagaaaatgtttatgttacactgcaaagctttcttagttggtattttccttgtttggttctttgcagtgagcatatattgagcattaattaggtatccagcattatcattggcattaggaatagaaaattaaagaagacctgcttatggtcttaagtagatatagccacaaataattgcaaaactatacgattaaatttaatgtggttacatttagattaaatacmctacagtgtttttattgatacctctttctgattagatgacaattcaatgtgaataacttcaaatgtctgaaaggttcatgatgcaaatcctttcaaatgattttactgtgtagtcagaaaaaatttaaattcttatacaacaatttcattgttttactgttaattatagcgaaggaagatgcaaactgtgcagtgtgcgacagcccgggagacctcttagatcagttcttttgtactacttgtggtcagcactatcatggaatgtg

SEQ ID NO: 226346 - DNA, 433 bp, Homo sapiens
gaattctgggtgtctttctcarcttgttctgtctcccctttggtgtgcttcttttcgatttgctctttgtaatctgctattctcttttgagagtgacaggattacataatttctgggaatactattggatacttaatctttttattctgttctatgaaggcactatagtgtggtggttaaaagcttatgctgtggagtcaaactgcagttttttcagttactaaattgatgatctttggctacctgtttaacttccctaagtcagtgtatagaaggttaacggtacttacctcacagggatgttggatttaatgaagtggtatctataaagtgcccagcacaatgcctaacacaaagtaagtacagaaacagttaccatagagtttttcatggattgaaaggtttgtcctttgaaccatttgaagaatgatca

SEQ ID NO: 226347 - DNA, 433 bp, Homo sapiens
gaattctgggtgtctttctcagcttgttctgtctcccctttggtgtgcttcttttcgatttgctctttgtaatctgctattctcttttgagagtgacaggattacataatttctgggaatactattggatacttaatctttttattctgttctatgaaggcactatagtgtggtggttaaaagcttatgctgtggagtcaaactgyagttttttcagttactaaattgatgatctttggctacctgtttaacttccctaagtcagtgtatagaaggttaacggtacttacctcacagggatgttggatttaatgaagtggtatctataaagtgcccagcacaatgcctaacacaaagtaagtacagaaacagttaccatagagtttttcatggattgaaaggtttgtcctttgaaccatttgaagaatgatca

SEQ ID NO: 226348 - DNA, 433 bp, Homo sapiens
gaattctgggtgtctttctcagcttgttctgtctcccctttggtgtgcttcttttcgatttgctctttgtaatctgctattctcttttgagagtgacaggattacataatttctgggaatactattggatacttaatctttttattctgttctatgaaggcactatagtgtggtggttaaaagcttatgctgtggagtcaaactgcagttttttcagttactaaattgatgatctttggctacctgtttaacttccctaagtcagtgtatagaaggttaacggtacttacctcacagggatgttggatttartgaagtggtatctataaagtgcccagcacaatgcctaacacaaagtaagtacagaaacagttaccatagagtttttcatggattgaaaggtttgtcctttgaaccatttgaagaatgatca

SEQ ID NO: 226349 - DNA, 433 bp, Homo sapiens
gaattctgggtgtctttctcagcttgttctgtctcccctttggtgtgcttcttttcgatttgctctttgtaatctgctattctcttttgagagtgacaggattacataatttctgggaatactattggatacttaatctttttattctgttctatgaaggcactatagtgtggtggttaaaagcttatgctgtggagtcaaactgcagttttttcagttactaaattgatgatctttggctacctgtttaacttccctaagtcagtgtatagaaggttaacggtacttacctcacagggatgttggatttaatgaagtggtatctataaagtgcccagcacaatgcctaacacaaagtaagtacagaaacagttaccatagagtttttcwtggattgaaaggtttgtcctttgaaccatttgaagaatgatca

SEQ ID NO: 226350 - DNA, 423 bp, Homo sapiens
atttttcatctaagaataagaggatatattgctctttcagtgaaggtagcatgttgtatatgttcttttgcatgttgcttttttcatgtaataaaatctggaaatcacttccaggcaagttaggcaagttcaagrgatctcattctccttttaaacagctgcatagcactccattgtgtatctgtgctatgggttactcaaccagtggcctgtgctttggtatttcagtagtttatgatattttgcattataaatgattttacactccctggctttgtgcatgtgtgtttttgaattctcagggacaaatctgtagggtaaattcctaggattattgcctcaggagtgtacacatatgtagctttgttagatactgtaaaattccctttttgggggcttatggcactttgcattgccaccaga

SEQ ID NO: 226351 - DNA, 423 bp, Homo sapiens
atttttcatctaagaataagaggatatattgctctttcagtgaaggtagcatgttgtatatgttcttttgcatgttgcttttttcatgtaataaaatctggaaatcacttccaggcaagttaggcaagttcaagggatctcattctccttttaaacagctgcatagcactccattgtgtatctgtgctatsggttactcaaccagtggcctgtgctttggtatttcagtagtttatgatattttgcattataaatgattttacactccctggctttgtgcatgtgtgtttttgaattctcagggacaaatctgtagggtaaattcctaggattattgcctcaggagtgtacacatatgtagctttgttagatactgtaaaattccctttttgggggcttatggcactttgcattgccaccaga

SEQ ID NO: 226352 - DNA, 423 bp, Homo sapiens
atttttcatctaagaataagaggatatattgctctttcagtgaaggtagcatgttgtatatgttcttttgcatgttgcttttttcatgtaataaaatctggaaatcacttccaggcaagttaggcaagttcaagggatctcattctccttttaaacagctgcatagcactccattgtgtatctgtgctatgggttacwcaaccagtggcctgtgctttggtatttcagtagtttatgatattttgcattataaatgattttacactccctggctttgtgcatgtgtgtttttgaattctcagggacaaatctgtagggtaaattcctaggattattgcctcaggagtgtacacatatgtagctttgttagatactgtaaaattccctttttgggggcttatggcactttgcattgccaccaga

SEQ ID NO: 226353 - DNA, 423 bp, Homo sapiens
atttttcatctaagaataagaggatatattgctctttcagtgaaggtagcatgttgtatatgttcttttgcatgttgcttttttcatgtaataaaatctggaaatcacttccaggcaagttaggcaagttcaagggatctcattctccttttaaacagctgcatagcactccattgtgtatctgtgctatgggttactcaaccagtggcctgtgctttggtatttcagtagtttatgatattttgcattataaatgattttacactccctggctttgtgcatgtgtgtttttgaattctcagggacaaatctgtagggtaaattcctaggattattgcctcaggagtgtacacatatgtagctttgttagatactgtraaattccctttttgggggcttatggcactttgcattgccaccaga

SEQ ID NO: 226354 - DNA, 482 bp, Homo sapiens
ggcaaatctataaagttatcatttgagacagagtcgtcattttcattatcagcagacataagcaaggcagatgtgtcttcctccccaacaccttcttcagacttgccttcgcatgacatgctgcataattacccttcagctcttagttcstctgctggaaacatcatgccaacaacttaacatctcagtcactccaaaaattggcatgggtaaaccagctattactaagagaaaattttctcctggtagacctcggtccaaacaggtagggtgattttaatgatattgacagaaaagatattggaacaattctataaaatcagaaggtatatgtgtagctttggtgtggatggcaactttttctgtcttcagatagaacttcagtgtaatgttgattatgtgtttcagccattattttttaaatgctgttaatgaagaatgccatttattaaatttgaagggatcttatttggaatttcaac

SEQ ID NO: 226355 - DNA, 482 bp, Homo sapiens
ggcaaatctataaagttatcatttgagacagagtcgtcattttcattatcagcagacataagcaaggcagatgtgtcttcctccccaacaccttcttcagacttgccttcgcatgacatgctgcataattacccttcagctcttagttcctctgctggaaacatcatgccaacaacttaacatctcagtcactccaaaaattggcatgggtaaaccagctattactaagagaaaattttctcctggtagacctcggtccaaacaggtaggktgattttaatgatattgacagaaaagatattggaacaattctataaaatcagaaggtatatgtgtagctttggtgtggatggcaactttttctgtcttcagatagaacttcagtgtaatgttgattatgtgtttcagccattattttttaaatgctgttaatgaagaatgccatttattaaatttgaagggatcttatttggaatttcaac

SEQ ID NO: 226356 - DNA, 314 bp, Homo sapiens
gtctaatagaaatatgatgcagaccatatgtgtaatttaaatttttctagtagttacacttaaaaaaaggtgaaataaattttaatrtattttatttaacctggtatattcaaaacaatatttcagcatttagtataaaaatgaacaagatgctttatacttaaaacatcagttctggctagctgcattagaagtgctcggaggtcacatatgatggtggctgccttattgcacgatgcaagacaaaacattttgagaaatacaaaaacagcagttccagaattattggtgaaattaaaataccaaaagaattc

SEQ ID NO: 226357 - DNA, 314 bp, Homo sapiens
gtctaatagaaatatgatgcagaccatatgtgtaatttaaatttttctagtagttacacttaaaaaaaggtgaaataaattttaatgtattttatttaacctggtatattcaaaacaatatttcagcatttagtataaaaatgaacaagatgctttatacttaaaacatcagttctggctagctgcattagaagtgctcggaggtcacatatgatggtggctgccttattgcamgatgcaagacaaaacattttgagaaatacaaaaacagcagttccagaattattggtgaaattaaaataccaaaagaattc

SEQ ID NO: 226358 - DNA, 618 bp, Homo sapiens
tggaatatttcaggtgctatttagttagaaatatgatgcttattttctttatgacatgtttgagatatatctcaaatgtatgatttagaacctaactgactacaggaatagtaacacatttttctgatggctgtgaatagaataagattccttttgttttttgttttttttgcctattacaatagatgcaggatttcacaaagatgaggaaaaattagacatgataaggtagaagtaacagacagcaaattggatattgtttcatacaaattgtcctaatgacctagttgtattttctcatcttttattgaagttatwtattcataaataatttagtatttcattttttagcatttaaaatatttttttttttatagagatgggggtcttgctgtgtagaccaggctggttacaaagtcctggcctcaagtgatcctcccatctcgggtctcccagagtgctgggattacaggtgtgagccccacagcgcctggcccattttcaacatttctataggtatatgtgctttgcgacctgggtttaagaaagtggttattgacactgacacatattgtaatcaactcagtagattttagaacatcaagctaatgaccctac

SEQ ID NO: 226359 - DNA, 618 bp, Homo sapiens
tggaatatttcaggtgctatttagttagaaatatgatgcttattttctttatgacatgtttgagatatatctcaaatgtatgatttagaacctaactgactacaggaatagtaacacatttttctgatggctgtgaatagaataagattccttttgttttttgttttttttgcctattacaatagatgcaggatttcacaaagatgaggaaaaattagacatgataaggtagaagtaacagacagcaaattggatattgtttcatacaaattgtcctaatgacctagttgtattttctcatcttttattgaagttatatattcataaataatttagtatttcatttttyagcatttaaaatatttttttttttatagagatgggggtcttgctgtgtagaccaggctggttacaaagtcctggcctcaagtgatcctcccatctcgggtctcccagagtgctgggattacaggtgtgagccccacagcgcctggcccattttcaacatttctataggtatatgtgctttgcgacctgggtttaagaaagtggttattgacactgacacatattgtaatcaactcagtagattttagaacatcaagctaatgaccctac

SEQ ID NO: 226360 - DNA, 382 bp, Homo sapiens
aaatgagaaaagagaaatggcttttgacaacacwtccctactaatagtagggaagaagacataggtacagattcaagttgattggaaattatgaaagtgaggtaattgacctgcagtggttgctgctcagtgaaatcagcatagtgattacatgagctaggttagagatttgatgggtaagaaagaacacctgagggtaatcctggaagggaaaaaaataaagtgtttgctggagagaatgagttggattgctggacttcaatgagtgtgggttgagtttgtgacttaaaaatgaaaccaggctattgcttgtgtggcttatctcaaaatactgttattccatagaaaatctcttaccccaagagtagtcacattcttattt

SEQ ID NO: 226361 - DNA, 382 bp, Homo sapiens
aaatgagaaaagagaaatggcttttgacaacacatccctactaatagtagggaagaagacataggtacagattcaagttgattkgaaattatgaaagtgaggtaattgacctgcagtggttgctgctcagtgaaatcagcatagtgattacatgagctaggttagagatttgatgggtaagaaagaacacctgagggtaatcctggaagggaaaaaaataaagtgtttgctggagagaatgagttggattgctggacttcaatgagtgtgggttgagtttgtgacttaaaaatgaaaccaggctattgcttgtgtggcttatctcaaaatactgttattccatagaaaatctcttaccccaagagtagtcacattcttattt

SEQ ID NO: 226362 - DNA, 382 bp, Homo sapiens
aaatgagaaaagagaaatggcttttgacaacacatccctactaatagtagggaagaagacataggtacagattcaagttgattggaaattatgaaagtgaggtaattgacctgcagtggttgctgctcagtgaaatcagcatagtgattacatgagctaggttagagatttgatgggtaagaaagaacacctgagggtaatcctggaagggaaaaaaataaagtgtttgctggagagaatgagttggattgctggacttcaatgwgtgtgggttgagtttgtgacttaaaaatgaaaccaggctattgcttgtgtggcttatctcaaaatactgttattccatagaaaatctcttaccccaagagtagtcacattcttattt

SEQ ID NO: 226363 - DNA, 373 bp, Homo sapiens
tattatttaaatatgactccccacccccacttgaatctagggacattgtagttttctactgcagactttatttctggtttatactgggaatatattgtttatcgttttcagtgaaagcattcactggttaaatttccttttaaaaataataatggatctttacaatttctttgagctgctcagtgtgtataatgtgttgaattttctgtaagtggttgggaggtagaaatagatactttatctctattttagccatttccawaattatatatctcaatagtcttgtcaatgcatcattagtcctatgactgaattaatgattacttttagtagtcacttaatttcttactgatgatgatgattctacttctgt

SEQ ID NO: 226364 - DNA, 428 bp, Homo sapiens
attgttattctagaccttagcaaaaatatatgttttgattatgaattttctgaagctttccagttaagtgtaaaacaagtgaaaaatataacttcgtattttgtgtattttgctttttataggtgtctactgcagatatttcatcaaataaggatgatgaagaaaactctatgcacactacggttgtgttgttttctagyagtgacaaattcactttgaatcaggtttgaacttgacaatttactgtcttcctcattgaattcctccttgcacatttctgctttatctcatctacacagaagtgatccaatatttagctatagagctatattagttaagaaggtatttttaaagtaaaatttgtaggtttttagcttagtctccatttaaaatatgttctgttttcttaacttcaggatatgtgtgta

SEQ ID NO: 226365 - DNA, 428 bp, Homo sapiens
attgttattctagaccttagcaaaaatatatgttttgattatgaattttctgaagctttccagttaagtgtaaaacaagtgaaaaatataacttcgtattttgtgtattttgctttttataggtgtctactgcagatatttcatcaaataaggatgatgaagaaaactctatgcacactacggttgtgttgttttctagcagtgacaaattcactttgaatcaggtttgaacttgamaatttactgtcttcctcattgaattcctccttgcacatttctgctttatctcatctacacagaagtgatccaatatttagctatagagctatattagttaagaaggtatttttaaagtaaaatttgtaggtttttagcttagtctccatttaaaatatgttctgttttcttaacttcaggatatgtgtgta

SEQ ID NO: 226366 - DNA, 444 bp, Homo sapiens
ttctagcagtgacaaattcactttgaatcaggtttgaacttgacaatttactgtcttcctcattgaattcctccttgcacatttctgctttatctcatctacacagaagtgatccaatatttagctatagagctatattagttaagaaggtatttttaaagtaaaatttgtaggtttttagcttagtctccatttaaaatatgttctgttttcttaacttcargatatgtgtgtagtttgtggcagttttggccaaggagcagaaggaggattacttgcctgttctcagtgtggtcagtgttaccatccatagtttgtcagtattaaggtaaacatccttaaattgagttaacaaatatgtattgaatttttatttggttttagtagtaacatgagctcctagttctcacaattaagtattatgattattaaacatatgtgaca

SEQ ID NO: 226367 - DNA, 444 bp, Homo sapiens
ttctagcagtgacaaattcactttgaatcaggtttgaacttgacaatttactgtcttcctcattgaattcctccttgcacatttctgctttatctcatctacacagaagtgatccaatatttagctatagagctatattagttaagaaggtatttttaaagtaaaatttgtaggtttttagcttagtctccatttaaaatatgttctgttttcttaacttcaggatatgtgtgtagtttgtggcagttttggccaaggagcagaaggaggattacttgcctgttctcagtgtggtcagtgttaccatccatagtttgtcagtattaaggtaaacatccttaaattgagttaacaaatatgtaytgaatttttatttggttttagtagtaacatgagctcctagttctcacaattaagtattatgattattaaacatatgtgaca

SEQ ID NO: 226368 - DNA, 424 bp, Homo sapiens
aggtttttagcttagtctccatttaaaatatgttctgttttcttaacttcaggatatgtgtgtagtttgtggcagttttggccaaggagcagaaggaggattacttgcctgttctcagtgtggtcagtgttaccatccatagtttgtcagtattaaggtaaacatccttaaattgagttaacaaatatgtattgaatttttatttggttttagtagtaacatgagctccyagttctcacaattaagtattatgattattaaacatatgtgacagtatttaagcactttaaatactgcttttaagggtttcctatctcaagaaatttgctcctctataaatcttatattgtactaatatcccgcttttgtcttgaaaaagtaaaacataaaaatatatgcatttaatttaaaagacaatttatac

SEQ ID NO: 226369 - DNA, 552 bp, Homo sapiens
aaatgatttcacagttaactgagagaaagtcagtataagttgaaaagtttataagtgttaataagaatgaaaaatatgtacaatatgcaattactattaaatataatttgcccatagttgcacactgatttcattatcatggcagttaagtatcagagcttctggtttctcactcttcattcatgtattcagcaaccatgtgctaaggtactaggacaagcactggattaacaagawaaagatgatacggtccacccctcaacaactgtatgctataatccgaaaaaacaagcaggcaattcccatacagagtcatacatacaatgacaggcataagacaccacttactggaagacatagaagggatactagcccaggtttgtgttaatattgtaggctttttggtagaggcaattcataggttgatatctgaaggggaaggaaaacacatgtaggatagagggaagaagtaaatgcgaagagctggaggtgaggacgatcactgtggagctctgtgtagtctagtttggctggatgctagaacaaaggtgc

SEQ ID NO: 226370 - DNA, 552 bp, Homo sapiens
aaatgatttcacagttaactgagagaaagtcagtataagttgaaaagtttataagtgttaataagaatgaaaaatatgtacaatatgcaattactattaaatataatttgcccatagttgcacactgatttcattatcatggcagttaagtatcagagcttctggtttctcactcttcattcatgtattcagcaaccatgtgctaaggtactaggacaagcactggattaacaagaaaaagatgatacggtscacccctcaacaactgtatgctataatccgaaaaaacaagcaggcaattcccatacagagtcatacatacaatgacaggcataagacaccacttactggaagacatagaagggatactagcccaggtttgtgttaatattgtaggctttttggtagaggcaattcataggttgatatctgaaggggaaggaaaacacatgtaggatagagggaagaagtaaatgcgaagagctggaggtgaggacgatcactgtggagctctgtgtagtctagtttggctggatgctagaacaaaggtgc

SEQ ID NO: 226371 - DNA, 552 bp, Homo sapiens
aaatgatttcacagttaactgagagaaagtcagtataagttgaaaagtttataagtgttaataagaatgaaaaatatgtacaatatgcaattactattaaatataatttgcccatagttgcacactgatttcattatcatggcagttaagtatcagagcttctggtttctcactcttcattcatgtattcagcaaccatgtgctaaggtactaggacaagcactggattaacaagaaaaagatgatacggtccacccctcaacaactgtatgctataatccgaaaaaacaarcaggcaattcccatacagagtcatacatacaatgacaggcataagacaccacttactggaagacatagaagggatactagcccaggtttgtgttaatattgtaggctttttggtagaggcaattcataggttgatatctgaaggggaaggaaaacacatgtaggatagagggaagaagtaaatgcgaagagctggaggtgaggacgatcactgtggagctctgtgtagtctagtttggctggatgctagaacaaaggtgc

SEQ ID NO: 226372 - DNA, 552 bp, Homo sapiens
aaatgatttcacagttaactgagagaaagtcagtataagttgaaaagtttataagtgttaataagaatgaaaaatatgtacaatatgcaattactattaaatataatttgcccatagttgcacactgatttcattatcatggcagttaagtatcagagcttctggtttctcactcttcattcatgtattcagcaaccatgtgctaaggtactaggacaagcactggattaacaagaaaaagatgatacggtccacccctcaacaactgtatgctataatccgaaaaaacaagcaggcaattcccatacagagtcatacatacaatgacaggcataagacaccacttactggaagacatagaagggatactagcccaggtttgtgtyaatattgtaggctttttggtagaggcaattcataggttgatatctgaaggggaaggaaaacacatgtaggatagagggaagaagtaaatgcgaagagctggaggtgaggacgatcactgtggagctctgtgtagtctagtttggctggatgctagaacaaaggtgc

SEQ ID NO: 226373 - DNA, 492 bp, Homo sapiens
cattcagtctacaaccacatgattgcatttctgtttccagtctttgcctactctctctttgcttctccagtttggaatgcagcgttgtgttttcatctgtcagagcagcaagctgtccactrtaacaggctatcgtttttgctaatgtttccccattccgttttagagccttttgaaggtcttcacgctttcttttcacaatttcaaattcttttaagtatttattttccaggttttggtttcttattgtgtctttttccagcctgagccaggcaatttcatcttgcatcaagcagttttcatgcagcaggtcttctttttcatcagtttcagaaatctaaataaaacaaagaaaacttgtaactagtatccaataggataacatattgtgattgtttctgaaattaaataataacccgtacatttatacaatgagaggttgccataactgtatatctaaatgggaaaaaagttgagtcaaaacctcaaacc

SEQ ID NO: 226374 - DNA, 492 bp, Homo sapiens
cattcagtctacaaccacatgattgcatttctgtttccagtctttgcctactctctctttgcttctccagtttggaatgcagcgttgtgttttcatctgtcagagcagcaagctgtccactgtaacaggctatcrtttttgctaatgtttccccattccgttttagagccttttgaaggtcttcacgctttcttttcacaatttcaaattcttttaagtatttattttccaggttttggtttcttattgtgtctttttccagcctgagccaggcaatttcatcttgcatcaagcagttttcatgcagcaggtcttctttttcatcagtttcagaaatctaaataaaacaaagaaaacttgtaactagtatccaataggataacatattgtgattgtttctgaaattaaataataacccgtacatttatacaatgagaggttgccataactgtatatctaaatgggaaaaaagttgagtcaaaacctcaaacc

SEQ ID NO: 226375 - DNA, 492 bp, Homo sapiens
cattcagtctacaaccacatgattgcatttctgtttccagtctttgcctactctctctttgcttctccagtttggaatgcagcgttgtgttttcatctgtcagagcagcaagctgtccactgtaacaggctatcgtttttgctaatgtttccccattccgttttagagccttttgaaggtcttcacgctttcttttcacaatttcaaattcttttaagtatttattttccaggttttggtttcttattgtgtctttttccagcctgagccaggcaatttcatcttgcatcaagcrgttttcatgcagcaggtcttctttttcatcagtttcagaaatctaaataaaacaaagaaaacttgtaactagtatccaataggataacatattgtgattgtttctgaaattaaataataacccgtacatttatacaatgagaggttgccataactgtatatctaaatgggaaaaaagttgagtcaaaacctcaaacc

SEQ ID NO: 226376 - DNA, 357 bp, Homo sapiens
gagaagctgaaaagtctaaaaaccactgcacctcttctcctccaaagtgtcacagctcctccacagcaatggaacaaagctggatggagaatgactttgatgagttgacagaagtaggcttcagaaggttggtaataamaaacttctccaagctaaaggaggatgttcgaacccatcgcaaggaagctaaaaaccttgaaaaaagattagatgaatggctaactgtaataaacggcatagagaagaccttaaatgaccaaatggaggtgaaaacaatggcacaagaactacgtgatgcatgcacaagcttcagtagccgatttgatcaagtggaagaaaggggatcagtgattgaag

SEQ ID NO: 226377 - DNA, 357 bp, Homo sapiens
gagaagctgaaaagtctaaaaaccactgcacctcttctcctccaaagtgtcacagctcctccacagcaatggaacaaagctggatggagaatgactttgatgagttgacagaagtaggcttcagaaggttggtaataaaaaacttctccaagctaaaggaggatgttcgamcccatcgcaaggaagctaaaaaccttgaaaaaagattagatgaatggctaactgtaataaacggcatagagaagaccttaaatgaccaaatggaggtgaaaacaatggcacaagaactacgtgatgcatgcacaagcttcagtagccgatttgatcaagtggaagaaaggggatcagtgattgaag

SEQ ID NO: 226378 - DNA, 357 bp, Homo sapiens
gagaagctgaaaagtctaaaaaccactgcacctcttctcctccaaagtgtcacagctcctccacagcaatggaacaaagctggatggagaatgactttgatgagttgacagaagtaggcttcagaaggttggtaataaaaaacttctccaagctaaaggaggatgttcgaacccatygcaaggaagctaaaaaccttgaaaaaagattagatgaatggctaactgtaataaacggcatagagaagaccttaaatgaccaaatggaggtgaaaacaatggcacaagaactacgtgatgcatgcacaagcttcagtagccgatttgatcaagtggaagaaaggggatcagtgattgaag

SEQ ID NO: 226379 - DNA, 357 bp, Homo sapiens
gagaagctgaaaagtctaaaaaccactgcacctcttctcctccaaagtgtcacagctcctccacagcaatggaacaaagctggatggagaatgactttgatgagttgacagaagtaggcttcagaaggttggtaataaaaaacttctccaagctaaaggaggatgttcgaacccatcgcaaggaagctaaaaaccttgaaaaaagattagatgaatggctaactgkaataaacggcatagagaagaccttaaatgaccaaatggaggtgaaaacaatggcacaagaactacgtgatgcatgcacaagcttcagtagccgatttgatcaagtggaagaaaggggatcagtgattgaag

SEQ ID NO: 226380 - DNA, 570 bp, Homo sapiens
cctccctgtattccttcttaaaccacaaagggtccagaaatagctacaggagaagacaaaatagtagtcatttcttttaaaacaaaacccacaggaagagtgggttcaaacataagatatacaccttacaccaagtcagaattaagtgctctgatgtttggatttcctgatctgactcaagacaccttaggtttgccaaggaattccaaataatgyttaagacctatgattcagggttttcaaaccaatatcagctaactgatttactagtcctccaaaacaaagccaaagagtgctacaaagtagtgaattagaaacagctttagcagattttaacaaactaaagtgcaaatgggagagagaagtgtagggagttttgcaactgcctctgtgggaatttaccacagctattccccctaatcctatagactaggcaaaatacaacaatgtaatatataccccagcaaaaccatacctgattattatatcacatttatttttattttttgtgggtatacagtagttgtgtgtataaatggggtatatgagatactttgatacaggcatgca

SEQ ID NO: 226381 - DNA, 570 bp, Homo sapiens
cctccctgtattccttcttaaaccacaaagggtccagaaatagctacaggagaagacaaaatagtagtcatttcttttaaaacaaaacccacaggaagagtgggttcaaacataagatatacaccttacaccaagtcagaattaagtgctctgatgtttggatttcctgatctgactcaagacaccttaggtttgccaaggaattccaaataatgtttaagacctawgattcagggttttcaaaccaatatcagctaactgatttactagtcctccaaaacaaagccaaagagtgctacaaagtagtgaattagaaacagctttagcagattttaacaaactaaagtgcaaatgggagagagaagtgtagggagttttgcaactgcctctgtgggaatttaccacagctattccccctaatcctatagactaggcaaaatacaacaatgtaatatataccccagcaaaaccatacctgattattatatcacatttatttttattttttgtgggtatacagtagttgtgtgtataaatggggtatatgagatactttgatacaggcatgca

SEQ ID NO: 226382 - DNA, 218 bp, Homo sapiens
tcttttgcatgtagatatccagtttccaagcatgatttattgaagagattgtcttttccctaatttaagttcttggcacctttgttgaaaatgagttcagtgaaaatgtataaaatttttttctgggttatctgttcaattccattggtttatktgtctatttttatgccagtaccaggctgctacagttactatagctttgtaatataatttgaagt

SEQ ID NO: 226383 - DNA, 454 bp, Homo sapiens
tctgacctttcaagttgcttttacaaaagaaatgggatgtccattgaacatctgttttagatctgatttccccaatctgggattattaaaatgaggaggctatttttttcccagtatataaatgattctaatactttttgctgtaaaacttttggagtctctctgctaaattatgttccagtttcttagcttgggattcaagtcataaatatactaggtctgtcttacctttcartgcttttatttgttcccttttgaacatggctgaattttacctttctgtctccctgcccgccattcttgctacccctccttcctttttccactctcatctttttcccattttccagtctgtaaatcctacctatccttttattttttaaattacaatatctcattctgttacttaggcaggagtgtggtggcacaatcatagttgactgcagcttcgaat

SEQ ID NO: 226384 - DNA, 290 bp, Homo sapiens
actaggtctgtcttacctttcagtgcttttatttgttcccttttgaacatggctgaattttacctttctgtctccctgcccgccattcttgctacccctccttcctttttccactctcatctttttcccattttccagtctgtaaatcctacctatccttttattttttaaattacaatatctcattctgttacttaggcaggagtgyggtggcacaatcatagttgactgcagcttcgaatttctgggcccaaatgaccctcccatctcagcctcccaagtagctggga

SEQ ID NO: 226385 - DNA, 540 bp, Homo sapiens
gacttacctatctacctatctatccatctaatgtattatgtaatctatgtatttatctattgaatctataatctatgtatcaattatctatctacctatcatctatccctgtagctatctctctatccagctatctatctatacatctatctatccatccatctaatgtattatctatctatgtatttatctattgaatctataacctatgtatcaactatctacctatcatctatctgtctggctagctagctatctacctatcatctctctactatctatctatcatctactatatatccatcatctatcatccatccatctatgcatscatccatctatccatctatatatgtatctattgaatctataacgtatgtatcaattatctacctatcatctatccctgtagctatcaacttacctatctacctatctaatgtattatctaatctatgtatttctctattgaatctataatctatgtatcaattatctacttatcatctaactgtttggctagctagccgtctatctacc

SEQ ID NO: 226386 - DNA, 398 bp, Homo sapiens
atcatctatgtatctatctatccacctacctatctatcaataaatattgatagataggtaggtggatagataaacagccctgatgagggctctcctttgcctccaagatggcgccttcctgatgaatcttccagaagaaacaccttgtctttacatgaagaccacctatctatctatgtctgtgtctatccattcatccatctatccattcatctatytaatgtattctctgtgtatttatctattaaatctataatctatgtatcaattatctatctgtcatctatctatctgtctagctagctgtctatctgcctatcctctctctactaccaggagttcatcggtgggtcttgatcctctcacttggtaagtatcatcacagcttagaatctcac

SEQ ID NO: 226387 - DNA, 542 bp, Homo sapiens
tactttttgccagctagtactgctgtgctgcgtaggaggtctaatgtaggcccctctctttcagcaaccatacagagtgatcatcatgataacgattactaagcatcttccccgtcccaggattctgcagacacaataactggatattaccccccaaagaaacatcagttctggaagcttcattattaagcaagcaggattttccttgtgtcatcattcacagagggtttatcttgcaagctgaaatataagcaccaggagaaaaccacagaaattctacctgaaagggagagtgttactcaacatcctggaggttttgttcttgaaatakcagtttgccttttgcttatgaccaaatccatgaatctagtgttgaaattcataactataactttggtatttctaagtatcttttagcaatcttgaattttaaaatttttctaaactttaaatatttgctgctttcacatatgtaagaatattcccagaaataatacatgccaagcaaattaaaaattaaaaagtaaatttagagtaaattt

SEQ ID NO: 226388 - DNA, 542 bp, Homo sapiens
tactttttgccagctagtactgctgtgctgcgtaggaggtctaatgtaggcccctctctttcagcaaccatacagagtgatcatcatgataacgattactaagcatcttccccgtcccaggattctgcagacacaataactggatattaccccccaaagaaacatcagttctggaagcttcattattaagcaagcaggattttccttgtgtcatcattcacagagggtttatcttgcaagctgaaatataagcaccaggagaaaaccacagaaattctacctgaaagggagagtgttactcaacatcctggaggttttgttcttgaaatatcagtttgccttttgcttatgaccaaatccatgaatctartgttgaaattcataactataactttggtatttctaagtatcttttagcaatcttgaattttaaaatttttctaaactttaaatatttgctgctttcacatatgtaagaatattcccagaaataatacatgccaagcaaattaaaaattaaaaagtaaatttagagtaaattt

SEQ ID NO: 226389 - DNA, 652 bp, Homo sapiens
ataataaaaaagtgctatttcctttctcactacaaaaatattttttaagccaaaaatgtgtgtgctcttaaggttaatttgggagaactacagaaatctctttattaaggaacatggctttcggaattttcccaagatatcagttttaattctattctcttatttttcccatattttagtgtacttcttttaattggcaaataaaattgtatacatttatcatgtttagttttttgaatatataagtttcccaaattctgtcactttaccttcaaatatagctcttgaaactcctctccctcattacctctcaaaattgtctctttgtattaacagcctcagctctggttccttaatttctcactcaaacattaattttctgactggtyctctaggaagttagaaacttattctcttttaaattaccaatatctagcacagcctggctcatagtaagcattcaacaaatgttggttaactaaaatttgggactagccagaagccaaactggatcagaaaatatctatttctatatatagatctcaggatccaaaagcctaattctcacaaaaaaaggccaactcattgttcaaatgaagcaacaaagaagatgcccataccattattagttctgactgcaactgacacctgg

SEQ ID NO: 226390 - DNA, 608 bp, Homo sapiens
ccaagactatggacaagttagtttacttcattgaaccataattcctaatattggaaaaataattgaaaagcatatcacwtgttcagttaagtgcttaggaaatagtgggcccccccaaaaatcgcgattattgttttttataattatgttgtcttctatatttcttcatatgacagcacaaaatattgcatcaaagagaatgactccttatggtactgctcattagatatctgaggattccctttccaaatgtccttatagctcttataaaagcatttacaacaatctagtagacacccttcttcaaaaagtagcaaaaaacaaacaaacaaaaaagcatagacctccactttgtgaggagatagatgttttcagtagcctatttcattttgtcacttctgcaatagcgtcagtattgtcagagttaagagccaagccctagtcatacacagctgatggataaggcagccagactgtggatacaattgctgcaggagtagctcaatgccatctggagtatgtccctggtgaatcatgccctatatgtagctgagagctgccaactcataagtgctggagaaaattggaggaagtaagttagaaaggga

SEQ ID NO: 226391 - DNA, 577 bp, Homo sapiens
atataattcttgcattatttcaaagtttttcttttttattatatctgttattgtgatctgtaatcagcgatctttgatgttactattggattcttttggggtgccacaaactgtgcccatagtaaacagtaaacctaaaaaaaaaaaaaagaatggcctaatacacagaatttaagagttttactttatattctttttcagcttttgttttagattcagggtgtatatgtacaggtttgttacctgggtatattacatgatgctgaggtttggtgtacaaatgatcccatcactaatgtactgagcatagtaaccaaaagctagcttttcaacacttaccttctcttctccccactctagtaattcccagtgtctattgttgccatctytatgtccataagtaccctatatttatatccacttataagtgagaacatgcagtatttgattttctgttcctgcattaattcacttaggataatggccctcaactgcattcatgttgttgcaaaggacatgattttgttcttttttatggctgcatagtattccatggtgtatatgtaccacaatttct

SEQ ID NO: 226392 - DNA, 467 bp, Homo sapiens
taatttaggcaatagtctgaggatcatctgccacattggttctcaaccttggctgcacattggaaatacgtgggggtctttagaacctactgatgcctgggtccctcctccagagattttgatataattggcctgggttgaggtgttgtaaaagctccccaggtgattctaattgcagccaagtttgaaattcattgatgtaaagagagtctcaatatatggagaatgaaatcagaggtagccaaacccagcaggcctttcctagggttttttccagctctaccgacccatgctcctgattgcctgcacttcagccactctggatatctcttggttgctctaattcccytcactcttctcacttagcctctttgcacatttgagtccttctacctatgtcagcatctgctacctgtctacatcaatctctagttaattcctatttagctttatatatatcattccaa

SEQ ID NO: 226393 - DNA, 614 bp, Homo sapiens
gagcttctccgctgcatgactatagcccctgtctggagtcactatggctcagtatgcaactgtaatatgctgtggcagaggctttgccccagccctactccatcagttgaactaagcattcatttatggcttgctgaaggggatgccaggtcttcaccttttgtggtctgagaattggtctaagctttgcatagtagctttatcacatgcaaagccgaaggcagaagtcaccacatcagttttcrtggttagagaaggaacttatccctggcatgatggtgatggagtggttggggtgcaggtcttgaggcttatctgttctgtctgagcaccgggcccacacaggtctccatggaaccactcagaaggtcagttttactagaggcagtttcttccccttagggggaactgcctgtggagatcagtcttggaaaattcacttttatcaactttacacaacttgttcatgatttatcagactttttatatgttcctagattcaagttgcttatattttgtttaggatttttacactgatattattaaatatattaaatacataattaatgtgattattaaatgtgatttttttcccttcatactgttcttgtcag

SEQ ID NO: 226394 - DNA, 559 bp, Homo sapiens
tcaaaaaaaaatactggaagaaatttttcttaaactaaagaaagaccagagaagtcatattgctagggccttctggctgcaaaacaggaggagttgaagaaagaccacaaccagatgcatcaaatctcagaattacaaggatgaagatagccttctaaatctttcagagggataagaaattaccaacagagaaatgaaaatataattgacataaaatwctttatcaagaattctcaagtgtgagaaaaaaaataatagtgcctttaaatttctcaggaaaaatgtttttgaatataagtcgaataatggctactaaagattcttatgacctaatacccaaacctgtaaatatgttgccttacatagcaaaagggactctgcagatgtgattaaggttacagaccttgagatgtggagattatatccttgcgggcatcactttttttggagagcctttgctggctggatcagaaagagatgtgacaattaggagggtcagagaggtgtgtagtgagcattaggcctgtcattgtgactttgaaaatggaaggaagccaaa

SEQ ID NO: 226395 - DNA, 559 bp, Homo sapiens
tcaaaaaaaaatactggaagaaatttttcttaaactaaagaaagaccagagaagtcatattgctagggccttctggctgcaaaacaggaggagttgaagaaagaccacaaccagatgcatcaaatctcagaattacaaggatgaagatagccttctaaatctttcagagggataagaaattaccaacagagaaatgaaaatataattgacataaaatactttatcaagaattctcaagtgtgagaaaaaaaataatagtgcctttaaatttctcaggaaaaatgtttttgaatataagtcgaataatggctactaaagatkcttatgacctaatacccaaacctgtaaatatgttgccttacatagcaaaagggactctgcagatgtgattaaggttacagaccttgagatgtggagattatatccttgcgggcatcactttttttggagagcctttgctggctggatcagaaagagatgtgacaattaggagggtcagagaggtgtgtagtgagcattaggcctgtcattgtgactttgaaaatggaaggaagccaaa

SEQ ID NO: 226396 - DNA, 648 bp, Homo sapiens
ccagactacaagagaataataattgaggaagaagcaggagcatggaatatagatttctttcttccttaaaaagtatctattggtggtttggcagtggcttaaagaagaggaaacaaaatgactgctcaaaagggtaaccgaaaaaaggagatttttacttacttgcttgcttacattaggatgaggaaaacttgagcagagttggggggtcacagtattactggacaagaggtaaagtagataaaagagagctttctgggagagcaaggtgttgagcaacactgggagggagtgttttaggccacagaggaccagccttggagagaagggtattattgtctggggcaagagtaggaaagaagagaaagtcactcatattcaagtgatatggtttggctctgtgttcccacccaaatctcatcttgaattgtactctcataattcccacatgttgggaagaacccsgtgggagataattgaatcatgggggcagtttcccccatattgttcttgtggtagtgagtaagtcttacgagatctgatggttttatcaggggtttctgtttttgcatccttctcattttctcttgctgccaccatgttaagaagtgccttttgcctcccgccacgattctgaggcctccccag

SEQ ID NO: 226397 - DNA, 606 bp, Homo sapiens
tacgagcaggttaacatccctaaaataaagcaggagccagyaataacagggtcgggcaacagaaagctacagctggtaaggaagtcagcagcaccacaccattagatacagcaattactttagatacagggtggggtcccagctctgcagcacacactctcaggctggagaaacaggctgtgcttctgggaaagcattctccatcctggggtacagatccctggagtcttaagaaggcgttgcagaaaaattaagcattatctcgtctgagtcccctaggctgggttagaagttgcttgcctgattattgcgtgcagctggaatggtcttggtacagggagggatctgggctgaggaggatgggctgagaggggagaggggagagggaagaggggagaaggggacccgcacacatgcgcactgtagcagaagctgcaactttgccggttgcagggctgttgtgagatagggtgcttgctactgtgactggggccccgccttgcagatctgcttgtcatcacttaccctctcttggtggtttgggcatgcacttctttgggggaacaaacaaaattttaaaagttcctgagtttgacagcagcagcc

SEQ ID NO: 226398 - DNA, 606 bp, Homo sapiens
tacgagcaggttaacatccctaaaataaagcaggagccagcaataacagggtcgggcaacagaaagctacagctggtaaggaagtcagcagcaccacaccattagatacagcaattactttagatacagggtggggtcccagctctgcagcacacactctcaggctggagaaacaggctgtgcttctgggaaagcattctccatcctggggtacagatccctggagycttaagaaggcgttgcagaaaaattaagcattatctcgtctgagtcccctaggctgggttagaagttgcttgcctgattattgcgtgcagctggaatggtcttggtacagggagggatctgggctgaggaggatgggctgagaggggagaggggagagggaagaggggagaaggggacccgcacacatgcgcactgtagcagaagctgcaactttgccggttgcagggctgttgtgagatagggtgcttgctactgtgactggggccccgccttgcagatctgcttgtcatcacttaccctctcttggtggtttgggcatgcacttctttgggggaacaaacaaaattttaaaagttcctgagtttgacagcagcagcc

SEQ ID NO: 226399 - DNA, 613 bp, Homo sapiens
aaccaacagcctaggccactgaaacaattgcagacactataaatgaggattgcagctgaataaaatgcagagaccatgctactgagtccatctaaaaccaaagccaacacaccacacttaaacaacatcctatgactcatgtgcaggaaacagtctctccctctgaaaactactccaccaaatttgaaaagatgactgttccactggtatgcacagatatcaacaaaggaacacacacacacacacacacacacacacacacacacacacagaaaaagtaaggaaacacgacacgtctaaaggagcaaaataattctccagtaacagaatccaaagaaaagaacaaaattccagaaagggaatttaaaataatgaycttaagaaactcagtgagatacaagagaatacagccaatattcaatacaattcaatgaaattaggaaaacaacagagattgatatcatgagaagaaccaaacgaaaatcttgacactgatgagtgccttgaatgaaataaaaatacaattgagagtttcaacaacagactaaatcaaacagaataaagaatttctgaactttaagatagttcttttgaaataactcagaggtaagac

SEQ ID NO: 226400 - DNA, 613 bp, Homo sapiens
aaccaacagcctaggccactgaaacaattgcagacactataaatgaggattgcagctgaataaaatgcagagaccatgctactgagtccatctaaaaccaaagccaacacaccacacttaaacaacatcctatgactcatgtgcaggaaacagtctctccctctgaaaactactccaccaaatttgaaaagatgactgttccactggtatgcacagatatcaacaaaggaacacacacacacacacacacacacacacacacacacacacagaaaaagtaaggaaacacgacacgtctaaaggagcaaaataattctccagtaacagaatccaaagaaaagaacaaaattccagaaagggaatttaaaataatgatcttaagaaactcagtgagatacaagagaatacagccaatattcaatacaattcaatgaaattaggaaaacaacagagattgatatcatgagaagaaccaaacgaaaatcttgacactgatgartgccttgaatgaaataaaaatacaattgagagtttcaacaacagactaaatcaaacagaataaagaatttctgaactttaagatagttcttttgaaataactcagaggtaagac

SEQ ID NO: 226401 - DNA, 520 bp, Homo sapiens
atataatccaggttattttagaaatagaacaccagtgatgtgtttgtgacaacttctactggtcctgtaatctagttagaattgggtggatgaccccttataaatcctaactagattacaggaccagtaatgtgtcagtcttaattaattcattggtttatttattcattcattctttcattcatttttttacttgttcatccattcatcaaaagtatttttagtactttacctactattagctgggcttcagttaaataattttgtatttttttttccttaatagaacttatgatctggtggaaggacatgataactaatcaaataatcacaaatatgtatttcagaggtaattattctaaaggaaagttatctgacttggtttttctgggaagtcttgcctaaatgagataatttttgaagtgggtgagctggccacttagggcttgggagaggttaacagaatgaggccacaggtaacttcttgrgcagcatgtgcaagggccttggggacagaggg

SEQ ID NO: 226402 - DNA, 547 bp, Homo sapiens
tttggaggggacaaatacccaaactgtatcrcaacccaaattaaagtatccaggtatactttttcccttatcaaattgctttaaaacctgcaatatcctgtgctggtgagaatgaggagaagtgagaactttcatacacttttgctggaattgcatatataaattttgacacagaaatttcatatctagaaacttatcccatggaaataacagcacgacgtttttattatttaatttcatctcaggagcatttccccatactagtaaatagtttttaaaacaattattatttttttctaccaattgtgtatttcttctttccatggtgatgacataatttctttaagtattttcctattattgggcatttgtgtcattttgaatattctgcttttaggtttaagagacatataaccaaatcagataatgagtattgtttagatcctgattgaaacaaatagtacaaaggcattttcaagattacctggaaattttgaatatttaaagggtgttcaatgatacaaaattagtattaatttgttttgtg

SEQ ID NO: 226403 - DNA, 517 bp, Homo sapiens
ggtaaataagagcactgagaaattcagctttccaggtatgatttcaccatccagggctttactttttttcacattgtgggtatgtgcccttccatgaatataacttggaagtggagaggatgagaaagtgaatttagtatgcctaaaaagaacacaacagcatttttttttttttggtctcagctgaatgttcaactcattaaaagaacaagaaacatttcatggattactgatarcagtacctctgtcacagacaggaggccagatttgagccataaatggagccattgtgtgcaataacaaaggtgagatattcatcctcaaaactgatccacctcctgccaaagacaggtacacacaatgaatacacaaaaacagcctagtttttttcagagagccacactaaaaaacaagttattaggacattaatcatcagttgaaaacaacattccagaagaaaacagcaaaatcaacaaaaatatgtgtactgctgatatgcttgcaaagctcaacacac

SEQ ID NO: 226404 - DNA, 449 bp, Homo sapiens
aatcatgtttccttagcatctctggaactggtccacttaattctatttgcctaatttaccccaccatcatttcttgcctgtattattgcagcaaggactgatatccttttccccccttgtccttctagcccactcttcaatttgcagccagcgtgagcatttgctgtcacaaatctgaccatctttctctttagttagctttgaagtctcagctttttagtgtgtcttccaaaccccttcttgttctgactcctgctgaccttccagcttcatttctcacctcaacctacctccttccccagaagtactgggatattcttagytccttaaatgcaatatacttttcttatttgatgtcttttatcctctccacctgcaacatttttctttctctgctctctgtcctctttctttttctttttctcccttctgataggaagcattctttg

SEQ ID NO: 226405 - DNA, 449 bp, Homo sapiens
aatcatgtttccttagcatctctggaactggtccacttaattctatttgcctaatttaccccaccatcatttcttgcctgtattattgcagcaaggactgatatccttttccccccttgtccttctagcccactcttcaatttgcagccagcgtgagcatttgctgtcacaaatctgaccatctttctctttagttagctttgaagtctcagctttttagtgtgtcttccaaaccccttcttgttctgactcctgctgaccttccagcttcatttctcacctcaacctacctccttccccagaagtactgggatattcttagctccttaaatgcaatatacttttcttatttgatgtcttttatcctctccacctgcaacatttttcyttctctgctctctgtcctctttctttttctttttctcccttctgataggaagcattctttg

SEQ ID NO: 226406 - DNA, 540 bp, Homo sapiens
ataattggatgagctattctctatgaaaaccacatttttatcataactggaaaagatctgttataaactgaacaacagagaaatgttaagaccttttatatctgtcycccttgacactacactgagagctatgctgttgttatgttttccgaatccctctgtggcttctcttgtaagtgagcaggacactacagaagctgacatgcgaagggccctgataaaccagaatgctttttccatacagtaaattcgaatggttatttgagctcaacagtgttttctctggtgtttgaaaagcaaaaatagaaggatccaccaaacactgcaagtcatggaaactatagacgaattgggtgagttgagggccctgtgatggcagagagatgtctttatccgaggcaatggtgcacaggtagacaagcacactacagcagctctgagacatttccagagccttccttcgaaagggcatccctaaacaacctgagtctgtagaggtggataatggtgtgtgcattatgagtatgcacacaaaggaga

SEQ ID NO: 226407 - DNA, 540 bp, Homo sapiens
ataattggatgagctattctctatgaaaaccacatttttatcataactggaaaagatctgttataaactgaacaacagagaaatgttaagaccttttatatctgtcccccttgacactacactgagagctatgctgttgttatgttttccgaatccctctgtggcttctcttgtaagtgagcaggacactacagaagctgacatgcgaagggccctgataaaccagaatgctttttccatacagtaaattcgaatggttatttgagctcaacagtgttttctctggtgtttgaaaagcaaaaatagaaggatccaccaaacactgcaagtcatggaaactatagacgaattgggtgagttgrgggccctgtgatggcagagagatgtctttatccgaggcaatggtgcacaggtagacaagcacactacagcagctctgagacatttccagagccttccttcgaaagggcatccctaaacaacctgagtctgtagaggtggataatggtgtgtgcattatgagtatgcacacaaaggaga

SEQ ID NO: 226408 - DNA, 540 bp, Homo sapiens
ataattggatgagctattctctatgaaaaccacatttttatcataactggaaaagatctgttataaactgaacaacagagaaatgttaagaccttttatatctgtcccccttgacactacactgagagctatgctgttgttatgttttccgaatccctctgtggcttctcttgtaagtgagcaggacactacagaagctgacatgcgaagggccctgataaaccagaatgctttttccatacagtaaattcgaatggttatttgagctcaacagtgttttctctggtgtttgaaaagcaaaaatagaaggatccaccaaacactgcaagtcatggaaactatagacgaattgggtgagttgagggccctgtgatggcagagagatrtctttatccgaggcaatggtgcacaggtagacaagcacactacagcagctctgagacatttccagagccttccttcgaaagggcatccctaaacaacctgagtctgtagaggtggataatggtgtgtgcattatgagtatgcacacaaaggaga

SEQ ID NO: 226409 - DNA, 631 bp, Homo sapiens
agatgtaatccccaccttcatgagttttgaaatctataagatttgtaaaaataatatatcaacccattaaaatttaaaaagctaaattttgaaagcaacaaaagttttaaatgattgatattacaaaggattctatgggaccctatgtaatttcaagtaagttatgtgtcgtgcaaccattactggaataagtgttgaaagaaaggagaaatcattttcttggtggaaaatattagggaggcacaggagartttaatgaatgttgccacctgagtaactcacccacctagagattgcccccacttcttccattaataccctcacatagctcttcatgcgagtcagattccattcaccagttctcttctcacttcataaatttttttcaacatccttagcttagcaaaataaagatcatcactgttaccaattagatcaaatacttaaaaggccaaagcaaagctcagtcttaacaaataagagaattatgaatctatgaacttggagggaatcttgtaggtaaacacaaagtatgataaatagcagcaagtctttatgaagcacattaacataaaatgacttatttgatcccctcaccaactctgaaaatgggaaagggcaaagaaaggtc

SEQ ID NO: 226410 - DNA, 631 bp, Homo sapiens
agatgtaatccccaccttcatgagttttgaaatctataagatttgtaaaaataatatatcaacccattaaaatttaaaaagctaaattttgaaagcaacaaaagttttaaatgattgatattacaaaggattctatgggaccctatgtaatttcaagtaagttatgtgtcgtgcaaccattactggaataagtgttgaaagaaaggagaaatcattttcttggtggaaaatattagggaggcacaggagaatttaatgaatgttgccacctgagtaactcacccacctagagattgcccccacttcttccattaataccctcacatagctcttcatgcgagtcagattccattcaccagttctcttctcacttcataaatttttttcaacatccttagcttagcaaaataaagatcatcactgttaccaattagatcaaatacttaaaaggccaaagcaaagctcagtcttaacaaataagagaattatgaatctatgaacttggagggaatcttgtaggtaaacacaaagtatgataaatagcarcaagtctttatgaagcacattaacataaaatgacttatttgatcccctcaccaactctgaaaatgggaaagggcaaagaaaggtc

SEQ ID NO: 226411 - DNA, 404 bp, Homo sapiens
accaacgcttcagatagtgacatctcaagtgttgttagagaattcaaagacataacttcaccacccaccttccgcagggcccagcattccagtggccctcagtcagctctcccctcttctgccctactacatgccttttctcacattttacactcactgactgtgttgcttgtgaattatttcctagcatcttccattttcctagtttatttgatatttagaagtagaggatgtatcctccgtgaaacttcccccagatcctcagcaaatcctgcaacgtttcatctgtagacccatcctgtaaacagtcacggacatgcagtttatcatcaattcgtctctagtaattctatgaattctgggccagtctstccacccagaatgtagtattctaaatgctggat

SEQ ID NO: 226412 - DNA, 597 bp, Homo sapiens
ttttctctttttttctttttttcttcccttttgattttattctttttttgtttctaggttagagattcaaatagaactttctctgcttccgtgaatttttaaaattggtttatacatttgacaaagctacttacatgcatattttattggaaaaaaaggtttagaaaagaggattacataaagattctcacactgcatgcagccaacagcatttgtgaagcactttttttcagagctctgtcttgagtgctagagtaggtgacaaaatggctcaagtaagagtgaaatgggttcaccttccccggaaacaggctgagagagcctgtggctaaaatgagatcggatgagtggaatgaaatactatctggaccttccaggattgcacaccccagccatagcaccccaaggactgggragaggcagatcacattcaaattaattttgtacatgactaaaaaaaaaaaaatctgtagaaatgtgcatggtttcctaagtaaatatgggtcttagaaattataagtggaagcacatgacttagtgaatagagttctagaaaccaagaacagaagtcttgttcttagttctttcaccacttcc

SEQ ID NO: 226413 - DNA, 487 bp, Homo sapiens
ctttcaatgacatcgcagaagagagagagatgtctgtgattttgatcatgcaaggctgctcataaccttttggctgtgcaattttcagcctgggaaatcagatagaaaggattcttacatcctttaggaggctggcagccttggtatcaacactgtggcttctggcttgaaagcaggggctcttctgagatacctggacaaagcctatgtaatgcacatattttcttcctaaagcacatcacagctttcttgagcttargaacactacatagcactttaccctgtatttgggtgaaattgccaaaaaaaaatgcacacaaatgtgagaaacatggcactaactgtgaaaaggacacttgttaacattatgagagctgaaacaagaaggtagaacttcactttgttcaacttaagctaggaatgtgtccattgggtgactcagatttttttctccaatctacgccggtgcatgtccctgaataactgc

SEQ ID NO: 226414 - DNA, 449 bp, Homo sapiens
ataaaaaagagtagtaggaagtaaaggtgaggttgggaattataccaggcccagagatttaaaactgatgctctggataagtgtcttttgatagaaaaataatgggaagcagtaaygcaaatcacagatgtaatttataattctctagtagccacattaagaaatgtaaaagaagtaagttaaattaattgtaataatatgttttattcaactcaacgtatccaaaatattatcatttccacatgtaatcaatataaaaattgttgatgcagtaattctttttaaaataactattcaaaatctgctgtgcattttacactttcagggtatttgaatttggaccagccacatttcaagtgatcagtagtcacgtgtggctactgactgacttgttgaatggcacagctcttgagagtaaggatctgctcatagtttgttaacgaaagagt

SEQ ID NO: 226415 - DNA, 323 bp, Homo sapiens
gtcaccataggaagagcatctgcagaagtcttaatgacttcttgtctgtgattcagagyccagtgggatacgagcgtagaaaattattcagatatttggggtgacaaatatctgagtaaatgtgaaatcattgtcaaggagtagtggaagatgagatcaagaagggccaggttatagaaaaccatgacttccaggagaggcatgtagaattatggagtactcagtagagaacacagatggttcctaaacaggggactaataccttaatttagaaaaacctatctgcctattatagtaagtgaagtagagtagagggtggagga

SEQ ID NO: 226416 - DNA, 422 bp, Homo sapiens
gccaccaccatgttgccaagcaaatttcaacctaagttttgaagggtacatacatttaaaccacagcagttggcaaagggccaggccattgtgaagatattgacttctactcagagtgaggcgacagcccttgcagattctcagcagagggcaggaactggcttgggtgttaacagagccactctggctgatgtgatgaacatcaactggggtaggagacataagccagaggccacttaggaggcaattataataccyaggaatgaggccccagtgccttggactccaggggagcctgaagtggtgaggagcagctgtgccacactccctgggctgtctttcctcattctgctgcttcttgggcacttttgagggatccttttcaggctctgactccaaatgttgaggtatccagattcagt

SEQ ID NO: 226417 - DNA, 612 bp, Homo sapiens
ccccttataaaaccatcagattttgtgagaactcactcactatcacgagaacagtatgggggaaaccacccccatgattcaattatctccacctggtccctcccatgacacatggggattatgggaactacaattcaagatgagatatgggtggggacacagccaaaccatatcgtttatatatatatataggcttttcaggatatatattatatatagaacatatataatgtataggctttttagaacatatgtattacatatattctggtccagtgaattgggccaggatagtttcagaaaatatctaaatatctaggtccttattgatctttggaattcataagggagtttttctctcccatcataattcaaggagggaccgtgtcatataagttttatgatctttcagtcaagctctagaaaatcaggctttaagttataaacacactagagagaatggtcatctcctaagaatagcagggtgaaatcccatcagcatctctgaggaatgaagccccacagggccctcctgggtctccaaacttttctcacacaaagggatgmgggccctattggcaaaaacattcacacaccgtggctaagttctcc

SEQ ID NO: 226418 - DNA, 501 bp, Homo sapiens
gaattcattttctacagtaaaattgattactttgcctcatactctgaaccctataaaaagcaccaaggtagtcttaattcttctactactaataaaacccatacttgggtatgctttatgctttaatgcttataaggaacttttcacatattatgaccagaaacaatttgctcatatattctttcatccagtaattccttcaacaacctatttttacattcttagtcacgtgagagaaaaaaaggcaagcacaagagatataattgcaggcctcatgaagcttacaaataccttttcatcaaatagacagacaaataaatgaaaaattgcatccaaacaaggacattacaagawaagaaaattacataccaacatattaaaaaggataatacatcatgactggctggagtttattccaggaatgcaaggtttatttaacaaatgaaaatcatttaatgaaatttatgatattaaccaattaaaagaaaaatagattatgat

SEQ ID NO: 226419 - DNA, 646 bp, Homo sapiens
cagaagcagaccaactggcctgaaaggaaggatgcagtcctcgtaggacccatcacctgctgactaaagagtccttgggccctgaacaactggcagaaataaccaagtagtacaccatggtccttgggtgagactctgaggcttgctggcttcaggtgagactcagcacattctcagctactatggctacagggagagactccttccgattgagaaaagtagrgggaaaagtaaacaggactttgtttttcaccttaggtacctgctcagccacagagaagtaaagcaccaagcaggctttcagggtccctgatttcaggccttggctcttagacaacgtctatgcaccttccctggggcagaggagagaccactgtcctgaagggtgagtcctaggcctgccaacattcaccataagctgactgaagagccattggaccttaagggtatattgatggtggcctggcaatactccccataggcctgtgggggtggtggccatgggatgaggttcctctgcctgcggaaaggggaggaaagaatgggaaggactgtgtctcatggtttgagtgccagctcagccacagtacaatagaacaccaggtagatttctaagattttgactctaatccctgagtcctggtca

SEQ ID NO: 226420 - DNA, 545 bp, Homo sapiens
aacttgctgctgcttctccatcagcccttgctgctcaccatgctcttttatgttatggagatggcttcttttcttcaaccttgtgaaccaatctctgctagcttccaacttttcttttgtagcttcctstctcctttcagccttcatagaattgaggagagtcaggaccttgctctaaattaggttttcggccagcgtggtagctcatgcctataatcccagcactttgcggggcagaggtgggtggatcactggaagccaggagtttgagaccagcctggccaacatggtgaaaccccgtctctactaaaaatacaaaaattagctgggcatggtggtgcacgctataattccagctactcgaagagctgaggcatgagaatcgcttgaaccttggaaggcagaggttgcagtaaactgaggtcatgccactgcactctagcctgggtcacagagtgagactgtctcagaaaaataaaaatataaataaataaataaataaataaataataaataaataaataaggtaggcattggcttaaggg

SEQ ID NO: 226421 - DNA, 515 bp, Homo sapiens
ttgagttgaaagggagagcccagattatgaaggcccttgaaagtctataattcagattttatagagagaaaggtttgaatgtgaaaggaacatgactttacatgattttaaaaaaccygtctggcaacaagggagcttgaagatgaggaggcctgagttccagagactgccttgttagcatttgtgttttccaggtaataggtcagagttctggcctacctgggagggaaaatcaacaaggcttagtttcattggttgagaatgggggaatgtgtcaaagataactgaagtttcaggaatgggattcatggaatgatagtttcaaagacagcagagggagatgaggaagaggagaatcacaaatctgtttaagtatattaataattaaaagtagtttgtatctgtttgaccacagaactaatttaaatttccagaagtattacagtagatgaaagcctgcaagttaggatatgtgatagaattacatggggaagacaaagaatgtaagtataaaa

SEQ ID NO: 226422 - DNA, 589 bp, Homo sapiens
cttgctgtgaaaaattgttatattgccatagctagttcccaaatagataaagtttacatggatcctattatttgmaaacagacttgcaattaaggattaaaaaaaaattcatggtaaataatcatcggttgaatgtttggccaaacgtatgtgtctatttattaaaaattagggacctacctagctctacaatgctacagctttaattgagtttcaaaagcacattttaaacaacctagcaagaggtagctttctggcaagttttcgatactgtagttcaatgtttacatttcttttcctggcatgtctgagcctttgtttccagcttaaaagtggaaccattatattcaaaagtaaagctgggttaataatgcttactgcaattatctgatctttatgcatttttaatgagaacacacagccagcagaataatttaatgagggcaggctagcttttaaagctgtgttttcactatgccgaaccatatcaactttctcgctgagaagcagcagtgagaaatgatggagaagatttatttttaacacacttggcccaggagaaggaaaggatatatttgctaaagaattc

SEQ ID NO: 226423 - DNA, 581 bp, Homo sapiens
taatctttaaataagaggaagtttcttcagctatcctacttgttttgcaaggagcagtagaactactcatttaaataagggcaatgccacgtagattcttctagacccactgtttttactttcaaggagaagtgcaggacactagcccagaacttctgacgtcatcccccaactatttctgctgtgtgttcctttattcgagcttgtggagaggaatatttctttatgtcctggccaggaacattctaactccccactggcaggacttaagttatgtctttatattttcgcctgtcttttgtaaattgtaaacctgtcccctcataaatagggcatcttcttgtacctgccacatgtcgggccggtcagcacaggttttctgcagggcttctggctgggctggcaaaaagcagcagggagcagggcaaagctttttttctggcctgactcccccttgstgcagcccagcgctgccacctgggtggatggtccccggggccctattcccagttgctccagagccactatttaggatccaggttgtgccaccaagttcaaggctggttgtgatggtgagaaca

SEQ ID NO: 226424 - DNA, 574 bp, Homo sapiens
atgcccagcctcctgctgtttctggcctttgcatttgccattctctcttcctagatactggtcctccagagatctgagaactggctcccttacatcgttcatgtctctactctggcatcaccttgttggaaaaccttctcctaaccacccttttgaaaagggcagcactttccatatggcaatttctatcttagccttattttttccatagcagctatggccacttcatgtattatayacacactctttgatctgatgtctgtctccctactagaatgaaagctccatgagggcaaggagtttgtctattgtgctccctgatatgtctctggcatcaagatctatgcctgccacaaagtaggggcttaagtattaattgtggaatgaatgaataaacatgtgcatagacaaccattatcgaacacagaatgtgtaattgctatacaagacatttaaaaaatgctgtgggtatggagagagattacttctaactagagagaccaagaaatgctcatccctgggaagcctctgatccgtatctcatggaatggaatgctgacagcgcagtggctaa

SEQ ID NO: 226425 - DNA, 526 bp, Homo sapiens
ccagggtgacctcaacctaaaagcatatggaatgacatcctgccaccaacccgctgtcctcccttcctccttgtcccttgatggaccacacttagctcccttccatcacattgctcctgcttctcctcctgcctgaaatgctccaagacacggtgaggtcattagaaaccaggcagatctagatctatctagaaaatagttctgaacatacatcccacctcttctgcttcccagtctggggatcctgaggcattaatataagctctctgcttcattttctctctctgtaatatcagggtacctattttaataatgtgttgtagggataaatggagtaacgcaggcaaaatgcctggcacagtgcacagcctgtagcaggcagtcaataagtgttcactccattcccaccrtacatgttaatgtctttatgtctagacaaatatcacatatgcctggaggtacaattccagtctcatctcattaaggaatctccagttatcatctcccattctgaagtcctacttag

SEQ ID NO: 226426 - DNA, 291 bp, Homo sapiens
tttctgttcctttatctgggattacaggcatgagccacaacacacagcttaacccctgtgtgactatctagtccatagaacttcagaaagtacaaccaaatagggtgaaagttcaagtcttgygtcctctataatcctatcttgcaccctgtccctcaccaaatattttgaagcaaatcccagacatcatatcatttcctccataaatatttcaatatacatctctgaaagtttagacctctttcaaaaggttaatttccatatgattatcatacttaaaaattaaaaatt

SEQ ID NO: 226427 - DNA, 595 bp, Homo sapiens
aggtagacttttctataaatatacttccaattagaacaaatttctttctttaattctttttaataaaatttttagtaagagtggtgttaatattgatgtttmtccctttaagccaagacacataatattttacagctgaatgtggatgtctttaagagccatagaaaagttatattaatttattgtaaataaaaattctgtacaattaaaatccctgaaaattaaaaacaatctttatgaggctgtttttaagttagtaattttaataactttacaaaggaacattttagatatagcccatttttttaagtatgaactgtaacttgaacttatatgcactatatattgttaaaaatcatttcagtaaaacattctagaagagaacaattcactaataaacttaacctaattttaaatttaaatattattctagtttattgtttctggggctttctttttattttaaatttcaaaagtgaaggtatgtttccagtgaaaataaaattggcaatgatttcaaatttgggcaaggttatggaatcacagaaaccctcattggttgctgatagaaatccagaatactacagagcacttt

SEQ ID NO: 226428 - DNA, 595 bp, Homo sapiens
aggtagacttttctataaatatacttccaattagaacaaatttctttctttaattctttttaataaaatttttagtaagagtggtgttaatattgatgtttctccctttaagccaagacacataatattttacagctgaatgtggatgtctttaagagccatagaaaagttatattaatttattgtaaataaaaattctgtacaattaaaatccctgaaaattaaaaacaatctttatgaggctgtttttaagttagtaattttaataactttacaaaggaacattttagatatagcccatttttttaagtatgaactgtaacttgaacttatatgcactatatattgttaaaaatcatttcagtaaaacattctagaagagaacaattcactaataaacttaacctaattttaaatttaaatattattctagtttattgtttctggggctttctttttattttaaatttcaaaagtgaaggtatgtttccagtraaaataaaattggcaatgatttcaaatttgggcaaggttatggaatcacagaaaccctcattggttgctgatagaaatccagaatactacagagcacttt

SEQ ID NO: 226429 - DNA, 550 bp, Homo sapiens
cataatactaaataataatggttttgacttaagttgatcccatagggtatcaaatgtgtccatgggcactcttatattttccagtctgtgggtatctatttgggatggatatacttagcatgtggaagtatgttcacatactggtttctgcattggacctttgtgctaaaaagttgtaaaagaaagaccctgaaactaccaatccttgctagtattaccaaaagcaaaacckcattctagaaagatttacaaagaaatcactaacatcagaaacgttaaagatgcagaaggtcttgtctccatcattgctctttttaatttactttctgaacctctgtggaaagtagaaaaatgctccattcttaatcattggatagaccaaaatcttggtatgtcaaatgttatatttttattgaaacagatcaatatagtttcttacattttgtatgcagctcacatttggtgagtgtttgtttttcttattgctccttagcaaggaggatcaaaagcatctcatcagtagaagtcatatttcagtagggcatcctca

SEQ ID NO: 226430 - DNA, 557 bp, Homo sapiens
aactaaatgctgtaaggactcaggaaatccattctttcaacaaaagttactgaagactttccccattagtatcctaaacaatgtctgcaaaattggttttcatacctggataccttgtcttctaagagacacggcagggaaagatcataggaaaaaagtcactatcaggcacagctaacaactagcaaacccatagtctttaaaagactgatcctttgattcctatctctcaagtaaagaggtttaggtcatcttcatattacaggaaagtatccctaccaaaaacttctaactaaygactcttaggattcttccaaaagcaaatagtctttgggagaagacagcttccatcaaatgcctttggatcaagtgaatcactatatgagatatcggtatctgcaaaccaagatccacaaaaaaagatccattgtttgtcatatttaatctgtatatcttgagttttcattttcctagttaactttatctttttatgcttaaggttacatttaattactttacctataaagctactattcctaattcctctatgccgtcct

SEQ ID NO: 226431 - DNA, 430 bp, Homo sapiens
accactttctttccttttttttttttttttttttaaattaagagacagggtgtctcaatgttgcccaagctggagttcagtggctagtggctattcacaagaacgatcatcgcacactacctcaaactcctgggatcaagcaatcctcctgcctcagctttccaagtcgctgggactataagtgtgtaccacagcatgtcagctctctctctccttcttgacctaaagcctagcataaaattagctaagtagaatgtttccaaagatggctgtatcagtatctcccatcccacataatttctgtttsattttgccattcacccataaaatggtgggatctacctcccctccttgcaaatttgagctggccctctgatcctaagatctgaagccagatattaaggtacttcattaatttccatgtttgtcc

SEQ ID NO: 226432 - DNA, 552 bp, Homo sapiens
aaatctcttttcttcataaattactcagtctcaagtcattctttatatcattgtgaaaactgactactacggttagcaatcttaaagaatacttgtgattttgagaatcaggcacatatttttttaataatcggactgcttayaattgtttaactccttgcaacttatagttagtgcctaaaactttgatgactttcattacatttcaatggctctgttcccttatagcaaactaccttttttactgtacttactgtaactacagtgcatttattttcagcccaaatagtattcagtaataagcatttcttcccacataagaataagttatattcctattcactatattctagaatttctattttccttccacagtgccagctaaaattaaagtggaataatctattggggccctgtgtatttaatgtttgttttcttagtatattataaacactgtgaaggaaggaaatccttgcctcttgtttatacttttatctccattatagaaacactctgcattattttcttactgctgctgtagccaattactac

SEQ ID NO: 226433 - DNA, 582 bp, Homo sapiens
agatatagagaatgattgaaggttatcagagtcacacaccagatgagtaaattgttgttttcaaggaagaggttacataaaggtaagcggagtaatatttcagcatttttgttaattaaaaatttgtaaagttatttccatttcaaggaaattactctcagtaattttacgggtaaaatgacaaattccaagtttaattttcacatgtaacaccctccttgagcacttatttttataaagctattaatctattttggtctcaatttacctttctttaaagagattttaaaattttctgaaagaagttgacatctggaagtgtagctgttatatttttcaatttttaattacatatttaattatcctttaattacttaaggttattctcaaaagtgaagagatagctgggatcacactgcgtaagattttactcctgaatgtaatattcaaaaatgttacaaagtctatcaamgaggttttcattctgtgacaatacatggtcaatttgacatggtcaggaagcaccacccccactgagagataccaaattatggagtaaaccaccgtaatttaggcagatct

SEQ ID NO: 226434 - DNA, 633 bp, Homo sapiens
tgctaccacaaaaacccactgaagtacatagctcacaggcactataaagtatctacacaatcaagtctacctaaaaaccagctacaaacgtgatgataggatcaaaatctcatgtatcaacattaaccataaatgtaaataggctaaacacccccacttaaatgacatacaatggcaaactggataaaaatgcaaggctcaccatctgcagtcttcaagagactcacctcatatgtaatgacagccactggcccaaaataaggggatggagaaaatctgccatgcaaatgataacaaaaaagcaggagtaactattcttatatcagataaaacagactttaatcaaaattaaaaagaacaattgaagaatgaagagcattaygtcatgagaaagtatatgatcaaacaagaatacttaagtaccctaaatataaatgcacccaacatggagcacccagattcataaaacaagttctttttggactacaaaaagacagacgaccacccaataactgtaggagacttcaacacccccgctggcagcactggatcatcaaagcagataactaagaaagaaactgtgtacttaaacttcacccttgaccatctggacctaataagacatctacagaa

SEQ ID NO: 226435 - DNA, 633 bp, Homo sapiens
tgctaccacaaaaacccactgaagtacatagctcacaggcactataaagtatctacacaatcaagtctacctaaaaaccagctacaaacgtgatgataggatcaaaatctcatgtatcaacattaaccataaatgtaaataggctaaacacccccacttaaatgacatacaatggcaaactggataaaaatgcaaggctcaccatctgcagtcttcaagagactcacctcatatgtaatgacagccactggcccaaaataaggggatggagaaaatctgccatgcaaatgataacaaaaaagcaggagtaactattcttatatcagataaaacagactttaatcaaaattaaaaagaacaattgaagaatgaagagcattatgtcatgagaaagtatatgatcaaacaagaatacttaagtaccctaaatataaatgcacccaacatggagcacccagattcataaaacaagttctttttggactacaaaaagacagacgaccacccaataactgtaggagacttcaacacccccgctggcagcactggatcatcaaagcagataactaagaaagaaactgtgtacttaaacttcacmcttgaccatctggacctaataagacatctacagaa

SEQ ID NO: 226436 - DNA, 612 bp, Homo sapiens
aagctttatattatttctaacaataaatgtaaaccatctaattttctgaaaaggggtggaaataaatatttaacaaagaagatgttattcttaaattgtaatatgtacattgcctaaaaataaaaaggtagttgaagatatattgtgaacaacaaaaaatgaagagctgataatattaatgtgcgaaggaaactcataacatattgtactaattataaatcagtgtattgacaaaacctgagtcctcaattattattgactgtyattgacatgttaatgatagaatattaaatatagaatataataaagcaatttagaataaaaaagagaaagcgatagacatgaatagaaacaaaatgcaactgttcaatattaaaagcctttctaaattgcttgtgtttttctagtgacctgtttcgctatgcagtgtaggctcaggtgtctagattttagttgcagataaacacaggtagtgttttccagatctcagaatgaccagttacataaaaataggccataaaccatatatttcattcttacggttgacaaacctctaattcacctgaaaatattaaaaagaaagaagacagacgtgacagtggttggaagttg

SEQ ID NO: 226437 - DNA, 487 bp, Homo sapiens
attgagatatataactatttagcccttattttaaaacatcaggtaacaagcatcaatcaatttctatcaaatgtttcaacttgggtattayagcataagcagaaatatactgttaccaatatcccagccaatttcttttcctaatgaaacaataaaactgagaatatagagaccatttagtaaagctgatatatatatatatgtttgcatatgtgtgtgtgtgtatatatacatataaatgtaattaatacagtagatgaggtcaaagaagcaagtgatacacaacttttaatttggatgggatgtccttgaagattcctgtattagtcctttctcacattcctatatgaaaatacctgagactgagtaatttattaaagaaagaggtttaattgactcacagttccctatgactggggaggcctcaggaaacttacaatcgtagtggaaggtgaaagggaggcaggcactttcttcacaaaatggc

SEQ ID NO: 226438 - DNA, 487 bp, Homo sapiens
attgagatatataactatttagcccttattttaaaacatcaggtaacaagcatcaatcaatttctatcaaatgtttcaacttgggtattacagcataagcagaaatatactgttaccaatatcccagccaatttcttttcctaatgaaacaataaaactgagaatrtagagaccatttagtaaagctgatatatatatatatgtttgcatatgtgtgtgtgtgtatatatacatataaatgtaattaatacagtagatgaggtcaaagaagcaagtgatacacaacttttaatttggatgggatgtccttgaagattcctgtattagtcctttctcacattcctatatgaaaatacctgagactgagtaatttattaaagaaagaggtttaattgactcacagttccctatgactggggaggcctcaggaaacttacaatcgtagtggaaggtgaaagggaggcaggcactttcttcacaaaatggc

SEQ ID NO: 226439 - DNA, 502 bp, Homo sapiens
gcctttcaggttctaggtggtgttaagcctgcagatgcaccaaagtcaagaattaacgttcatgaacctccgcctacatttcagaagatgtatgaaaatgcctggaaatccaggcaaaagtttgctgtgggggggaggggaagggggggccctcatggataacctctgctaggrcagtgtcaaagggaaatatggggttggagctcccacacagagtccccactggggtactgccaagcagagctgtgagaaaagggccaccatcctccagaccccagaatggtagatccactgacagcttgcactgtgtgcctggaaaagctgcagacactcaatgcagccagaaggggggctgtaccctgcaaagccacaggggcggggctgcccaagaccctgggaacccacttcttgcatcacctagatgtgacacatggagtcaaaggaggtcattttggagctttaagatttgcctgctgggttttggacttgcatggggcctgta

SEQ ID NO: 226440 - DNA, 458 bp, Homo sapiens
gctgaccctgggacctgcccttcaaaatcaggccttctccttgaccagacgaggtggctcatgcctggaatccctacaccttgggaggctaaggcaggaggatcacctgagtccaggagttcaagaccagcctgggcaacctagtaagaccccaactctataaaaaggwgtttttttttttgagacagtctcactctgtcacccaggatagagtgctgcggcatgatctcaattcaccgtggcccctgcctcctgggttcaagcaattcccctgcctcagcctcccgagtagctgggattacagacgtgcaccatcatgccctgcaaattttcatattttagtagagacggggtttcaccatgttggccaggctggtctccaactcctggcctaaagtgatctgcccgcgtcagcctcccgaagtgctgggattacaggtgtgagccaccatgcccgg

SEQ ID NO: 226441 - DNA, 458 bp, Homo sapiens
gctgaccctgggacctgcccttcaaaatcaggccttctccttgaccagacgaggtggctcatgcctggaatccctacaccttgggaggctaaggcaggaggatcacctgagtccaggagttcaagaccagcctgggcaacctagtaagaccccaactctataaaaaggtgtttttttttttgagacagtctcactctgtcacccaggatagagtgctgcggcatgatctcaattcaccgyggcccctgcctcctgggttcaagcaattcccctgcctcagcctcccgagtagctgggattacagacgtgcaccatcatgccctgcaaattttcatattttagtagagacggggtttcaccatgttggccaggctggtctccaactcctggcctaaagtgatctgcccgcgtcagcctcccgaagtgctgggattacaggtgtgagccaccatgcccgg

SEQ ID NO: 226442 - DNA, 587 bp, Homo sapiens
attttttgctaccctcattttatctctgaagagacatcttgttaaaaaatgaataacagacacatataaatacctaattacaagcagagttaagattaaaattcagcctcattaggggtgggayagaaatcagtacactaaagaatattttggtgcaggtagtttgtttcaaatgattcaaccttcaacattacttcacttaaattttagcaaactttctgctataatttaagcatacagacctatgacactagacatatgtcctgtgtaagcctgggctaggggagctctatttaatacttacataaaccccaaagatgtcctaagaaataaaatttggaaaaactttgatgtgctacagcacggattttctcctacagcaacagagcagacacttgaatgtagttatactcctgctttccacctccctgtcaaaacaataaaaaaggccacaggcctgtggttctggcctccagggaactggtggcttctttaacccacactgctgctgctgaatcccatttaggtttagggtttattttgtatatgcctttgtacaggctaaatgctggtctagttgaaaatca

SEQ ID NO: 226443 - DNA, 528 bp, Homo sapiens
tgtgtggataggaaaacaattatccatacaggtatgatattggcagagaaaatcacaaaatgttttaatgagcaaacactttggggatggtaataatctttctaccaccttcattgtcttgtttaagtatctctacattcttctttaaaaattaggaatatatctttcttgctctttcgttgttgttgaacaccagaaggggatattccttaattctctctccatagctaaggacagtacagcacaatattccattcagcaggtgaagtcagtatgaatgaatgcatttcaatcagcaaattgctggttgtgttgcaactcctagttatgatgttttgtgtactttgaagggctcccattaattaaggtatttcttataagcattcagaaagtytcttttcttggcatgcgacttgaaaatttgtcctgatattttccctgtgacaatgttttgtgaattgtaactcagccacttaagtggctcctcataataaagccacatggtatccatgtacacatatttaacaa

SEQ ID NO: 226444 - DNA, 377 bp, Homo sapiens
ttctttacctttaacaactgatgggcacttatgttgattcatgtctttgctattgtgaatagtgctgctaaatgtataagtgcatatgtttctctggtagaacaatttattttcttttggatacataccctgtaatgcgattgctgggtcaaatggtagctctgtttgaagttctttgaaaaagcttcaaactgctttttacagttagtgcaattacatttccactaagagtgtatgtgtttcatttcctctgcagccttgaccasatatgttgtttttgactttttaatagttatcctgactactatggagtggtatctcactgtggctctgatttgtacttcaatgatgattagtgatgatgattagtgatgatt

SEQ ID NO: 226445 - DNA, 340 bp, Homo sapiens
taaaatattgcatagttcgtctcacactataaaaatgtttttgcacctttatttttggctcaacattaggctttagatatatcaatatagattcatgtagctctaattcattcctttcaattactgtatggtattttcctatacaatracactgccagttatttactcattattatccttatggacattttcatttttttctattaccaatgatgttgcaatgggcattctatctcttgtgcccactgcacgatgttccatgatggcttccctggtcttgatggcaagaagtgatcctcagttcttgtgtacagtgctactgttcttccaacgtcaaagg

SEQ ID NO: 226446 - DNA, 485 bp, Homo sapiens
atttttaatctcagtgtgaaattcacatgttatctcactttatgctccctcctaaaatgctttaaattctaaacattctatttctttctgggatatgtagcagaaatatcttaaatctaatcctctgtcccatcctttgtgtcatattttgggactttataatatctcgcctgggtttttttaagatagcttcctgtctcataactccctgaccaagtcagaggttattgaaagacattagctatttccctaattattaaatttgatcatgtcaaccacttgctttaaaattccttttggttcctatccctttcagatttagacccaaatttcttattttagctctcaaggcccttccartctatttctggcctattatcccattggtaactctatctaaactcctctccacttccattaagccaccaatatgcctctaaattcattccagtatactaaagtcctcatcatttttaagcacatca

SEQ ID NO: 226447 - DNA, 518 bp, Homo sapiens
ctcaaagtgttacagttttactttttacaattaagtccatgagccaatctattttgagtttataggatatgagacttgggtttgggttctctctgtctctctctctcttcctctccctctcttttgcttctgaatatccagttgctccagcatcatttgtcaaaaatgctacctttcctctattgaattgcttttgcctctttgtcaaaaattaattgggcatattcgtgtgggtctatttctgggatctctgttctattccactggtttttgtgtctatgttttgccagtaccacatcatctaaattattgaagctataagtcttaacatctagtagatcaatttttaattcaaaatgattttagctttcttgattcttttgcctttctatgcacatttaaaaatcaacttgtctatgtctgtaaaaacaccttgctkggatcttggtaagattgcttattgatttagaaagaattgacacctttgctatgtttagtgcttcatcccatgaacatgc

SEQ ID NO: 226448 - DNA, 577 bp, Homo sapiens
tcttaatagttaaagagctattcaaattatttcaaattgtttcttgtaaccatttgtgtttttttcagaggattgttccattttgtctaagtggtatccagcctttttggcaacaaggactggtttcatggaagataattttttaatggacaggggaagagggtggcaggatggttttaggatgaaactgttccacctcagatcatcaggcattagttagatactcatagaagtgcacaacctagattccttgcatgtgcagttcacaatagggtttgcactcctgtgagaatctgaggctgccgctgatctgaaaggagatggagctcaggtggtaatatggtttggctgcgtccccacccaaaatctcatcttgaattgtagtccaaattgtaatccccacgtgttgggggagggaccttgtggtagatgattagaacatgtgggcacttcccccatgctgttctgatgatagtgagtgagttctcatgagggactttctcccccttatctctgcacttccctttcctrctgccctgtgaagaggtgcctttcaccatgattgtaagttttctga

SEQ ID NO: 226449 - DNA, 539 bp, Homo sapiens
gtaacctataagcctgagtatatgtggaagtagagattgttcttgcctggcaagacagatatgtttcttaggtatgttttaactgtcagagactgctccactgctctctctacagctttcctgctrtttcagtcctggtgtaagccccttattttacaaacctaaaaactaagctctatataggttaagtccaaggttacatggctcattgctgaactgagctgtaatgcatcattgagaattgcagtccttttaaccaaaatcagttcacaaacactgtagcagaggctgctagttgcctcccaaagtccaacctcctgtcttgaaaaagaatttcactttgcagatgagcacattgctacccagtctcccttgcagctaggtgtggctatgagaccacttgacctgtaagatgtaaatagaaattatctacgtagcttccaagacttatcactaaagctgtaagtcacagccttttctgctacctcagtgttcttgctgactcaattaaaattaagcagctgacaaacagtcatctt

SEQ ID NO: 226450 - DNA, 479 bp, Homo sapiens
atgtgcctctgtaaggaggaggtggaggggaagaataaaatatacaatgcaatatgttggtagatagagtttagaaaggacttcttccctatttagaggataaacctaatggttctctctgcttttctcatactggtcatcccaagctttacccacttgagtataggctttggattcagagagtgcattcaatcccaaagtccaccactttggaaaagtttctacttttaccttggatacctcatctacaaaasaagtataatagtatctccctcatagggttgttgcaaagattaaaggagataataaatgtaaaaatagagcattgtatgatgtataataatcattcaataaatgatatctattgtcatcattatctctcctctctccatgcggtcctccagcttctcctactcatagcaatgcatcaatttatatgactccagtcaaaagacagcagggtcaaccctgagtttatt

SEQ ID NO: 226451 - DNA, 479 bp, Homo sapiens
atgtgcctctgtaaggaggaggtggaggggaagaataaaatatacaatgcaatatgttggtagatagagtttagaaaggacttcttccctatttagaggataaacctaatggttctctctgcttttctcatactggtcatcccaagctttacccacttgagtataggctttggattcagagagtgcattcaatcccaaagtccaccactttggaaaagtttctacttttaccttggatacctcatctacaaaagaagtataatagtatctccctcatagggttgttgcaaagattaaaggagataataaatgtaaaaatagagcattgtatgatgtataataatcattcaataaatgatatctattgtcatcattatctctcctctctccatgcrgtcctccagcttctcctactcatagcaatgcatcaatttatatgactccagtcaaaagacagcagggtcaaccctgagtttatt

SEQ ID NO: 226452 - DNA, 520 bp, Homo sapiens
aaggtaacattgcattcaaagaaatgggaaacacagggctagaaacaggtttgggaatcaagtggtaatcttacaaattggtaatcttggcttacatgccttgcacaatgtttgatgtaggtgtttcatatttgcagcaaaaaaataatgatttttaaaatttattattcaggcttttagacatttaggtgatttttaatttttttctaaaaattatataaggatttactgaacatgctaaattacattgacggaatatggcaatccccagatattggaaaaattatattctttcccttcataggtatttggctccagtcaactcccagaatcatggcaactaaactctaatttgagaaaataatgaaagagtgtaaatcacattccactttttgaaacttcataatctatgtgctctggtccctcattttagagttatttgaaaaagtttgtctacggcatacacagaataagtttatgatgtgtgagtatrtgatggacttgggagatgtttcattac

SEQ ID NO: 226453 - DNA, 560 bp, Homo sapiens
tctggctagtgtggaaagaagtactgatatcatctaggttacccattttagtttagagcaggggttggcaagttgtggtccatggaccagatccaatccactgcctgtttttgtattgcccatgagtaaagaatggttgaaaaacatcaaaaggaaaaaaaaattgatatgtgaaaagtrcatggaatccagtattcgttagccataaagttttatgggaatacagtcatggtcattatgtttccatattgtctgtggctgcaagggcggaactgagtaattgtgacagagattgtatggcccacagagccaaaaagatttgctatctgggactttacagaaaaagttttcagacctgtggcttagaggagagacgaaaaggccaaagacctagatagttactgtcgttttatgaatactacagtgatacagaggcgagcttcctgcacacaggaccatgtaagtgtttgtcaaattagaatcttgtaatgtgtaccccatggaaattaagttcaaagaatattaaaaattgtcacatggcaaaaagaggttcaaaacag

SEQ ID NO: 226454 - DNA, 522 bp, Homo sapiens
ttttaattacttttttttgaaataaaacaaaactacttctggtatttctctaaaaatataatttaccacatttccccacccccaccccatggttttttcctccttttttgtaaatttcaatttcatgaaactaagtgtagttaaatgtaattaacatgaaaaatattgaaaaagtggctgccatttcggccagagtacactatactcagaagtttgtggagagcttcagcttttagtaaaactgaacacattttgggttagctacaaagagaaaaggtaagggatgaartaggatttctgagtgttggcttcatgcacaagtcaaatggagataaggaacttcattgccagcgttcgattgggtcacaaaaagacacatttgaaggaaggaagaattataaaaaaattactgcgtagctagtagagatctttcaaccagacctctcacccttggaggagggggaaaggagacgttaagcaccacagtaggaagatattaataaataaaactaaactaaaaag

SEQ ID NO: 226455 - DNA, 568 bp, Homo sapiens
gaattcctaggaatattttgcayatttatgataaagtggtttctttttgtcttgatttgagttgaagatgaaggaaaatgatggataaatcttaaggctgtccagtggatacccttctccctccatattatgtgctagacttctcctttcatggaaacgatttcatacttttattactacatctgtcttctaacatttgaatggtacaaagatagatatgtgacctgatcaacaaggacattttcttgggatgtttaaaaattggaattgggacagagaacctctcttctgatttgagatttaaatatgaaattcagagctaagtgtagccatgtttcctgtcctgtgtaggaaacaggtataaaatagaggacaataaagctgaaatctagattaaaacagagattggcaatgaagaaaagctttcacgcttttggaatcctgcttactagttgctcctgaggctcagctgaagtcctccatgttccagaatttaaatactcaatccttccttcaagtatgtgagatacccccggaatccacttattaattcctcctatgataaagg

SEQ ID NO: 226456 - DNA, 538 bp, Homo sapiens
ttctttacctgagctaagcaagtaaatttgctggagacccatgtggagtgactagatttagaaaagaatgtagtcatatgtgatatgccacagtctagtcatatgccacatcagggcatatcagaagctgtccctgctaactcccaccccccagaaaattcattcacttaacttttaacagactagctttctatgatacgtcaatttgaatttgagatattrgccccttcagtctctacatcgtgaacaaaaagggcttggctttccttttgtcaacagtgggcccaggctcctttattaatattgggaaataggactggatataatttgtttctttctcccttgacaattttattgtcttctagaggaaacagatgttttttgaaaagatttttgggcacccaaatcagcacctttgagtttgcactggtctagaaatgaagacactggagtaggagttagaagacctgtgtttgagtcctcgcctaattagctatgtcactttaatccaattcccttctcgaggatggtttgctca

SEQ ID NO: 226457 - DNA, 602 bp, Homo sapiens
agagtcccagaagaacataagaaaggaagggtaatttggaaaaaaaattatatatatgttataaatatataaatatatataaatatatataaatacacacacacacacacacacatatgagtaagcagattgaatcagtaataaaaatttgccyatcaaggaaaagctcagggctggatggactcacaagtgaattctaccaaacatttaaagaagagtagataccaattcttctcaaactcttcccaaaagttaaatagggaatattttcatacatattttatgaggccagtattaccccaataccaaaaccagatcaggacactataaggaaaaacaaacaaacaaactataggccaatattcctgatgaacattgatgcccaatcctcagaaaaatactagcaaaccaaacttagcaacatatttaaagaatcattcgccataatcaagtgggattgatccctgggatgcaagggtgctttaacacacataaatcaataaatgtgatacatcacattaacagaatataagacaaaaccatattatctcaataaacacaaaaaaagcatttgacaaaactcaatatcctttcatgataga

SEQ ID NO: 226458 - DNA, 602 bp, Homo sapiens
agagtcccagaagaacataagaaaggaagggtaatttggaaaaaaaattatatatatgttataaatatataaatatatataaatatatataaatacacacacacacacacacacatatgagtaagcagattgaatcagtaataaaaatttgcctatcaaggaaaagctcagggctggatggactcacaagtgaattctaccaaacatttaaagaagagtagataccaattcttctcaaactcttcccaaaagttaaatagggaatattttcatacatattttatgaggccagtattaccccaataccaaaaccagatcaggacactataaggaaaaacaaacaaacaaactataggccaatattcctgatgaacattgatgcccaatcctcagaaaaatactagcaaaccaaayttagcaacatatttaaagaatcattcgccataatcaagtgggattgatccctgggatgcaagggtgctttaacacacataaatcaataaatgtgatacatcacattaacagaatataagacaaaaccatattatctcaataaacacaaaaaaagcatttgacaaaactcaatatcctttcatgataga

SEQ ID NO: 226459 - DNA, 435 bp, Homo sapiens
tatatgtgtgtgtgtatatatctatatctatatctatatatatctccttttacccttaaatattcagtgtatatttcctaacaacaaggtgatttaaaaatatatatataaacatagtataattaacaatcaggacatcaacattgaaacatttctgctatgtcatctacaggccttaggaagactttgtcaggtgccccaataatagccttgatggtagaagaaaaccatgtgttgtattcagttgtcatgtctcttagtgtcttgtaatctgaaataattcccaagccctttggatttcatgacagtgacattgttgaagagtacaggccagttattttrtagaaggtctctcagtttaggtctgtctgatgtttcctcctgatcagattcaggttattcacttttgacaggaataccactgaaatgatgctg

SEQ ID NO: 226460 - DNA, 549 bp, Homo sapiens
ccttttcagtggtattcaatggactataaatatcacttgctgtgaaatgcagattgttcttacagatgctttaccacatcccagagttaatttccagttctcctttagcacacttcccaacgttttatatctttgttgtattcttttcttttgaaataccatctccttctcttgttgactttaaataaaaaataacactccaaaatcattaaagaggctccttctagctctaagkttcatgagcatattaaaataaaatctattgaaatcaatctcttcactgagccagtatccaaaccagaaaaaaatatttaggaacaattttttctgaactaaataaaaatgaattttcaaaaaaagtgtcccaaattctgaataaaaaattaaactttttaatatcatattaaaaaaatgattactgaaggagatttatacatgtctgatgttttattcagaccactcaagctatttttgtgattgtcaaaaccataaaatgtctgtttaatcacaaaatgtctgtttgtactttctttttcctctttgggaggc

SEQ ID NO: 226461 - DNA, 549 bp, Homo sapiens
ccttttcagtggtattcaatggactataaatatcacttgctgtgaaatgcagattgttcttacagatgctttaccacatcccagagttaatttccagttctcctttagcacacttcccaacgttttatatctttgttgtattcttttcttttgaaataccatctccttctcttgttgactttaaataaaaaataacactccaaaatcattaaagaggctccttctagctctaagtttcatgagcatattaaaataaartctattgaaatcaatctcttcactgagccagtatccaaaccagaaaaaaatatttaggaacaattttttctgaactaaataaaaatgaattttcaaaaaaagtgtcccaaattctgaataaaaaattaaactttttaatatcatattaaaaaaatgattactgaaggagatttatacatgtctgatgttttattcagaccactcaagctatttttgtgattgtcaaaaccataaaatgtctgtttaatcacaaaatgtctgtttgtactttctttttcctctttgggaggc

SEQ ID NO: 226462 - DNA, 608 bp, Homo sapiens
aagcttcaataactagtttcaaacaattccctctattcatcatataaaacattattgcagaactaacgaaataatctgagtgtcaacgtgctgggaaataacataagattgaaggaaagaaggaataaagtaaggaactacatggaggaagccaccaataggaaatctaaaattttatgatggataaaaaccagcttacctttagagtttattctatttgtaaacatccaggattatgactggaagagggaatgcaaatatctaagaataaaaagtggttgttttccctttaaactcaggaggattttatagataatctctttttagagtataattttttcattcataaaagtagtgtgtatatatgttcaaacctaaaacagaaaaaatatgcagtcacactaaactcaaacgaatttctttctggtttgttttacatataatttttgtgtctgtttcttttggttaactggtatgttccttagaataacctaggttatattgcagtaacaatttaactgtgatatctaagggtcttaatacaatgaagttacrtttattgttaactctgagtgtccaatacattgtattttgccctactccacaca

SEQ ID NO: 226463 - DNA, 569 bp, Homo sapiens
agactccacatgtaagcatcacgctgcatccttagaggtagtagagggggaatatctattgtttacctaccttaagagaagccctctctactagatcctcaaaaatatcaaagtatggcaccattcctggccacaagacagatacattatagttgggtaaataaggtagcatttctattttaaaaaaatattaattattcaaaataaattgagttcagatactaatactatattaatagaagtgcaatagaataagaacttactctgggatgagtcaggccatccgggtaaacttcagaggggtagagactttgatttcacagctttgataacacagctttgagaattccttgtaacataagccctgcactcaggcaggttgagagacgtggaggtggctgcaagcaaggcttttggtgggtacatctattccttaaaacaaataaataaataaaaataaaatatatttastgaatcggatactatcataggtggagagacagtaaaaaaaaaaaagcaagatagaatgtcaggtcctttagatttaatattatagagtaaaaaagcaa

SEQ ID NO: 226464 - DNA, 549 bp, Homo sapiens
atgctcttaaattctatgaaggctgagagaggtgaggaagctgcagaagaaaagttggaagctagcagaggttggttcatgaggtttaagaaaagaagccatgtgcacrgcataagtgcaaggtgaagcagcaaatgctgatgtggaagctacagcaagttatccagaagatctagcaaggaccattgatgaagatggtgacactaacaaacagattttcaaatgtaaacaaaacagccttctgttggaagaatatgccatctaggacttccacagctagagaggagaagtcagtgcttgccttcaaagcttcgaaggacaggctgaccctcttgctaagggccaatgccattggtgatttgaaattcaaaccagcgctcatttaccattccaaaaatcccagggctctgcgaattatgctaagtctactctgcctgtgctctatacatggaacaagaaagcctagatgacagcacatctgtttatagcatggtttattgactattttaagcccattgttgagacctgctcagaaaaaaagattgcttt

SEQ ID NO: 226465 - DNA, 414 bp, Homo sapiens
agtgattcagtgaaatacagaaaggaatacataagcttttctgyctgcctttctgcctttagttatctcagggagaattaatcttattgcttagggtctaggattttgactgtgccatattcactagcagagactctgtctattaaaacgtcacacagtcatgtataacctacatattataagtaagaccagggaatgctcagttcttagtaggtccaaccatagtggtaagctctttctcgcataagcttgctaggataaggttctcactagtaagtaccatgttagtgttgtctgttattatcagctattcctaaattcatattttcctgaaatatctccagatgtcattgattttcctcttttctgggaacttatagcatttattgtttcttttatacaacttaatcacag

SEQ ID NO: 226466 - DNA, 325 bp, Homo sapiens
aatacttttggtgaacaaaaatgtgtcagatgtcttttcaagggattgttagttgaaaatagactgaaatgtatctttagaaagcattacaaagatgacttgcaaataactgggaaaaaacccacaacattaaatagtacatttctaaaaagaagtttattctgatgaatttacagaagcaaatgacaggtaaaattgaagcagcatyagttatgcatttaggaaatatatttaatctatttaagtcaaatcaataacctgggaaatattaacctagaatcaatactgcaaaaccattttgtataaaagtgaatgacaccaacta

SEQ ID NO: 226467 - DNA, 495 bp, Homo sapiens
gaattcagcaccttcaactgaaatatccaggttctcacattgggactgactaggcaaacaacttgatccagagagaaagaagaaatgcagggtggagcaatgaatggcctaccaaggaacagcagggagccaaaggaaactcaccctcagccaaggaaagtggtgagtgattgtgccaccccgcccgggaaatcacatttctcccagagatctctgaaacccagatcaggaaatcccatctttgatcccagatctttgcagatcaggagatcccattgtgagcccatgccactagggccttgggttcgacacacagagctgtgtggagtctcagcagagcaaacgctcaggcacacaatgaggcccaggagttttacagaytctggccctgggatcctggcaaggcagaagatatgacagtgcatatcccaaggaagggggctgaatccagggagccaagcagttgttctgcacgtcccacttccacagcacctc

SEQ ID NO: 226468 - DNA, 495 bp, Homo sapiens
gaattcagcaccttcaactgaaatatccaggttctcacattgggactgactaggcaaacaacttgatccagagagaaagaagaaatgcagggtggagcaatgaatggcctaccaaggaacagcagggagccaaaggaaactcaccctcagccaaggaaagtggtgagtgattgtgccaccccgcccgggaaatcacatttctcccagagatctctgaaacccagatcaggaaatcccatctttgatcccagatctttgcagatcaggagatcccattgtgagcccatgccactagggccttgggttcgacacacagagctgtgtggagtctcagcagagcaaacgctcaggcacacaatgaggcccaggagttttacagattctggccctgggatcctggcaaggcagaagatatgacagygcatatcccaaggaagggggctgaatccagggagccaagcagttgttctgcacgtcccacttccacagcacctc

SEQ ID NO: 226469 - DNA, 425 bp, Homo sapiens
tgggtgtcctgggaggcagggcagctgtgtccagctgcagtgtccctggtggctgagctgaaggcagtgtgaagctccggcctcgaggatgtgccagggagtgtgtggaggtcatgtctgtgtccctccctcagacccgcactcccagcctgtgctttacaccagacaactcctggcraaactgcgctgctgccctgcctggcactggccctgccctcagggaggctctggccggggctgccagtgttcatcagtgtcttcaaaacttgtttctcacattagaaaaatgttaaggcccgtcatttcatggtggtaattgtgtgagagtatgtatgaattgaaaagatggaaaatgacacaattactatgaatatagtaagattaaaaaacagcatctgtatgtgtcaacatattacttagcctcc

SEQ ID NO: 226470 - DNA, 451 bp, Homo sapiens
tgggagtgctcccatctggagtggacacttggggaggagtctggggatgctcctgtctggagtggacactgttgtkgaggattctgggagtcctcccgcctggagtggacattgttggggaggattctgggggtgctcccgtctggagtggacacttgtggaggattctgggagtcctcccgcctggagtgtacactgttgtggagaattctgggagtcctcccgcctggagtggacactgttggggaggagtctgggggtgctcccgtctggagtggacattcactgaggagtctgggagtgctcccatctggagtggacacttggggaggagtctgggggtgctcctgtctggagtggacactgttgttgaggattctgggagtcctcccgcctggagtggacactgttggggaggagtctgggagtcctcccgcctggagtggacact

SEQ ID NO: 226471 - DNA, 586 bp, Homo sapiens
tgtccctaacggcgggaatacctggactggctggggtgtcccactggggagggtttcccggtggggaggtgtctggcgggggagcggctccggctaagcatgggtgttctgctaggaggatgtgtctggctgggggcggtgtcccaatcgggagggttgccctgatgggggaggttctacagttgtggagatgccaacctggggggcgctccggttggggggtgtgccctctctggttaccccgctctcgctgccactcataggccygctgcccaggtatgcacaagtcaaggccttttctgcagaccaagtagccttccctggagagcgcccccagcaccacggaaactatctacatgccccgcggtggtcagcccgccttatcccagccccgagacccaaaacaagaagcatggactgaatttgaggtttctggatggtcgtgtgaaccgaggggacgggtactggactgacaagaaatgagccttgaaggtcaatctgggtgacacccgagtctcctggtgagtcggactccggagaattatctcaagtccagcatagacagcgcacatagacagaaaaggaa

SEQ ID NO: 226472 - DNA, 586 bp, Homo sapiens
tgtccctaacggcgggaatacctggactggctggggtgtcccactggggagggtttcccggtggggaggtgtctggcgggggagcggctccggctaagcatgggtgttctgctaggaggatgtgtctggctgggggcggtgtcccaatcgggagggttgccctgatgggggaggttctacagttgtggagatgccaacctggggggcgctccggttggggggtgtgccctctctggttaccccgctctcgctgccactcataggcctgctgcccaggtatgcacaagtcaaggccttttctgcagaccaagtagccttccctggagagcgcccccagcaccacggaaactayctacatgccccgcggtggtcagcccgccttatcccagccccgagacccaaaacaagaagcatggactgaatttgaggtttctggatggtcgtgtgaaccgaggggacgggtactggactgacaagaaatgagccttgaaggtcaatctgggtgacacccgagtctcctggtgagtcggactccggagaattatctcaagtccagcatagacagcgcacatagacagaaaaggaa

SEQ ID NO: 226473 - DNA, 451 bp, Homo sapiens
gttccctgttttgagaaactattattacgtgccacacactctggcccaggaattccccaagagcccyaggtcacacccctccatgccctccactgttctcttactttggaatgcagggattaaactggtgaatgattatgaaatcttagagtggtaaaagctattccaggccttaccccaaagccagaaaccacaaaagaaaacttgattgatttagctacagaagaacttcaaacttgtgtgtagtaaaaaaataaaaaggcaggacacagtagctcccatctgtaatcccagcactttgggaagccaaggagggtggatcactcaagccaggagttcaagaccagcctggggaacatggcaaaaccccatctctacaaaaacatacaaaaactagccaggcgtggtgacgtgcacctgtagtcccagctactggggaggctgaggtggg

SEQ ID NO: 226474 - DNA, 567 bp, Homo sapiens
gaagcttgcccctagtgaaggagggaagtttaaagagagatactgacacggagaagggagtgggtgagcagccctgggctgtaatgtaggtgagcagccaaagcaggcatccccgcarttgacttgccaccaagggaatgtgggtgactgaccaaggcacgtgtccccatggtgatcagacaccaatgaaatgtgggtgaataatcaggcaggcatccctgcagtgattaaacaccaagggaagactgtcttcccgagtcggtgactggcgccggagttttgggtccacggataagatgtgtctcctttctctctactagagaggaaaaagaactggaattggaaggacagggagattgaagggtagtgagagagggagattgaagggtagcaagagagactggagaaaagagtgaaaagaccgcttacctgatttgaaattggtgagatgttccttgggctggttggtctgaggatctgaggtcgtaggtggatctcctcatggagtgatggtgaggacaggggatggtctcccgaagaagtcctcctgtcctgggtttcggcacc

SEQ ID NO: 226475 - DNA, 617 bp, Homo sapiens
tactcaatctgtaatagtggatcagcatcatcagtgtgtcctcagagcttgttaaaatgcagaatctcaggccctaccccagacctaatgaattaaaatacgctttctgacaagatccctaggcacatgttattgtttaagaacgtctgttttagaactcactttgggaaacctgtgctagaatttattgtaatgctgaaaaagaccagctgaaactcttaagatttgatttcaacattcaaaaaataattttctatagttcaatatagttcaaagatgcataatgattaatttttgtaggttttgttccagctttattaaagatagaagatccactaattattatgggcttgaaactaaatttttaatttttttgtttgtttttgagacggagtcttgttttgttgccaggctggagtgcagtggcgctatctcggctcactgcaacctcagcctccctggttcaagcgattctcctgcytcagcctcccgagtagctgggactacaggtgcgtgccaccacgcccagctaatttttgtatttttagtagagacggggtttcaccatgttggccaggctggtctcgatctcctgacctcgtgatccgcactcccca

SEQ ID NO: 226476 - DNA, 523 bp, Homo sapiens
gtgactgggttccgccagcagaaataagggtagaagtgatgagtgccatttatagtcctggtccataaaatccacctgtgctgttcttcacattctcccttccctaactgtcttttgtgtattgacactttgctgctagcattaccacaatacctattagtatattttaattaatataattaatatatagctaagagtttgttagtggttttagctagcttctccagtttgtattctcaactaaagtttattactatttcaacttaagtttttcgggggtgggtggataagtagtgttaagaggtagtgtagatgatttaaatgagatacaaagatttttaaaaatcattagtggatttagtgaattaaataaagctaatctatacttagagtttataaatttagctgccacmtatgaaatatcttccaaagatctgagattcttaaacacaaggaacatttcacatatctttgttttagagaatttgacaaatgaagttagaattaagatcgtatatcacct

SEQ ID NO: 226477 - DNA, 619 bp, Homo sapiens
attgaataactctgcttttcttcagtgttgtaaaaaatgtttttaatgtatttcaaattataataggtacttgaatcagtttctggactgtgtaattttttgtgctaagatcatacagttataaatatwctgtctctttctctctttttttaagaggcgtcttgctctgtcaccccaatctaaagtacagtggcattaccatagctcactgcagccttgaactcctgggctcaagtgatcctcctgctctacctcccaagtaactgggactgtaggcacacaccaccacatatgcctaatttttattttaagagattagggtctctctttgttgccaaggctgctcttgaacttctggcctcaagcaatcacctcagcgttctgagtagctaggattacaggtgcaagccactgtattcggctcctactgtgtcttaatactgtcttaaaattgtttacctcttccactatcattattcttctatttcaggttattctaggctattacttgtttgcttttccagatgaatttaaaataagacaattaaaatttcaaacagacaaacataagagcaactgaacatctgttggttttttgataggacaacatctgaatttg

SEQ ID NO: 226478 - DNA, 619 bp, Homo sapiens
attgaataactctgcttttcttcagtgttgtaaaaaatgtttttaatgtatttcaaattataataggtacttgaatcagtttctggactgtgtaattttttgtgctaagatcatacagttataaatattctgtctctttctctctttttttaagaggcgtcttgctctgtcaccccaatctaaagtacagtggcattaccatagctcactgcagccttgaactcctgggctcaagtgatcctcctgctctacctcccaagtaactgggactgtaggcacacaccaccacatatgsctaatttttattttaagagattagggtctctctttgttgccaaggctgctcttgaacttctggcctcaagcaatcacctcagcgttctgagtagctaggattacaggtgcaagccactgtattcggctcctactgtgtcttaatactgtcttaaaattgtttacctcttccactatcattattcttctatttcaggttattctaggctattacttgtttgcttttccagatgaatttaaaataagacaattaaaatttcaaacagacaaacataagagcaactgaacatctgttggttttttgataggacaacatctgaatttg

SEQ ID NO: 226479 - DNA, 602 bp, Homo sapiens
aaacattcaaaattttttttacaggaatagtcatagcatataaagggaaaaaaataaagatgacaggttttgaatttgaatgactgtggccttctatggagagagagaactcaggaagaggaaccagtttgcagggaagggtccagtaagaaaagtaattctgattgggaaatgttgaaggcaaagagaaaggaacaaatggtttagtgttggcaaagtgctgatcagcatcattcccttctgtgtgttatctcagataagactgaaaggaggtacctgtggagtatgtgtagagatgtgtagtttggtccatagttagaaataagggctgtggcttgaggaaaggtgacagctagaaaccatgatttgggtttcctcacaaggtaaaataatagatgaagctgtggagtaaacataaccctccaggraaggcatgttaaatgagaagacaaaagaagggagagcatgtcctttaaagataatccaaatcatataattatttgaattgaaaaggacatctgtcttgttatagacctctggcttctggatcttcaagaaagcaaatgtttaacagagtgttctgaatattgtttcttggtgtc

SEQ ID NO: 226480 - DNA, 448 bp, Homo sapiens
tattaatttttctacaaatatagttttagacaagttattagttttggtgtatagagtttgttttcattttctagatagtctgcattrttagttttaatatcctgctttacacaggaataattaagatagcatttaaaaaattccaggtggctggagattttaaatttttacttttgtaatttctatttttcatataattaatatatttttatttatttaaatgtattgaaacagcttttgtgcactaagataaatttcctacaaatgtttaatggaagcttagaagtaaggttatattaagtgttcttagattattaaacttaggacatatcttttaactttgttcattgtctttttcacatgctttaaaccaaacttttttcaatttcatctgtcagttaatatttcctgaatttttaaatttgcttttgtattccctgtaggtttg

SEQ ID NO: 226481 - DNA, 448 bp, Homo sapiens
tattaatttttctacaaatatagttttagacaagttattagttttggtgtatagagtttgttttcattttctagatagtctgcattattagttttaatatcctgctttacacaggaataattaagatagcattwaaaaaattccaggtggctggagattttaaatttttacttttgtaatttctatttttcatataattaatatatttttatttatttaaatgtattgaaacagcttttgtgcactaagataaatttcctacaaatgtttaatggaagcttagaagtaaggttatattaagtgttcttagattattaaacttaggacatatcttttaactttgttcattgtctttttcacatgctttaaaccaaacttttttcaatttcatctgtcagttaatatttcctgaatttttaaatttgcttttgtattccctgtaggtttg

SEQ ID NO: 226482 - DNA, 679 bp, Homo sapiens
  misc_feature (1)...(679): n = A,T,C or G
aatttttaagttttatccactgtattaattggatgtgagctattatgagaatgattacagagtgaaagtgtaaattgtcttgaatttgaatgtcttttaattaagcagtttctcaaactgcttctttcagtgtgaaacctaaataggagacacaagataatnttagcaccaaatgaggcctttaggatttagcttacttgcattcattcagtaaatattcattgtacttattttgcaaaaatgttgtattggctacctaaatcagtgaagggaaactacaaaggtaaatcagaaatgtactgtgagatcaagaagcccgtagctctgaggagagacaaaagtgtctaaaataatgagagtgtgaagtggagaaatgggctagtattgtaggagacagacaagaggaggagaagcttaatcaaggaaatgacaccataagctgaatgtaggctccttttgaggggtagcgtagagccctgtctctgtagttctttctctatcctccatgcctmacacatggttgacatttcatgaatattaaatgattagagtagaaaatcctgactcaaagttctgattttgtcacatacttgcagcatggctaaaaataaggcactacaatttactgaggctcagttcccttacctactaaaataatatggattttaaaatgaatatc

SEQ ID NO: 226483 - DNA, 594 bp, Homo sapiens
atcttggctcactgcaacctctgtcttccaggttcaagtgattctctcactgcagcctcccgagtagctgggattacaggcgcccgccaccatggccagctaatttttgtattttttgtagagaaagggtttcaccatgttggccaggctggtcttgaactcctgacctcaggtgatctgcccacctcagcctcccaaagtgctgggattacaggcgtaagccatcacgcctggccagggatttattttattttgtattaacataaactttttttaaagataaaacaaatacastacttcaatgttggcctgagaccgagtagattaatagaacataatacaaaatttatatacaggttccacaggtaaatactaatgaaaagtaatattctgaaaggtaaattttaatcatatagggtccattttcatatgttaattagacattttatttttttctgtgcattgcttatatttcattagattgtttttaatctaactcatctccctttttccttccctctcccactttatctacctctctctcttttcctctctcattctctttccctctctcttcaacatgtttagaaatgt

SEQ ID NO: 226484 - DNA, 594 bp, Homo sapiens
atcttggctcactgcaacctctgtcttccaggttcaagtgattctctcactgcagcctcccgagtagctgggattacaggcgcccgccaccatggccagctaatttttgtattttttgtagagaaagggtttcaccatgttggccaggctggtcttgaactcctgacctcaggtgatctgcccacctcagcctcccaaagtgctgggattacaggcgtaagccatcacgcctggccagggatttattttattttgtattaacataaactttttttaaagataaaacaaatacagtacttcawtgttggcctgagaccgagtagattaatagaacataatacaaaatttatatacaggttccacaggtaaatactaatgaaaagtaatattctgaaaggtaaattttaatcatatagggtccattttcatatgttaattagacattttatttttttctgtgcattgcttatatttcattagattgtttttaatctaactcatctccctttttccttccctctcccactttatctacctctctctcttttcctctctcattctctttccctctctcttcaacatgtttagaaatgt

SEQ ID NO: 226485 - DNA, 636 bp, Homo sapiens
gtaaatgcatcgttttagtcccctggccacctttttcctatacgtcttcacatcattttccttcgtgagtttgtctgtctctgcatatacaaacttcccctttgtataaggacatcagtcacattgaattagggcctaccctaatgatttcattttaatttgatttcctctgtagacactttatttycaaatgaggttacattttgaggtactgagggttatgacttgaacatgtttttttagtggggtgacacaattccacccataacaacaaacattggaattttacctataaatcgctaaaagtgagatccttttccttttcctacccagtacttcctcctaactgagaataggttggcagatcacctggcttttgcatttggcacctctctcattccaataagagaccaaaggtttccttcagctttttcatatgagttgtatctgcttgatggggtattgcagtgattgtctaccctgcctgcatattggaaccctctaggaaacttacgtatcattctggggtgtgacctgggcatgggttttaaaaaatattctcaggtgactctaatatgagaatacagctgagaacctctacattaggaataatactgaattgattgtttgttgatc

SEQ ID NO: 226486 - DNA, 600 bp, Homo sapiens
acacatgccatgtaataaattgacaaatgtcatcaattcagcctcaaacgcatatccacagcctatatatatactccacgtttcccataaacatcattgttcaggctgttattacctatagggtgaaccattaaaagacctcccaactggttctgtgtttccttgcttgctttcctataatccacccaccaaagaagcagagttatttttaaaataaaataattcaaattaatatcattattctatttaaaacactctaaggcattcccattgcacctgaataaaatcccaatttcttaatctggttggtaagccctatacaaccctgctgcctgcctaccagtctgtctcatcttgwtcatgcttctctctcacccactgtgctccaccttcttgctgtttcttggacacagccagtttattcctgttttagtgccttgcactagctgctccctctgcctggaatgacttgattcaaggtctttgtgtggctggttccatctcttctttcagatcttgatttatgtcacctattccgagaagggtgataacctaattcagccatgaggtcactttatcacattgattcatcataattct

SEQ ID NO: 226487 - DNA, 600 bp, Homo sapiens
acacatgccatgtaataaattgacaaatgtcatcaattcagcctcaaacgcatatccacagcctatatatatactccacgtttcccataaacatcattgttcaggctgttattacctatagggtgaaccattaaaagacctcccaactggttctgtgtttccttgcttgctttcctataatccacccaccaaagaagcagagttatttttaaaataaaataattcaaattaatatcattattctatttaaaacactctaaggcattcccattgcacctgaataaaatcccaatttcttaatctggttggtaagccctatacaaccctgctgcctgcctaccagtctgtctcatcttgttcatgcttctctctcacccactgtgctccaccttcttgctgtttcttggacacagccagtttattcctgttttagtgccttgcactagctgctccstctgcctggaatgacttgattcaaggtctttgtgtggctggttccatctcttctttcagatcttgatttatgtcacctattccgagaagggtgataacctaattcagccatgaggtcactttatcacattgattcatcataattct

SEQ ID NO: 226488 - DNA, 421 bp, Homo sapiens
  misc_feature (1)...(421): n = A,T,C or G
nnnnnnnnnnnnnatatctgagtgtttactcctgagtttttgagattgttattaagatcgtgctctactgtgatgatttgggtttgtttataatcagaaaaaaagcrtattcttttaggtgttcagccacactgctttggtgtcacaactgcacattggtttcacagctgcaggacaagttcgagcatcttaaaatgattcaacaggaggagataaggaagctcgaggaagagaaaaaacaactggaaggagaaatcatagatttttataaaatgaaagctgcctctgaagcactgcagactcagctgagcaccgatacaaagaaagacaaacatcgtaagaagcaatagtttctcttactattctgagagccttatcattctacatcccatcttcctgtgagtttgtctttgtagcattt

SEQ ID NO: 226489 - DNA, 614 bp, Homo sapiens
atctcaccattacactccagcctgggtgacaagagcaaaactgcatctcaaaaaaaaaaaaaaaaagggggtgaacttgaaggcaggtcctgtgtccatcttttcagattctgtatcccagcacttaggacayagacaaacacgaagatgacaatcaatatttgccaaaatgaaaaaacaaaagaaacatgtaacatcatgtaaaagaagctggttaggtggagaaatttatttaccatagtcttgcttgtggatccagtagtgacttttacagtttgtatctaaatagaagctggaggctttgttggggactcataggcataaaatattatttattatagagttaaatgctacaaagacaaatctaattaataggcctattttcctttttaaattctactcataatttcttcatagtttttatgataaaaggttggattttgattagaactcccatgattttgtgtcagaattaaaactggtattagaataaataattcaaaagctagagaaagagtacaaagagaagccatgagttgcatttgaattataatattatgtcttacagatttggggtatatgctaaagttaccaaagttgtagaaaataaggcc

SEQ ID NO: 226490 - DNA, 614 bp, Homo sapiens
atctcaccattacactccagcctgggtgacaagagcaaaactgcatctcaaaaaaaaaaaaaaaaagggggtgaacttgaaggcaggtcctgtgtccatcttttcagattctgtatcccagcacttaggacatagacaaacacgaagatgacaatcaatatttgccaaaatgaaaaaacaaaagaaacatgtaacatcatgtaaaagaagctggttaggtggagaaatttatttaccatagtcttgcttgtggatccagtagtgacttttacagtttrtatctaaatagaagctggaggctttgttggggactcataggcataaaatattatttattatagagttaaatgctacaaagacaaatctaattaataggcctattttcctttttaaattctactcataatttcttcatagtttttatgataaaaggttggattttgattagaactcccatgattttgtgtcagaattaaaactggtattagaataaataattcaaaagctagagaaagagtacaaagagaagccatgagttgcatttgaattataatattatgtcttacagatttggggtatatgctaaagttaccaaagttgtagaaaataaggcc

SEQ ID NO: 226491 - DNA, 526 bp, Homo sapiens
tctgacacatagcggcaattattcattgaataaatggacccagcgatagtacattagctatgctatatgcatacattaaagatgtagattatygactttcaaaagataattaatgtaacttcttactgcttctgaacatgtttgtgagttatattgctgagggacctttatcttctcattctttcatcttaacccagtgttataaaattgaaatcaccaatattattccatatctaaaattaatatctaccttgtaaaaaatatcactctgctgcatttgagaatagactttttaggtaataatgatgcaatccatagggttttttgggggcacagagggattcatgctaacagaacattttattttctattttcccagagctgtaaaacatgaaattacggtagtataaggcatatttttactctttttataattttttctaaaaaaaattagtgtttgttccctatataacttttaactttataggtaaatatttgtttctttcagctccagttttatgtgaaa

SEQ ID NO: 226492 - DNA, 583 bp, Homo sapiens
atatctaccttgtaaaaaatatcactctgctgcatttgagaatagactttttaggtaataatgatgcaatccatrgggttttttgggggcacagagggattcatgctaacagaacattttattttctattttcccagagctgtaaaacatgaaattacggtagtataaggcatatttttactctttttataattttttctaaaaaaaattagtgtttgttccctatataacttttaactttataggtaaatatttgtttctttcagctccagttttatgtgaaatagagttttcagatttatgtagcatggaaagttttaatacgtcagagttactgatttttgccaatcattttctcaattatttcttttttatctttagttgatttttttgtagtgacacattttgtttctagtctcatttccttttgtttatattctatatatatttcatttttggttactatgagaattacatataacatcctagagttataacattttaatttgaatttatttcaacttaagttcaatcacataccaaaattctactgctatatatatagctctactctttttatgtt

SEQ ID NO: 226493 - DNA, 583 bp, Homo sapiens
atatctaccttgtaaaaaatatcactctgctgcatttgagaatagactttttaggtaataatgatgcaatccatagggttttttgggggcacagagggattcatgctaacagaacattttattttctattttcccagagctgtaaaacatgaaattacggtagtataaggcatatttttactctttttataattttttctaaaaaaaattagtgtttgttccctatataacttttaactttataggtaaatatttgtttctttcagctccagttttatgtgaaatagagttttcagatttatgtagcatggaaagttttaatacgtcagagttactgatttttgccaatcattttctcaattatttcttttttatctttagttgatttttttgtagtgacacattttgtttctagtctcatttccttttgtttatattctatrtatatttcatttttggttactatgagaattacatataacatcctagagttataacattttaatttgaatttatttcaacttaagttcaatcacataccaaaattctactgctatatatatagctctactctttttatgtt

SEQ ID NO: 226494 - DNA, 555 bp, Homo sapiens
aagcttaacacgccccctgattctacattatggtgagttctataattattttattatatattacagtgtaataatggaaataaagtgcctaataaatgcmaatgtgcttacatcttttggcccagctcctacctcccggcagcctctccaggcccagaactttctccagtcagcctctacagaccaagctcatgactcacaatggcctatttaggcccataccctacgtcacggcagcctccgcagatgagcctactgcctcacaacagcctccacaggcacagctccatcgttacaatggcctctttagacccagctcctgcctcccagccttctctccaggccctgaactttctcaagtcgacctcaccaggcccagctcatgcttctttgcagcctctccaggcccagctcctgcatcttggtggcccctccaggcccagcctctgcctcccgtcagcctctacagtcccaacgtctgcctcacagcagattcttcaggcccagcatctgcctcactgtggaccccccaagccaagctcccaacctttcagc

SEQ ID NO: 226495 - DNA, 555 bp, Homo sapiens
aagcttaacacgccccctgattctacattatggtgagttctataattattttattatatattacagtgtaataatggaaataaagtgcctaataaatgccaatgtgcttacatcttttggcccagctcctacctcccggcagcctctccaggcccagaactttctccagtcagcctctacagaccaagctcatgactcacaatggcctatttaggcccataccctaygtcacggcagcctccgcagatgagcctactgcctcacaacagcctccacaggcacagctccatcgttacaatggcctctttagacccagctcctgcctcccagccttctctccaggccctgaactttctcaagtcgacctcaccaggcccagctcatgcttctttgcagcctctccaggcccagctcctgcatcttggtggcccctccaggcccagcctctgcctcccgtcagcctctacagtcccaacgtctgcctcacagcagattcttcaggcccagcatctgcctcactgtggaccccccaagccaagctcccaacctttcagc

SEQ ID NO: 226496 - DNA, 555 bp, Homo sapiens
aagcttaacacgccccctgattctacattatggtgagttctataattattttattatatattacagtgtaataatggaaataaagtgcctaataaatgccaatgtgcttacatcttttggcccagctcctacctcccggcagcctctccaggcccagaactttctccagtcagcctctacagaccaagctcatgactcacaatggcctatttaggcccataccctacgtcacggcagcctccgcagatgagsctactgcctcacaacagcctccacaggcacagctccatcgttacaatggcctctttagacccagctcctgcctcccagccttctctccaggccctgaactttctcaagtcgacctcaccaggcccagctcatgcttctttgcagcctctccaggcccagctcctgcatcttggtggcccctccaggcccagcctctgcctcccgtcagcctctacagtcccaacgtctgcctcacagcagattcttcaggcccagcatctgcctcactgtggaccccccaagccaagctcccaacctttcagc

SEQ ID NO: 226497 - DNA, 555 bp, Homo sapiens
aagcttaacacgccccctgattctacattatggtgagttctataattattttattatatattacagtgtaataatggaaataaagtgcctaataaatgccaatgtgcttacatcttttggcccagctcctacctcccggcagcctctccaggcccagaactttctccagtcagcctctacagaccaagctcatgactcacaatggcctatttaggcccataccctacgtcacggcagcctccgcagatgagcctactgcctcacaacagcctccacaggcacagctccatcgttacaatggcctctttagacccagctcctgcctcccagccttctctccaggccctgaactttctcaagtcgacctcaccaggcccagctcatgcttctttgcagcctctccaggcccagctcctgcatcttggtggcccctccaggcccagcctctgcctcccgtcagcctctacagtcccaamgtctgcctcacagcagattcttcaggcccagcatctgcctcactgtggaccccccaagccaagctcccaacctttcagc

SEQ ID NO: 226498 - DNA, 596 bp, Homo sapiens
ggcctttgcaggcccggcctcctgcctctcgaggcctgcacgggcccggcctgggcctcggcctcacagcrgactctccacgcccagctagctctcgcctcactgggggctccccagtccaaagctcctgcctttcggccactttggcaggtccagctcctgcctgccagtggcctctttaggcccagcttattcctcacgtcggccattccaggccccgtttttcccttccggcagcctcttggcctctaatttgtttatcttttgggtataaatcccaaaatattgaattttggaatatttccaccattatgtaaatgttttggtaggtatttaatttggagtgagttttgcgccaagcccgaattttttattttattttccttattatttgggtgttaaacaggtttaatgacggtcatggcaactttttggcacaatgaaaaatatcgcccccgatcaacgtgttctgtctggggaaaggggcaaaggcagggtgaatcactttcttaaaaagtatagctcaagttgggagtgcagagggaatggggagaaaaccctcccgctgcctgtgtcgaagtgcaggagcccccacc

SEQ ID NO: 226499 - DNA, 596 bp, Homo sapiens
ggcctttgcaggcccggcctcctgcctctcgaggcctgcacgggcccggcctgggcctcggcctcacagcggactctccacgcccagctagctctcgcctcactgggggctccccagtccaaagctcctgcctttcggccactttggcaggtccagctcctgcctgccagtggcctctttaggcccagcttattcctcacgtcggccattccaggccccgtttttcccttccggcagcctcttggcctctaatttgtttatcttttgggtataaatcccaaaatattgaattttggaatatttccaccattatgtaaatrttttggtaggtatttaatttggagtgagttttgcgccaagcccgaattttttattttattttccttattatttgggtgttaaacaggtttaatgacggtcatggcaactttttggcacaatgaaaaatatcgcccccgatcaacgtgttctgtctggggaaaggggcaaaggcagggtgaatcactttcttaaaaagtatagctcaagttgggagtgcagagggaatggggagaaaaccctcccgctgcctgtgtcgaagtgcaggagcccccacc

SEQ ID NO: 226500 - DNA, 557 bp, Homo sapiens
tggccatgtgctgggaatgagcagctcacgtgggcggcagcagggctgcccacgggtcacctccctcaccaggggctgcaaagtggcctggagctccatgctgagtagaaggctttgggccagagtatgatgcagtgccagacaccacctgtgtcagttcccgtagtgcctgrcggtctatttccctgccgtccaggctgtgtaccccgctgtgggagaaggcttgggccaggctgagccaggttccctgactgtgtgcagccgttctgccccacagaagctgctccttggcatccgagctctggagtgtttgggctgcaactgacaggagttcagaggacgccccaggggcagtggcagtgcccgtctctgatatgctccgctcccacgagcccttgttacactcctgctagcccctggcttgtgggcttggcctctgagctggacttctttcggtccttgttgcaagtgggccaccttcacctggaaggccaggttgtatttctgcatctcattgggccccagggtgtaccaccgctcgctcagcatctggctga

SEQ ID NO: 226501 - DNA, 557 bp, Homo sapiens
tggccatgtgctgggaatgagcagctcacgtgggcggcagcagggctgcccacgggtcacctccctcaccaggggctgcaaagtggcctggagctccatgctgagtagaaggctttgggccagagtatgatgcagtgccagacaccacctgtgtcagttcccgtagtgcctggcggtctatttccctgccgtccaggctgtgtaccccgctgtgggagaaggcttgggccaggctgagccaggttccctgactgtgtgcagccgttctgccccacagaagctgctccttggyatccgagctctggagtgtttgggctgcaactgacaggagttcagaggacgccccaggggcagtggcagtgcccgtctctgatatgctccgctcccacgagcccttgttacactcctgctagcccctggcttgtgggcttggcctctgagctggacttctttcggtccttgttgcaagtgggccaccttcacctggaaggccaggttgtatttctgcatctcattgggccccagggtgtaccaccgctcgctcagcatctggctga

SEQ ID NO: 226502 - DNA, 370 bp, Homo sapiens
gaacagtgggggcgctgcccaggtgcaggactggccccctgggggtctcgggacggctcccgcctccgtcttccccgcaccgcgcactttggaggcctgggcacaggyggaggcggcgctgggtcccgccgtacactcccctgtcgcaggcgccctctctccagccggagggaacctcaaaaaagctctgagcgagtccccgtcccaggtggggccgcggcttataccgggaccactccagggtagctcaaggttcgaaaacggaatccctgtccggtgaaccagagaagagaaaatcgctcggggccacctgggtagagaccggaggagtgactgccttgactgggaggcgtggaggagcgagcggggt

SEQ ID NO: 226503 - DNA, 370 bp, Homo sapiens
gaacagtgggggcgctgcccaggtgcaggactggccccctgggggtctcgggacggctcccgcctccgtcttccccgcaccgcgcactttggaggcctgggcacaggcggaggcggcgctgggtcccgccgtacactcccctgtcgcaggcgccctctctccagccggagggaacctcaaaaaagctctgagcgagtccccgtcccaggtggggccgcggcttataccgggaccactccagggtagctcaaggttcgaaaacggaatccctgtccggtgaaccagagaagagaaaatcgctcggggccacctgggtagagaccggaggrgtgactgccttgactgggaggcgtggaggagcgagcggggt

SEQ ID NO: 226504 - DNA, 550 bp, Homo sapiens
ttggcaataaatgggaacttattttattgcagagggtccagctctgtgctaagggaaaatctgcaaagtcttaaagaagcagaagcatgatggagtgagtaggtaacacttacctgacagcctaacacrtggcaggtggtatttggggaatgagtctgtagacgggcaaggctacggagagcaaactcaatgtcgccacatggattggagaagggtctgtgggaaagttcactctcatggaaaacagttcttataattatgaaatagtttcattgttctgattgaaattgagctgagtttactgcctcccccttctcattttctttcttcatctttctcccacttctcttcctccgttcccttccctttcttcttcttcctaactgcccatacaagtagccatcgtctgctgcataatatcattaattcaaaatgatctttcttatttcaaataggaaatgtcactttgaattaatgtgaactatgtctcctatcatcctttttacctgacaataatataaggccatgtgtgactctctttattttctta

SEQ ID NO: 226505 - DNA, 550 bp, Homo sapiens
ttggcaataaatgggaacttattttattgcagagggtccagctctgtgctaagggaaaatctgcaaagtcttaaagaagcagaagcatgatggagtgagtaggtaacacttacctgacagcctaacacatggcaggtggtatttggggaatgagtctgtagacgggcaaggctacggagagcaaamtcaatgtcgccacatggattggagaagggtctgtgggaaagttcactctcatggaaaacagttcttataattatgaaatagtttcattgttctgattgaaattgagctgagtttactgcctcccccttctcattttctttcttcatctttctcccacttctcttcctccgttcccttccctttcttcttcttcctaactgcccatacaagtagccatcgtctgctgcataatatcattaattcaaaatgatctttcttatttcaaataggaaatgtcactttgaattaatgtgaactatgtctcctatcatcctttttacctgacaataatataaggccatgtgtgactctctttattttctta

SEQ ID NO: 226506 - DNA, 417 bp, Homo sapiens
cagccactctaacattttttagctcctggaccaagacaagctcttcccagaacctgacctttgtacctgttctttattcctggagtatttttcccctgacaaattacttatcatctatcataattcaggttamatggcactaactcagggaaggcttccctaactgcctcccttctccaaccaaattaggaacaattatatggccacatagtatcgaatcaagtttataattttaaaataattgggagattttgttgtttaacacttgttttcactataagactgtaattacatgcaagtaagaaccatgcctgtttgttcactcctgccacagtcagaatagtgcctggaatatgcagtaagggctgaacaagcactaaataaatgaacaagtgaataaatggatattgtctcatt

SEQ ID NO: 226507 - DNA, 601 bp, Homo sapiens
ggcctacaaggccctgagcaatgtggcacctgctgaagcctgctgcctcatttaataactctttgtctctttcccagatccagccactctaacattttttagctcctggaccaagacaagctcttcccagaacctgacctttgtacctgttctttattcctggagtatttttcccctgacaaattacttatcatctatcataattcaggttaaatggcactaactcagggaaggcttccctaactgcctcccttctccaaccaaattaggaacaattatatggccacatagtatygaatcaagtttataattttaaaataattgggagattttgttgtttaacacttgttttcactataagactgtaattacatgcaagtaagaaccatgcctgtttgttcactcctgccacagtcagaatagtgcctggaatatgcagtaagggctgaacaagcactaaataaatgaacaagtgaataaatggatattgtctcatttttagaacagagtactgaatggatcatgaacactatctggtatgtcacgtaggtaatttacaagggctacactttcagctcagatttaccttttcctggataca

SEQ ID NO: 226508 - DNA, 557 bp, Homo sapiens
actctttgtctctttcccagatccagccactctaacattttttagctcctggaccaagacaagctcttcccagaacctgacctttgtacctgttctttattcctggagtatttttcccctgacaaattacttatcatctatcataattcaggttaaatggcactaactcagggaaggcttccctaactgcctcccttctccaaccaaattaggaacaattatatggccacatagtatcgaatcaagtttataattttaaaataattgggagattttgttgtttaacacttgttttcactataagactgtaattacatgcaagtaagaaccatgcctgtttgttcactcctgccacagtcagaatagtgcctggaatatgcagtaagggctgaacaagcactaaataaatgaacaagtgaataaatggatattgtctcatttttagaacagagtactraatggatcatgaacactatctggtatgtcacgtaggtaatttacaagggctacactttcagctcagatttaccttttcctggatacaggtcttgataggt

SEQ ID NO: 226509 - DNA, 531 bp, Homo sapiens
tgaataaatggatattgtctcatttttagaacagagtactgaatggatcatgaacactatctggtatgtcacgtaggtaatttacaagggctacastttcagctcagatttaccttttcctggatacaggtcttgataggtctcttgatgtcatttcacttcagattcttctttagaaaacttggacaatagcatttgctgtcttgtccaaattgttactaagaatcaagagagatatctgacatgaaatgacattggaaaacattaaacaccattgaaataatgctagccaatatggttattattagaaaccaattacattttcaacttaaaaatagtaatacttattgcagactcaaatgtgcttattctaaaacaagtaaatgtttgcctatggtctgagattctaatccacggagttcattctaatccacattcaacactatcatgtaccagtgggcctcataacccacctagccctgtgatttttcaggttcacttttctaaacttgtgaattaaatatttatttt

SEQ ID NO: 226510 - DNA, 531 bp, Homo sapiens
tgaataaatggatattgtctcatttttagaacagagtactgaatggatcatgaacactatctggtatgtcacgtaggtaatttacaagggctacactttcagctcagatttaccttttcctggatacaggtcttgataggtctcttgatgtcatttcacttcagattcttctttagaaaacttggacaatagcatttgctgtcttgtccaaattgttactaagaatcaagagagatatctgacatgaaatgacattggaaaacattaaacacsattgaaataatgctagccaatatggttattattagaaaccaattacattttcaacttaaaaatagtaatacttattgcagactcaaatgtgcttattctaaaacaagtaaatgtttgcctatggtctgagattctaatccacggagttcattctaatccacattcaacactatcatgtaccagtgggcctcataacccacctagccctgtgatttttcaggttcacttttctaaacttgtgaattaaatatttatttt

SEQ ID NO: 226511 - DNA, 514 bp, Homo sapiens
tcaacactatcatgtaccagtgggcctcataacccacctagccctgtgatttttcaggttcacttttctaaacttgtgaattaaatatttattttcttagttcagaagaggaaaaaaactcttgtaattgttgcccatttcaggagaaatcttgcatatgaaaacaagagataaatatacacaactgagggctgtggtttaaacaaaatcttgagaatgttttttgaccttatacatttgtgctttagtataacaaaatgatatagacaaaggtaacttttaatagaaccagtcactaaattaaaaaaatgacaaattcttctgcttagctaagcaacagagaaggtaaaatactaattcaattcatcaatttaagcaatactcattaagagccaagtatgtgcttactgaataagctgctaaggtttggtggttacagagtgtgyggtgaaatgatgtctacatcacagtccaacattcacagagtttaaaagcctaccaagaatcaagacag

SEQ ID NO: 226512 - DNA, 485 bp, Homo sapiens
gaatttcttcttgtgccctctccctctctctctttctcttgccctctcatttgaatgaagccaaccggcatgctgtcagtggcmcagtgtaagtcctgttacaagaaattgatgattacctgtagccaaccctaagtgaagaactgaggtcctcagtcctacaaatggagagaaactgaatctagctaagaaccatgtgagtgagctgggaagaagatccaccctcagttgaaatttaagatgacatattgagcagacatactgagacacactgaaagtaagagagcaggaggaaacaaaaccagggtcatacaaagaacacaactgattttgagattctcacataagtattacaccttcagtgagcacgtgtactagaaatttaaaaaataaataaaataaaccttcaaagtgagctagcaaataaatttccctatggtctcagctctgagtggagagagaaaatgttccctgtggagtttata

SEQ ID NO: 226513 - DNA, 422 bp, Homo sapiens
ttgggttctgtgcccacactctagactgtcaggctaagatctctgatataaaacagacctcttctgatttttgtctagctgcttttctaatatctattcaccaagctcttccaataatagcataaggccctaattaatattaaacttttatcattataatacataggatgtcytctgttttcctgatcaaattctgactactattaaaatataaagaattgtccagaaatatataaaaaaagaatcacacattgatcttctttaaatgaaaatataacaattgtatggactaggatgattacagttgttcagttctgactgttatttgaagaaaaaagcagtaagaagcctcagcaacttaacagaaggagctgccatttactaggagaaaagattgtggatgagagtgtagcaaaggtcag

SEQ ID NO: 226514 - DNA, 465 bp, Homo sapiens
gaatcctttatgagctcccactgtccatctggataagatttacagacctttcagaaattcctataagcttgggttctgtgcccacactctagactgtcaggctaagatctctgatataaaacagacctcttctgatttttgtctagctgcttttctaatatctattcaccaagctcttccaataatagcataaggccctaattaatattaaacttttatcattataatacataggatgtcttctgttttcctgatcaaattctgactactattaaaatataaagaattgtccagaaatatataaaaaaagaatcacacattgrtcttctttaaatgaaaatataacaattgtatggactaggatgattacagttgttcagttctgactgttatttgaagaaaaaagcagtaagaagcctcagcaacttaacagaaggagctgccatttactaggagaaaagattg

SEQ ID NO: 226515 - DNA, 463 bp, Homo sapiens
aatcctttatgagctcccactgtccatctggataagatttacagacctttcagaaattcctataagcttgggttctgtgcccacactctagactgtcaggctaagatctctgatataaaacagacctcttctgatttttgtctagctgcttttctaatatctattcaccaagctcttccaataatagcataaggccctaattaatattaaacttttatcattataatacataggatgtcttctgttttcctgatcaaattctgactactattaaaatataaagaattgtccagaaatatataaaaaaagaatcacacattgatcttctttaaatgaaaatataacaattgtatggactaggatgattacagttgttcagttctgactgttattygaagaaaaaagcagtaagaagcctcagcaacttaacagaaggagctgccatttactaggagaaaagatt

SEQ ID NO: 226516 - DNA, 558 bp, Homo sapiens
tataatgaattatcttttatactcactacaatttcctaacaattttggggtttatatttttgaaagagatatacctttaatttyctttctttgtactattgttaggtaactttgatgtgcagattatactacagtgaaagttgccaatgacaaggcaaagtcacttacatcagacccaaagcaaagtggagccgggtcatgaaaaaggggatcttgtgtgtctgtccacgataagcactatcacaaggactttctataaactcacaagaaatttctgcccacccagcacactctgtttgtccagctcatcctgtaggtgtctctataataggacctatcataaaaaattcctcaagactgcagcatttcagataagccaccctcacaagaacacttgcctagcaatggctgtttctgccagtaagttaacaccagctcctgcatcagaccctgtgaccaatgatgtttgtttcaaaacagcttgcatggacttctttttgtctttacatattttccttacctcaacctcttgggatgcacctatgattgatcatagca

SEQ ID NO: 226517 - DNA, 641 bp, Homo sapiens
tttttgtgtttagtttttcttttgtgattggggaggggggtttatcgtactgattcaaggtgtgaaggtaacatcattttgattttatacatcttcttcagtccatttaagcatgttacatagcgttgtttgttcttttcatgatattctttacagtagtctcctaaatgttccctctgcttctgccatgagcccctacaatctatttcaactcagaagctatagagtttgtttaaaacatgtaacatattatgccacctttcttacygtaaaacatcccatggtttctcgtagtatttatagtaaaagtgaaatttttatgatggcttgagaaactttttcccattagatgcccaagtgctggtctggtctgatcttctcatcttcccttgggtgattctgtggcagtcacactagcctccttgctgctccacaaaaactccagcatgatcctacttcaggatatttgccattgttactgcatctgcctggaaccttttctcccatataaacatagagattgctcttgcctgtccttcaagtctattcttaaatgtcccattctctgtgaagctttcctgcccaccctatttaaattacagacttcactcccaattccccatctactttaagagtcttcc

SEQ ID NO: 226518 - DNA, 641 bp, Homo sapiens
tttttgtgtttagtttttcttttgtgattggggaggggggtttatcgtactgattcaaggtgtgaaggtaacatcattttgattttatacatcttcttcagtccatttaagcatgttacatagcgttgtttgttcttttcatgatattctttacagtagtctcctaaatgttccctctgcttctgccatgagcccctacaatctatttcaactcagaagctatagagtttgtttaaaacatgtaacatattatgccacctttcttactgtaaaacatcccatggtttctcrtagtatttatagtaaaagtgaaatttttatgatggcttgagaaactttttcccattagatgcccaagtgctggtctggtctgatcttctcatcttcccttgggtgattctgtggcagtcacactagcctccttgctgctccacaaaaactccagcatgatcctacttcaggatatttgccattgttactgcatctgcctggaaccttttctcccatataaacatagagattgctcttgcctgtccttcaagtctattcttaaatgtcccattctctgtgaagctttcctgcccaccctatttaaattacagacttcactcccaattccccatctactttaagagtcttcc

SEQ ID NO: 226519 - DNA, 419 bp, Homo sapiens
cgtctgtctccaaatactggaatgttaagttctgtaatgtcagatatttctgtttggttcactggtgtattcttaaagcatgttacatactaggtatactcaatgaatatttgttgaatamatatcacattgggcttattccagaaattcaagcttgtttcaatagttagagcaatctacaaatgtaattcattacattaactaattaaaggagctaaatcacatcaccaccacaataatgcagaaaaccacatttgatacaactcaatattcatgtctgcctaacaaacatctcatgatactaggaaaagaggaagggatatattattttcatgtataaagcactaaccattgtagcatgccaatatactcaaaattcaatgaaattcctatcaaaatcttagcattcctcttagtcc

SEQ ID NO: 226520 - DNA, 419 bp, Homo sapiens
cgtctgtctccaaatactggaatgttaagttctgtaatgtcagatatttctgtttggttcactggtgtattcttaaagcatgttacatactaggtatactcaatgaatatttgttgaataaatatcacattgggcttattccagaaattcaagcttgtttcaatagttagagcaatctacaaatgtaattcattacattaactaattaaaggagctaaatcacatcaccaccacaataatgcagaaaamcacatttgatacaactcaatattcatgtctgcctaacaaacatctcatgatactaggaaaagaggaagggatatattattttcatgtataaagcactaaccattgtagcatgccaatatactcaaaattcaatgaaattcctatcaaaatcttagcattcctcttagtcc

SEQ ID NO: 226521 - DNA, 419 bp, Homo sapiens
cgtctgtctccaaatactggaatgttaagttctgtaatgtcagatatttctgtttggttcactggtgtattcttaaagcatgttacatactaggtatactcaatgaatatttgttgaataaatatcacattgggcttattccagaaattcaagcttgtttcaatagttagagcaatctacaaatgtaattcattacattaactaattaaaggagctaaatcacatcaccaccacaataatgcagaaaaccacatttgatacaactcaatattcatgyctgcctaacaaacatctcatgatactaggaaaagaggaagggatatattattttcatgtataaagcactaaccattgtagcatgccaatatactcaaaattcaatgaaattcctatcaaaatcttagcattcctcttagtcc

SEQ ID NO: 226522 - DNA, 400 bp, Homo sapiens
tttcttaggggaaacttctctgactcacatcaaatccctctcttatagtaattttcattgtatttcagagtaatttttatggttgcaattttacatttgtgtgattgtttgattaatctctgtctcctccacgaaaactccaagatgcaggaactatatcttactggcatycagcacaatacctggcacataggtgttcaaaaaatactaatagggtaaataaatgaattaattttatgcttttattttaatattttcatggtattaatatttctctctatgtgatattttgtatgtacctattttcttttaatttgaagatttatagtttagttatgtgctgtataaattatatttagttctttaatttttgtgttatttccaagggtgctctccattg

SEQ ID NO: 226523 - DNA, 400 bp, Homo sapiens
tttcttaggggaaacttctctgactcacatcaaatccctctcttatagtaattttcattgtatttcagagtaatttttatggttgcaattttacatttgtgtgattgtttgattaatctctgtctcctccacgaaaactccaagatgcaggaactatatcttactggcattcagcacaatacctggcacrtaggtgttcaaaaaatactaatagggtaaataaatgaattaattttatgcttttattttaatattttcatggtattaatatttctctctatgtgatattttgtatgtacctattttcttttaatttgaagatttatagtttagttatgtgctgtataaattatatttagttctttaatttttgtgttatttccaagggtgctctccattg

SEQ ID NO: 226524 - DNA, 400 bp, Homo sapiens
tttcttaggggaaacttctctgactcacatcaaatccctctcttatagtaattttcattgtatttcagagtaatttttatggttgcaattttacatttgtgtgattgtttgattaatctctgtctcctccacgaaaactccaagatgcaggaactatatcttactggcattcagcacaatacctggcacataggtgttcaaaaaatactaatagggtaaataaatgaattaattttatgcttttattttaatattttcatggtattaatatttctctctatgtgatattttgtatgtacmtattttcttttaatttgaagatttatagtttagttatgtgctgtataaattatatttagttctttaatttttgtgttatttccaagggtgctctccattg

SEQ ID NO: 226525 - DNA, 535 bp, Homo sapiens
ttaattttttaaatcttaaaaacatttatctacttaagcctggctctggatgggaataagggaaaaggcccttcttaacgtaaggcataagaactaatggtcagcatgatacttcctcacattgctcttacaatagttaccatcacccaggtgtatattaggtgccaattccctgctagatgtggtgcttggtttagctctgttctcatgacaattctggagagttgtcactattacacctattttcgagatgagatcattgaggcttggggaagttaatctctgtgtaaacatttcacaactcatggcaaggcagccagattcagactgaggcccagagggctcagcagtccccmcacagtcattcttttactcttggctcctctatgtaaagttttccttcactgtttcatttgttgatgtaaaggataggatatgggagcttctttcctgtgacgagtttaccacccaggcctcagtggtaatgaactgaaaactgtaggttgcaaagctgcactctggcagctgcaatagt

SEQ ID NO: 226526 - DNA, 515 bp, Homo sapiens
cgcaagaggctgaggcaggagaatgacatgaacctgggaggcggagcttgcagtaagccgagactgagccactgcactccagcctgggcaatagagcaagactccatctcaaaaaaaaaaaaaatcggctcatcttttattgctgttggttgagatgaatctactgatgaagaaaactgtactttgcttacattcagaataaggctttcaaaactgtgggtgtgctgttttcgtgagccttctacttgaccaccaaagacagtatttttgcagctgtatcaaatgaaccgagttggaggaaattgtataggagtatatcttaatggcactacagcaaactgtgttaaatttgggtttttggcaaagattgaagaaaactggtattcaagatgtactgcarctgtcaccaccaagcatgaactttcactgattacccataacctactggaaatcttcagccttgctgtcagcatagaccactgtgagaaacagtacattccattccagtttgccct

SEQ ID NO: 226527 - DNA, 621 bp, Homo sapiens
tgaagtttcttggttgccaaagaaaaacggattctgctgaacttgtggacagaacaaccccaaggttggaagaamaatgaaaaataatctatacttgaacatttcaaaagttaaaattttcaacagagttttaacacactgaagcttaaaatacattgacactgaaatgtcaatgggcaaacaccaatttcgccgttcattatgaaatacatcaaacaaaacttgccaaaaatacaaccataaaaatatagcaaatgtatgtatgagcaaactaatgctaaaaatgtctaattttcttggctagtctttcaaggaccagattcatgagtgttatttgaagggaaaaagtgaaatacttggaattattttgagtgatgtgctcctgagcttgttcttaaaatctaccagtggtagcttttggaaagaatgtgtttcataccgatgtgcaggcctcactggaagagcttcaagaggagtttgtgaaactcaaagtctaatggttttgattagaaacttccaggcaaatactctagagaaacttgggtgtaaaatgactaaacagatgaaaaggctttatccactattccatttgctccttacaccttaaaaagcttttttatt

SEQ ID NO: 226528 - DNA, 621 bp, Homo sapiens
tgaagtttcttggttgccaaagaaaaacggattctgctgaacttgtggacagaacaaccccaaggttggaagaaaaatgaaaaataatctatacttgaacatttcaaaagttaaaattttcaacagagttttaacacactgaagcttaaaatacattgacactgaaatgtcaatgggcaaacaccaatttcgccgttcattatgaaatacatcaaacaaaacttgccaaaaatacaaccataaaaatatagcaaatgtatgtatgagcaaactaatgctaaaaatgtctaattttcttggctagtctttcaaggaccagattcatgagtgttatttgaagggaaaaagtgaaatacttggaattattttgagtgatgtgctcctgagcttgttcttaaaatctaccagtggtagcttttggaaagaatgtgtttcataccgatgtgcaggcctcactggaagagcttcaagaggagtttgtgaaactcaaagtctaatggttttgattagaaacttccaggcaaatactcyagagaaacttgggtgtaaaatgactaaacagatgaaaaggctttatccactattccatttgctccttacaccttaaaaagcttttttatt

SEQ ID NO: 226529 - DNA, 614 bp, Homo sapiens
aaagaaaaaaaaaaacataaatagggagaaaatatttttaacacatttacccaacaaaggctaatattcaacgtttawttaaattaaaaacaaaagacagctgaaaagaaaattggacagaatatgtgaataccacttagaaaaacaattttaatggagtccaacctcattagtaactagagaaatgtaactgaagactccagggcaatactactacacacactctagaattacagacccgcctgaaaaggaagaggtgctcggagaacggactgccacaaagtgaggatggcaatttcatttggaggggaaggccagtagcgatttggagagatgactacaggagcttccgcagagctgccagtgttctatttctttattttatttgtgtggttgttacaattctgcaatttaaaaaaaaaaggaggaagaaagagatggagaaagggaacttctcttcaccaaaatatttaagttttctgtgttttgaggcaaaaggcaaaaactacagcttcggaaatgatcctaaaaaacttaataataataataataaaaacggcaagtcatactctaaatatcaaaacataaccaaaaaccaaggaaacaagcagaaa

SEQ ID NO: 226530 - DNA, 538 bp, Homo sapiens
gaattcattcactacttaagccttggcaggttttgtacatgaagcaagagtattaaagactgtattggtrtaggagtcaagaagaggaaggtgtcaagaacgactccaagaatttgaggcaaatgatgggagaatacagcactcttaagaagggaagggcaattcccaaaggaggttaattctataagcggatttggagctcaagagaaaaggacttctgattatggatgatttttccataaatgatgatgacaggtttggagtttaggccagggttccaggatagaaagagaaaagccagaatttttaaagaagctggagacatggtggttatttatagcatcagaggaacaatcataaagagaaataagaaaagaaatatgaccactaaaccactcagaatgccaaagtttgagaaatttacattgagaaggggggaaatggagacatacaataggtgctcaagagatagaagacagatgtccaatttcatggaaatcaagagggtagtggatttaaaggtgatggaatacttgga

SEQ ID NO: 226531 - DNA, 538 bp, Homo sapiens
gaattcattcactacttaagccttggcaggttttgtacatgaagcaagagtattaaagactgtattggtgtaggagtcaagaagaggaaggtgtcaagaacgactccaagaatttgaggcaaatgatgggagaatacagcactcttaagaagggaagggcaattcccaaaggaggttaattctataagcggatttggagctcaagagaaaaggacttctgattatggatgatttttccataaatgatgatgacaggtttggagtttaggccagggttccaggatagaaagagaaaagccagaattttyaaagaagctggagacatggtggttatttatagcatcagaggaacaatcataaagagaaataagaaaagaaatatgaccactaaaccactcagaatgccaaagtttgagaaatttacattgagaaggggggaaatggagacatacaataggtgctcaagagatagaagacagatgtccaatttcatggaaatcaagagggtagtggatttaaaggtgatggaatacttgga

SEQ ID NO: 226532 - DNA, 356 bp, Homo sapiens
gggtatggattctgcatttaaaagtgctgaagctgagagactgggtcttggtggaccccgagaggtctgtttctcctctactcattgttcytttttttcccaacagctggcattgctgtttaaatgggttgttctttgctgttttaagttgtttcatagtggtgtgtcaggatttgggttttcttaatactttccaagctggtgacttgagtggtggttagggaggaaatgttttagggctgttctggagctattgaggtcgggtgtctagatactcccagcttgtctgttgaggagaatgctgttctcattgtgctgcctttggtggtgctgtgtgtggctctttagatgtgcgt

SEQ ID NO: 226533 - DNA, 356 bp, Homo sapiens
gggtatggattctgcatttaaaagtgctgaagctgagagactgggtcttggtggaccccgagaggtctgtttctcctctactcattgttccwttttttcccaacagctggcattgctgtttaaatgggttgttctttgctgttttaagttgtttcatagtggtgtgtcaggatttgggttttcttaatactttccaagctggtgacttgagtggtggttagggaggaaatgttttagggctgttctggagctattgaggtcgggtgtctagatactcccagcttgtctgttgaggagaatgctgttctcattgtgctgcctttggtggtgctgtgtgtggctctttagatgtgcgt

SEQ ID NO: 226534 - DNA, 272 bp, Homo sapiens
atggttatataaaatatatatttatatatgtttccttttgaaagggttatcttacttacgttccctgacatatctttagaattatcgtttaatgattaaactaaatatttccacatttcattattttatctaacacacaatttgttttaattccatgctataatatatttcagtctatataacaaatacaatgaatatagaaagaaggcattggatttatttagtgctctgcaactcttaactttgttkttatatgacattacaaaaaggtt

SEQ ID NO: 226535 - DNA, 272 bp, Homo sapiens
atggttatataaaatatatatttatatatgtttccttttgaaagggttatcttacttacgttccctgacatatctttagaattatcgtttaatgattaaactaaatatttccacatttcattattttatctaacacacaatttgttttaattccatgctataatatatttcagtctatataacaaatacaatgaatatagaaagaaggcattggatttatttagtgctctgcaactcttaactttgtttytatatgacattacaaaaaggtt

SEQ ID NO: 226536 - DNA, 574 bp, Homo sapiens
taataattatctcttcaagttgactttcatgtctttttgacgtgatcctgttggactttgatggcttccttgctttctggcaaaacagatgttccaggatcaatatactgcaccatacatggagtcagccgtttctctagggaaccttgattccttttagtagagaacacagtttgaggtcttggactgaatgacttttgtgaacctcctctcctgagactacagcctgcatccctgcatatagcccgtttggagctcttgctgggcaccaacagatctcctaaaactgctatatagttctgcctcactcttacaaagattcatctcttgagagttttgtgctctacccccagatgtggtctttctggttmtgaagcttttgcttcagtcaccctgaattttgccagccctatgcatgctataccttggattgccaacttgccctcactgaagccagtttctctggttagaatagttgcccaaacccatgcctaatactctagtaaacaaggttctacctgggcttaggttaacttttgctcctttgggccctgtgttctaccagcattccatt

SEQ ID NO: 226537 - DNA, 590 bp, Homo sapiens
aagcttttgcttcagtcaccctgaattttgccagccctatgcatgctataccttggattgccaacttgccctcactgaagccagtttctctggttagaatagttgcccmaacccatgcctaatactctagtaaacaaggttctacctgggcttaggttaacttttgctcctttgggccctgtgttctaccagcattccatttatctgaaactctccctcaccttaagaacttatctgttctttaatgatttactgctgcttcctgggctcaaaagaacccagttcaggagtttctgttttagtttgagatcttataggcctgtctcatcaggttggtgtcagcccagctaggattaggcagaattgggtgggggctgtagtgcatttttggcacagcatgtacctgtctgactaattctctgtcttttctttcctgttgcaattcatgggtcttagcatcttctgaatggtgtttagtaggtcatcctgttgatttcctgctagggagtagcatactctggctctgtaccattggccaagggacttaaggatagatgaagggctgcagttttgttaaatggaacaatatg

SEQ ID NO: 226538 - DNA, 318 bp, Homo sapiens
caaagattcatctcttgagagttttgtgctctacccccagatgtggtctttctggttctgaagcttttgcttcagtcaccctgaattttgccagccctatgcatgctataccttggattgccaacttgccctcactgaagccagtttctctggttagaatagttgcccaaacccatgcctaatactctagtaaacaaggttctacctgggcttasgttaacttttgctcctttgggccctgtgttctaccagcattccatttatctgaaactctccctcaccttaagaacttatctgttctttaatgatttactgctg

SEQ ID NO: 226539 - DNA, 318 bp, Homo sapiens
caaagattcatctcttgagagttttgtgctctacccccagatgtggtctttctggttctgaagcttttgcttcagtcaccctgaattttgccagccctatgcatgctataccttggattgccaacttgccctcactgaagccagtttctctggttagaatagttgcccaaacccatgcctaatactctagtaaacaaggttctacctgggcttaggttaacttttgctcctttgggccctgtgttctaccagcattccatttatctgaaactstccctcaccttaagaacttatctgttctttaatgatttactgctg

SEQ ID NO: 226540 - DNA, 318 bp, Homo sapiens
caaagattcatctcttgagagttttgtgctctacccccagatgtggtctttctggttctgaagcttttgcttcagtcaccctgaattttgccagccctatgcatgctataccttggattgccaacttgccctcactgaagccagtttctctggttagaatagttgcccaaacccatgcctaatactctagtaaacaaggttctacctgggcttaggttaacttttgctcctttgggccctgtgttctaccagcattccatttatctgaaactctccctcaccttaagaacktatctgttctttaatgatttactgctg

SEQ ID NO: 226541 - DNA, 590 bp, Homo sapiens
aagcttttgcttcagtcaccctgaattttgccagccctatgcatgctataccttggattgccaacttgccctcactgaagccagtttctctggttagaatagttgcccaaacccatgcctaatactctagtaaacaaggttctacctgggcttaggttaacttttgctcctttgggccctgtgttctaccagcattccatttatctgaaactctccctcaccttaagaacttatctgttctttaatgatttactgctgcttcctgggytcaaaagaacccagttcaggagtttctgttttagtttgagatcttataggcctgtctcatcaggttggtgtcagcccagctaggattaggcagaattgggtgggggctgtagtgcatttttggcacagcatgtacctgtctgactaattctctgtcttttctttcctgttgcaattcatgggtcttagcatcttctgaatggtgtttagtaggtcatcctgttgatttcctgctagggagtagcatactctggctctgtaccattggccaagggacttaaggatagatgaagggctgcagttttgttaaatggaacaatatg

SEQ ID NO: 226542 - DNA, 498 bp, Homo sapiens
ttagaatagttgcccaaacccatgcctaatactctagtaaacaaggttctacctgggcttaggttaacttttgctcctttgggccctgtgttctaccagcattccatttatctgaaactctccctcaccttaagaacttatctgttctttaatgatttactgctgcttcctgggctcraaagaacccagttcaggagtttctgttttagtttgagatcttataggcctgtctcatcaggttggtgtcagcccagctaggattaggcagaattgggtgggggctgtagtgcatttttggcacagcatgtacctgtctgactaattctctgtcttttctttcctgttgcaattcatgggtcttagcatcttctgaatggtgtttagtaggtcatcctgttgatttcctgctagggagtagcatactctggctctgtaccattggccaagggacttaaggatagatgaagggctgcagttttgttaaatggaacaatatga

SEQ ID NO: 226543 - DNA, 590 bp, Homo sapiens
aagcttttgcttcagtcaccctgaattttgccagccctatgcatgctataccttggattgccaacttgccctcactgaagccagtttctctggttagaatagttgcccaaacccatgcctaatactctagtaaacaaggttctacctgggcttaggttaacttttgctcctttgggccctgtgttctaccagcattccatttatctgaaactctccctcaccttaagaacttatctgttctttaatgatttactgctgcttcctgggctcaaaagaacccagttcaggagtttctgttttagtttgagatcttataggcctgtctcatcaggttggtgtcagcccagctaggattaggcagaattgggtgggggctgtagtgcatytttggcacagcatgtacctgtctgactaattctctgtcttttctttcctgttgcaattcatgggtcttagcatcttctgaatggtgtttagtaggtcatcctgttgatttcctgctagggagtagcatactctggctctgtaccattggccaagggacttaaggatagatgaagggctgcagttttgttaaatggaacaatatg

SEQ ID NO: 226544 - DNA, 498 bp, Homo sapiens
ttagaatagttgcccaaacccatgcctaatactctagtaaacaaggttctacctgggcttaggttaacttttgctcctttgggccctgtgttctaccagcattccatttatctgaaactctccctcaccttaagaacttatctgttctttaatgatttactgctgcttcctgggctcaaaagaacccagttcaggagtttctgttttagtttgagatcttataggcctgtctcatcaggttggtgtcagcccagctaggattaggcagaattgggtgggggctgtagtgcatttttggcacagcatgtacctgtctgactaattctctgtcttttctttcctgttgcaattcatgggtcttagcatcttctgaatggtgtttagtaggtcatcctgttgatttcctgctagggagtagcatactctggcyctgtaccattggccaagggacttaaggatagatgaagggctgcagttttgttaaatggaacaatatga

SEQ ID NO: 226545 - DNA, 590 bp, Homo sapiens
aagcttttgcttcagtcaccctgaattttgccagccctatgcatgctataccttggattgccaacttgccctcactgaagccagtttctctggttagaatagttgcccaaacccatgcctaatactctagtaaacaaggttctacctgggcttaggttaacttttgctcctttgggccctgtgttctaccagcattccatttatctgaaactctccctcaccttaagaacttatctgttctttaatgatttactgctgcttcctgggctcaaaagaacccagttcaggagtttctgttttagtttgagatcttataggcctgtctcatcaggttggtgtcagcccagctaggattaggcagaattgggtgggggctgtagtgcatttttggcacagcatgtacctgtctgactaattctctgtcttttctttcctgttgcaattcatgggtcttagcatcttctgaatggtgtttagtaggtcatcctgttgatttcctgctagggagtagcatactctggctctgtaccattggccaagggacttaaggatagrtgaagggctgcagttttgttaaatggaacaatatg

SEQ ID NO: 226546 - DNA, 530 bp, Homo sapiens
ctggcttgcttcctctttgtcttccgccatgattgtagatttcctgaggcctcccaagctgtrctgaactgtgagccaattaaactactttcctttataaattacccagtcttgggcagttctttatagcagtatgaaaacagaaaaatacacctactatgtaaaacttaaaatacaaaaaaacaaaacattatcttactaacataggagctaatattttggtgtactttgtttagtattttatattaaaaatatgtacatatatatttatatataattaagaacatgtatgtacaatcgtgcatacatcatgtacatacatctacttaagaaaatagctatgtaatataccattactcaactagattataattttttctccatttctttattgtaatttatcattttctacttttttgttttctcatttttattgcataatatttaattatgcaaaaaatacattaaatacattgaaaatatatagtgtagctataagaataaagaacgatggtaaaacaaatgctaat

SEQ ID NO: 226547 - DNA, 530 bp, Homo sapiens
ctggcttgcttcctctttgtcttccgccatgattgtagatttcctgaggcctcccaagctgtgctgaactgtgagccaattaaactactttcctttataaattacccagtcttgggcagttctttatagcagtatgaaaacagamaaatacacctactatgtaaaacttaaaatacaaaaaaacaaaacattatcttactaacataggagctaatattttggtgtactttgtttagtattttatattaaaaatatgtacatatatatttatatataattaagaacatgtatgtacaatcgtgcatacatcatgtacatacatctacttaagaaaatagctatgtaatataccattactcaactagattataattttttctccatttctttattgtaatttatcattttctacttttttgttttctcatttttattgcataatatttaattatgcaaaaaatacattaaatacattgaaaatatatagtgtagctataagaataaagaacgatggtaaaacaaatgctaat

SEQ ID NO: 226548 - DNA, 530 bp, Homo sapiens
ctggcttgcttcctctttgtcttccgccatgattgtagatttcctgaggcctcccaagctgtgctgaactgtgagccaattaaactactttcctttataaattacccagtcttgggcagttctttatagcagtatgaaaacagaaaaatacacctactatgtaaaacttaaaatacaaaaaaacaaaacattatcttactaacataggagctaatattttggtgtactttgtttagtattttatattaaaaatatgtacatatatatttatatataattaagaacatgtatgtacaatcgtgcatacatcatgtacatacatctacttaagaaaatagctatgtaatataccattactcaactagattataattttttctccatttctttattgtaatttatcattttctacttttttgttttctcatttttattgcataatatttaattatgcaaaaaatacattaaatacattgaaaatatatartgtagctataagaataaagaacgatggtaaaacaaatgctaat

SEQ ID NO: 226549 - DNA, 632 bp, Homo sapiens
actgctatccctcttatcctttcattaattttcttctagttttctcacatgtgaatctatttctaaatacatttctttattttgcaagttttkggacttcatataaatgtaaccatattgtatatattcttcttcagcttcttagtttttcactaaacaatatgttttgctgatacttacattcatatgtacagtaatggttgatttattttaatggctatatattattccattgttagaatacaccaggatttatttttacttattttttttgctggaaaattgggtgtcttttttattttttgatataacaaacaatgttgtaatcattttgtatttacttcctagtccactcctgtaagtttctcttgagtacatactagcaatgaatatgctgagtcactgcatatacatactcacaactttattctataatgtaatattctataaagtagctgtatcagtttatactttaaccagtaatggacaagattttctgttacttcccatctttgttaattattacttttagactctaacttttatcaggctcatggatgtaaaaagcatctcagggtggttttaatttgcatttatctgctcatctatgaagatgagcttcttttcatata

SEQ ID NO: 226550 - DNA, 314 bp, Homo sapiens
ttccaattgaaattccctcaactactcagaattactgctatccctcttatcctttcattaattttcttctagttttctcacatgtgaatctatttctaaatacatttctttattttgcaagtttttggacttcatataaatgtaaccatattgtatatattcttcttcagcttcttagtttttcactaaacaatatgttttgctgatayttacattcatatgtacagtaatggttgatttattttaatggctatatattattccattgttagaatacaccaggatttatttttacttattttttttgctggaaa

SEQ ID NO: 226551 - DNA, 523 bp, Homo sapiens
gatactaaagctcagacaggagaagagacgtggccagcctgtgtccccagggcctatggtcttaccactaggttacagtgtttccagatatcacatgttgtgagatttttgctttaaaatgaaccaaaaaaaaccaaaggtgaaaaaggcataagctattaaaaagtgggagaaacactaagagaaccttaagcatgtaactaaaaatattatggaaatgttattgaatwcattagcaaatttagtgctaggttttcattgaggagtaggttatattactcatgatgaagaaaaatgttcattttaagtatattaacataaataccatcaatattgtttatcatgtttaaatgttcacttaaagcaattcagttaaaattctgcatatcatacaattttatagtttgctagtaggttacaagtaaatagtcacccaaataaaaacatcatgttttccactggttgttgctcttttttaggtgagtatttgatgtataccaacagagagaggataataacaaat

SEQ ID NO: 226552 - DNA, 523 bp, Homo sapiens
gatactaaagctcagacaggagaagagacgtggccagcctgtgtccccagggcctatggtcttaccactaggttacagtgtttccagatatcacatgttgtgagatttttgctttaaaatgaaccaaaaaaaaccaaaggtgaaaaaggcataagctattaaaaagtgggagaaacactaagagaaccttaagcatgtaactaaaaatattatggaaatgttattgaattcattagcaaatttagtgctaggttttcattgaggagtaggttatattactcatgatgaagaaaaatgttcattttaagtatattaacataaataccatcaatattgtttatcatgtttaaatgttcacttaaagcaattcagttaaaattctgcatatcatacaattttatagtttgctagtaggttacaagtaaatagtcacccaaataaaaacatcatgttttccactggttgttgctcttttttaggtgagtatttgatrtataccaacagagagaggataataacaaat

SEQ ID NO: 226553 - DNA, 603 bp, Homo sapiens
ccatttatttatagagttactttgtcttttactaattcaatgatctgtttaatcttttattaaattataaaaatrataaatacttttaaataagtgaaaaatgtccttcactctttagacccataatcttatctcaggaaataattgcagttgagaaaatgggccatatccttcaagatacgtacatggtgattgaacatcacttcatattttcatatttcgtggacatttgtgccaatacctattgatctatcttaatccttttcatggttgcataatattttattatatggatgtgtcacaatttaccagtaccagtcaactgctggaggcatttaggctccttctaatatttgctttgagctctttatataattaaaaattaaccccctcagccaggtgtggcagctcacacctttaatcccagcattttggaaggctgaggtgagagaactgcctgagtgtaggagatcaccaccaacctggtcaacatagtgacactttgtctctactaaaaattaaaaaaaaaaaaatgagctacacgttgcagtgcacacctgtagtccgagctactggggaggctaagactggaggatcacttga

SEQ ID NO: 226554 - DNA, 603 bp, Homo sapiens
ccatttatttatagagttactttgtcttttactaattcaatgatctgtttaatcttttattaaattataaaaataataaatacttttaaataagtgaaaaatgtccttcactctttagacccataatcttatctcaggaaataattgcagttgagaaaatgggccatatccttcaagatacgtacatggtgattgaacatcacttcatattttcatatttcgtggacatttgtgccaatacctattgatctatcttaatccttttcatggttgcataatattttattatatggatgtrtcacaatttaccagtaccagtcaactgctggaggcatttaggctccttctaatatttgctttgagctctttatataattaaaaattaaccccctcagccaggtgtggcagctcacacctttaatcccagcattttggaaggctgaggtgagagaactgcctgagtgtaggagatcaccaccaacctggtcaacatagtgacactttgtctctactaaaaattaaaaaaaaaaaaatgagctacacgttgcagtgcacacctgtagtccgagctactggggaggctaagactggaggatcacttga

SEQ ID NO: 226555 - DNA, 603 bp, Homo sapiens
ccatttatttatagagttactttgtcttttactaattcaatgatctgtttaatcttttattaaattataaaaataataaatacttttaaataagtgaaaaatgtccttcactctttagacccataatcttatctcaggaaataattgcagttgagaaaatgggccatatccttcaagatacgtacatggtgattgaacatcacttcatattttcatatttcgtggacatttgtgccaatacctattgatctatcttaatccttttcatggttgcataatattttattatatggatgtgtcacaatttaccagtaccagtcaactgctggaggcatttaggctccttctaatatttgctttgagctctttatataattaaaaattaaccccctcagccaggtgtggcagctcacacctktaatcccagcattttggaaggctgaggtgagagaactgcctgagtgtaggagatcaccaccaacctggtcaacatagtgacactttgtctctactaaaaattaaaaaaaaaaaaatgagctacacgttgcagtgcacacctgtagtccgagctactggggaggctaagactggaggatcacttga

SEQ ID NO: 226556 - DNA, 620 bp, Homo sapiens
tgacaaaaattacaaatgagcctaactaataaattatcagctgtgtttatatgtataagcatgcacagattttggtaaatatgtacatagtatattggtgagcttatttttatcattcttaactcattgtgtagtctaaacgttggggaaaaaataaaatacaataatcagatggtgtgaataagaaaattgttctaatgtttgtaaaccaagcaactgttttaactgctcccctcttcctgattgacttctaaaagggattgatccatattgggtcctatcatatacgtcacggtataacatctccagctataaaatggaaatttgagawtaactttgctgctactcagatacattttatttcaaaaacatacactaaggtgttgctgttggatctttccaaaaacatattcacacagaactttcaatcacactgagccatatttgaacaatctttcaaggtcagctctggcataagctaacattataccatttaactcagaaatttctttagtatttgattaatgggtttatgtttgatatgtaatgtaattttctaatgctaaatcaagtggtaattttgttagtcaagttgatttagtggcttgggaagaaagctt

SEQ ID NO: 226557 - DNA, 620 bp, Homo sapiens
tgacaaaaattacaaatgagcctaactaataaattatcagctgtgtttatatgtataagcatgcacagattttggtaaatatgtacatagtatattggtgagcttatttttatcattcttaactcattgtgtagtctaaacgttggggaaaaaataaaatacaataatcagatggtgtgaataagaaaattgttctaatgtttgtaaaccaagcaactgttttaactgctcccctcttcctgattgacttctaaaagggattgatccatattgggtcctatcatatacgtcacggtataacatctccagctataaaatggaaatttgagattaactttgctgctactcagatacattttatttcaaaaacatacactaaggtgttgctgttggatctttccaaaaacatattcacacwgaactttcaatcacactgagccatatttgaacaatctttcaaggtcagctctggcataagctaacattataccatttaactcagaaatttctttagtatttgattaatgggtttatgtttgatatgtaatgtaattttctaatgctaaatcaagtggtaattttgttagtcaagttgatttagtggcttgggaagaaagctt

SEQ ID NO: 226558 - DNA, 559 bp, Homo sapiens
gagattaactttgctgctactcagatacattttatttcaaaaacatacactaaggtgttgctgttggatctttccaaaaacatattcacacagaactttcaatcacactgagccatatttgaacaatctttcaaggtcagctctggcataagctaacattataccatttaactcagaaatttctttagtatttgattaatgggtttatgtttgatatgtaatgtaattttctaatrctaaatcaagtggtaattttgttagtcaagttgatttagtggcttgggaagaaagcttttaatgttcccctaatttttcttacctttgacatgatccttcacatgtcttattttgcttagtgatttttctttttttttttttttttgagacagggtcttactctaccacccaggcttgagtgcagtggtgcaatcacagctcattgcagccttgacctcccagactcaagctattcttccacctcagcctcccaagtagctggtactacagggcacatgccaccaaacttggctaattttgtattttttgtagagacagagtt

SEQ ID NO: 226559 - DNA, 559 bp, Homo sapiens
gagattaactttgctgctactcagatacattttatttcaaaaacatacactaaggtgttgctgttggatctttccaaaaacatattcacacagaactttcaatcacactgagccatatttgaacaatctttcaaggtcagctctggcataagctaacattataccatttaactcagaaatttctttagtatttgattaatgggtttatgtttgatatgtaatgtaattttctaatgctaaatcaagtggtaattttgttagtcaagttgatttagtggcttgggaagaaagcttttaatgttcccctaatttttcttwcctttgacatgatccttcacatgtcttattttgcttagtgatttttctttttttttttttttttgagacagggtcttactctaccacccaggcttgagtgcagtggtgcaatcacagctcattgcagccttgacctcccagactcaagctattcttccacctcagcctcccaagtagctggtactacagggcacatgccaccaaacttggctaattttgtattttttgtagagacagagtt

SEQ ID NO: 226560 - DNA, 600 bp, Homo sapiens
cagcatcgctgcacttattttttattctactctgacattagaataatccttgagtgggggaaaggttaaaaacccccctggataagtgttactaattaatgatgattgttttaaacaatgtttggataatttttccttgtcccttgacataaacttgataaataactgagaagtgagaaggagattagtgggttgattaaattccattcaggtacttaaagtkagctccaaaaatttagctatttgtaaattgtcatgcattgttaatgtataagagatgtagatttcatttatctttggtggagcgagatcaagcagtgaatcattgaagactgaaagaaagaaaaaggtcttttcccttttctttaagaagcatcattagttaaaaacatgttagttgataccacagaactatatttaaagggacagcaacaagcaaattgattactctggtgattattggagtgacattgccttttagttgtactttcacaaaaattcacaatatttgccaaagtcaagttatccattacactattaatttgtcattcttttgtttatatagtcaatatctctatctcaattggatctatctcaact

SEQ ID NO: 226561 - DNA, 600 bp, Homo sapiens
cagcatcgctgcacttattttttattctactctgacattagaataatccttgagtgggggaaaggttaaaaacccccctggataagtgttactaattaatgatgattgttttaaacaatgtttggataatttttccttgtcccttgacataaacttgataaataactgagaagtgagaaggagattagtgggttgattaaattccattcaggtacttaaagtgagctccaaaaatttagctatttrtaaattgtcatgcattgttaatgtataagagatgtagatttcatttatctttggtggagcgagatcaagcagtgaatcattgaagactgaaagaaagaaaaaggtcttttcccttttctttaagaagcatcattagttaaaaacatgttagttgataccacagaactatatttaaagggacagcaacaagcaaattgattactctggtgattattggagtgacattgccttttagttgtactttcacaaaaattcacaatatttgccaaagtcaagttatccattacactattaatttgtcattcttttgtttatatagtcaatatctctatctcaattggatctatctcaact

SEQ ID NO: 226562 - DNA, 600 bp, Homo sapiens
cagcatcgctgcacttattttttattctactctgacattagaataatccttgagtgggggaaaggttaaaaacccccctggataagtgttactaattaatgatgattgttttaaacaatgtttggataatttttccttgtcccttgacataaacttgataaataactgagaagtgagaaggagattagtgggttgattaaattccattcaggtacttaaagtgagctccaaaaatttagctatttgtaaattgtcatgcattgttaatgtataagagatgtagatttcatttatctttggtggagcgagatcaagcagtgaatcattgaagactgaaagaaagaaaaaggtcttttcccttttctttaagaagcatcattagttaaaaacatgttagttgataccacagaactatatttaaagggacagcaacaagcaaattgattactctggtgattattggagtgacattgccttttagttgtactttcacaaaaattcacaatatttgccaaagtcaagttatccattacactattaatttgtcattcttttgtttatatastcaatatctctatctcaattggatctatctcaact

SEQ ID NO: 226563 - DNA, 672 bp, Homo sapiens
tttgtttatatagtcaatatctctatctcaattggatctatctcaactgcttctaaacaagccaccagtctctcccatttcaacaatctcttccaagtaccayttcatttcttcttttcatatttttgaaaacttttgaaaaactacctattttcctcctccatttcttgttcattccattctagtggacatggaatctgttcctcctccaaaacggaatttggtcacccttaaattactaaacccaaaacaatatgttgtctttatctttacctctctgtggcatttaatgataagaccactactttcttctcttttacccttctttcttgaattcagtcaaacaacgtacttacatttttcgtcttattctccatcttagaaaccacctcagctttctccattcagctataaaattgtgcttttcctcaaagattaatctgcctctcctctcactctatactatctctgttagctaattttatttgtgcacattgcttatactgggcattatatacacatatgcatgtgtgtacatgtgcacacacacactgtatgtggacatgtatatatatatgtgtgtgtgtatatatatagtatatatataaattacaataacataaaggtggcattttaaattagtggaaattaccctgatttgatcactacaca

SEQ ID NO: 226564 - DNA, 672 bp, Homo sapiens
tttgtttatatagtcaatatctctatctcaattggatctatctcaactgcttctaaacaagccaccagtctctcccatttcaacaatctcttccaagtaccacttcatttcttcttttcatatttttgaaaacttttgaaaaactacctattttcctcctccatttcttgttcattccattctagtggacatggaatctgttcctcctccaaaacggaatttggtmacccttaaattactaaacccaaaacaatatgttgtctttatctttacctctctgtggcatttaatgataagaccactactttcttctcttttacccttctttcttgaattcagtcaaacaacgtacttacatttttcgtcttattctccatcttagaaaccacctcagctttctccattcagctataaaattgtgcttttcctcaaagattaatctgcctctcctctcactctatactatctctgttagctaattttatttgtgcacattgcttatactgggcattatatacacatatgcatgtgtgtacatgtgcacacacacactgtatgtggacatgtatatatatatgtgtgtgtgtatatatatagtatatatataaattacaataacataaaggtggcattttaaattagtggaaattaccctgatttgatcactacaca

SEQ ID NO: 226565 - DNA, 357 bp, Homo sapiens
actgtgattccatgaaactctttttattcataaattacccggtcttggatatgtctttatcagcagcatgaaaatggactaatgcaagcagaataagcagaattcttcgatactgactcagcacccacacacgttggttccaagatgtagaaatggaagcttcaaggcttttaacatctggacatcaaaactggaagttttactttcactgtattttattggtcaaagcagtcaaagagcccacccaggttcaaggagaaagaatatgtccccacgttttcaacrggatggtgccacaaaatttctagtcatcttaattcaccacagatagaaatatgaagagctcatttgttatgt

SEQ ID NO: 226566 - DNA, 438 bp, Homo sapiens
tgagttgcaccgctatcacactggtcaaagccaccatcctctctcatgaattattgcaatagccttccaactgatctgcctgatttgcccatttgccctgcctacaatttattcttaacacaaaacacaaagcaattcttagatcccaagtcagatcatgtcactgcctagctcaaaactttcaatgcctwtccctcttatgcaaagtaaaaggctaaaagtttacaaggcctaccaaaccctaaagattcgatactttttcctctctaacctcatctcttactactaggtcccatactccttcccttcagctacattgatctctttgtagttcttccaacacagaaggcatgcttctacttcagggccttggtatctgctgctactcccatctggaatgcccatccctctgttatccatatgcctgggtccctcatc

SEQ ID NO: 226567 - DNA, 622 bp, Homo sapiens
tgacagttttgacttcatttgaaaaactgttgtatgacagagatataaaaaaatgtaaaaagccaaacccacaggttagaagatttttacaatgttcctaagcaacaaataattcatctcaagtatcaatttaaaagatgaacaactcaaaagaaaaataaataaagaaacaagcaagcacttcacagaaaaagaaatacttattatagccaatacataaggaaagatatacagctttactagtaatcaggaaaatgcaaatgccatctcactccatttaggctggtgaaatttaaagtgtatgactttactaagtgtgggtagagaaatagaaaccttcatcacgagtacaaccacaacaaaatacattttggcatcattagttaaagttaaaaatattcacacatgcctatgacccagaactatttcgaattactccaagagaaactctcacatctttggagaaagaaacatactcaaggacatttctgtagtgcctttcacaacagaagagctttatgtaacctaactgtccatcaataggggaatgtaygaataaagttagaatcatacaatggaaaaaatatatagcatagtctaaatgaataattggagctatatg

SEQ ID NO: 226568 - DNA, 591 bp, Homo sapiens
tgttcaaccttggtagtgacttatcatcaatatgcttattgggtaccaaccatcagatgagcaattactttcttagttaacactgaacacactaatttactaatctaagccatccctcaaggcaatttcttactttataagctgacttctaagttaaactttaggattacatagaaaatagttctttcttatctgataataattaatttgcagtttatgtaattttatgtatgcttcatgcacccattcaatcagaataaattgggtaagtgacttgaagaatcaaagaaagtgctacataccattcttcagagtcttcatttgccttccatttttcctaacattttccctaacactttaattttggttggcaaacagtcggcaggtgacagtttggtcaaatgtcttaccactgcatagtgagggtcacccactttgtagyctgagatgattgagtccaaacccatcattgctctatctgctccattcactcattttccccattttatgggttacacataacttatagcacccttgtttacaataatcatacaccatcagttataaatatatggagctgcaagtaagaga

SEQ ID NO: 226569 - DNA, 581 bp, Homo sapiens
tacttttggctagtttttacttcatggccagcgcagacacacagggggagaaatcctgcctcctctggacttcctaaatctctccccaagaagagaatgatttagtaccttcaacagtaacttctctactttgcrtcactgaaacagcattaggaagaccataggtggaattcaatactctcactcgacttctctacactcctggccatattaattttatcccaaagctaaagtatttaacttggcaatgtgattgaagacatgttagagcaaaatagcatttttcttttaaaagacaacaatatacattgtaaataaagaataatttactccaaagaatgctcttttaacttggccatgtggtcaaagtcacttttattatggcttggagtgatatgcaattattatatttagacagcatttactttggacaagggtgccaaatttgtacagttgcacaccatatgcttttcattttgcaataatcaattccaagatttccattttccctgctttttctaggcagtctttcttaaatgacagcatttaaaaattgcagtagccatgtttagtgaattatg

SEQ ID NO: 226570 - DNA, 553 bp, Homo sapiens
gaagggacgaggaccctgattggtttttctattagggcagttttagacctgggagctgaaagcactgggggaagtgactgtaaagagrtataacacgtgacatcgtagagagaaggggtggcccatgcggactaggagcctgtggtccaggatgtgaacaaccatgtactgaacagtgcttacaagcaaaaggacctaacagcaatcattagaaaagctgccttcattagatcactaaatgttctgagaggcagctatgctcaactcctcaggaattcatttagctggtgtagcctcaggccacactttctttatgagaagcaggcaaataactgtgattcaaattgatagcagggaatttacaaagcactaatcacaaaaacacaaacacatttcaggagcacaattgtgtctgtgagccttcagcacacaagctattcaatctgtatctacatctgagtctgtaactatgaactgagcactagatacttatattcccaagggctaattatgatcaaatggtccatttaatctactctgtctcataagacaa

SEQ ID NO: 226571 - DNA, 553 bp, Homo sapiens
gaagggacgaggaccctgattggtttttctattagggcagttttagacctgggagctgaaagcactgggggaagtgactgtaaagagatataacacgtgacatcgtagagagaaggggtggcccatgcggactaggagcctgtggtccaggatgtgaacaaccatgtactgaacagtgcttacaagcaaaaggacctaacagcaatcattagaaaagctgccttcattagatcactaaatgttctgagaggcagctatgctcaactcctcaggaattcatttagctggtgtagcctcaggccacactttctttatgagaagcaggcaaataactgtgattcaaattgatagcagggaatttmcaaagcactaatcacaaaaacacaaacacatttcaggagcacaattgtgtctgtgagccttcagcacacaagctattcaatctgtatctacatctgagtctgtaactatgaactgagcactagatacttatattcccaagggctaattatgatcaaatggtccatttaatctactctgtctcataagacaa

SEQ ID NO: 226572 - DNA, 553 bp, Homo sapiens
gaagggacgaggaccctgattggtttttctattagggcagttttagacctgggagctgaaagcactgggggaagtgactgtaaagagatataacacgtgacatcgtagagagaaggggtggcccatgcggactaggagcctgtggtccaggatgtgaacaaccatgtactgaacagtgcttacaagcaaaaggacctaacagcaatcattagaaaagctgccttcattagatcactaaatgttctgagaggcagctatgctcaactcctcaggaattcatttagctggtgtagcctcaggccacactttctttatgagaagcaggcaaataactgtgattcaaattgatagcagggaatttacaaagcactaatcacaaaaacacaaacacatttcargagcacaattgtgtctgtgagccttcagcacacaagctattcaatctgtatctacatctgagtctgtaactatgaactgagcactagatacttatattcccaagggctaattatgatcaaatggtccatttaatctactctgtctcataagacaa

SEQ ID NO: 226573 - DNA, 553 bp, Homo sapiens
gaagggacgaggaccctgattggtttttctattagggcagttttagacctgggagctgaaagcactgggggaagtgactgtaaagagatataacacgtgacatcgtagagagaaggggtggcccatgcggactaggagcctgtggtccaggatgtgaacaaccatgtactgaacagtgcttacaagcaaaaggacctaacagcaatcattagaaaagctgccttcattagatcactaaatgttctgagaggcagctatgctcaactcctcaggaattcatttagctggtgtagcctcaggccacactttctttatgagaagcaggcaaataactgtgattcaaattgatagcagggaatttacaaagcactaatcacaaaaacacaaacacatttcaggagcacaattgtgtctgtgagccttcagcacacaagctattcaatctgtatctacatctgagtctrtaactatgaactgagcactagatacttatattcccaagggctaattatgatcaaatggtccatttaatctactctgtctcataagacaa

SEQ ID NO: 226574 - DNA, 516 bp, Homo sapiens
atataaggtattaataagaaccagagagggtttgattgatcacagcatgaattaatatctagatatgaaatgcagaaatacatgcattcagaaataatctcctttccttccagaacactcagattgaccaggaacagaatttaaacatctacagtctctctgtggctatgattataattatgaacattcccaacagtgttgtagatatgtaagtgatatactgaggaatttctttttcagaaagtatataaaggcatctatcatagttttttcttcagatctgaaacaattagtagacacgcacaggttattttttttcccatcccgtgagccaggatgccagggcatatatctgrtcagccacatctcaggggttctgcttcaattttcccaggttttcttctgtgtcccccagtggtccctggaagctccccacctcttggcaagaatacaacattgccaggaaggtgccagggcggttggttaatcattggtccaaagaacttcctgcagctt

SEQ ID NO: 226575 - DNA, 436 bp, Homo sapiens
tcaattccagcaatgtctttatcatcagcctttcttagtctgtcacttggaggatgttctatcctgtcctactgtccataagaccaagcagctcggaggactcccatgaatcagtgaaaagcaccttgcaccattctgggcragcagtgggactcagcttctgtggattttgaattgttgcatgaaatcagtcagtatttcggagcatcggtgatcagaggtgtctcctacatatttgtttgtattcctataagcatccaacacaatggccagtaggtagttaatgctgattaaatgtttactgagagaagagacgaatgcaggtatttatgtatatttgggtttgggtcattgttttcttctctttttttcctttctacacataggataaagagtctgtaatacacgactagaataatttgatacttaaaaaaac

SEQ ID NO: 226576 - DNA, 436 bp, Homo sapiens
tcaattccagcaatgtctttatcatcagcctttcttagtctgtcacttggaggatgttctatcctgtcctactgtccataagaccaagcagctcggaggactcccatgaatcagtgaaaagcaccttgcaccattctgggcaagcagtggractcagcttctgtggattttgaattgttgcatgaaatcagtcagtatttcggagcatcggtgatcagaggtgtctcctacatatttgtttgtattcctataagcatccaacacaatggccagtaggtagttaatgctgattaaatgtttactgagagaagagacgaatgcaggtatttatgtatatttgggtttgggtcattgttttcttctctttttttcctttctacacataggataaagagtctgtaatacacgactagaataatttgatacttaaaaaaac

SEQ ID NO: 226577 - DNA, 436 bp, Homo sapiens
tcaattccagcaatgtctttatcatcagcctttcttagtctgtcacttggaggatgttctatcctgtcctactgtccataagaccaagcagctcggaggactcccatgaatcagtgaaaagcaccttgcaccattctgggcaagcagtgggactcagcttctgtggattttgaattgttgcatgaaatcagtcagtatttcggagcatcggtgatcagaggtgtctcctacatatttgtttgtattcctataagcatccaacacaatggccagtaggtagttaatgctgattaaatgtttactgagagaagagacgaatgcaggtatttatgtatatttgggtttgggtcattgttttcttctctttttttyctttctacacataggataaagagtctgtaatacacgactagaataatttgatacttaaaaaaac

SEQ ID NO: 226578 - DNA, 410 bp, Homo sapiens
gcttaatttatagactattaagagtacacacactttactctgtaataaaaaaaaaatccttgcaactgaggtttktaaattgctctccaggtgacactggagcaaggcaggggaggaatgtggtctattcccaaagcagatagcaagaactttgacccaagtcctgcccataccatttaccagccgtgtgtctttgggaaattgacgtcttctttttgaccctgagttttcatgactgttcaactataaaatgtgagggtgataataacacctacgccttagggttttgtttgttttgttttaaatataaaataacacaatatactcaaaaatattttataaagtgtaaaacatcagagggcattagaaagtattctgcaacttctccttttgcagaggactatggaaac

SEQ ID NO: 226579 - DNA, 365 bp, Homo sapiens
ataaaaaacaattatctgtttctttatggctttacattttataactgtcctacttattatttaaaaaaataagaatgagtgattgaaagactgaagggaacctcttatttcagaaaagatttaaggtatttaaaaaatctgtgtgcatttgtattaagtcattcttgcattggtacaaagaaatacctgagactgtataatttatcaataaaaaaggtttaattggctcacagttctgcagcctttaccagtagcatggcgtgggcatctgytcagcttccaggtaggcctcaggtggcttacatatcatggtggaaggcaaaggggcagcaggcacatcacatgacaacagcaggaacaggtga

SEQ ID NO: 226580 - DNA, 562 bp, Homo sapiens
ctcaggaaacttaaaatcatggcagaaggtgaaggggacgcatgcacatcttatatggccagggcacaaggaagagagagaagaggcaggtgctacatgcttttaaatgactagatctcattagaacttaatattgcaaccaaggggggtggtgcagaaccattagaaatgacccctgtgatgcaatcacctcccaccagcccccacctctagcattggggattacaatttgaagtaagatttgggtggggacacagacccaaaccctcagtctccttggcatctccgtgtcttcattcctttcctccaagtgtagacaggagargaccccaatggaataagggtcttatgggcaatgcttcaggaacaaaggtcgaggagaaggtgggcttcctgtttgtgctgtttcctcatatgacaaggtgccctatttgggaatagcatgtcctaaaccttgtcactaccttcaaggtgagccttgaatcagaggttgtcaaaaatcttctaagcacttgcctagtctacacagccagagctgtcttctagcagctgcacccagatt

SEQ ID NO: 226581 - DNA, 467 bp, Homo sapiens
tattaatgtgaacagtgattacaattcattatttgatgttaatgaacaaaatagaatgtcatcatgtatataacatttaatgttttcgtagaactttaataatatatataacttttctaaaagaatggtatttaatgtctctygaattgtagctatgtcattaataactgtcattttgaagtaagcaaaagataaaggacatagagaaaaaattattagcaaaagcaacaaaaagaacatttgaaagcttgaccttctatttcctccaaatcagtgtaactcataatgaatgttaagggaaaactgtaatatattttcttccatattttctatctgtcaaagacactgatacctatttttcctcatcaacatgaacagttcactgaatgacagcaaatcaagccttatacatataaccgaaaagcaagggaaagcctgttcttagaagaaacatggtatagatggcc

SEQ ID NO: 226582 - DNA, 528 bp, Homo sapiens
tgtgaatcacaactgtattgtaacttaaatgcagcattttccccatggaaaccctgaaagactctctacagatagatataaatgatagatatacacatgcagaaagaaaacttgtatatatacacatacgtaggtatattgtcttaacaagaacaagttaatcctcatgaataaggtatcagttttgaaagtatttctggaaaaaaacagaggaaagaataagtgctatagttgggtgccgtctgggtggagttataaatagtggaataatttaaagacagtgacaggattaatgatcamggggcctgaagtctcacaatttcttcacaccaggccacacatatacaaattaccaaaaggctagctgggtaacacataggtctaagtgggttactcctctggttaaatctgtaagttagctccccacagcctacagaacagaggtagaggtatttggcatggcatacagcatctatttgaggccaggcatagtggcttacacctgtaatcccagtattttgggaggcg

SEQ ID NO: 226583 - DNA, 585 bp, Homo sapiens
agccacaggctttgccaaatgaggtctctgttggctcgtgagactgtggtaattaatctctgccttggcttcccagcctgtaaatcagggctgtcctcagaatgaagtacaatccagtgattctgtctgaagttgttgcattttacagaaaatgtttcatgtcacatgagagttatgataagtgatgctcttttaatgcttgagaaattttcctacaaagatcttcccttttaagagtcttgcttactgaaacaggatgaggcaaggattaagcaataacagcartaggagagtatattctgctaagcacctgagaacagatgtttggagatacggtttagaatggatctatccatattcccctggtcttcctcatgatgtgggcagcaccttgagcttggttttggagggtatcatcgttttttcatgggaaagagcaaaacacactcatttactttgggacaagaggcagaatggtacactggtagaaagagccctggatggaaaggcaggagttttgatgctcacttggccacttgattacatagtacatcacttcatgtctctggactctatttctttctc

SEQ ID NO: 226584 - DNA, 474 bp, Homo sapiens
gaattcaagacctggtgataatgcaggaactgataaagtgaagagagctatggtcacattgtggtatgttaggattttaaaaagttcagagaacaatgtctgctgatgctgaggtccacagaggatggagatcgttgaatgtaggggatgatggatgaaattgggaaaagtgaatctgtgagtcaggactcaaggttctgcctctttactccccaaagcatctcaattgtgatattggatatttttaatgtaagacattacctttaagagaatgtctcttgggttacttctatagataactaatctcatcataggcaaaattttcacttgttcaactttctgaagataactgcattttcaggttcttcggagggcaccccatcatgaactgcccctatagatggcattgctatctatatcatttggtttccaagcaacgatgccctcactccratactctactttctcttgtat

SEQ ID NO: 226585 - DNA, 536 bp, Homo sapiens
aattttccccttttccctcattacttcattctcccattcttgaattccaacagcctggctcactcccctactactcctcaacacccttcctcattcctcctctcccatttcacctgttccagagacaatgctgcagaaagccttaataatctgattctttctggttattttatggttggaacgagtgatttgttagtctctcaattacttgtttagttaggcttcttaaaattgtcatttctccctatatcataaagcattataatttcaccccacgtgtaaaaagaggacattcaaacttgtttttccacctgycttacaaaaatgaacaatttagattaatcattagacccttttgtgaacaagtttagagaaacgactgatataagcaacacttgttaactgtcgttcatgttttctgctattgtgacttagcatttttacaaagatcaagattatgtttatgtgggcgtaatctatctatatatctaatatatatctataatatataatatatagctatataataatcatat

SEQ ID NO: 226586 - DNA, 327 bp, Homo sapiens
tacaaagttactttccatatgggttcctcatcccttcctgctggtaagatgctgattgctgaattgttagggtatattatttcacatatgtggagtctaaaaatttagtcttaaaatagggatcaagagacataggattgtatcagagatagaattaacagagtagaatcccatgaatctttgttaccttctattttgctatgtggctagtggttcattggtttatggtacmatcttgggagtttgcaatggtggagcctttttttttaattgggagaagttgaagaaagtattgagataccttctaaggaatatggcagactagat

SEQ ID NO: 226587 - DNA, 560 bp, Homo sapiens
ttgctatgtggctagtggttcattggtttatggtaccatcttgggagtttgcaatggtggagccttttwttttaattgggagaagttgaagaaagtattgagataccttctaaggaatatggcagactagatattctgacaatcttttcctccatgctataaagttgcatgccacaaaactgccatgaaaatccctttaaatgcataattgagcatgtaagaaagtatgagaaacaaccaagtgccaaaaaagtagaggaaaataaaatagaaatgatgctttaactaatgctggagctttcctatgggcttttgccaatatcagaaacccagaaccttgggttttaaggctccagagggcataaaagtaaagactgtgctccctaaacacacaatgggtcactcacaccccattgacacaatgttaagaccttcaaaaagtggcacattcagtgagactaagctaggaaaacaaaattcatctgccagagttgagaccttggcctcatctctgggtggacaaaaggtttcccccaaaaaatatagttgtcctgccatca

SEQ ID NO: 226588 - DNA, 560 bp, Homo sapiens
ttgctatgtggctagtggttcattggtttatggtaccatcttgggagtttgcaatggtggagcctttttttttaattgggagaagttgaagaaagtattgagataccttctaaggaatatggcagactagatattctgacaatcttttcctccatgctataaagttgcatgccacaaaactgccatgaaaatccctttaaatgcataattgagcatgtaagaaagtatgagaaacaaccaagtgccaaaaaagtagaggaaaataaaatagaaatgatgctttaactaatgctggagctttcctatgggcttttgccaatatcagaaacccagaaccttgggttttaaggctccagagggcataaaagtaaagactgtgytccctaaacacacaatgggtcactcacaccccattgacacaatgttaagaccttcaaaaagtggcacattcagtgagactaagctaggaaaacaaaattcatctgccagagttgagaccttggcctcatctctgggtggacaaaaggtttcccccaaaaaatatagttgtcctgccatca

SEQ ID NO: 226589 - DNA, 583 bp, Homo sapiens
tgctaactcaatatttattaaatttattaaaggccttctcttagaatctcagaggaaagcaaatgctgtgcagcctggctgcccagaagtacctttatttgaaatctttaacaagatcttaaaagagtgatgacactactgtatctaatgaaaaatgagtatttgattctaacatattcaacataagaatttcatcatatatattcaatctgcaatataaatgagagtttctatatcttagttattcattcatttattgttttattcattcaaccattgttgagtgccaacaatgtgccagccatgcatctaggcactggggccagcacggtcaatgagaacaacatgtgcctgccctcatggagcttacagtctataggaaagacagtcaataaaacaagtgatttacaatgaagtgtgatgagtgttgtcacaggacacactagatacattaggagcacatagcaaagtaacakaattatgtggggcagagagatgacaagggtcacacatggggctggaggccttagtccttggaggtcctatccaaagcaaggctgataaaaactgcattgaccatggg

SEQ ID NO: 226590 - DNA, 587 bp, Homo sapiens
ctcatgcctgtaatcccagcactttgggaggccaaggcaggccgatcacctgaggtcaggagttcaagaccagcctaaccaacatgatgaaatcccatctctacttaaaaaatacagaattagccaggcatggtgacacacacctataatcccatctgcctccctgaggcaggagaatcgcttgaactcaggaggcagaggttgcagtgagctgagatcgcaccattgcactccagcctgggccacaagagcaaaactctgtctcaaaacaaaacaaaacaacctaaagaacaatgaaatagttaaaataatacaacggaataatacgtaagacaaaactgttgtmttttgcattgtatgaggtggaggcagaagaagcaaggtgcttagaaacaaggaagaaaaaaacattcacctttgattaatcagaacccagataactagctagaattaacataattggggtgttatttcagataaaagcatttatttttgtttttgtttttaaacattttttattgatttggtaaagcaactggaaaaaatacttcttgagtatgccctatagtcatggaataatcaactaa

SEQ ID NO: 226591 - DNA, 262 bp, Homo sapiens
cataaatcttacagaacctatataacaataacacagtgaaaaaaaaccaagatattcaagcaacaaattgcacaatgtatagaatagtacctcacaccccaataataacagtgaatgtaaatgccctaaattctccacttaaaaagatacagaatagcagaatgaataagaattcaccaaccaagtttctgctgtcttcagaattgtctatttgyactctttcagacttttgatgtaggcatttaatgctgtggaactttcc

SEQ ID NO: 226592 - DNA, 575 bp, Homo sapiens
agaatttttggagttatacaaagatctcttggttgcatattgtattagtctgctatcacactgctaatgaagatgtacccaagatgggataatttataaaggaaagagatttaattgactcacaattccacatggckgaggaggcctagcaatcatggcagaaggcaaatgaagagcaaagtcatgtcttatatggtggcaggcaagagagcatgtgcaggggaactcccttttatagaaccatcagatcttgtgagacttattcactatcatgagaacagcatgagaaagtcctgcccccatgattcgattacctctcactgggtccctgccatgacacatgagcattatgggagctacaattcaagatgagatctgggtggggggacagccaaaccatatcacatactgtgagctagattcctgatggctccagttgactgttatgctcaaactctacatgccaagtagaggaagctttgagggatattttcatcactctaaatctatactgatagcttaataatagaacagttcttggacaaaaatgcagactcaggaagcatgaacttctt

SEQ ID NO: 226593 - DNA, 575 bp, Homo sapiens
agaatttttggagttatacaaagatctcttggttgcatattgtattagtctgctatcacactgctaatgaagatgtacccaagatgggataatttataaaggaaagagatttaattgactcacaattccacatggctgaggaggcctagcaatcatggcagaaggcaaatgaagarcaaagtcatgtcttatatggtggcaggcaagagagcatgtgcaggggaactcccttttatagaaccatcagatcttgtgagacttattcactatcatgagaacagcatgagaaagtcctgcccccatgattcgattacctctcactgggtccctgccatgacacatgagcattatgggagctacaattcaagatgagatctgggtggggggacagccaaaccatatcacatactgtgagctagattcctgatggctccagttgactgttatgctcaaactctacatgccaagtagaggaagctttgagggatattttcatcactctaaatctatactgatagcttaataatagaacagttcttggacaaaaatgcagactcaggaagcatgaacttctt

SEQ ID NO: 226594 - DNA, 575 bp, Homo sapiens
agaatttttggagttatacaaagatctcttggttgcatattgtattagtctgctatcacactgctaatgaagatgtacccaagatgggataatttataaaggaaagagatttaattgactcacaattccacatggctgaggaggcctagcaatcatggcagaaggcaaatgaagagcaaagtcatgtcttatatggtggcaggcaagagagcatgtgcaggggaactcccttttatagaaccatcagatcttgtgagacttattcactatcatgagaacagcatgrgaaagtcctgcccccatgattcgattacctctcactgggtccctgccatgacacatgagcattatgggagctacaattcaagatgagatctgggtggggggacagccaaaccatatcacatactgtgagctagattcctgatggctccagttgactgttatgctcaaactctacatgccaagtagaggaagctttgagggatattttcatcactctaaatctatactgatagcttaataatagaacagttcttggacaaaaatgcagactcaggaagcatgaacttctt

SEQ ID NO: 226595 - DNA, 585 bp, Homo sapiens
cagtcagtacttctagaacttattatacatatgagtcaatgcttttgaaggtcattatacatatgaggtatagctcagcacatatcccatttaatttgatttgttggattattccgcttgacttggactgggtagatcaaatagttaggctcactctagaccagattaaccaaagaaatgttaaatgaagtgtaggaatacatatatatataattttgttacatatatatgtatattcttttaatttatatacttaatgayatcacataatatgtaatattatattaatatgtctatatttcatttatttatataaatctatattaaaataacataaacacaagtgtttctaattattaatatttgtgcagaaaatgtaagacaaaatttaactgatactgagaaacaaacataactactgtgacatcttcagtactaaattgaaactatttttaactactactcaattttgaccttgatttttctactgagtaaaaataagtagaaactgccttatattgggcccttccacagccttagaaacctttttgctcatttagctactgctcaggattgtcaaattgc

SEQ ID NO: 226596 - DNA, 550 bp, Homo sapiens
tttcatttgagaagagtcatgaactctgtgtcttctgggtaagacacggagtttttttctttttcttttctctttgcctgaaaatgtagacaaattttatgtctcaatcttctttagcatctgaacacttgattgatccagttatgctccaaggagaacaatggcaaataaggcaaataggtttctctctcctcacagtttgtgatctactttacaaatgttttctatgacatcgttctctttctcacactctacttccactcacttagaagcaaatattctttcctttgtgctctttcatactttgtatggactttgtttataacctccaattaccttctgacatgggtggagcctggtagccagaagtttcttttgcaggtgaatttggaggacatggcacagggataaattatagctctctaggaaggaggaacaaaagagtgaaagrgccctagggaagacaaaacttttagatgcaaatcactgtgggaaatggctgagaatgaaaactccagatgtccagcactaccagggacttgggagaaga

SEQ ID NO: 226597 - DNA, 592 bp, Homo sapiens
aaaaattacttatgatcagtgttgctttacatgttttcagaataatcactgtttctttcctttcaacagttttgtcccaaagtgctgctaactgtgtgctggtgtattgtgctgcctatgggaaatggtgttggatcagcagaaaactggaaatcttatttgtttccctccagactagtaagaacagatgcacattgacgacacaaagtttctgcgaatacgtagtttcatgtagggcataacttctatcctgtgatagtacatcattaaaaagtatcttgcttcttaaaacttctgcactgcagcaagacggtatcacactgacttcctgatcatgtccttttggcaagataaaaaactaacccttgggttcaaacaataaatgaggagtctgggtagtacatgaagtagtcacaggtgatatctacatttctttattgcattctgattttttcaatattgcattgcagtgctaactcaatttcataccacygcaaaactatggtaaaccatagtgtttgagttaaaagtgctcctgtgtctctgcaatagtatccaaaactaagagctgtaaattagttaatagactact

SEQ ID NO: 226598 - DNA, 519 bp, Homo sapiens
caaacaactatcatttatgatactttcagaagactttgcacatgctgaaacctatgtggtataattaataaagcattttttaccacagataatggaatgctacttgaccaacataaattatcaattattttggagagattctaataaggataaactaaggcataaaacaaagagcaataagaaatctgaacacaagtaacaaggctacactscactagccatctgagtcagaatttctgtgggtggaataaataataaacctgctgatgttaagaaaactaaaacaagttccatacaaatgaaaatttagaaggtgagaaatttctatcagaaaggaaaacaatacagcaaatgtcacatttgtacagaatatgcttcctataatccttcttgaatctatgaatttaaactaccccatttctccttaattctttcagccattagagaaccagttaatgatcttacagaacctatgatttaattacaagcatctgtttttgagactaatcaatgaatcat

SEQ ID NO: 226599 - DNA, 589 bp, Homo sapiens
aatttaaaaaatagttttaagcattttaacaaactcattgtcttaaaatttacatttagaaaaggatagatggggagaaaatctatgcagttatttttcatcacatataatttacatttggacttctctgtacatgcacctttcatactgatttatgatgaaaagatgatatattttaccatagggacatagtacttgtttacaatgttttctttctggraacaatctataaatcagggacaataatacctattctattaggcaggtattatttgaattgttaattaaaataatattaacagagatagttaattggagtgtattagtttgagctgtttgttctggagagtttgggttcccagcaatccatgtcagtctcttactctcacactttgagggcttttgtgccagaacgtggacggtgttccatcatcaggagaatcaaactcatgctctaaactggctcttgcaaccactacatttcaaagcaagagagattataaatttatgtgatattgctcagttttgggatccttgattttaacagttaaaattcaaaaatagagactgtgtatttacattttgtaaa

SEQ ID NO: 226600 - DNA, 589 bp, Homo sapiens
aatttaaaaaatagttttaagcattttaacaaactcattgtcttaaaatttacatttagaaaaggatagatggggagaaaatctatgcagttatttttcatcacatataatttacatttggacttctctgtacatgcacctttcatactgatttatgatgaaaagatgatatattttaccatagggacatagtacttgtttacaatgttttctttctgggaacaatctataaatcagggacaataatacctattctattaggcaggtattatttgaattgttaattaaaataatattaacagagatagttaattggagtgtattagtttgagctgtttgttctggagagtttgggttcccagcaatccatgtcagtctcttactctcacactttgagggcttttgtgccagaacrtggacggtgttccatcatcaggagaatcaaactcatgctctaaactggctcttgcaaccactacatttcaaagcaagagagattataaatttatgtgatattgctcagttttgggatccttgattttaacagttaaaattcaaaaatagagactgtgtatttacattttgtaaa

SEQ ID NO: 226601 - DNA, 610 bp, Homo sapiens
atccacctcaaactgatgcaccagtgtccaccccaaagacactggtggcccaccaattcaggtgaygcatggatcacatataaatgtgacatgccccactgaatgatgattggaactacattatattatttcccagtacccagtcctaactgttctttgagtctgtcccattttcccaccaaaatctttaattctcacctgaggccactgcttgttttaagaacaactccttcaaattctggacttgttttacatgcaggtacctaatatataaagaggaattttgttcttactaagtagggctgtatgctgtgtaccatgaaaatgcggctgtttcttcctgagggatcagggaaagcttcaaaaggtttaggcagaggatgatgttaatgacagtttaggctgatgggataacatgaatagagacaaaaacccctgtaaactatgaagaggtagttgtgtgtttaaagtttataattgttattttttttccctcagtagagattagctcactgctatagcgagctggtatactattgtccacagtatatttttgatttatgttccaaaatctgactgccacactttggtcatgatttccctgaattac

SEQ ID NO: 226602 - DNA, 599 bp, Homo sapiens
gctgaaagccttctgtatctgaggaatttccaacgttttgtgccctgcttagagtgagaggagaagcactgtgcctcttaatttaaaagacgctgaaaagaacagctactcatttcccagaattcccctacagctatggacttgggcaccagccctcagtgtgtcccagaaactaatgatayggcatctaggggcagggaattctttcctgaggccatggctacagcagcaggagtttctgcatcagaaccagttctcagtcacagttttgggtagcatttctctctgcttgatctcaatgtaaactgcagcttcccagtgttactttgtgttaaccagtatcctttaaataaatgtattttctatctcactcacccatagtcaacttctgctgcttgtaactcagcatcttgatgaattcacctaaagcaaaccatttaatcctgctgggccttagttttctcatctgtgaaagtggaggaagagaatgaaatgatatctcagttaccttctaaactctgcatgtctatgaaaatgactagatttgttcaattgtttaaaggtctctggcaatggctattgttactagaaccacatgg

SEQ ID NO: 226603 - DNA, 401 bp, Homo sapiens
taaagagtaaaatggatgctgacttaggatttttacaatagcaaaagctggagaatgtttttaaaatgtctgattcaatcattaggatgtatttatgaaatggaaggactcttactttgcaaacttagattatgcacagctttgatttctactaaatatgattcaagaraaaaatcttcaaagctgtagcacagatgcttgataaaagcataatgcttcaaaggacaagttttaaggggcatccctgaatgttttgtggcctttcttcccaatgaagatgaaataaaaacattccacagctggatttttttctgaacagaatgccctgaagccaatggaaaaccagttaacccaaaagttcaggaatgggatgattctgatcattggaatagtcattaaat

SEQ ID NO: 226604 - DNA, 614 bp, Homo sapiens
tttttatgttgtaaatcatacatacatgtatatgtgtatgtatatgtatatatatactttttaataaaaatatcagggtctttggttactttagcataaaaatacttttactggaaatctaaatttgtgaaagaaaacagttatattgcccgttaggatttttcctttcatcctagagaaatctagtaatttattcaggaacactcttctttctctcagagcagtcctaaaatatacaaatcaaaatcaawtatagtgaaatcagagggcctagcttttttattgtccactgttgcttggaataagtaagctataagctagaactttcaaaactctttgttatacttgtggcaatttcctaacctatgatggtaccttccacacatgcagtcagagtccatctattaatgttttattgaaaatacacttagagtactgtcttgggaatgttctatttaaaggagtcctaaaatcatcccacaactaactcctttgcacagctaaggaaacaatcaacaaagtgaagagacaatccacagaacgggattgtcttcattactacaatgagatataatctcaccgcagtaaaaatgaattatatccaaaagacaggc

SEQ ID NO: 226605 - DNA, 614 bp, Homo sapiens
tttttatgttgtaaatcatacatacatgtatatgtgtatgtatatgtatatatatactttttaataaaaatatcagggtctttggttactttagcataaaaatacttttactggaaatctaaatttgtgaaagaaaacagttatattgcccgttaggatttttcctttcatcctagagaaatctagtaatttattcaggaacactcttctttctctcagagcagtcctaaaatatacaaatcaaaatcaaawatagtgaaatcagagggcctagcttttttattgtccactgttgcttggaataagtaagctataagctagaactttcaaaactctttgttatacttgtggcaatttcctaacctatgatggtaccttccacacatgcagtcagagtccatctattaatgttttattgaaaatacacttagagtactgtcttgggaatgttctatttaaaggagtcctaaaatcatcccacaactaactcctttgcacagctaaggaaacaatcaacaaagtgaagagacaatccacagaacgggattgtcttcattactacaatgagatataatctcaccgcagtaaaaatgaattatatccaaaagacaggc

SEQ ID NO: 226606 - DNA, 433 bp, Homo sapiens
tgttaatccccaagacaatggggaaaatgtctccagggcatgtcagaggtcttcacggcagccgctctcatcacaggcccggaggacctaggaggaaaaaatggtttaatgggtcaggcccagggtccctgtgctgtgtgcagcctacagacttggtgcactgcatcccagccactccagccatggctgaaaggggtcaatgaagagcttgggctgtggcttcagagcttggcaacttccacatgatgttgagtctgtgagtgcacagaagtcaagaattagggtttgggaacctccacctagatttcagatgtatggaaacacctggatgmccaggcagaagtttgctgcaggggtggggtgctcatggagaacctctgctagggcagtgtggaagggaaatgttgggtcagagtccccacacaaagtccct

SEQ ID NO: 226607 - DNA, 615 bp, Homo sapiens
gctagtggtgtttttttttctcaacattttaaatatttcacttcactctctttatgcttgcatggtttctgaggagaagttggatataattcttatctttactcctctataggtaaggaattttttcctctggcttctttcatcttttttcttacctttgattttctgcagctgaagattatatgcctaggtgtaaatatttttttgggcacttattcagtttggtgttctctgaggtatctctaaggttcctgaatttgtggtttggtatccaacattctcagtcattattccttcaaatattgcttctgytccttgctctctttattctccttctgatattcccattatgtgtatgtttcacattttgtagttgttccacagttcttggatattctgttttttaaaaaatattttttctcattgcttttcagttttggaagtttctgtttatatatcctcaagctcagagattgttccttcagctacatgcagtctactaatgagcccatcaaaagcattctttatttcgttacactgtttttatatttggcatttcttttttattctttcttagcacttccatctttctgcctatgttatccgtctgttcct

SEQ ID NO: 226608 - DNA, 586 bp, Homo sapiens
attccttcaaatattgcttctgttccttgctctctttattctccttctgatattcccattatgtgtatgtttcacattttgtagttgttccacagttcttggatattctgttttttaaaaaatattttttctcattgcttttcagttttggaagtttctgtttatatatcctcaagctcagagattsttccttcagctacatgcagtctactaatgagcccatcaaaagcattctttatttcgttacactgtttttatatttggcatttcttttttattctttcttagcacttccatctttctgcctatgttatccgtctgttcctgcatactgtctcctttttccattaaaactcttagtgtattaatcatagttgttttaaattcacagtctgataattctatgagtctggttctagtgcttgctctgtctttttaaactgtgttttttgccttttagtatgccttgtaattttttgttgaaagctagacatgatgtaccagataaaaagaactctggtaaataggccttcagtaatgtggtagttggtattaagggaggaaaagtggtctctggtcctatgat

SEQ ID NO: 226609 - DNA, 586 bp, Homo sapiens
attccttcaaatattgcttctgttccttgctctctttattctccttctgatattcccattatgtgtatgtttcacattttgtagttgttccacagttcttggatattctgttttttaaaaaatattttttctcattgcttttcagttttggaagtttctgtttatatatcctcaagctcagagattgttccttcagctacatgcagtctactaatgagcccatcaaaagcattctttatttcgttacactgtttttatatttggcatttcttttttattctttcttagcacttccatctttctgcctatgttatccgtctgttcctgcatactgtctcctttttccattaaaactcttagtgtattaatcatagttgttttaaattcacagtctgataattctatgagtctggttctagtgcttgctctgtctttttaaactgtgttttttgccttttagtatgccttgtaattttttgttgaaagctagacatgatgtaccagataaaaakaactctggtaaataggccttcagtaatgtggtagttggtattaagggaggaaaagtggtctctggtcctatgat

SEQ ID NO: 226610 - DNA, 562 bp, Homo sapiens
aggaaaagtggtctctggtcctatgattgggtctcagtcttttagtgagcctgtgcccctgggttgtgaatttcacaagtgcctctcagttcccccactgcttagtgggacaatgtggctagagacagctggagtaggtatttccctccccaaggcttggttagcctcgaataaaaccccaatagtttaggctctcrtaaagtagattctcttgagggcaggccttgttaacaacagaatgctctggcatatttcaatgctctgttgtattttctctctccgtgttggaagcacaagggatttttctctgattcactttgagaaccaggaggcaagacttacaaaagtataggactccccctgtagttctaaactctcagatttgtccacactaagcctctagtaatttgtcagttacagttcaaggtttttctaccctgctactggttcctgtggatgtttctgtttgtgttgtgtttctgctccagtatttcgattctctgtaccctctctgtctatccctccaattttgggaggcagtatattgcctggtgagctcact

SEQ ID NO: 226611 - DNA, 567 bp, Homo sapiens
tgtgagccaccacacccggcccaaaatgcctcttctgtgggccaaggcagaagtgtgggaagattaagaggatgccaaccctccaaacaacagtgacaataactgctatgttcacttaactcctactgtttgccaggagttgttctttcatacatttaaattttggaacaatcctgtgtggaaggtataactatccccattttacagatgaggaaatggaggctgacaaaggttacatcacttgccaargtgagggtgtaactgagtcacagagctgctgtgactagctgcagagtctatgcttgtcccatcacattcagctacatactctcctccagaacagagagggaaatgcagtcaccagagagttggaactatgtgtatgcacagcagggtgactatctaggttttatctgggtgagcacttcagacactgcaattcttctcttaaacacccatgcatatacttgtaactactcttctttaaatgaggcattaaatgaggcatgcaaagctctgtcttgttagttcacctggataatggtaatgattccctgtgtagaataa

SEQ ID NO: 226612 - DNA, 567 bp, Homo sapiens
tgtgagccaccacacccggcccaaaatgcctcttctgtgggccaaggcagaagtgtgggaagattaagaggatgccaaccctccaaacaacagtgacaataactgctatgttcacttaactcctactgtttgccaggagttgttctttcatacatttaaattttggaacaatcctgtgtggaaggtataactatccccattttacagatgaggaaatggaggctgacaaaggttacatcacttgccaaggtgagggtgtaactgagtcacagagctgctgtgactagctgcagagtctatgcttgtcccatcacattcagctacatactctcctccagaacagagagggaaatgcagtcaccagagagttggaactatgtgtatgcacagcagggtgactatctaggttttatytgggtgagcacttcagacactgcaattcttctcttaaacacccatgcatatacttgtaactactcttctttaaatgaggcattaaatgaggcatgcaaagctctgtcttgttagttcacctggataatggtaatgattccctgtgtagaataa

SEQ ID NO: 226613 - DNA, 567 bp, Homo sapiens
tgtgagccaccacacccggcccaaaatgcctcttctgtgggccaaggcagaagtgtgggaagattaagaggatgccaaccctccaaacaacagtgacaataactgctatgttcacttaactcctactgtttgccaggagttgttctttcatacatttaaattttggaacaatcctgtgtggaaggtataactatccccattttacagatgaggaaatggaggctgacaaaggttacatcacttgccaaggtgagggtgtaactgagtcacagagctgctgtgactagctgcagagtctatgcttgtcccatcacattcagctacatactctcctccagaacagagagggaaatgcagtcaccagagagttggaactatgtgtatgcacagcagggtgactatctaggttttatctgggtgagcacttcagacactgcaattcttctcttaaacacccatgcatatacttstaactactcttctttaaatgaggcattaaatgaggcatgcaaagctctgtcttgttagttcacctggataatggtaatgattccctgtgtagaataa

SEQ ID NO: 226614 - DNA, 560 bp, Homo sapiens
gaattcaaatcagtctgctcgattccaaggctcatgctctatctccacccttctcttcccttcctctcttctatgtattgttgctactgagcccttcactgatacaagggcagggtagatggtgtcagttcagcagctcctgtagtcttcaattcccagctatcttggtgaaatctaacctagagctatgactccttgtatggtcttgagaacctacttctcgagatacagcctcttacataaaaagtgatacaggattgagagcaaaggacattgaaaaataagacagagacacagggccatttgtgcagttgctgatatctttastcccaacttcctacatgtaggaattttatgttaaaagtgacagtgtcttcctgaaaagacaactggtatcctaagtctgatagaaaatacaagggataaatcaaagataagattcataactatgctagtatgaatgactttcttttcaagaaacaatataaaaatgataagtggggaaaaggcataacacgaatcaaaagtcaaactgtctctgcccactctatcatccaact

SEQ ID NO: 226615 - DNA, 590 bp, Homo sapiens
atgggttgtttttccaaactgcttcttgattcttaagtgagaattcagacatgatactcaaacgagagcatattagacatctgttttaagatttattttctgttgcagtcatcttggcaaacaaaatccagatacagttaagttcaggctctcttccaaaccctgctaagcagctgctttgaaaatgttttcaatactatggatcttaatatccactgagatgacaaatgtaggaaaggaagattcattctgttaaatgttttttctcttttgcaatgtccaagctctacttatttattaatagcctccctctgtacccataacatcatttatttggtgaattcactgttattaatactagtattttatcacagtaaagaaaaggtttytgaaaacccacaacctcactatcctaaagcaactactgtgtttctattttggtatatcatcttccaggcttcctccacatgcaaatgcagcatacatattataatagtgtgtttttcttttctctttgaattatattccatgcatgtttccatgtttctatgtagtatttctaattatcaatgaacgattgtgtaatatgc

SEQ ID NO: 226616 - DNA, 430 bp, Homo sapiens
ctgctgtaatctgcatttcagtctcygttaatggtgagaaagtccagggatcagggctgcttgttgattgtcacagaatgggtttgacttattctcattctctgctggctctgagctgtctaggtagtcataaatattttcagacttaggatcagctgtgaccaagaacttattagattcattcaatgaatcccaagctctggattcatcctcagcaacgtggcagttggccacctggatctcttcctctattgactcttcaccaccgacactgtcatcatcagaacctgagcttgttgaaatgaccctggcatcctctgattgcacagttgcagaaatgtcatgttcatttttctcctggtagctagcaattagattgctttcctgatgtgtccctgaatgttcagaatatttgcctgtttcaggactg

SEQ ID NO: 226617 - DNA, 443 bp, Homo sapiens
ttctccttctccactgctgtaatctgcatttcagtctccgttaatggtgagaaagtccagggatcagggctgcttgttgattgtcacagaatgggtttgacttattctcattctctgctggctctgagctgtctaggtagtcataaatattttcagacttaggatcagctgtgaccaagaacttattagattcattcaatgaatcccaagctctggattcatcctcagcaacgtkgcagttggccacctggatctcttcctctattgactcttcaccaccgacactgtcatcatcagaacctgagcttgttgaaatgaccctggcatcctctgattgcacagttgcagaaatgtcatgttcatttttctcctggtagctagcaattagattgctttcctgatgtgtccctgaatgttcagaatatttgcctgtttcaggactg

SEQ ID NO: 226618 - DNA, 535 bp, Homo sapiens
gaattcattttaaagaaaccatctccaaatagaagataggacttcaacatatatggatttggagagacacaattcagtgcataacaggtgggatattacaaaatgactcaaatctactactgtccatggggtcactgcacccacagaacacctataccaccttgtccctccacacagtgatcacactgtgtacaagatcacacacagtacaaggtcacaccaccaccaccctctcaagaatgttcttttcttttcctttttcttttttttttgagatgaagtttcactcttgtcacccaggctggagtgcagtggcgtgatctcggctcactgcaacctccgcctcctgggttcaagtgattctcctgcctcagcctcctgagtagctgggatcacagctgcgggccaccacacccagctaatttttgtatttttagtagagacaagttttcaccatgttgcccaggctagtctygaactcctgacctcaggtgatccacccacgttagcctcccaaagtgctggggttacaggc

SEQ ID NO: 226619 - DNA, 368 bp, Homo sapiens
tgaacactgctcagctgccgcaaattccacaagtaaagcacagtaacctttgcaacatgcaagcttatggctcagggagcagagataagcaaaatccacagatacgtgccaaatcaccctttkcaaactaatagtttctcttttatcgcaactgaaattcttcctctatttactggcttttggttttcttcctcttgggtggatgcggtaggaagttgtgctgtgttcactaagaagcagaagagagacgtgattcgagtgagttttaggcttactcctcagatacttgggaacccatttgaccttctgaaaaacaagcttttctttagttataaacatccatctcagtaaggtaggctaaccccttt

SEQ ID NO: 226620 - DNA, 567 bp, Homo sapiens
atttactttccatttatgctctattacttatttaaacttgctttcaatggtcaattgatgtgctttctatctctggaaattgcttaggtatcttgctttggtcragatagaacacgtcgtaattttccaattacagttcatggaaatatttttcatataatggctctccagagcatcagggtttatacgaatgagttaaagtcattaagtgaaggataggttagagagttaaacactctctataatgtgatatgttccatcaactccaagagctgaaagccttggagaagggagaaaagacaaagaacacataattgtctcttgaccttgggtcaagacaccacactctggtattcctcttacctcttcacattccaattcttctcagtctctcatactgtctcttcctgcctttcatgacttcaaaatatgagagccccaggcagtggtgtgctggtaaatatttgataactgtttctattggaaggagggggaccatgatgtgtagtgtattgccagttttcatggttcaatcatgtccactatggctgattccaagctattagc

SEQ ID NO: 226621 - DNA, 359 bp, Homo sapiens
gtaaaagagatttgcaaaaatacaaaaacactgttattcttccaatttttctgaaaagattttcacaagaaattacttatgttaaaataaagggcttatcattgttattttcacagaagtaatacttaagttttttgctttctctctcttttttttttttttaagacagggtctcaatccatcacccagtctgtagtacaatgtcattatcttggctcactgcaggctcaaactcctggggatcctwccaccttagcctctcaagtagctgcaaccacaggtgcacctggctgcttatttttgtagagatagggtctcactatgatgcccaagctggacttaaacttgatcttgaattc

SEQ ID NO: 226622 - DNA, 468 bp, Homo sapiens
agctgggactataggcacacgccaccacacttagctaatttttgtatttgttggtagagacagggtttcactatgttgaccaggctggaaacctttgtctttattacttttggacatttgtaacatagtgaaacagaatatatgtaaaatatatatgaagggatattctgaaaatagtatttcagaataacatttaatttttaccttggttttctgactcttaaaaagctgttggttttttagatgttctcattacccatttcactgataatgtaaatactgtagcttttactgtttyaagattaccttcatgttaataattaacaaagacctgtgacttggtataacaatagaaatttgtgttgaccttttgaaagcctttataagaatgtctcagtatatagtggactttggatatttgaaatggcaaaatattgcctgagttgtccaatgcttattacgcatgag

SEQ ID NO: 226623 - DNA, 404 bp, Homo sapiens
ttatttagatctgtttctactatgagttacacgacatggttcttgggtgtaaataaaacagamagataagtcttcatttatttcggatacattcactgagttctacattagctaagaataccagaataagagacccagcctctgctctctgaaaactcacaccatatttaggaagcaaaggagtaagcagatgattgtaatctagtgtgccagccactctaacagagttaactcaggagtagcagggagacccacctgaaggtgggagggccagggaggtggggctgtaataagcaaataagcctttggggaaagggaagtagagagtgttccaaggaggaatagcgtgtgtgaagaaatgatgatgtgtctgtgaatctgtactgaagtgtaggtgtggggac

SEQ ID NO: 226624 - DNA, 560 bp, Homo sapiens
catattttatccagttaaatctaaaataagtgtattaataaataagctagatttttttttttttctttttgagacggagtcttgctttgtcacccagactgcagtgcagtggcatggtcttggctctgcaacctctacctcccaggttcaagcagttctccctcagcctcccaaatagctgggattacatgcatgtgccaccactcctggctaatttttgtatttttagtagagatggggttttaccatgttggccaggccggtcttgaactcctgtcctcaggtgatctgcctgcctcggccttccaaaatgctgggattacaggtgtgagcctccatgcccagcctagattttttttttcttttcaatagcaagaattccaaatgatttagctgacctatttggcactgattttctctttttctggcaacatcagctaaattstggacattttcttaatgtctaaactaattctaactggttattttcttaatggaatttgatcatgattattgtatctcttttgtgactaaagcatttagaagagtgttactgtttt

SEQ ID NO: 226625 - DNA, 554 bp, Homo sapiens
ctgacctatttggcactgattttctctttttctggcaacatcagctaaattctggacattttcttaatgtctaaactaattctaactggttattttcttaatggaatttgatcatgattattgtatctcttttgtgactaaagcatttagaagagtgttactgttttttaagtcactgatcaaaagcagagtaaaaaataactgttttccacccttcagttttctctgtaggaatggtgaggatatttaatgaagaagttccccgtaaacrttgacagaatagaaatgttccctttgggcacattcccatttcgactactactaaccataggttctggttgatacaccctgtcttcctgcttcatgaagtaatgtcatggtcagattgacactttttttaaaaagagtagtttgtttatggtttggttaagaaaaaaagcattatgtgcttagcagtatcaatgtgttcttttaccttctatggttatttaaaagtggaggcttatggagtaacgtgttcttgttgtttcatttaaccttgatatagaaaaaaa

SEQ ID NO: 226626 - DNA, 438 bp, Homo sapiens
tttcttggtgtttatgtcttacagaaatgcaatctcctrttgtacaaatatgcctaatcataaaacagttgcggacagtactgtatttcaaagtgtatttcaagttattcactggggcttttgtgacagattctttcaaatgatcatgctttttgaaaaatagttccttttatgaacagataaatatatgtctaccaaatacaaaacttctaatgtatggaatcaactggtgtgcaatctttttttttccaaagacatatttttgcctaaaggaaaataaggctttgaggctctttttccctctccctttctataaaaagagaaatgatgatattaaaaaaagatagaaacaataagatactttatcttcaaagtgcttgataaattcacagaagaaaatagtttctatattcacccattacagattaagaacaaaag

SEQ ID NO: 226627 - DNA, 564 bp, Homo sapiens
agtgaaaggatttgctatcatttcactatttattcttcatacttaaggctttcaaagtgaacttactcaatttacctgaaatgaaaaatgaaaccctgcaattttcttattcagccatcaggtggtaataatgtgcaatgcatgctctttaaatagaaaaggtaaagtgataggggctgtcttagatacgcatatgtggaaaaaatgctttgtctacattagaaaattcttagtcattgaccttacacagtattaattttaaagcaagtagaccttctttcttttttttttttaagctcctccaagtatgatggtccagtgctcatttacttgccaaaaaaaatttccctgccactgcttatctcatgatgaccagctgtggtcaccccactagcctgttcacgctaattaaatggaataagctgggtttccctctacaatttttcataacctggaaaggttcttggctatcctttcccatttgtgtctttcacactggggagaatgtggggcagggagtgatcttmtgtagtcaggagtgatgctgctgaggtcagaaagctt

SEQ ID NO: 226628 - DNA, 542 bp, Homo sapiens
agatttctgattttaaaaattcattaatatttggtggatacagtctccttcctgaagcgattgtttatttttgttgctgagagcaattagctagaacagtcacagttgcagctgttagatactataagctccagtggagatcacaaaaggccttatgcacatttagaggctgtatttggattgttgttaatgggtgattcttctggagtctactgtgttagcaaattcgattgggcgatcctgagccaaatcaaatgtacaatgggatcatcagcatgctgtgttgatcagagtcacttaaacaccttgctgttttgtgcaagccaggatggctgtggctgcatgtgcagaaaragcatgtactgttccttttcctgaatcctccccatgcaaacctggatgtgactcatctcaaaacattatgctgttttctcaggaatttttccttttgtgtttacttcttgtttgctgctttggacttgttggagcttttgtgagataatctgcatgtgcacgcatgagagagattcacagatacaatc

SEQ ID NO: 226629 - DNA, 635 bp, Homo sapiens
tactcttgttagcagttcagaaagtattgttcttcctgctttctgtacatagcagaatatcagggtattatctttttcatctaagggaaaatttactgccaarggaaattgaagaaattctctgaaaaggagtccctgaatgagtagtcagctatccttgtcttcatccttataatcatcttctgtcataattatttgagacttcttgtctaaagggctttacttaacattttgatagagagcaaatacctgaggttctagccttggagcttaggattcccctcctgaatgttcagcaaacccgaatagcaaaggtactcctaaggaatcctctttggccagatggatcagggatacatttccaaaattagtgctgcacagagaattctctctcatggactaattcttctccccctctctgaggaccatctgtctcatgggcagaagaaaaataggcatctgttcagatttgcagggttgccacctggacctgttcctatagtgtttccaagcagagggttgggatgtctgtgggccaacccaaggccttaagtactaggatcttcagtgaggaattacagcatcaagacaaaataattttgacctagaaccaggttttgcagagcaagaattag

SEQ ID NO: 226630 - DNA, 635 bp, Homo sapiens
tactcttgttagcagttcagaaagtattgttcttcctgctttctgtacatagcagaatatcagggtattatctttttcatctaagggaaaatttactgccaagggaaattgaagaaattctctgaaaaggagtccctgaatgagtagtcagctatccttgtcttcatccttataatcatcttctgtcataattatttgagacttcttgtctaaagggctttacttaacattttgatagagagcaaatacctgaggttctagccttggagcttargattcccctcctgaatgttcagcaaacccgaatagcaaaggtactcctaaggaatcctctttggccagatggatcagggatacatttccaaaattagtgctgcacagagaattctctctcatggactaattcttctccccctctctgaggaccatctgtctcatgggcagaagaaaaataggcatctgttcagatttgcagggttgccacctggacctgttcctatagtgtttccaagcagagggttgggatgtctgtgggccaacccaaggccttaagtactaggatcttcagtgaggaattacagcatcaagacaaaataattttgacctagaaccaggttttgcagagcaagaattag

SEQ ID NO: 226631 - DNA, 635 bp, Homo sapiens
tactcttgttagcagttcagaaagtattgttcttcctgctttctgtacatagcagaatatcagggtattatctttttcatctaagggaaaatttactgccaagggaaattgaagaaattctctgaaaaggagtccctgaatgagtagtcagctatccttgtcttcatccttataatcatcttctgtcataattatttgagacttcttgtctaaagggctttacttaacattttgatagagagcaaatacctgaggttctagccttggagcttaggattcccctcctgaatkttcagcaaacccgaatagcaaaggtactcctaaggaatcctctttggccagatggatcagggatacatttccaaaattagtgctgcacagagaattctctctcatggactaattcttctccccctctctgaggaccatctgtctcatgggcagaagaaaaataggcatctgttcagatttgcagggttgccacctggacctgttcctatagtgtttccaagcagagggttgggatgtctgtgggccaacccaaggccttaagtactaggatcttcagtgaggaattacagcatcaagacaaaataattttgacctagaaccaggttttgcagagcaagaattag

SEQ ID NO: 226632 - DNA, 635 bp, Homo sapiens
tactcttgttagcagttcagaaagtattgttcttcctgctttctgtacatagcagaatatcagggtattatctttttcatctaagggaaaatttactgccaagggaaattgaagaaattctctgaaaaggagtccctgaatgagtagtcagctatccttgtcttcatccttataatcatcttctgtcataattatttgagacttcttgtctaaagggctttacttaacattttgatagagagcaaatacctgaggttctagccttggagcttaggattcccctcctgaatgttcagcaaacccgaatagcaaaggtactcctaaggaatcctctttggccagatggatcagggatacatttccaaaattagtgctgcacagagaattctctctcatggactaattcttctccccctctctgaggaccatctgtctcatgggcagaagaaaaataggcatctgttcagatttgcagggttgccacctggacctgttcctatastgtttccaagcagagggttgggatgtctgtgggccaacccaaggccttaagtactaggatcttcagtgaggaattacagcatcaagacaaaataattttgacctagaaccaggttttgcagagcaagaattag

SEQ ID NO: 226633 - DNA, 583 bp, Homo sapiens
caggcgtaagccaccacgcccgcatcccatactttttattcactcaagtatatcattatggcaaacctaaatcgtacacctggtgtcctttaaaaaatctcctctcagtccctacctttaattatttctgtcattatctaccacccatgcccctcctgctaccaagcaccctttctgttttaaattcccaatagctggcctttgggattttattgaagtgtatcatacatgagatttaccagataacatgaagatgacttacacatttcttcatttagtttgtgtttatatttacactgttcctgtgatgtgctagggacttagcatgcattacaatttaagatcagtttaatgatatttagaaagycgtgctgtttttgtagtgcctttactggttgtatttttttgaaaacgcctgtgtttttcttttaaacagaggatagaggttcacttttgggcttaagtagaattagtaggattcattctggattttggttcatttttgtctcgaatcttaaactcttcaaatcctgttgttagctgctcaggactcagctgggcagatggtagctattgtacaaat

SEQ ID NO: 226634 - DNA, 583 bp, Homo sapiens
caggcgtaagccaccacgcccgcatcccatactttttattcactcaagtatatcattatggcaaacctaaatcgtacacctggtgtcctttaaaaaatctcctctcagtccctacctttaattatttctgtcattatctaccacccatgcccctcctgctaccaagcaccctttctgttttaaattcccaatagctggcctttgggattttattgaagtgtatcatacatgagatttaccagataacatgaagatgacttacacatttcttcatttagtttgtgtttatatttacactgttcctgtgatgtgctagggacttagcatgcattacaatttaagatcagtttaatgatatttagaaagccgtgctgtttttgtagtgcctttactggttgtatttttttgaaaacgcctgtgtttttcttttaaacagaggatagaggttcacttttgggcttaagtagaattagtaggattcattctggattttggttcatttttgtctcgaatcttaaactcttcaaatcctrttgttagctgctcaggactcagctgggcagatggtagctattgtacaaat

SEQ ID NO: 226635 - DNA, 407 bp, Homo sapiens
aaaccatctaacacaaagcctgttttataataaaagtgttgaatgtttcatgtaatttactgaatactgacagtgaaaaatagaatgatkgtgtagttacttgaagtgctgtttctactgaatgtgtatcgatcttgcaccattacaaagtttagaaactgttaagtcaaaccatgtaagttggggactatttgcatacctaaggttcagattccaggaaaagattgggtggcagcaatgagaggaaaagacaactgagagattaagaattggtgtgggggttgtattagtttgcttaggctgccataacagaataccatagcctgggtagcaaaaacaatagaaatttattttctcatggttctggaggctggaagaccaagatcaaggttttggtagtgttggtt

SEQ ID NO: 226636 - DNA, 595 bp, Homo sapiens
gactaataggaactgaataagcaggccaaacttctattccccatttactgagtctttaacaaggccatctaaagttgtaatggtaagaaggaaaaaattgggggactatattcttacactgccctctataagaatacagaagccgttggtctcttttcttttgcttggatggcagtagttcctccttacccacagtttcgctttccatgatttccgttacctgcagtcaactgtggttcacaaatattaaatggaaaattccaggcataaacaattcacaagttttacactgcgtgtacttctgaatagtgtgatgtaccctcatgctgaccagtcaggatgtgaatcctccctttgtctagtgtatccatgctgttagtcccttagtatagccatctcagttataagattgactttcgaggtattgcactgctcgtgttcaagtagcccttcttttactttcagcggccccaaagcacaagagtagtgatgctggcarttctgacatgccaaagagaggatgttaaagtgctccatgttccctttaagtaaaaaggtgaaagttctcgacttaaagaaaactaaatacgctgag

SEQ ID NO: 226637 - DNA, 416 bp, Homo sapiens
gtttaaaatcccagtgcatcactatcagaagtccctctaaatgctttcgtccaaacacacaactgctctcgtttctctgattcatcaatggaaagatcagtgacagtggacattaataccaatagattaaagtgataaggtctataaatgaacaaagaagttccctcttttttaaactaaaaacatttgagaagtcacccactgctaagatcaccactgaacaacttttatcacttgtcaattactgacccaggactacaaacattaaacctgaaaattagacacttgccactttagacttttttcaaaaagctccwttcaatctctccagctgaaaggtcacagttatgcctatttaaacggacagttaattgctgttcatattttttaaagatggagtcttcgtgggactatct

SEQ ID NO: 226638 - DNA, 445 bp, Homo sapiens
gaattcaggacttggggcttcttaaagaactttaacaagataaagttctcaatgaaaactttagtgtcatgacagaattttaaaagcacaaagctggaggagttgctgttgcttatggtgcagcaaaagccccactctgtgtactctgaaactttagttcagaggatgtagcaggagttttagaaaagtaaaaggtgagtatgtgtggtcaaatacgttagatcatgcwgaataacaaggataaataggcttctttgcttgggtcctccgagagcatcttccccccatatttcacaaacagcctgggagaagctgcccgcatgacctcggagaacctcttagaatgaaggttgtatttccttcttatttgcacgtggactggtgcaggctgttcctgtggtactcactgcagtgcccagcatgccagctgtcatgtcatgtcatg

SEQ ID NO: 226639 - DNA, 510 bp, Homo sapiens
cagtgttacacaaacatgtatggaatatttcctgtcactgaacaagttttctgctctaggggtttgtttctctttctgagtcaggaatcagaattcaaagatkgttcattgaattgtctgcccactggtatctgctacgaaggaaaggagaaatgggtctgagtcatgtgaggcatcacgacttctgtcaactttattttattaaccttgaaaaccgagctctcacatgtcagtaataaacttttccctgaatgtttaccagaacctctattttaggcttgtcctgtttgtttcttgtcagcatattctatcaggaatattcatagtaatctggtcagtacctaagaaaatcaacagcagattatttagaaaaccctcaaaggtctagggatgttgtgtttattcaacatgtagatccaaatgataaggaatgcctgattaactgtggacattatcattaaatgaaatgaaaactgaattatgcacagttttctggaggtcttgattcat

SEQ ID NO: 226640 - DNA, 510 bp, Homo sapiens
cagtgttacacaaacatgtatggaatatttcctgtcactgaacaagttttctgctctaggggtttgtttctctttctgagtcaggaatcagaattcaaagatggttcattgaattgtctgcccactggtatctgctacgaaggaaaggagaaatgggtctgagtcatgtgaggcatcacgacttctgtcaactttattttattaaccttgaaaaccgagctctcacatgtcagtaataaacttttccctgaatgtttaccagaacctctattttaggcttgtcctgtttgtttcttgtcagcatattctatcaggaatattcatagtaatctggtcagtacctaagaaaatcaacagcagattatttagaaaaccctcaaaggtctagggatgttgtgtttattcaacatgtagatccaaatgataaggaatgcctgattaactgtggacattatcattaaatgaaatraaaactgaattatgcacagttttctggaggtcttgattcat

SEQ ID NO: 226641 - DNA, 540 bp, Homo sapiens
gacaactcaattctatgtcaaccttgtaggcataaaaatgaagcaaacaagccttcaagaaggccacttgcaggcatgtatactgacctcaggcctctcttggcccaatgtttgtgaacagaagtcagaaggtggcagttgggggatacagaatttactttgtagtttgcaaaagaaacaagcaatctttgagatccaggcccttctatgtcctgcaaatcacaactgatgtttcatctgcatttgcacaaaagattcttttgccccctgggrtgccatattttcatcacataccgcagtgctgaaaatgctgctttggtttgtgtgaaagaagggatggaagactttagtgagtttttaaagtattccttttagaattaaatgaatactgtggaacaaggacatgttactgaatcacaccgatcaagtctgtggtccaacctttgagccctacaaggggcagccaggacaccagcctcatatgtaacctagtggggttgccatagcagaacaccatagactgggtggcttaaacaataa

SEQ ID NO: 226642 - DNA, 400 bp, Homo sapiens
tgtgctcttgtgtacacatgcattggaattttctgaaaattctctaggcttcagttttccattggagtttctgaagtctatggtttattttagtrttaattgcttaggaacaaggagcataggcttctgtgaagatgtgttgtcttgcttttgagatgttgcctggaataagtactgttaatgcatgcacacagttatttaaactacttgttattctaggaagatgttttttctttgctttgctgaagacctctcctattgaatatttgaaagatgtttagtttccaagatatttctactactaatttatccatttagtcagtatcgatttattgggtgcatccttccatacctagcactgtcctgtctactctgggatttgcagaaatgcactgtggga

SEQ ID NO: 226643 - DNA, 563 bp, Homo sapiens
tcagggggaacgttatgcctggtcacatctggccttctgattagaccagagagatatgcttcagtgtgtctgctattttcatttcccatgagaggatgagcaaaatgattgactcagaccccttcacaaatggagaccacagcggctcacagttagatgccttctgtataagggtcaattaagatgtgtgtttgattatccaccaaggaaataagggacagatggaggaatttggtcacagtgactgaaggcactttgacagctgctgtgctgattacatcaccagcctctatgttttcaatgaagattgtatctccttgataactcttgaacagaagcaaaagcatttgtctttctgatttcatctttaaaggctgtaacacttacgtggtagaaatattgctagaccctcaatcagtggagtgcagcttgaactgcatattagactcacctggagaacttttaaaaatttcaatccccaggttaaatatcccagagaccaatttccttagaatccctgcrgatgaaatccagggatcagtatttattacagcctccctccc

SEQ ID NO: 226644 - DNA, 383 bp, Homo sapiens
gtctgttcccaagtgcctaccacagtgcttgacacataacagatactcaatcaatatttgtaaaagtgckttctgatttatgcagaaatgtaagtacagcttgtttgcgtagaggtaaggtggaagaaaataacactgaacttgaaatcaaaatacatgacttctatctctaaatatatagccacttacttcttacctgggtaaggaataccttctcactgaggctctgtttttttaacatagaaataattgttaccagtttcatagatttgcaaggattcaatgtattaatggatgataaaaacttcaacgcacacatgagatatccaagctacgtaaagtaggtttacttagccttcagagaaatttctcaacctctgtaa

SEQ ID NO: 226645 - DNA, 383 bp, Homo sapiens
gtctgttcccaagtgcctaccacagtgcttgacacataacagatactcaatcaatatttgtaaaagtgctttctgatttatgcagaaatgtaagtacagcttgtttgcgtagaggtaaggtggaagaaaataacactgaacttgaaatcaaaatacatgacttctatctctaaatatatwgccacttacttcttacctgggtaaggaataccttctcactgaggctctgtttttttaacatagaaataattgttaccagtttcatagatttgcaaggattcaatgtattaatggatgataaaaacttcaacgcacacatgagatatccaagctacgtaaagtaggtttacttagccttcagagaaatttctcaacctctgtaa

SEQ ID NO: 226646 - DNA, 598 bp, Homo sapiens
tgctattaccattcaatcaaacttggttataaaaataattaatattatctactcaaaattactgtttcacccacaagacatatttatccccttatgcatttgtgattttaatacactggcagtctcaacagcctatcccaggttactgagaccaccaagataaaacgttagaatttccacacattkgtatgtattccctcttccatggtaccttccatctgacctcctccagcctctgaatttctatttaataagaagctgagtggaaaatcagaccttcacccctggaaatccatttgcttctgcctgtgtttacaaaactgatgatgccttgcaacaaactcgatcttcttactgacttctagtcacagtgtatttgggggattaacaatgataatttagttctaagccctattctcttgatttaaacagttgcaccaacaactgtgagcttcatttctttcctaggtctgtctacctcccgatgtactacacctgtgaaataggtcttgagaagtaccttattaggcattggggtgatatactgcttaaacaggagaggtctgtcctagttgcttatgaatgcctgaattcctta

SEQ ID NO: 226647 - DNA, 598 bp, Homo sapiens
tgctattaccattcaatcaaacttggttataaaaataattaatattatctactcaaaattactgtttcacccacaagacatatttatccccttatgcatttgtgattttaatacactggcagtctcaacagcctatcccaggttactgagaccaccaagataaaacgttagaatttccacacattggtatgtattccctcttccatggtaccttccatctgacctcctccagcctctgaatttctatttaataagaagctgagtggaaaatcagaccttcacccctggaaatccatttgcttctgcctgtgtttacaaaactgatgatgccttgcaacaaactcgatcttcttactgacttctagtcacagtgtatttgggggattaacaatgataatttagttctaagccctattctcttgatttaaacagttgcaccaacaactgtgagcttcatttctttcctaggtctgtctacctcccgatgtactacacctstgaaataggtcttgagaagtaccttattaggcattggggtgatatactgcttaaacaggagaggtctgtcctagttgcttatgaatgcctgaattcctta

SEQ ID NO: 226648 - DNA, 606 bp, Homo sapiens
ccgtgccatcatttaccctgctgctaaagagttaaccatcctaaggtatagctatgattatatctgtatactcctccaaaatcttcagtgattactttgtatgggctgaatttttgtgttctccccaaattcatatttcaaagcctaaatccccaatgtgatggtatttggaggtggggtcccagtctcatgaataggattagtgttcttaggagacatgagagagctgatctctctctcctggcctcagtgaggttatagcaaggaggcagtatgaaactaaaatgaatcttgggaccccaaaatcactaagccaaagggaaaagtcaagctgggaacttcttagggaaaacctgtctctcattccatttctaaaaaacgattaaaaagctccatgcctccctcacaaggaattgccttgtggrcaaaggacagacagaactcaaagtcatccccctgctgactgagataaatgcatatccgattgcttcctctggaaaggctaaccagaaactcaaaagaatgcaaccatttgtctcttatctacctgtgacctggaagccccctccctgcttcaagttgtcccgcctttctggactgaaccaa

SEQ ID NO: 226649 - DNA, 367 bp, Homo sapiens
tgaagcaaatggactcttctggaccagagcaagacccaaagttgggaatctagctaagagacttgtgctggaaagaagtgatgagggcctgaattaaagagcagcagatatgaagaggaacagttttgagtcatattaagaatattaaattgatcagatttacagtctggctaaatatggagtgtagaaaagaaaggaggactcatggatgactctccattttctgtcttgagtaactgtatagatagttgtctaattttcagagaargaagtactgtgagaggagccttcaggaggtggagggagggaacattatggttcagattggaaaatcttgactataaggtgcctaagaaatttctaggag

SEQ ID NO: 226650 - DNA, 481 bp, Homo sapiens
ttcctttaataaaaatattttggagattgtatggtgaaatayttgggggatagtattttcctgttatacctatatttgcatgcctaaataacattaaattatcaatgcaatttggtatgatttgtcaatattctgttagtgctagtctggcattttataaatagatttatttattttgctaagatagacaaactatgaagcactgtcagttactttgtgaaaatttcaaataccaggtagtgaaacctaatagcacagttgtaaaaactgcatattattattttctgagtctctctgaccccacagcagtgcaaatgcttgcatttctctctgcttgacccaattgaatcatatcgttttaaggtatctgtccacccaacctaccatggataatgagacatttagaaaggcatataaatattagaaagtctttgtagtagaactgaataaaatgtattcgctcaaataccaatgtttttaa

SEQ ID NO: 226651 - DNA, 403 bp, Homo sapiens
tcattttctatgtataatttcacacatttctactggctcatcattatttttggaagatcatcaaatcaggaagtccaatggcaagttagacaaagagtggcaaaccgattgcttytgtcacaccaacttgaatggatttatagtagtgctttaagttttgtactgggaaagattctgaggccatgttcgacctaagggtaagatcatgaattagccctcatttatggcctgggagagagagaagtggcagcgcaagtgctacatagttgccatccctttgtaaaccaatggtaggggagggtgacaagtaatactgccacacaggaggcttcattggtacatgctcaaacattcatccagaatgtcagagaacctggcaattagctcattgcttaggatgctg

SEQ ID NO: 226652 - DNA, 391 bp, Homo sapiens
gtataatttcacacatttctactggctcatcattatttttggaagatcatcaaatcaggaagtccaatggcaagttagacaaagagtggcaaaccgattgcttctgtcacaccaacttgaatggatttatagtagtgctttaagttttgtactgggaaagattctgaggccatgttcgacctaagggtaagatcatgaattagccctcatttatggcctgggagagagagaagtggcagcgcaagtgctacatagttgccatccctttgtaaaccaatggtaggggagggtgacaagtaatactgccacacaggaggcttcattgrtacatgctcaaacattcatccagaatgtcagagaacctggcaattagctcattgcttaggatgct

SEQ ID NO: 226653 - DNA, 390 bp, Homo sapiens
tataatttcacacatttctactggctcatcattatttttggaagatcatcaaatcaggaagtccaatggcaagttagacaaagagtggcaaaccgattgcttctgtcacaccaacttgaatggatttatagtagtgctttaagttttgtactgggaaagattctgaggccatgttcgacctaagggtaagatcatgaattagccctcatttatggcctgggagagagagaagtggcagcgcaagtgctacatagttgccatccctttgtaaaccaatggtaggggagggtgacaagtaatactgccacacaggaggcttcattggtacatgctcaarcattcatccagaatgtcagagaacctggcaattagctcattgcttaggatgct

SEQ ID NO: 226654 - DNA, 568 bp, Homo sapiens
ttcctgctttcccacataaatttcaatctccagctccccaaatatttttaccaccttctagcagcttttaaaggtctcttacacaaagagggaacactagccacctgctggagggtggaggttggaaggagggagaggatggaaaaactgtctatcgggtactatgcttattacctgggtgacaaaataacctgtacaccaaacccccacaacacataatttacccatgtcacaaacctgcacatgtgccctcgaacctcaaataaaagttaaaaacaaataaagatttctttatcactattcctcagataaccaaccgttaggggcctcttgcttctatcagacattggtctgttcrgcagtaagagcctgaatgaatatgtgcccatgctatgacttagcatgctcatcaatcataaatcataacaacacacgttagccatagtagcccaaaactcaaaaccactcaaatgtcaaacaaaaaaaaaaaacactaggcaatagactgtgaagtgttcataccatggaattctattctgcaatgaaaaccaacaagccactgctgata

SEQ ID NO: 226655 - DNA, 452 bp, Homo sapiens
taactgacacatttgttgagcatcataaaaaatgtgccttgcaatatccattcattccttcatgtgacaggagggaatgcaaaagaagttcagcagagtcaagatgtgtttactcagttgtactttctgcagcctaccaaaactcataagrcaaaaataaaaataagaaaaggaatactaatttcgaatattatttgccaagaatcatatccccaagcttaagacgctaaaaaatatctgccaaatatggaggctctaacatgtagaatttccactaacaaactctcacaaatgtgcattgtaccaattctgcagtttactgatagttggaaacaaccttctcaccattgctcagagtgttcagaaattttgttctctgtgtgccttttggtctcacaaatcaaaaagcaatgggaatgttaaaaggagaagagggacatgattaaaattaa

SEQ ID NO: 226656 - DNA, 593 bp, Homo sapiens
tcaagatgtgtttactcagttgtactttctgcagcctaccaaaactcataaggcaaaaataaaaataagaaaaggaatactaatttcgaatattatttgccaagaatcatatccccaagcttaagacgctaaaaaatatctgccaaatatggaggctctaacatgtagaatttccactaacaaaytctcacaaatgtgcattgtaccaattctgcagtttactgatagttggaaacaaccttctcaccattgctcagagtgttcagaaattttgttctctgtgtgccttttggtctcacaaatcaaaaagcaatgggaatgttaaaaggagaagagggacatgattaaaattaacatgaaaatagatctacagagaaatttaaaagagaaaggaaataagaatatttgatgtacttacggaattaattatttaaagtagaaacaattcagaggtcagaatgattcagatgccacatgaaaacgattgttaatgtgcactcagaagaattgcaaaatacaagacaaactgaccaacaaaatgaatgtcaaaaatttaaatatattttcacatctttggttagtctagcaaccag

SEQ ID NO: 226657 - DNA, 641 bp, Homo sapiens
agtgtagactctggggccagactgcctggcttcaaaactgggctcctccactagctgctcatgtgccattaggcattttcttaatttataaaagaacaaaaataacagttgcaccagatgctgttgacagcctgcttgtattgcatcagtctctctgaatgcccccccatcctgacccctcttcctgtattactctgcctgaaagtattctctggccacaggccatgcttgccctctctctaggcaggcagaagtgcaggaatcagtgccttgagaacaycatcaatcaacaagagctggactttcagcagggagaccccctgtcttaatggaggaggtgtgacttgtgtttcaaacagtcttacagagggtcctcgaaggatttgagccccagttgctcacagcggtattatgctcattattacacttttcccttctttttcttgtttcacttgtaattcttcttatcacttttcaaatcatctttttgcatccaaagctcttctccaaggggaatccaatctaaaccttatggagtcgtggtgaaaactgcatgaaatgatgcacatttagaaataagcatggtgcctatccaaagcgagtggccaataaatattgactataattatcaccataaatat

SEQ ID NO: 226658 - DNA, 641 bp, Homo sapiens
agtgtagactctggggccagactgcctggcttcaaaactgggctcctccactagctgctcatgtgccattaggcattttcttaatttataaaagaacaaaaataacagttgcaccagatgctgttgacagcctgcttgtattgcatcagtctctctgaatgcccccccatcctgacccctcttcctgtattactctgcctgaaagtattctctggccacaggccatgcttgccctctctctaggcaggcagaagtgcaggaatcagtgccttgagaacaccatcaatcaacaagagctggastttcagcagggagaccccctgtcttaatggaggaggtgtgacttgtgtttcaaacagtcttacagagggtcctcgaaggatttgagccccagttgctcacagcggtattatgctcattattacacttttcccttctttttcttgtttcacttgtaattcttcttatcacttttcaaatcatctttttgcatccaaagctcttctccaaggggaatccaatctaaaccttatggagtcgtggtgaaaactgcatgaaatgatgcacatttagaaataagcatggtgcctatccaaagcgagtggccaataaatattgactataattatcaccataaatat

SEQ ID NO: 226659 - DNA, 533 bp, Homo sapiens
ttagcctcatttgttgaaaagagaatcctttctttgttgaatagtttcagagcctttgtcatagataaggtgactagcctgttcctttgatctgtctatctattcctttgctaatatcatgttgtcttgatgcttggagctttataacaatcttgaaattgggttgtatgcatcttcaacttacatttcttcttcagtattgtgttagctattctagggttttttgcctttatgtacattttagaattagtttgtggatacrtataaaatggtttgttgaacttttcatcaggatcatgttgaatttattaaaattgagaataattgacattttaatttgagcttcagataagaaatatgaactatctttccatttatttagacctttcttgacttctttcatcagttttatttttgtatatagaccctatacatattttattaggcttataccttaagtattccatgatttttggtgctattgtaagtggtatttttaaaaagtaattctaattccaatcatttattgctgg

SEQ ID NO: 226660 - DNA, 640 bp, Homo sapiens
tcccaatctgtatgccttttattttatcttcttgttttgctcccttcactaggtcttccagtggcaggcagaataggagaaatggaagtggacatcctgccagttcccagtatttgggggaaaacaaccagtttctcaccattaaatataatgcyagaagtagaatacttataagtattctttaccaagatgagaaagttccctctgtttctagtgtgctgagtttcttttttatcctgaataggtattatattttgtcaaatgcttttctttgcatctacagatataataatacattttttcctttaagcctgttgatataaaagattaactatactgattttcaaatgataaaatagccctgcgtacctagaataaattcctcttggtcatgatgaatagatttttgatacattgctggatttgatttgctcatattttgttgagaatgtttgtgcctgtgttcattgaagatattgatttgtagttttcttttttggatgtgccttagtctgattttggagtcaaggtaatcctggacttataaaatgaattaggaagcattacctgtgcttctattttctggaagaggttgtaaaaaaataaagtcattttctccttaatgtttggtaagattaac

SEQ ID NO: 226661 - DNA, 640 bp, Homo sapiens
tcccaatctgtatgccttttattttatcttcttgttttgctcccttcactaggtcttccagtggcaggcagaataggagaaatggaagtggacatcctgccagttcccagtatttgggggaaaacaaccagtttctcaccattaaatataatgctagaagtagaatacttataagtattctttaccaagatgagaaagttccctctgtttctagtgtgctgagtttyttttttatcctgaataggtattatattttgtcaaatgcttttctttgcatctacagatataataatacattttttcctttaagcctgttgatataaaagattaactatactgattttcaaatgataaaatagccctgcgtacctagaataaattcctcttggtcatgatgaatagatttttgatacattgctggatttgatttgctcatattttgttgagaatgtttgtgcctgtgttcattgaagatattgatttgtagttttcttttttggatgtgccttagtctgattttggagtcaaggtaatcctggacttataaaatgaattaggaagcattacctgtgcttctattttctggaagaggttgtaaaaaaataaagtcattttctccttaatgtttggtaagattaac

SEQ ID NO: 226662 - DNA, 640 bp, Homo sapiens
tcccaatctgtatgccttttattttatcttcttgttttgctcccttcactaggtcttccagtggcaggcagaataggagaaatggaagtggacatcctgccagttcccagtatttgggggaaaacaaccagtttctcaccattaaatataatgctagaagtagaatacttataagtattctttaccaagatgagaaagttccctctgtttctagtgtgctgagtttcttttttatcctgaataggtattatattttgtcaaatgcttttctttgcatctacagatataataatacattttttcctttaagcctgttgatataaaagattaactatactgattttcaaatgataaaatagccctgcrtacctagaataaattcctcttggtcatgatgaatagatttttgatacattgctggatttgatttgctcatattttgttgagaatgtttgtgcctgtgttcattgaagatattgatttgtagttttcttttttggatgtgccttagtctgattttggagtcaaggtaatcctggacttataaaatgaattaggaagcattacctgtgcttctattttctggaagaggttgtaaaaaaataaagtcattttctccttaatgtttggtaagattaac

SEQ ID NO: 226663 - DNA, 532 bp, Homo sapiens
tcctaacttgaaaaaaaaccgaatgtctatcaactgctgaatggagaaaatacatccatttggtatatctatatgatgaaatattattcagcactttaaaaatgcacaaaatagtggcatatgctcaaacatggaagaacctcaaaatcattatgctaagttaaggaaggtggacataaaaacttacatattatatgatttcatttatatgtagagaaaaggtaaatctataggcacagaaaatggatgagtgattgtctgggcctggggcaggatgggaggattggggagcgactgctaatgggtagagacggggtttcacyatgttggccaggctggtcttgaactcctgacctcaggtgatccacccaccttggcctcccaaactgctgggattacaggcatgagccaccacgcccagcccttttgtcaaatttttaatggaaatgtttgcctttctaacattgagttgtgagagttctttatacacttcaggtatgagcctctgtcagatgtgtgatatgcaaatcat

SEQ ID NO: 226664 - DNA, 497 bp, Homo sapiens
tcataactgcttccatgtcacagcggttgatgctcagcaaagagatcagtaaaaacactmagccgtttgccaaacacataaagattttaaaatacaaactgatggtaaaatgcataccaggatattttcagctgtacctgtcttccaagtgcaggaaatctcatatgtctcatctccagagctatatgctccctcccaggctcaaaggaaactcttctcagactaaggagtcatggctttttcccagaaatgtgctcatcatctctcacctacaccattcaaccctcctaactggctttcgaagttcaccttcctccagttcttactccagtggaagccagccaaggcagtcttgctaaaattcaaatttatacatgatgtccttgcttaaaatccttgagtctcccctttgcctagagggcagctcaaataacattctgtcatgcaaaagccttcagaatcaagcccctgactccttctctagccataaggccatt

SEQ ID NO: 226665 - DNA, 533 bp, Homo sapiens
tgagcaaggtggatcttatctctcaccacatcctgtaccagtttgggcagacaaggaatcctggttgaacagactgagataacactttatgaacattcttttcctgctgcctctgatgagagagatctgagagaagcccctccctgctgaggtctggtgaggacccacaggccaaaatgcagtctgattaacaggcatcccaagcagtgactcaaaccatcrgcaatttcagaggaagcttgttatggtgactccacaattaataccacagcccatgtgaccagtcagtcccgcgggaggctggactaagcaacatataaaagtcccaccttgctgggcttcacagtccacagcctttgttgagtcttgttgaagatcaggtaagtggggcatctgtgccctctctctccctgttactctgtctttaggcggccgctgttctgttcctcttatggactgtactttctactgattttttaagtggtttgccatttcttgggcctcacaaactatcctgtatattctatccagac

SEQ ID NO: 226666 - DNA, 533 bp, Homo sapiens
tgagcaaggtggatcttatctctcaccacatcctgtaccagtttgggcagacaaggaatcctggttgaacagactgagataacactttatgaacattcttttcctgctgcctctgatgagagagatctgagagaagcccctccctgctgaggtctggtgaggacccacaggccaaaatgcagtctgattaacaggcatcccaagcagtgactcaaaccatcggcaatttcagaggaagcttgttatggtgactccacaattartaccacagcccatgtgaccagtcagtcccgcgggaggctggactaagcaacatataaaagtcccaccttgctgggcttcacagtccacagcctttgttgagtcttgttgaagatcaggtaagtggggcatctgtgccctctctctccctgttactctgtctttaggcggccgctgttctgttcctcttatggactgtactttctactgattttttaagtggtttgccatttcttgggcctcacaaactatcctgtatattctatccagac

SEQ ID NO: 226667 - DNA, 620 bp, Homo sapiens
taattatgctaggttttgaaggttatataaatataaccttacatgtgtcatttttagaatttatttttaattaaaagataaaaattatatatatttttgtgtaaaacgtgttttaaaatgtatacattgtggaatggctaaatrgaactaattaacatatgaattacctcacgcacttataattttttatggtgagaacacctaaaatctactctctcagcaattttcaagaatacaattcattgtctttaaccataatcactacatgtaaaataggtttcttgaacttattctgcctatctaactgaaattttgtgtcctttgaccagcatctccccagtgcttcccttccccacctccagctcctggtaaccaccattctactctcttttcctatgagttcaacttttttagattccatatccaagtgagatcatgtggtatttgtctttccatacctggcttatttcccttaacataatatcctccagctgcatttgtgttgtcccaaataacaggattttcttctttttaaggtattttctttactcattcatctcttcatatacactaggttgctcacatatattggctattctgaatagtgcttcagtgaacat

SEQ ID NO: 226668 - DNA, 578 bp, Homo sapiens
gggtgaggttgtgggagtgcaaattggtacaaccactttggaaaactctttgacggtcatgactaaagtagaatgtatacacagccaatgactgaacaattcctctcctaggcatctgccccgcatacggtcaccaaaactcaaacattagaatgttcattctagctctcatcaggcatccttgtgaaagtggcatcacctttaaaccctgcatggcaacccctgacacactgccaggctgcccagggaatacagggcaacctggaagtccaactacttccttcagatcatccaatttttcaatcattatctgaaatgtttcattgtagaagcagcaatgtgggctccaagtagatgcagcagatccacatgtccctctgagggaaagccatggtgccaatgggcaagaacaccatgatgtgcaaggccatccaagggcacctggaaaacaacccagctctggaaaaaytgttgcctcatatccagggaaatgtgggctttgcgttcaccaaggaagacctcactaagttcagggacatgctgctgaatagtaaggtgccagctgccacccatgctgg

SEQ ID NO: 226669 - DNA, 536 bp, Homo sapiens
gcattctcacctcctggagggtgtccgcaatgttgccrgtgtttgcctgcagattggttacccaactgttgcatcagtacctcattctaccatcaatgggtacaagcaagtcctggctttgtctgtggaaactgattgcaccttcccacttgctgaaaaggtcaaggccttcttggccgatccatctgcctttgtggctgctgcccctggggccactgccaccactgctgctcctgctgcagctccagccaaggctgaagccaagaagagttggaggagttggatgagaatatgggatttggcctatttgactaatcaccaaaaggcaaccaactcagccagctttatttgcaaaacaaagaaatgaaggcttacttctttcaaaaaaaaatgtttattctagtgttattcataatatccaagtatcagaaagaatacaaatacccatcaatgaataaataaacggtggtatattcagacaatggaattccatacagcaatgtatacaaatgatctacagctacacacagcaataa

SEQ ID NO: 226670 - DNA, 536 bp, Homo sapiens
gcattctcacctcctggagggtgtccgcaatgttgccagtgtttgcctgcagattggttacccaactgttgcatcagtacctcattctaccatcaatgggtacaagcaagtcctggctttgtctgtggaaactgattgcaccttcccacttgctgaaaaggtcaaggccttcttggccgatccatctgcctttgtggctgctgcccctggggccactgccaccactgctgctcctgctgcagctccagccaaggctgaagccaagaagagttggaggagttggatgagamtatgggatttggcctatttgactaatcaccaaaaggcaaccaactcagccagctttatttgcaaaacaaagaaatgaaggcttacttctttcaaaaaaaaatgtttattctagtgttattcataatatccaagtatcagaaagaatacaaatacccatcaatgaataaataaacggtggtatattcagacaatggaattccatacagcaatgtatacaaatgatctacagctacacacagcaataa

SEQ ID NO: 226671 - DNA, 607 bp, Homo sapiens
taagaagaccaggggctcagtyttgaacctgtcaattttgagacgcatacagaataaccaagcagaaatacaaagtaagcacttacatctatgagtcaggagcgcgggaaaaattcaggaatggagatctacacttgggagccatcatcgtaggggtagcattctagctttggggtgtatagatcatccagtgacagaatatagattaagaaaagaagggaacttaagaccatgccctgagaaacctcaacagctaaaggttgagaagagagagagcccttggcaaaagattaagaaggagtcaatgatttaagagaaaagtcaggaaggagagagtgtgcaaaatgctgaatgccactgaggatcaggaagtgcccacactgagtgacaacatggagagcaggcatgggggtgggagggtccagccaggctggtcacccagggattgctcaaatactggaacctcttcccactcacttctcttcttctaaggcacagtggtttgccattagatcctggtacatgggaataagtgagtgaatgaatgataaatgatctgaggacccaaaaggtttaacagcttgaccaagattatccggccagtaag

SEQ ID NO: 226672 - DNA, 607 bp, Homo sapiens
taagaagaccaggggctcagttttgaacctgtcaattttgagacgcatacagaataaccaagcagaratacaaagtaagcacttacatctatgagtcaggagcgcgggaaaaattcaggaatggagatctacacttgggagccatcatcgtaggggtagcattctagctttggggtgtatagatcatccagtgacagaatatagattaagaaaagaagggaacttaagaccatgccctgagaaacctcaacagctaaaggttgagaagagagagagcccttggcaaaagattaagaaggagtcaatgatttaagagaaaagtcaggaaggagagagtgtgcaaaatgctgaatgccactgaggatcaggaagtgcccacactgagtgacaacatggagagcaggcatgggggtgggagggtccagccaggctggtcacccagggattgctcaaatactggaacctcttcccactcacttctcttcttctaaggcacagtggtttgccattagatcctggtacatgggaataagtgagtgaatgaatgataaatgatctgaggacccaaaaggtttaacagcttgaccaagattatccggccagtaag

SEQ ID NO: 226673 - DNA, 607 bp, Homo sapiens
taagaagaccaggggctcagttttgaacctgtcaattttgagacgcatacagaataaccaagcagaaatacaaagtaagcacttacatctatgagtcrggagcgcgggaaaaattcaggaatggagatctacacttgggagccatcatcgtaggggtagcattctagctttggggtgtatagatcatccagtgacagaatatagattaagaaaagaagggaacttaagaccatgccctgagaaacctcaacagctaaaggttgagaagagagagagcccttggcaaaagattaagaaggagtcaatgatttaagagaaaagtcaggaaggagagagtgtgcaaaatgctgaatgccactgaggatcaggaagtgcccacactgagtgacaacatggagagcaggcatgggggtgggagggtccagccaggctggtcacccagggattgctcaaatactggaacctcttcccactcacttctcttcttctaaggcacagtggtttgccattagatcctggtacatgggaataagtgagtgaatgaatgataaatgatctgaggacccaaaaggtttaacagcttgaccaagattatccggccagtaag

SEQ ID NO: 226674 - DNA, 400 bp, Homo sapiens
gcactggtttgacttctcaattttcatactagattatcaacccctgctacctattcatttgatttccaaagcatatgtaaatacattcaacagcatcttcaaagagcttcaggcatgtatctgagagtgtaactcttaatcctcatgggtccagagctcatcagaaggctcaactgaaagaataatgactaccttaactaacagtgttgattatttatgatgtgccgtctcatctaattcatacaacagctctcttcagcaggtacaatcatctcctccatcrtgagattaggacaccaccctgaagagatgtcagcgtcagagaattagagaagaggtgtagacaggatttgaacccagcagtttgactctaagcctttactcctaaacactgggaatg

SEQ ID NO: 226675 - DNA, 522 bp, Homo sapiens
ttaagatctactcttagcaattttcaagtatacaatatattagtattaactatgatcaccttgcggtactacggatctcccaaacatattcatcctttgtaactaaaattggatttttttaatctgctaattttgctaaaggkgtaggattttaacatattaattcttcttgtgtctttgtatggttatgagaaagatacatcaaagattccattctaagctgttgacatgctcttatatggccaggaggctacctgattatcttagatactgtatttgttttctattgctgcataacaaatggccacaaacttagcagcttaaaacaacaacatttattatttcatagtttccatgggtcagaaatctgggcacgacttatgtaggtcctctgctaaagtccttacagggctaagttaaggtctgaagggctgcattctcatctggaggcttgactgaggaaaaatctgctcccaagctcattcagtttgttggcatcattcatttccttatggctgtgtg

SEQ ID NO: 226676 - DNA, 568 bp, Homo sapiens
gcctgtcctttgttatggtcttcaacaagttattcaatttcttggaatcttatttgctcccatgatgaaaggataatattgctcatttcttagagttgtttttgaggattaaattagatcacaagtgtgcgccatttagcacaatgcccaagtagttagtgctgggtaatttgtagctatgatttaattattgtcaccatcgttattataccagtcatagttaaacccagcacttgggtctacatttgtaaataaaagcaaattccccaagagtagcatgccgtttctctagattaagaagatttcttatcgttatatacataagagtagacacatagcaatgttcattaaataaatgctgttgaattaaaatgaaagtgagcttggtgattcttaaatatgacatgtttttcagtttgttttacatacacagacccccttckgaaggaaaaatgtaatatagctttctctctgtcctctgctactcagacagcaaatttaatgggattacctggagttagtgttagagaaactcacaggcctttcattgtatgaatggagaagctga

SEQ ID NO: 226677 - DNA, 502 bp, Homo sapiens
tcctttcacaaatattcatgactcctcctatagcttattcaacatgtatattcagccacgccattcagcataaattcctgccttattcttctcaccctccaaatatctgtatttctggcttctggctggagactgtgtttccaagtatgtcagaatggctgccttgcagactgaaccgctttatggaaagaaagctctcctttccaaatatatgaatttcatcattcttcagttcacagtcttacagtttatattaactaatrtaactaattaatttatttagacatgattttaagttacaaagtgtaatggaatttggttaggtttctaaacagcattgaaatgcttaagaaaacataagaatcaaaagatgtataaattttcttcgagtatgtatttggaattgtattagtcagtgggagacttaaagtactctaaaattgaggatatcaacttggtaacctcagtttaagttgttaagagagtttaaccgaagttgtta

SEQ ID NO: 226678 - DNA, 601 bp, Homo sapiens
ctctgactgattaaacagaaaaagggtttattaacatattattgggtagattatagaactcttggaaaagccgcagaaccaggcttgaggctaagcatataggggaaatgtccaaaaaccacaccacaaaactagcctggtgaggaagttctactgccacagcgactgctccaccattgctacatcatgccaggaacacatcyttgcctcctcagccagccgcaaaagggagccaccacccctgccagcaaaatgtcttctgcaaggagaccctcttccaattgttcctttccagagcatagctctgactggtagagcctccgtcacagtgcgcaccctgactgcaaaacagactgtgagatttactttctgggttctaccttggggagaaggaatacaagtctgtaaaatagtccatacatagtgacagtgtgcaaagagtactggaaagcaagggaaaggattacatatatttgctacaggcccaaattatcactggttttagatccaggcaagttgagacaacacctgcactgtcagccacatatttgaagcatctgtcaggaaatccagttttgctagctgaaaatgacctggatgg

SEQ ID NO: 226679 - DNA, 610 bp, Homo sapiens
cagttggaaatgtacttcagagatttactacaaggactcaatttatgtgattgcaaaggcagctaggcaagtctaaaatccagaagtcaggacatcaagagggtaagctggaactctgtcataggctgaagctgtaatccacacatakaatttcttcagggaagatttagcttggcttttaaagcctttcaactgattgaatcagaccagcctgtataaactaggattttctcccttacttagagtcaattcataatggactttaatcacatctaccttcacagcaacacctagattagtatttgattgagtaactagggactgtcatgcagccaagctgacacgtcaaaagaccatcacagggctgtcaagttttcatttatgtgttagttttttattttcaaggaatttgtgcttttcatctaagttgtagaattcaatatgaagttgtttataatatccactcattttaaatataacaatgtcacgcctatcatttgtgaaatggtttcatttttaaatatacaatatcatcgtgtgtgtgaaggtactcatgccacaaactaaataaggataataatgtttgaaataatgatagtagtcataataa

SEQ ID NO: 226680 - DNA, 610 bp, Homo sapiens
cagttggaaatgtacttcagagatttactacaaggactcaatttatgtgattgcaaaggcagctaggcaagtctaaaatccagaagtcaggacatcaagagggtaagctggaactctgtcataggctgaagctgtaatccacacatataatttcttcagggaagatttagcttggcttttaaagcctttcaactgattgaatcagaccagcctgtataaactaggattttctcccttacttagagtcaattcataatggactttaatcacatctaccttcacagcaacacctagattagtatttgattgagtaactagggactgtcatgcagccaagctgacacgtcaaaagaccatcacagggctgtcaagttttcatttatgtgttagttttttattttcaaggaatttgtgcttttcatctaagttgtagaattcaatatgaagttgtttataatatccactcattttaaatataacaatgtcacgcctawcatttgtgaaatggtttcatttttaaatatacaatatcatcgtgtgtgtgaaggtactcatgccacaaactaaataaggataataatgtttgaaataatgatagtagtcataataa

SEQ ID NO: 226681 - DNA, 484 bp, Homo sapiens
cactctcaacctgctgagggattttctcttcatctctgctctctccattaagacatctgccccagtgggyccccagtttattgcccttgcttgtagctgggaaggtgatggtgtcacaggaggaaaaaggaaacagaagcctggtgggcaccttaggaggagccctcaggtaaaatgtggactccacagaggagtccggtagagcttcactcaagagaatgactcccatttacccacaggatccttccctaccgtgcctggcccagctacctccctgccaagtccactccatcctgtgtcctccccagttctcctgaagtgggtctcaccaggcagagaatgtgtgtgtgtgtgtgtgtgtgtgtgtgtgtgtgtgtgtgtgtgtgtatgttggaggatgaagaggaggtgcagggcaagataaaccctagctgcagggaaggggagatggacactcgctgaagcttgagtccatctctgcttg

SEQ ID NO: 226682 - DNA, 521 bp, Homo sapiens
cctgctgagggattttctcttcatctctgctctctccattaagacatctgccccagtgggcccccagtttattgcccttgcttgtagctgggaaggtgatggtgtcacaggaggaaaaaggaaacagaagcctggtgggcaccttaggaggagccctcaggtaaaatgtggactccacagaggagtccggtagagcttcactcaagagaatgactcccatttacccacaggatccttccctaccrtgcctggcccagctacctccctgccaagtccactccatcctgtgtcctccccagttctcctgaagtgggtctcaccaggcagagaatgtgtgtgtgtgtgtgtgtgtgtgtgtgtgtgtgtgtgtgtgtgtgtatgttggaggatgaagaggaggtgcagggcaagataaaccctagctgcagggaaggggagatggacactcgctgaagcttgagtccatctctgcttgggagcctggatcagatggcggctgtatcctggacaaatccaacaag

SEQ ID NO: 226683 - DNA, 521 bp, Homo sapiens
cctgctgagggattttctcttcatctctgctctctccattaagacatctgccccagtgggcccccagtttattgcccttgcttgtagctgggaaggtgatggtgtcacaggaggaaaaaggaaacagaagcctggtgggcaccttaggaggagccctcaggtaaaatgtggactccacagaggagtccggtagagcttcactcaagagaatgactcccatttacccacaggatccttccctaccgtgcctggcccagctacctccctgccaagtccactccatcctgtgtcctccccagttctcctgaagtgggtctcmccaggcagagaatgtgtgtgtgtgtgtgtgtgtgtgtgtgtgtgtgtgtgtgtgtgtgtatgttggaggatgaagaggaggtgcagggcaagataaaccctagctgcagggaaggggagatggacactcgctgaagcttgagtccatctctgcttgggagcctggatcagatggcggctgtatcctggacaaatccaacaag

SEQ ID NO: 226684 - DNA, 540 bp, Homo sapiens
aaacctccctggctgtctcagtctctaacctcttaatgttgaggattggactttattcatctactgtctacacttgtgcccttggggatgccatccagtcttgtggtttcgaaaaccgtctatacactgacaactctcaaatttacatctcctccgactctgggtgcctggattcctattcctctctctagctggatgtctatcaaacatcagagatccaccatggcccaaagtgaactccacatcttcctccccaggagtgtccccagctcagctaaagccaactctttctcttggctgcccagaccacactttgaggccacctttacttctctccttctttcaccccccatgtcaaatcctggagcagactatgctaactctgtcttcaaaatacacccagaatctgactgcctctccgcactgccattgcatacagctcagtccaggcaccgtcatctctccctgggtgactgcagtgcccattagggcacacatctcakccttgcatcccattggccaggcaggggcacatgacta

SEQ ID NO: 226685 - DNA, 526 bp, Homo sapiens
ggctcatacctgtaatctcagaactttgagaggccaaggcgggcrgatcacttgaggtcaggagttcaagaccagcttggccaacatggcgaaattccgtctctacgaaaaatacaaaaattagctgggcatggtggtgctaccctggaggctgaggcatgagaatcacttgaacctgggagacggaggttgcagtgagccaagatcgcaccactgcactccagcctgggcaacagagtgagactccgtctcgataataataatgatgataatgataatcaaagtgtctgcaaggttgtgtcccttctggaggcctcctggggagaacacacttcctcgcctgctccagctcctagaggccacctggattcttaggcttgtggtcccttcctccacctcaaagccagccagcatcggcagctcaagtccttctcacaccacatcactccaacctcctcctctgccttcttccactttaaggaccctcgtgattacatggggcccacctggataatccaaggtaatt

SEQ ID NO: 226686 - DNA, 526 bp, Homo sapiens
ggctcatacctgtaatctcagaactttgagaggccaaggcgggcagatcacttgaggtcaggagttcaagaccagcttggccaacatggcgaaattccgtctctacgaaaaatacaaaaattagctgggcatggtggtgctaccctggaggctgaggcatgagaatcacttgaacctgggagacggargttgcagtgagccaagatcgcaccactgcactccagcctgggcaacagagtgagactccgtctcgataataataatgatgataatgataatcaaagtgtctgcaaggttgtgtcccttctggaggcctcctggggagaacacacttcctcgcctgctccagctcctagaggccacctggattcttaggcttgtggtcccttcctccacctcaaagccagccagcatcggcagctcaagtccttctcacaccacatcactccaacctcctcctctgccttcttccactttaaggaccctcgtgattacatggggcccacctggataatccaaggtaatt

SEQ ID NO: 226687 - DNA, 492 bp, Homo sapiens
cagcctctccacttctatgcctgttctcacccaatccccatccctcagcagtcatcrcctcaaaatgcaaacactgtcctatggtttcctggctcagaacccatcgggccctcctctgctctcaaatcaggcccccacccttcaaggccatgaggactgggctggcctggcccctaccggtcagtgcactcccccatcctggctgggttgtctcctctttctccttcaagtttttctatttaaaattcccctcctcagagaaccttctctggccaccatcccccaatctaaattaggttctccctcctaaggttctttctcaaatccatttcctttccttctgagcacttaagcgagcgataattacacactaacttgtgtaatttgtttaataggatctttgggacagagactttatctgactcgcttgatgctgcagctgctagaacccagaccgtaatgtagtgggagctcagtgcagacttttgaagg

SEQ ID NO: 226688 - DNA, 502 bp, Homo sapiens
caggttggagtttggaattcgaactttaacaggtaaactttaacaggtgctcatgatagagctcgcttttgtgcctggacatgaggagaaatcgggtctgcagagagagatgggggtgggagggggaagtgggagagtcaaggaaagagagaggaatcctgatgtgagaggaccccagtgctgctcacaccatagccttctctgttctgggctccacttgcagtcctgcctttggatttggtgaggccacccrggtccggagtcccactctggtataggttagctggagtggatctctaaggcctggcacaaagggaactccactgaccgtgacttcccaccccatctttcaggtcccatcgcagctgctgcagcctcctggggcccacctcgacctttcacccattgggcctctccagccacctctgaactcaacacctcgaacctttcctaccatcctggtgtgaaatcatggttatttgtccacgtatctcctcattcc

SEQ ID NO: 226689 - DNA, 493 bp, Homo sapiens
ggtggcaggtgggattttactcccagctccttccccactccccctgtcatgtgaccttgcagagcaccgggtggagcaaaacgcatttccctgtccctctgatgttgggtgctgtgacgtgtctcttgctgacccatgggacacaagcaacagctcccagttgtccgctggggcctgaggaggcttcccctgcttccccatgtgccccctttacattttggctgggagagatcatgagaagaacatggagccgctggctcagaacaggcctaaggagcagccccagaacccacggaagcctgaagcagagccccccaccctaggccatgggccatggactcatgagacagaaagagaagcrtttgcttctaaaagccccgagacattcagcttgttacagagaacaagtcaaaaagaaagatgaaaatctaatacagtcacccaagcagatttcagcatggaatccttttttgggaagcacctgtcagcatct

SEQ ID NO: 226690 - DNA, 597 bp, Homo sapiens
taattgttcagagaggtttggtgacttggccaaggtcccacaagaagtggaaagkacaggacttgtgctttgattttttttcccattgcaccagacaaggtgactcaccccccgccccccttgggttggcaaggtgttctttccagaataactgccaagatccccctccctgcctgccccaaaccatgaccaactctcctttggaactggccatccaatcagaggttcccaggcttccctgtttatatcagcagtaaatatgaggctggggagagagaaaagccagcccaccatggagagagggagcaaacacaagagggatggggtaagagaggccagctgcagagagagaagagtggagagaggagagagtcacacagagaggggggaacaaaaccaaggagaacaagacaccaagaggataacagaggcagcaaaatacattaaaaaaaacacaaaacacatacacgtgtgtgcacacgaacacacatggacgagaaagagaacctttgggaaaggctctaaaaatgagtgtgatggaggcacccacccagggagtgagaaacacacacacacacacacacacacacacacaca

SEQ ID NO: 226691 - DNA, 415 bp, Homo sapiens
gaattcatggttttcatccttgaaggagtgctccatgaagactgcaayggcttccctctcacaggctgcatgcacgtccagcagctcctggagcgtgtctgtggggagcctcagttgctgggccatctgctggctatagtggtcggctgccctctgcacagccgctgggttctcaagctgggccagtgctgtcactgcattctccagacaaggtactgctccactgttgatggcatctacataagtcaccaccagagtccccagccctgaatcacatatatttagggaaaatttacagttcttactcattatttatacaagttttaagagtcagcattctaaaaattacaaaaattctaattatcttgaagtttcttatcactcctttattctcttcctcctcctttttcatctt

SEQ ID NO: 226692 - DNA, 415 bp, Homo sapiens
gaattcatggttttcatccttgaaggagtgctccatgaagactgcaatggcttccctctcacaggctgcatgcacgtccagcagctcctggagcgtgtctgtggggagcctcagttgctgggccatctgctggctatagtggtcggctgccctctgcacagccgctgggttctcaagctgggccagtgctgtcactgcattctccagacaaggtactgctccactgttgatggcatctacataagtcaccaccagagtycccagccctgaatcacatatatttagggaaaatttacagttcttactcattatttatacaagttttaagagtcagcattctaaaaattacaaaaattctaattatcttgaagtttcttatcactcctttattctcttcctcctcctttttcatctt

SEQ ID NO: 226693 - DNA, 579 bp, Homo sapiens
aagcttgttgatgtaagttatcatcctcattttacagcaaatatactactaagactttttttttaaagtcttccaacagtttattagaaagaatgtaggcatttaaaaaaatccccactgtcatgaacataaattgaggttttcagccctggtataagctgaatcaaaaaaagaaaaaatccggccgggcgcggtggctcatgcctgtaatcccagcactttgggaggctgaggggggcagatcacgaggtcaggagatcgagaccatcctggctaacacggtgaaaccccatctctactaaaaaatacaaaaaattagccgggcrtggtggcaggcgcctgtagtcccagctactcgggaggctgaggcaggagaatggtgtgaacccgggatgtggagcttgcagtgagcagagatcgggccactgcactccagcctgggtgacagagagagactctcaaaaaaaaaaaatacaatagtgtattaaacatttttcactcatttgccatactgacaatgcaaatacaaatctggactaaatgtacagactctcaagcaacaatgtacagctttcttcg

SEQ ID NO: 226694 - DNA, 578 bp, Homo sapiens
attgaaagaaggagaaggagggaaaattcatgttaaatggaattttttctgatttttagaatgctgatacataccactcgtaaaacaatgagtgaaaactttctatctattccctaaatttcctaaatcattcagggctggggatgctggtggaagactacctggatgccatcaacagtggagcgactcctagtctggagaatgcaagggcagaactggcccagtgtgagaactcagcagccgtgcagagggcagccaaccactacagacagaagatggcccagcaagtgagataccccacagacacactccaggagctgctggacgtgcatgcagtttgtgagagggaagccattgcagtcttcatggagtactccttcaaagataaaagccaggaatttcagaagaagcttgtggtaatctttgttatttttttttttcttgattcctgcctttctggaatgatacttatagtccacctttttaatgccatggttcatctccttcttgtrgtaaagggagattggattattttatgtgactgaatttaatgggctacagttttttatttttctaaa

SEQ ID NO: 226695 - DNA, 387 bp, Homo sapiens
cacctggcctctattttcctttttttttttttaactttaaatttaagttcaggcttacccccaaactaaataaaataaaataaaataaaataaagaagttaaaaaatattttaagtccagtggtgcccctgaacttaatgaaataccatgaaagttaataaaatttaaaaaaaataaagaaaacattcctgtctgacagctttgaggagagtagtggttctcccagcacagagtttgagatctgagaayggacagactgcctcctcaagtgggtccccgacccccgagtagcctaactgggaggcacctcccagtaggggccgactgacacctcaaacagccgggtgcccctctgggacaaagcttccggaggaaggatcaggcagc

SEQ ID NO: 226696 - DNA, 555 bp, Homo sapiens
ccatcgggcatttcattagggaagttacaacaactcagtttcgacatgaaactggcagtgtaaaataagaaggaaatgctcttcctttggagaagaaaagctccgttttgcaaagatcttagtatcgtggcagaatttctatctctaattctattttaggatggagtggcaggctctccccttgaggccattacagtaccagcttgcagagaaatgagtataattaggccacaactctaatggtgagttgtgttttcttttagtatgtttcagtcaatgcttagtggggccgtctcttgggggcgatgagttggttcatttctctgcagcacaaggactggacttcatcccctttgggcagtgacgcagtgggtgaagscatgtactggaatgagtgtcacagggtctctgaggagggtgaccaaagggacaggtcttgaaagcggtgtgcaacagcagggcctgggagtgaccaaacccgctggcaccagctactcccgggaaggatctggacaggccccattctcccagcttggagagggtgaggcaggattg

SEQ ID NO: 226697 - DNA, 493 bp, Homo sapiens
gaattcccctttgcttgggaggctgatctttctgttctattcacattttcaactgattgcatgaggcccacccacrctatggggggcaatctgtcttacttaagagttcaccagtatagtgttactgtcatcctaaaacatcctcatttaccaagaaagaacccagcagacaacatgtttaagtgggaagaaaacatagatgccacactgcaggagaactaggacaaagcctgcaaactgccttgcagaggggactgatgccaatggcatctgttttgtgaggtgtaagccatttttgccctaagtagaaaaaaaaaaaacccatacactacctcaagtgggaaaccttgaaaactgtttcagtagctcaccttaagagcctgtcacaccctcctgaggaatcagtaacgtctacttaataggcagtcagtgccctctggctctgagtcctggtacaaaaatttaaaactctctgccagaccctctctaagga

SEQ ID NO: 226698 - DNA, 522 bp, Homo sapiens
tttgtgattcatgagaacaggtcaaaaatcaacattaacagaaatctggaagaagttaattccaaccctcatagattactttgaggggttttagatttcagtggagaaagtccctgcagatgttgtggaaayagcaggagaactagaattagaagtaaagcctgcctgggaggggaaggacacgcaccggagcctgttaggggatgggaagtaataggagggagagtattaggaccaatacctaatgcatgcggggcttaaaacctagatgacaggttaataggtgcaggaaaccatcatggcacatgtatacttatgtaaacaatcccacactttctgcgcatgtatccaggaacttaaagtaaaattaaaacaaacaaaaaaagaagtaaagcctgaagatgtgactgaatcactacagtctcatgataaaactttagcaaataaggagttgcttcttatggatgagcaaagaaataagtttattgaaatggaatctattcctggtgaagatgctgtgaa

SEQ ID NO: 226699 - DNA, 522 bp, Homo sapiens
tttgtgattcatgagaacaggtcaaaaatcaacattaacagaaatctggaagaagttaattccaaccctcatagattactttgaggggttttagatttcagtggagaaagtccctgcagatgttgtggaaatagcaggagaactagaattagaagtaaagcctgcctgggaggggaaggacacgcaccggagcctgttaggggatgggaagtaataggagggagagtattaggaccaatacctaatgcatgyggggcttaaaacctagatgacaggttaataggtgcaggaaaccatcatggcacatgtatacttatgtaaacaatcccacactttctgcgcatgtatccaggaacttaaagtaaaattaaaacaaacaaaaaaagaagtaaagcctgaagatgtgactgaatcactacagtctcatgataaaactttagcaaataaggagttgcttcttatggatgagcaaagaaataagtttattgaaatggaatctattcctggtgaagatgctgtgaa

SEQ ID NO: 226700 - DNA, 522 bp, Homo sapiens
tttgtgattcatgagaacaggtcaaaaatcaacattaacagaaatctggaagaagttaattccaaccctcatagattactttgaggggttttagatttcagtggagaaagtccctgcagatgttgtggaaatagcaggagaactagaattagaagtaaagcctgcctgggaggggaaggacacgcaccggagcctgttaggggatgggaagtaataggagggagagtattaggaccaatacctaatgcatgcggggcttaaaacctagatgacaggttaataggtgcaggaaaccatcatggcacatgtatacttatgtaaacaatccyacactttctgcgcatgtatccaggaacttaaagtaaaattaaaacaaacaaaaaaagaagtaaagcctgaagatgtgactgaatcactacagtctcatgataaaactttagcaaataaggagttgcttcttatggatgagcaaagaaataagtttattgaaatggaatctattcctggtgaagatgctgtgaa

SEQ ID NO: 226701 - DNA, 522 bp, Homo sapiens
tttgtgattcatgagaacaggtcaaaaatcaacattaacagaaatctggaagaagttaattccaaccctcatagattactttgaggggttttagatttcagtggagaaagtccctgcagatgttgtggaaatagcaggagaactagaattagaagtaaagcctgcctgggaggggaaggacacgcaccggagcctgttaggggatgggaagtaataggagggagagtattaggaccaatacctaatgcatgcggggcttaaaacctagatgacaggttaataggtgcaggaaaccatcatggcacatgtatacttatgtaaacaatcccrcactttctgcgcatgtatccaggaacttaaagtaaaattaaaacaaacaaaaaaagaagtaaagcctgaagatgtgactgaatcactacagtctcatgataaaactttagcaaataaggagttgcttcttatggatgagcaaagaaataagtttattgaaatggaatctattcctggtgaagatgctgtgaa

SEQ ID NO: 226702 - DNA, 515 bp, Homo sapiens
aggtcaaaaatcaacattaacagaaatctggaagaagttaattccaaccctcatagattactttgaggggttttagatttcagtggagaaagtccctgcagatgttgtggaaatagcaggagaactagaattagaagtaaagcctgcctgggaggggaaggacacgcaccggagcctgttaggggatgggaagtaataggagggagagtattaggaccaatacctaatgcatgcggggcttaaaacctagatgacaggttaataggtgcaggaaaccatcatggcacatgtatacttatgtaaacaatcccacactttctgcgcrtgtatccaggaacttaaagtaaaattaaaacaaacaaaaaaagaagtaaagcctgaagatgtgactgaatcactacagtctcatgataaaactttagcaaataaggagttgcttcttatggatgagcaaagaaataagtttattgaaatggaatctattcctggtgaagatgctgtgaacattattgaaa

SEQ ID NO: 226703 - DNA, 528 bp, Homo sapiens
catttgtgattcatgagaacaggtcaaaaatcaacattaacagaaatctggaagaagttaattccaaccctcatagattactttgaggggttttagatttcagtggagaaagtccctgcagatgttgtggaaatagcaggagaactagaattagaagtaaagcctgcctgggaggggaaggacacgcaccggagcctgttaggggatgggaagtaataggagggagagtattaggaccaatacctaatgcatgcggggcttaaaacctagatgacaggttaataggtgcaggaaaccatcatggcacatgtatacttatgtaaacaatcccacactttctgcgcatgtatccaggaacttaaagtaaaattaaaacaaamaaaaaaagaagtaaagcctgaagatgtgactgaatcactacagtctcatgataaaactttagcaaataaggagttgcttcttatggatgagcaaagaaataagtttattgaaatggaatctattcctggtgaagatgctgtgaacatt

SEQ ID NO: 226704 - DNA, 473 bp, Homo sapiens
tacatctgaattctcacatttcaaacatatatgaaatatcaaataaaaatttatttttacaagaatttaggggaactactacatagctataaatgtaatatatatgttaactaagtatcayagataaaaaccatgctcccttcagcagcacgtgtaataatagatacaaagattgaaaggtaaaagatttaggatgaaaagaatcctctcttaaaaaggaaagcaaaattatacgtatgtgtatataacagttataacacccatcacacagctttatagaaacagcatctattcaaaaataccagtatttccaaaatatttaaaataatatttcaagtaataatattcaaataaataaatatatttaatatttcaataaataaaataatatttaaataattctatacccatgtttttcaaaataaaccaataaattagatagtatatattagacgtgttagtatatatatctg

SEQ ID NO: 226705 - DNA, 474 bp, Homo sapiens
ttacatctgaattctcacatttcaaacatatatgaaatatcaaataaaaatttatttttacaagaatttaggggaactactacatagctataaatgtaatatatatgttaactaagtatcatagataaaaaccatgctcccttcagcagcacgtgtaataatagatacaaagattgaaaggtaaaagatttaggatgaaaagaatcctctcttaaaaaggaaarcaaaattatacgtatgtgtatataacagttataacacccatcacacagctttatagaaacagcatctattcaaaaataccagtatttccaaaatatttaaaataatatttcaagtaataatattcaaataaataaatatatttaatatttcaataaataaaataatatttaaataattctatacccatgtttttcaaaataaaccaataaattagatagtatatattagacgtgttagtatatatatctg

SEQ ID NO: 226706 - DNA, 473 bp, Homo sapiens
tacatctgaattctcacatttcaaacatatatgaaatatcaaataaaaatttatttttacaagaatttaggggaactactacatagctataaatgtaatatatatgttaactaagtatcatagataaaaaccatgctcccttcagcagcacgtgtaataatagatacaaagattgaaaggtaaaagatttaggatgaaaagaatcctctcttaaaaaggaaagcaaaattataygtatgtgtatataacagttataacacccatcacacagctttatagaaacagcatctattcaaaaataccagtatttccaaaatatttaaaataatatttcaagtaataatattcaaataaataaatatatttaatatttcaataaataaaataatatttaaataattctatacccatgtttttcaaaataaaccaataaattagatagtatatattagacgtgttagtatatatatctg

SEQ ID NO: 226707 - DNA, 473 bp, Homo sapiens
tacatctgaattctcacatttcaaacatatatgaaatatcaaataaaaatttatttttacaagaatttaggggaactactacatagctataaatgtaatatatatgttaactaagtatcatagataaaaaccatgctcccttcagcagcacgtgtaataatagatacaaagattgaaaggtaaaagatttaggatgaaaagaatcctctcttaaaaaggaaagcaaaattatacgtatgtgtatataayagttataacacccatcacacagctttatagaaacagcatctattcaaaaataccagtatttccaaaatatttaaaataatatttcaagtaataatattcaaataaataaatatatttaatatttcaataaataaaataatatttaaataattctatacccatgtttttcaaaataaaccaataaattagatagtatatattagacgtgttagtatatatatctg

SEQ ID NO: 226708 - DNA, 421 bp, Homo sapiens
tgaattctcacaattcagtcacaracctaaacagcaaataaaaatttctatcaccagaattatgtttttttctggtggggaactaccaatagctataaatagaagagattattatggaagtatcatagataaaaagagtgctcacttcaggagcacatataataatacagaaacaaatttaaagataataaaatatttaggataaaaagaattgtctcttaaaaatgaaaagaaaattatctttatgtatatataacaactataactctcatcaaaaaactacaggaacagcatgttttcaaaagtacaacaatttccaaactattgaaataaatctatgaataattcaatggccaacattttccaaacaaaccaataaaatgcagagtgtgcatgaagctatctgttacaatctgtggca

SEQ ID NO: 226709 - DNA, 420 bp, Homo sapiens
gaattctcacaattcagtcacagacctaaacagcaaataaaaatttctatcaccagaattatgtwtttttctggtggggaactaccaatagctataaatagaagagattattatggaagtatcatagataaaaagagtgctcacttcaggagcacatataataatacagaaacaaatttaaagataataaaatatttaggataaaaagaattgtctcttaaaaatgaaaagaaaattatctttatgtatatataacaactataactctcatcaaaaaactacaggaacagcatgttttcaaaagtacaacaatttccaaactattgaaataaatctatgaataattcaatggccaacattttccaaacaaaccaataaaatgcagagtgtgcatgaagctatctgttacaatctgtggca

SEQ ID NO: 226710 - DNA, 420 bp, Homo sapiens
gaattctcacaattcagtcacagacctaaacagcaaataaaaatttctatcaccagaattatgtttttttctggtrgggaactaccaatagctataaatagaagagattattatggaagtatcatagataaaaagagtgctcacttcaggagcacatataataatacagaaacaaatttaaagataataaaatatttaggataaaaagaattgtctcttaaaaatgaaaagaaaattatctttatgtatatataacaactataactctcatcaaaaaactacaggaacagcatgttttcaaaagtacaacaatttccaaactattgaaataaatctatgaataattcaatggccaacattttccaaacaaaccaataaaatgcagagtgtgcatgaagctatctgttacaatctgtggca

SEQ ID NO: 226711 - DNA, 420 bp, Homo sapiens
tgaattctcacaattcagtcacagacctaaacagcaaataaaaatttctatcaccagaattatgtttttttctggtggggaactaccaatagctataaatagaagagattwttatggaagtatcatagataaaaagagtgctcacttcaggagcacatataataatacagaaacaaatttaaagataataaaatatttaggataaaaagaattgtctcttaaaaatgaaaagaaaattatctttatgtatatataacaactataactctcatcaaaaaactacaggaacagcatgttttcaaaagtacaacaatttccaaactattgaaataaatctatgaataattcaatggccaacattttccaaacaaaccaataaaatgcagagtgtgcatgaagctatctgttacaatctgtggc

SEQ ID NO: 226712 - DNA, 420 bp, Homo sapiens
gaattctcacaattcagtcacagacctaaacagcaaataaaaatttctatcaccagaattatgtttttttctggtggggaactaccaatagctataaatagaagagattattatggaagtatcatagataaaaagagtgctcrcttcaggagcacatataataatacagaaacaaatttaaagataataaaatatttaggataaaaagaattgtctcttaaaaatgaaaagaaaattatctttatgtatatataacaactataactctcatcaaaaaactacaggaacagcatgttttcaaaagtacaacaatttccaaactattgaaataaatctatgaataattcaatggccaacattttccaaacaaaccaataaaatgcagagtgtgcatgaagctatctgttacaatctgtggca

SEQ ID NO: 226713 - DNA, 427 bp, Homo sapiens
agtcacagacctaaacagcaaataaaaatttctatcaccagaattatgtttttttctggtggggaactaccaatagctataaatagaagagattattatggaagtatcatagataaaaagagtgctcacttcaggagcacatrtaataatacagaaacaaatttaaagataataaaatatttaggataaaaagaattgtctcttaaaaatgaaaagaaaattatctttatgtatatataacaactataactctcatcaaaaaactacaggaacagcatgttttcaaaagtacaacaatttccaaactattgaaataaatctatgaataattcaatggccaacattttccaaacaaaccaataaaatgcagagtgtgcatgaagctatctgttacaatctgtggcactgatatttcacaaaagaattc

SEQ ID NO: 226714 - DNA, 421 bp, Homo sapiens
tgaattctcacaattcagtcacagacctaaacagcaaataaaaatttctatcaccagaattatgtttttttctggtggggaactaccaatagctataaatagaagagattattatggaagtatcatagataaaaagagtgctcacttcaggagcacatataataatacagraacaaatttaaagataataaaatatttaggataaaaagaattgtctcttaaaaatgaaaagaaaattatctttatgtatatataacaactataactctcatcaaaaaactacaggaacagcatgttttcaaaagtacaacaatttccaaactattgaaataaatctatgaataattcaatggccaacattttccaaacaaaccaataaaatgcagagtgtgcatgaagctatctgttacaatctgtggca

SEQ ID NO: 226715 - DNA, 421 bp, Homo sapiens
tgaattctcacaattcagtcacagacctaaacagcaaataaaaatttctatcaccagaattatgtttttttctggtggggaactaccaatagctataaatagaagagattattatggaagtatcatagataaaaagagtgctcacttcaggagcacatataataatacagaaamaaatttaaagataataaaatatttaggataaaaagaattgtctcttaaaaatgaaaagaaaattatctttatgtatatataacaactataactctcatcaaaaaactacaggaacagcatgttttcaaaagtacaacaatttccaaactattgaaataaatctatgaataattcaatggccaacattttccaaacaaaccaataaaatgcagagtgtgcatgaagctatctgttacaatctgtggca

SEQ ID NO: 226716 - DNA, 412 bp, Homo sapiens
gtcacagacctaaacagcaaataaaaatttctatcaccagaattatgtttttttctggtggggaactaccaatagctataaatagaagagattattatggaagtatcatagataaaaagagtgctcacttcaggagcacatataataatacagaaacaaatttaaagatrataaaatatttaggataaaaagaattgtctcttaaaaatgaaaagaaaattatctttatgtatatataacaactataactctcatcaaaaaactacaggaacagcatgttttcaaaagtacaacaatttccaaactattgaaataaatctatgaataattcaatggccaacattttccaaacaaaccaataaaatgcagagtgtgcatgaagctatctgttacaatctgtggcactgatatt

SEQ ID NO: 226717 - DNA, 390 bp, Homo sapiens
tcacagacctaaacagcaaataaaaatttctatcaccagaattatgtttttttctggtggggaactaccaatagctataaatagaagagattattatggaagtatcatagataaaaagagtgctcacttcaggagcacatataataatacagaaacaaatttaaagataataaaatatttaggataaaaagaattgtctcttaaaaatgaaaagaaaattakctttatgtatatataacaactataactctcatcaaaaaactacaggaacagcatgttttcaaaagtacaacaatttccaaactattgaaataaatctatgaataattcaatggccaacattttccaaacaaaccaataaaatgcagagtgtgcatgaagctatctgtt

SEQ ID NO: 226718 - DNA, 420 bp, Homo sapiens
tgaattctcacaattcagtcacagacctaaacagcaaataaaaatttctatcaccagaattatgtttttttctggtggggaactaccaatagctataaatagaagagattattatggaagtatcatagataaaaagagtgctcacttcaggagcacatataataatacagaaacaaatttaaagataataaaatatttaggataaaaagaattgtctcttaaaaatgaaaagaaaattatctttatgtatatrtaacaactataactctcatcaaaaaactacaggaacagcatgttttcaaaagtacaacaatttccaaactattgaaataaatctatgaataattcaatggccaacattttccaaacaaaccaataaaatgcagagtgtgcatgaagctatctgttacaatctgtggc

SEQ ID NO: 226719 - DNA, 421 bp, Homo sapiens
tgaattctcacaattcagtcacagacctaaacagcaaataaaaatttctatcaccagaattatgtttttttctggtggggaactaccaatagctataaatagaagagattattatggaagtatcatagataaaaagagtgctcacttcaggagcacatataataatacagaaacaaatttaaagataataaaatatttaggataaaaagaattgtctcttaaaaatgaaaagaaaattatctttatgtatatataacaactataactctcatcaaaaaactacaggaacagcatgttttcaaargtacaacaatttccaaactattgaaataaatctatgaataattcaatggccaacattttccaaacaaaccaataaaatgcagagtgtgcatgaagctatctgttacaatctgtggca

SEQ ID NO: 226720 - DNA, 395 bp, Homo sapiens
tgaattctcacaattcagtcacagacctaaacagcaaataaaaatttctatcaccagaattatgtttttttctggtggggaactaccaatagctataaatagaagagattattatggaagtatcatagataaaaagagtgctcacttcaggagcacatataataatacagaaacaaatttaaagataataaaatatttaggataaaaagaattgtctcttaaaaatgaaaagaaaattatctttatgtatatataacaactataactctcatcaaaaaactacaggaacagcatgttttcaaaagtacaacaatttccaaactattgaaataaayctatgaataattcaatggccaacattttccaaacaaaccaataaaatgcagagtgtgcat

SEQ ID NO: 226721 - DNA, 395 bp, Homo sapiens
tgaattctcacaattcagtcacagacctaaacagcaaataaaaatttctatcaccagaattatgtttttttctggtggggaactaccaatagctataaatagaagagattattatggaagtatcatagataaaaagagtgctcacttcaggagcacatataataatacagaaacaaatttaaagataataaaatatttaggataaaaagaattgtctcttaaaaatgaaaagaaaattatctttatgtatatataacaactataactctcatcaaaaaactacaggaacagcatgttttcaaaagtacaacaatttccaaactattgaaataaatctatkaataattcaatggccaacattttccaaacaaaccaataaaatgcagagtgtgcat

SEQ ID NO: 226722 - DNA, 427 bp, Homo sapiens
agtcacagacctaaacagcaaataaaaatttctatcaccagaattatgtttttttctggtggggaactaccaatagctataaatagaagagattattatggaagtatcatagataaaaagagtgctcacttcaggagcacatataataatacagaaacaaatttaaagataataaaatatttaggataaaaagaattgtctcttaaaaatgaaaagaaaattatctttatgtatatataacaactataactctcatcaaaaaactacaggaacagcatgttttcaaaagtacaacaatttccaaactattgaaataaatctatgaataattcaatggccracattttccaaacaaaccaataaaatgcagagtgtgcatgaagctatctgttacaatctgtggcactgatatttcacaaaagaattc

SEQ ID NO: 226723 - DNA, 390 bp, Homo sapiens
tcacagacctaaacagcaaataaaaatttctatcaccagaattatgtttttttctggtggggaactaccaatagctataaatagaagagattattatggaagtatcatagataaaaagagtgctcacttcaggagcacatataataatacagaaacaaatttaaagataataaaatatttaggataaaaagaattgtctcttaaaaatgaaaagaaaattatctttatgtatatataacaactataactctcatcaaaaaactacaggaacagcatgttttcaaaagtacaacaatttccaaactattgaaataaatctatgaataattcaatggccaacattttccawacaaaccaataaaatgcagagtgtgcatgaagctatctgtt

SEQ ID NO: 226724 - DNA, 512 bp, Homo sapiens
taaaagcttatgtttgactacaaacaaataccttttctctagtttaatatacagcctcccaaacaccgaggagaatacttaaataagagaacgggaaatcctctgttgagaaatctcatatattctgtccagaaaataaatgragacattatatcgtgtataaatattcaatatcagaatgttggccaacagatttgttcatagaatagtacagtgtatatttgttttattcccatacgaggcttaaaagttccacacattacttacagataaataaattacatatatattttagctttctagttattctattttacattcacagtaaccttgcaaaggaagtagtgaaacttttagcattcccatttcaaggcaaggtaactaagggacatcaaaattaaatgatttatccagtgtcattcagtttgtcagcactgctgaattataggtagccatgtcccctgcacactctctgtgttaaggattttactgtctagggattctgaatgttc

SEQ ID NO: 226725 - DNA, 510 bp, Homo sapiens
agggcagagtagatataaaagcttatgtttgactacaaacaaataccttttctctagtttaatatacagcctcccaaacaccgaggagaatacttaaataagagaacgggaaatcctctgttgagaaatctcatatattctgtccagaaaataaatggagacattatatcgtgtataaatattcaatatcagaatgttggccaacagatttgttcatagaatagtacagtgtatatttgttttattcccatacraggcttaaaagttccacacattacttacagataaataaattacatatatattttagctttctagttattctattttacattcacagtaaccttgcaaaggaagtagtgaaacttttagcattcccatttcaaggcaaggtaactaagggacatcaaaattaaatgatttatccagtgtcattcagtttgtcagcactgctgaattataggtagccatgtcccctgcacactctctgtgttaaggattttactgtct

SEQ ID NO: 226726 - DNA, 509 bp, Homo sapiens
gggcagagtagatataaaagcttatgtttgactacaaacaaataccttttctctagtttaatatacagcctcccaaacaccgaggagaatacttaaataagagaacgggaaatcctctgttgagaaatctcatatattctgtccagaaaataaatggagacattatatcgtgtataaatattcaatatcagaatgttggccaacagatttgttcatagaatagtacagtgtatatttgttttattcccatacgaggcttaaaagttccacacattacttacagmtaaataaattacatatatattttagctttctagttattctattttacattcacagtaaccttgcaaaggaagtagtgaaacttttagcattcccatttcaaggcaaggtaactaagggacatcaaaattaaatgatttatccagtgtcattcagtttgtcagcactgctgaattataggtagccatgtcccctgcacactctctgtgttaaggattttactgtct

SEQ ID NO: 226727 - DNA, 512 bp, Homo sapiens
taaaagcttatgtttgactacaaacaaataccttttctctagtttaatatacagcctcccaaacaccgaggagaatacttaaataagagaacgggaaatcctctgttgagaaatctcatatattctgtccagaaaataaatggagacattatatcgtgtataaatattcaatatcagaatgttggccaacagatttgttcatagaatagtacagtgtatatttgttttattcccatacgaggcttaaaagttccacacattacttacagatamataaattacatatatattttagctttctagttattctattttacattcacagtaaccttgcaaaggaagtagtgaaacttttagcattcccatttcaaggcaaggtaactaagggacatcaaaattaaatgatttatccagtgtcattcagtttgtcagcactgctgaattataggtagccatgtcccctgcacactctctgtgttaaggattttactgtctagggattctgaatgttc

SEQ ID NO: 226728 - DNA, 512 bp, Homo sapiens
taaaagcttatgtttgactacaaacaaataccttttctctagtttaatatacagcctcccaaacaccgaggagaatacttaaataagagaacgggaaatcctctgttgagaaatctcatatattctgtccagaaaataaatggagacattatatcgtgtataaatattcaatatcagaatgttggccaacagatttgttcatagaatagtacagtgtatatttgttttattcccatacgaggcttaaaagttccacacattacttacagataaataaattacatatatattttagctttctagttattctattttacattcacagtaaccttgcaaaggaagtagtgaaacttttagcattcccatttcaaggcaaggtaactaagggacatcaaaattaaatgatttatccagtgtcattcagyttgtcagcactgctgaattataggtagccatgtcccctgcacactctctgtgttaaggattttactgtctagggattctgaatgttc

SEQ ID NO: 226729 - DNA, 512 bp, Homo sapiens
taaaagcttatgtttgactacaaacaaataccttttctctagtttaatatacagcctcccaaacaccgaggagaatacttaaataagagaacgggaaatcctctgttgagaaatctcatatattctgtccagaaaataaatggagacattatatcgtgtataaatattcaatatcagaatgttggccaacagatttgttcatagaatagtacagtgtatatttgttttattcccatacgaggcttaaaagttccacacattacttacagataaataaattacatatatattttagctttctagttattctattttacattcacagtaaccttgcaaaggaagtagtgaaacttttagcattcccatttcaaggcaaggtaactaagggacatcaaaattaaatgatttatccagtgtcattcagtttgtcagcactgctgaaytataggtagccatgtcccctgcacactctctgtgttaaggattttactgtctagggattctgaatgttc

SEQ ID NO: 226730 - DNA, 597 bp, Homo sapiens
ttgactccattctaagactatattgctaatagggtttagtaaacatagttttgcaaacctacattataaagatgtttcaacctcatacattggcctttaccatcacgttgaatacagaaatactgttctctctggaatttattstgagtcctgggttcatttacattttatcagtgacccaacatgaaacataacatttactttttgtttagtactttcctgaagcagacaggagaaagtcattgaaattgcttcaaattacctgagaaattgccataatttgcaacttcacaatgcaagcctggatttcccaagttagctctgatctcaatgatgagtttaaatgccaggatgatattttaactatgcagagtcataggcatacatgaaactccattagtttagaatctaatgaagacttatgttgacatatcattctatgtatttcagcatattatctactaagacattataagaacaaaaccccccaaaattccattcttttttgaggtagggtggctttttctcttttaatatttttttacatttgagttcttcatgtttcctgaaggtaaatgatgcatgagaaaacttgga

SEQ ID NO: 226731 - DNA, 597 bp, Homo sapiens
ttgactccattctaagactatattgctaatagggtttagtaaacatagttttgcaaacctacattataaagatgtttcaacctcatacattggcctttaccatcacgttgaatacagaaatactgttctctctggaatttattgtgagtcctgggttcatttacrttttatcagtgacccaacatgaaacataacatttactttttgtttagtactttcctgaagcagacaggagaaagtcattgaaattgcttcaaattacctgagaaattgccataatttgcaacttcacaatgcaagcctggatttcccaagttagctctgatctcaatgatgagtttaaatgccaggatgatattttaactatgcagagtcataggcatacatgaaactccattagtttagaatctaatgaagacttatgttgacatatcattctatgtatttcagcatattatctactaagacattataagaacaaaaccccccaaaattccattcttttttgaggtagggtggctttttctcttttaatatttttttacatttgagttcttcatgtttcctgaaggtaaatgatgcatgagaaaacttgga

SEQ ID NO: 226732 - DNA, 661 bp, Homo sapiens
ttaaatgccaggatgatattttaactatgcagagtcataggcatacatgaaactccattagtttagaatctaatgaagacttatgttgacatatcattctatgtatttcagcatattatctactaagacattataagaacaaaaccccccaaaattccattcttttttgaggtagggtggctttttctcttttaatatttttttacatttgagttcttcatgtttcctgaaggtaaatgatgcatgagaaaacttggaatatcttgactagcattttaaaagcatattaaatattattttcaaaactgaactatgaatagttctgcacaacaattttcttgttggaaattctgatatttatccatttttcctttgatgacctagcatactaatgctatacagactacttcawtcttccccaaagttgtgaaactcacaatttcatgaaagatcaaggatacagatactctttgaaggggtgatttatatgtttagtggaagatggttattttttacaaggactttggattcttgtgaatgtaggttttacaactaagaatatgttagatgttattttttataaatttcatgatagtcctaaatttcattaatgtacaaataaaatgattccatggttaatacagtcccagaactaccagag

SEQ ID NO: 226733 - DNA, 353 bp, Homo sapiens
gctagggctactcacccagagacgtgataggggctactcccctaagaccaattcctcctggcaggccactcacaatctcacagcaggaggcagctaaacacaaaatcartattaatataaaatcaactgctatatttttaaagagtagtgtttggattacataagcaatcataaaactcccgttggctttagcaagaggtttagtcctgtaaactccaaaggttttctgtgtgtgctgagcagacaagcatcctaacagaataagccagaactttcctagccatcctagcatgtttgtgccttgtaagatattcccagttacatcctttaatttgccaaagggcagaaaaaga

SEQ ID NO: 226734 - DNA, 353 bp, Homo sapiens
gctagggctactcacccagagacgtgataggggctactcccctaagaccaattcctcctggcaggccactcacaatctcacagcaggaggcagctaaacacaaaatcaatattaatataaaatcaactgctatatttttaaagagtagtgtttggattacataagcaatcataaaactccmgttggctttagcaagaggtttagtcctgtaaactccaaaggttttctgtgtgtgctgagcagacaagcatcctaacagaataagccagaactttcctagccatcctagcatgtttgtgccttgtaagatattcccagttacatcctttaatttgccaaagggcagaaaaaga

SEQ ID NO: 226735 - DNA, 353 bp, Homo sapiens
gctagggctactcacccagagacgtgataggggctactcccctaagaccaattcctcctggcaggccactcacaatctcacagcaggaggcagctaaacacaaaatcaatattaatataaaatcaactgctatatttttaaagagtagtgtttggattacataagcaatcataaaactcccgttggctttagcaagaggtttagtcctrtaaactccaaaggttttctgtgtgtgctgagcagacaagcatcctaacagaataagccagaactttcctagccatcctagcatgtttgtgccttgtaagatattcccagttacatcctttaatttgccaaagggcagaaaaaga

SEQ ID NO: 226736 - DNA, 592 bp, Homo sapiens
gaagctttctccaggcagtaaatagagcaatcaaaaggctcatgcttyttgtcaatggatcattgtctttcattttttaatggtcaatgtattgagaacttttattttaaatattttgtccacttttttagttgcttcatgtgggagagtaagtccagtctctgttactccctcttggcaggaagtgaaaatccctttatctctcgaatctgcaaccccacaactttccatccgcagtcatcatagatgctcctactgttttgttcacgtgtgatcttcaaaggtcaattctcaatcctcgtcttattttatctactactgtcaattcccacatagttacttatttctctcctcccttgctgacttaggttttctagggtggccttcttaaagtgccacaaatggggagtttacaataaacagaaatttattttctccctgttctggagaattgaagtccaaaatcaacatgttgacaggactatgctcccctctgaaactcataaaggaagaattctttcttgtctcttcctggcttctggtggtttgccagcaatctttgtcattcctctacttgtagcagcagcacttc

SEQ ID NO: 226737 - DNA, 592 bp, Homo sapiens
gaagctttctccaggcagtaaatagagcaatcaaaaggctcatgctttttgtcaatggatcattgtctttcattttttaatggtcaatgtattgagaacttttattttaaatattttgtccacttttttagttgcttcatgtgggagagtaagtccagtctctgttactccctcttggcaggaagtgaaaatccctttatctctcgaatctgcaaccccacaactttccatccgcagtcatcatagatgctcctactgttttgttcacgtgtgatcttcaaaggtcaattctcaatcctcrtcttattttatctactactgtcaattcccacatagttacttatttctctcctcccttgctgacttaggttttctagggtggccttcttaaagtgccacaaatggggagtttacaataaacagaaatttattttctccctgttctggagaattgaagtccaaaatcaacatgttgacaggactatgctcccctctgaaactcataaaggaagaattctttcttgtctcttcctggcttctggtggtttgccagcaatctttgtcattcctctacttgtagcagcagcacttc

SEQ ID NO: 226738 - DNA, 592 bp, Homo sapiens
gaagctttctccaggcagtaaatagagcaatcaaaaggctcatgctttttgtcaatggatcattgtctttcattttttaatggtcaatgtattgagaacttttattttaaatattttgtccacttttttagttgcttcatgtgggagagtaagtccagtctctgttactccctcttggcaggaagtgaaaatccctttatctctcgaatctgcaaccccacaactttccatccgcagtcatcatagatgctcctactgttttgttcacgtgtgatcttcaaaggtcaattctcaatcctcgtcttattttatctactactgtcaattcccacatagttacttatttctctcctcccttgctgacttaggttttctagggtggccttyttaaagtgccacaaatggggagtttacaataaacagaaatttattttctccctgttctggagaattgaagtccaaaatcaacatgttgacaggactatgctcccctctgaaactcataaaggaagaattctttcttgtctcttcctggcttctggtggtttgccagcaatctttgtcattcctctacttgtagcagcagcacttc

SEQ ID NO: 226739 - DNA, 461 bp, Homo sapiens
ggcttctggtggtttgccagcaatctttgtcattcctctacttgtagcagcagcacttcaatctctgcctccaatatcatgtcattctcacctcatgcatccatgtcttcacatgrcattctcttctgtgtgtttctatcccttcttcttataaggtcaccagtcatattggatccctattctaatgatctcctttgaatttgattacatttaaaagatcttatttctaaagaagatcacatgcacaggtactgaagcttcagatttcaacatatattttgggaggacaacattcagcctgtaacactgattattctattataccttcttctgaacttctgaaagttgaagcatcctagctgagtcttcagacttcttcttttgcatactccctcagtaataatcttatcgggtcctaagtctttaaacatcacctcaacattaaagtttccaaacattat

SEQ ID NO: 226740 - DNA, 461 bp, Homo sapiens
ggcttctggtggtttgccagcaatctttgtcattcctctacttgtagcagcagcacttcaatctctgcctccaatatcatgtcattctcacctcatgcatccatgtcttcacatgacattctcttctgtgtgtttctatcccttcttcttataaggwcaccagtcatattggatccctattctaatgatctcctttgaatttgattacatttaaaagatcttatttctaaagaagatcacatgcacaggtactgaagcttcagatttcaacatatattttgggaggacaacattcagcctgtaacactgattattctattataccttcttctgaacttctgaaagttgaagcatcctagctgagtcttcagacttcttcttttgcatactccctcagtaataatcttatcgggtcctaagtctttaaacatcacctcaacattaaagtttccaaacattat

SEQ ID NO: 226741 - DNA, 461 bp, Homo sapiens
ggcttctggtggtttgccagcaatctttgtcattcctctacttgtagcagcagcacttcaatctctgcctccaatatcatgtcattctcacctcatgcatccatgtcttcacatgacattctcttctgtgtgtttctatcccttcttcttataaggtcaccagtcatattggatccctattctaatgayctcctttgaatttgattacatttaaaagatcttatttctaaagaagatcacatgcacaggtactgaagcttcagatttcaacatatattttgggaggacaacattcagcctgtaacactgattattctattataccttcttctgaacttctgaaagttgaagcatcctagctgagtcttcagacttcttcttttgcatactccctcagtaataatcttatcgggtcctaagtctttaaacatcacctcaacattaaagtttccaaacattat

SEQ ID NO: 226742 - DNA, 488 bp, Homo sapiens
gaattctttcttgtctcttcctggcttctggtggtttgccagcaatctttgtcattcctctacttgtagcagcagcacttcaatctctgcctccaatatcatgtcattctcacctcatgcatccatgtcttcacatgacattctcttctgtgtgtttctatcccttcttcttataaggtcaccagtcatattggatccctattctaatgatctcctttgaatttgattrcatttaaaagatcttatttctaaagaagatcacatgcacaggtactgaagcttcagatttcaacatatattttgggaggacaacattcagcctgtaacactgattattctattataccttcttctgaacttctgaaagttgaagcatcctagctgagtcttcagacttcttcttttgcatactccctcagtaataatcttatcgggtcctaagtctttaaacatcacctcaacattaaagtttccaaacattatattat

SEQ ID NO: 226743 - DNA, 461 bp, Homo sapiens
ggcttctggtggtttgccagcaatctttgtcattcctctacttgtagcagcagcacttcaatctctgcctccaatatcatgtcattctcacctcatgcatccatgtcttcacatgacattctcttctgtgtgtttctatcccttcttcttataaggtcaccagtcatattggatccctattctaatgatctcctttgaatttgattacatttaaaagatcttatttctaaagaagatcacatgcacaggtactgaagcttcagatttcaacatatattttgggagracaacattcagcctgtaacactgattattctattataccttcttctgaacttctgaaagttgaagcatcctagctgagtcttcagacttcttcttttgcatactccctcagtaataatcttatcgggtcctaagtctttaaacatcacctcaacattaaagtttccaaacattat

SEQ ID NO: 226744 - DNA, 564 bp, Homo sapiens
aattgggaggaagtacagaggttccacatggctgagcaagagcctacctactggccattatgcttmagcaccatctactgagtcatagcccaaacttcatcaccaaaaacattttgctaatatacccacctgtgaaaccaaggacaaaaattagaattcagctacaaataaagaccctgcacaaaggtcttggccttctgaaaacatccagaaaagaagtcaactgacgatattcaaattataccacagttaaaggaatatcagcctacacaaatgagaaaggacctgacccgtagaagaactctggcaattcaaaaagccagagtttctcctttcctccaattgattgtgctggttccatagcaaaggttcttaaccagactgaaagtactgaaatgacagacatagaattcagatatggatagaaatgaaaagcatcaagattcaggagaaagtcaaaattttattctaatccaaggaatctaaggattgcagcaaaacaatacaggagctgaaagatgaaatggccattataaggaagaaccaaatggatctgatagaact

SEQ ID NO: 226745 - DNA, 388 bp, Homo sapiens
gggtccaaatctcaattcttgacttctgtgtaccagaaggctcaacaacaagtagaagctgccaaagcttggggcttgcaccctctaaagccatggcccaagctatwccttggccccttttagccatggctgcagcagctggaatgcagggcaccaagttgctaggctgcacacagcggggggaccctgggcccgtaaagccatttttttcctcctagacttctggatctgtcatgggaggggctgccacaaaggtctctgacatgccctggagatattttccacattatcttggtgattaatatttctctcctcattacttgtgtaaatttctgcaaccagcttgaatttctccccagaaaatggtttttctttcctatttagttat

SEQ ID NO: 226746 - DNA, 388 bp, Homo sapiens
gggtccaaatctcaattcttgacttctgtgtaccagaaggctcaacaacaagtagaagctgccaaagcttggggcttgcaccctctaaagccatggcccaagctataccttggccccttttagccatggctgcagcagctggaatgcagggcaccaagttgctaggctgcacacagcggggggaccctgggccygtaaagccatttttttcctcctagacttctggatctgtcatgggaggggctgccacaaaggtctctgacatgccctggagatattttccacattatcttggtgattaatatttctctcctcattacttgtgtaaatttctgcaaccagcttgaatttctccccagaaaatggtttttctttcctatttagttat

SEQ ID NO: 226747 - DNA, 388 bp, Homo sapiens
gggtccaaatctcaattcttgacttctgtgtaccagaaggctcaacaacaagtagaagctgccaaagcttggggcttgcaccctctaaagccatggcccaagctataccttggccccttttagccatggctgcagcagctggaatgcagggcaccaagttgctaggctgcacacagcggggggaccctgggcccgtaaagccatttttttcctcctagacttctggatctgtcatgggaggggctgccacaaaggtctctkacatgccctggagatattttccacattatcttggtgattaatatttctctcctcattacttgtgtaaatttctgcaaccagcttgaatttctccccagaaaatggtttttctttcctatttagttat

SEQ ID NO: 226748 - DNA, 500 bp, Homo sapiens
gaatcacacgaacaactgtattttgttggggggatttttgttgggttttttttgcttccaagtttttctcttgttatcttctgtgcctgaattacacttctgcaccttacctggcaaaattttaccaaagaccttgtgcaaatttcagctcttcttaaaacactcctggttctacccggaaaaattaatagctccttccgaactgtgttcctaaagccctcccaccrccttcctatccattgatttcattatggcataatttggggtgcttgcctaaaattgtaattccagtaagagtagacagtgttttatcaatactgaaccctcaacacctagcacaagatcttgtactcgcaaggacttgtacatttgctaatgaagtgaacaaatattgcattaatttcaaatgtttgctgaactgaatttttgaatgctgtgttgaccaaactactagcagggcaatgtgtttcattcttgaaaagttgtacctttgcattcca

SEQ ID NO: 226749 - DNA, 500 bp, Homo sapiens
gaatcacacgaacaactgtattttgttggggggatttttgttgggttttttttgcttccaagtttttctcttgttatcttctgtgcctgaattacacttctgcaccttacctggcaaaattttaccaaagaccttgtgcaaatttcagctcttcttaaaacactcctggttctacccggaaaaattaatagctccttccgaactgtgttcctaaagccctcccaccgccttcctatccattgatttcattatggcataatttggggtgcttgcctaaaattgtaattccagtaagagtagacagtgttttatcaatactgaaccctcaacacctagcacaagatcttgtactcgcaaggacttgtacatttgctaatgaagtgaacaaatattgcattaatttcaaatgtttgytgaactgaatttttgaatgctgtgttgaccaaactactagcagggcaatgtgtttcattcttgaaaagttgtacctttgcattcca

SEQ ID NO: 226750 - DNA, 500 bp, Homo sapiens
gaatcacacgaacaactgtattttgttggggggatttttgttgggttttttttgcttccaagtttttctcttgttatcttctgtgcctgaattacacttctgcaccttacctggcaaaattttaccaaagaccttgtgcaaatttcagctcttcttaaaacactcctggttctacccggaaaaattaatagctccttccgaactgtgttcctaaagccctcccaccgccttcctatccattgatttcattatggcataatttggggtgcttgcctaaaattgtaattccagtaagagtagacagtgttttatcaatactgaaccctcaacacctagcacaagatcttgtactcgcaaggacttgtacatttgctaatgaagtgaacaaatattgcattaatttcaaatgtttgctgaactgaatttttgaatgctgtgttgaccaaactactagcagrgcaatgtgtttcattcttgaaaagttgtacctttgcattcca

SEQ ID NO: 226751 - DNA, 398 bp, Homo sapiens
ctaatgtctggctacaatctccagtgaagaatgagaaytggctgggcgcggtggctcatgcctgtaatcccaacattttggtaggccgaggcaggaggagcacttgaggtcaggagttcaagaccagcctggccaacatggtgaaaccccgtctgtactaaaaaaataaaataaaattagctgggcatggtggcatgcccctgtaatcccagctacttgggaggctgaggtgggaggatggtttgaaccagagaagtcgaggttgcagtgagttatggtggtgccactgcaatccagcctgggcaacagagtgagaccccatctcaaaaaataaacccacacccaaagtgttggtttacagaggctttccaatgcaataggaagcttctggaaacttt

SEQ ID NO: 226752 - DNA, 403 bp, Homo sapiens
tttctctaatgtctggctacaatctccagtgaagaatgagaactggctgggygcggtggctcatgcctgtaatcccaacattttggtaggccgaggcaggaggagcacttgaggtcaggagttcaagaccagcctggccaacatggtgaaaccccgtctgtactaaaaaaataaaataaaattagctgggcatggtggcatgcccctgtaatcccagctacttgggaggctgaggtgggaggatggtttgaaccagagaagtcgaggttgcagtgagttatggtggtgccactgcaatccagcctgggcaacagagtgagaccccatctcaaaaaataaacccacacccaaagtgttggtttacagaggctttccaatgcaataggaagcttctggaaacttt

SEQ ID NO: 226753 - DNA, 394 bp, Homo sapiens
ccagtgaagaatgagaactggctgggcgcggtggctcatgcctgtaatcccaacattttggtaggccgaggcaggaggagcacttgaggtcaggagttcaagaccagcctggccaacatggtgaaaccccgtctgtactaaaaaaataaaataaaattagcygggcatggtggcatgcccctgtaatcccagctacttgggaggctgaggtgggaggatggtttgaaccagagaagtcgaggttgcagtgagttatggtggtgccactgcaatccagcctgggcaacagagtgagaccccatctcaaaaaataaacccacacccaaagtgttggtttacagaggctttccaatgcaataggaagcttctggaaactttagggaaagaggaggat

SEQ ID NO: 226754 - DNA, 403 bp, Homo sapiens
tttctctaatgtctggctacaatctccagtgaagaatgagaactggctgggcgcggtggctcatgcctgtaatcccaacattttggtaggccgaggcaggaggagcacttgaggtcaggagttcaagaccagcctggccaacatggtgaaaccccgtctgtactaaaaaaataaaataaaattagctgggcatggtggcatgcccctgtaatcccagctacttgggaggctgaggtgggaggatggtttgaaccagagaagtcgaggttgcagtgagttatggtggtgccactgcaatccagcctgggcaacagagtgagaccccatctcaaaaaataaayccacacccaaagtgttggtttacagaggctttccaatgcaataggaagcttctggaaacttt

SEQ ID NO: 226755 - DNA, 549 bp, Homo sapiens
actgaccttcatctaagagtttccatgttggttcccatggaggtgatagattatagttgtctaaggacatgaaccctgccctgtttacagtagagacacagtagtgcttgctggactatgctatgtgagtgcacggggcgggtggtatacagtcgtccccacccgacacagtcagtactaattctgaccttccatctgaccaccacaccacgaccagatattgctttcttcttttattcggaagcagacacagggtgggaggcagtgcgacacctcctggtgagaaccaggataacagcagtcagagtcagggacaccaccacagccaggcctacgcccagcagcaccactgaggtgtcagaaggcaaagcccactgctctacttcatggtcaccmctcctgtccaggaagatcagtggccccacggtgacatctgcttcttctgtcactgtgaaaggagaacacacaaccaagggtcatcttagtccctaaccgggaactgggttggaggttttattctgcctcagtgggctaaactaatatgttgtc

SEQ ID NO: 226756 - DNA, 600 bp, Homo sapiens
attctttgctagcctagaagtaaggtgggtccagccagactgaccttcatctaagagtttccatgttggttcccatggaggtgatagattatagttgtctaaggacatgaaccctgccctgtttacagtagagacacagtagtgcttgctggactatgctatgtgagtgcacggggcgggtggtatacagtcgtccccacccgacacagtcagtactaattctgaccttccatctgaccaccacaccacgaccagatattgctttcttcttttattcggaagcagacacagggtgggaggcagtgcgacacctcctggtgagaaccaggataacagcagtcagagtcagggacaccaccacagccaggcctacgcccagcagcaccactgaggtgtcagaaggcaaagcccactgctctacttcatggtcacccctcctgtccaggaagatcagtggccccacggtgacatctgcttcttctgtcactgtgaaaggagaacacacaaccaagggtyatcttagtccctaaccgggaactgggttggaggttttattctgcctcagtgggctaaactaatatgttgtcttttttgtgtggg

SEQ ID NO: 226757 - DNA, 584 bp, Homo sapiens
gcagggtcaggactgcgaaagcggagtaggggtactgcctgctctgggaccaaccaggccccacacaggcctgagtgtgggcttgctaaatggagtcgctgagcctttgaacattctcagcaggtccgttcttgaactggttctccagcagctctcagtgctgtttccacctgaaatgcctgctgggtctgtgccctttgctttggccccagacaccctcagttcacctgcatagtcacaccagscacctccgtgctctctgctcttagtcaggttttccctcctgactctgtgtcttcaggttctcttccctcagcctctcccttccaggatactgactcagggctgggcctgttgtggtttggagacagcttctcctcacctctgcagcctcatctcctgccgctccacccctcagcattcgccctgggctccagcccgatcttgcccttcctgccttcatttctacttcttctattgcatgtgctgggctttctgaagtctccttccttttctttttctttctgccccattctgctcacccttccatgtataaatgtcggcaagtcagtcatttcttcctg

SEQ ID NO: 226758 - DNA, 596 bp, Homo sapiens
cagcaacaacaaactaaagatataaatcaggaatggaagcgaccgggggaatgtcatcacccagatggaaaggccaagacagacagaactggggttcaaagaagggaaggggacaggaagaggattcctggtttcatatgcagaccacagaacagaatcagttttggagaacaggggctctaattgtgcagtttagagaaaacagagctgttgctacgtgaagaggcagaaccagctgacgttaaaaataggtttggatgacacacaggagtgacacaagatccctgccttcaaatagtcagggggccatcgtgtgggaggagggatggatgtgtctcccggcaccaatggacggccctgggtccaacagtagatgccccaagctacaaaaagcttcttggctgcctcagaagggggcgggctgtgataatttggggtcgctcccagcggagacatggcacaaaccatattaaaaaaggaytgccataggacccaccaccgcctgggcctggggattattaagacaaaagagtcctgcactgagggtcccaggatcaggattccagctctggcggcaaaccacctactgtgtgatc

SEQ ID NO: 226759 - DNA, 602 bp, Homo sapiens
aaataaatatgattgacatgtatatatccattgccaaattgaacgtttattaacattttgcgatacttmcatcagagctcttaaaaagaaaatgtgttacagagccagccaaagtctacctcctcacatctccccacctctctcaccagaaatggcttcagaattgctgtgtggctttgcacttttaacagttgttaattatcagcacagtattcatattattgctgtatgtgtttaatattttacctgggtactgtacataacattttgcagcttggttttttcactcaacatatgatgatgttccatgggaactccaaacacggggaggctaggcgacttgctcaaggcagctgttacctctgtcagaaagacagaggctttcagattcaagaagtagaccctgcatgtctgattctgttctgtaaacccccttcatactcagaagcatgcaataaacaagcctggggtaattatcaatgcaaaggttaccctcccagaagaaatttccaaaacactttcattattctctgctcttgacatgaagagaactgaataagccatcatcaactgagataatggatgccaaaacatccagtaaa

SEQ ID NO: 226760 - DNA, 602 bp, Homo sapiens
aaataaatatgattgacatgtatatatccattgccaaattgaacgtttattaacattttgcgatacttccatcagagctcttaaaaagaaaatgtgttacagagccagccaaagtctacctcctcacatctccccacctctctcaccagaaatggcttcagaattgctgtgtggctttgcacttttaacagttgttaattatcagcacagtattcatattattgctgtatgtgtttaatattttacctgggtactgtacataacattttgcagcttggttttttcactcaacatatgatgatgttccatgggaactccaaacacggggaggctaggcgacttgctcaaggcagctgttacctctgtcagaaagacagagrctttcagattcaagaagtagaccctgcatgtctgattctgttctgtaaacccccttcatactcagaagcatgcaataaacaagcctggggtaattatcaatgcaaaggttaccctcccagaagaaatttccaaaacactttcattattctctgctcttgacatgaagagaactgaataagccatcatcaactgagataatggatgccaaaacatccagtaaa

SEQ ID NO: 226761 - DNA, 172 bp, Homo sapiens
ggctagagagagaattagtaacatggaagatcaaaatatccagaaaaaaaaaaaggaggcagagggtacactataaaaaggcctgacatgccatgtaatagaagcaatggaagaagakaatgaggtaggtgtaatatttaaggaaataatcaccaatcagttccaaaaactg

SEQ ID NO: 226762 - DNA, 530 bp, Homo sapiens
tggttttgttgattttctctattgccatttttgttttctattttattgatttctgctctgatctttattatttattttgatcactttctgcttaatttgttattacatttctagtttcttagggtggaaactgaggtaactgatttaagacctttcttttcttataggtgtttggtgctatacattttcctctaagtactgcattagtaaaatccagtaattttttgatatgttgtgtttattttcatttcaaaacatttactaacttctgttttgatttcttctttgacgatgggttatttagaactgtatttttcccaaatatcaaaatatttccyataaatcattttcttctgttgatttctctttttaattactgtgggcgagaagccatccaggtgctgaggcaagagactaagggcacgagctattccagtgtaatgaagaaaatatatagaataagaatagttatactagaaatagattatagatatgatgatatatgaatattattaatcattagtttgtag

SEQ ID NO: 226763 - DNA, 563 bp, Homo sapiens
aataatgtgctcccgcacggggctgccatcattcaatgtggaactcccaacatcccaaggctgtatgggtaggtgcagtcagggctacaaggcagcagggagctaagggagggccagcggctagttgagcaggagcccaaaagggccacttaacaccctccgacaccccatgcacctgcttgactccctttcactggcaactgggtcccaggagcaatgtgggagcattcaccttgggggtgccgctggccgtgtcttcrtttagtcaggggttcttgcccggggatgggtcgagagtcacatatgcccactgtgcacactgcctggtctatgttgacggggtgggggcatttcttgatatcctgctttggagaaaatcacccaaaccccgactctccaacccaactcctcttggtgtgaggtcaaggaaaacatgagaaatgctctcctccctgtgtgaggtttcgtggtcctggcaccataaagggtgagagatggggttatccagcctttctttttaatgacctgcaggaaatacatggggctttactgatttacttcct

SEQ ID NO: 226764 - DNA, 593 bp, Homo sapiens
tgtttgccatgatggctgtactaatttacatatccactaacagtgcacgagagttcccttttatctgcgctcttgccgccatttgttatttttttgtctttttgataataaccgtcctaactgggatgagatgacatctcattgtggttttgatttgtgtctccctgatgattcttgatgttgagcattttttttacatacctgttgtctatttgcatgtcttcttttgagaaatgtctattcagatcrtttgcccatttttaaatctttttttttctgttgagatgttgcagcttcttttatattctggatattaatcacttcttggatgattggtttgcagatattttctcccattctataggttgtctcaccactcttttgattgtttccttcaccatgtaaaaatcttttagtttgatataacactatttgttaatttttgcttttgttgcttgtgatttcaaggtcttattcataaaatcttttttttcagaccaatgttctgaagcatttaccctatgttttcttctagcagttttatagttttgggtcttacatttagatctttgattcattttgagttgattttt

SEQ ID NO: 226765 - DNA, 577 bp, Homo sapiens
gaattccctcaatttttccttctcaagaaaaattgtttctcctccattcttgaaggatagatttgctggatataatattcttggttgacaggtttttaaaaatttatttcagtactttgaatatatcatctcattctcttctgacctgtaaggtttctgctgagaaatctgctgttaatcaaactgggattcccttatatctgaattgatgcttttctcctgctactttaaaaattctttatgtttgacttttgacagtttgactataatgtgccttggagaggacctgtttgggttgaatctatttggggttcttggagcttcctgggcttggacattcatccctctcccaagatttgggatttttctgctgttatttcattaaatgtgttttccatttcccttcttttctcctcctggaatgcccagaatatttgtttgcttaatggtgtcccataaatcctgcaggctttctttattcctttaaattattttttgtctgcctgtattatttcaaaagacctatcttcaagtacagaagttctttcttctcytttgtttaatctgttgttgaagt

SEQ ID NO: 226766 - DNA, 558 bp, Homo sapiens
tgtgcctctttcttggttgtaggaggggccaaatgcagcaacttatccttcaccttaggaggaatatctctacaggmcccataccactggacccttagaaattttactgaggtagaaggtccctgaattttaggcagatacacttcccatcctctggcatgcaaatgtttcaccaataagtccagtgtttgctacttcttgctcactggatccaatctgcataatgtcatcaatgtaatggaccagtgtgatatcttttggaggcaaaaagcgatcaagttctctctgaataagattatgacacaaagccagataattcatatacccctgaggtaggacagtaaaggtatattgctggccttgacagctgaaggcaaattgtttctggtgggccttatggacaggaatggagaaaaaggcatttgccaagtcaatggttgcacacaaagtaccaggagatgtgttaatttgctcaaataatgaaaccacatctggtacagcagctgcaattggaatcatcacttggttaagcttatggtaatccactgtcattctcca

SEQ ID NO: 226767 - DNA, 558 bp, Homo sapiens
tgtgcctctttcttggttgtaggaggggccaaatgcagcaacttatccttcaccttaggaggaatatctctacaggccccataccactggacccttagaaattttactgaggtagaaggtccctgaattttaggcagatacacttcccatcctctggcatgcaaatgtttcaccaataagtccagtgtttgctacttcttgctcactggatccaatcygcataatgtcatcaatgtaatggaccagtgtgatatcttttggaggcaaaaagcgatcaagttctctctgaataagattatgacacaaagccagataattcatatacccctgaggtaggacagtaaaggtatattgctggccttgacagctgaaggcaaattgtttctggtgggccttatggacaggaatggagaaaaaggcatttgccaagtcaatggttgcacacaaagtaccaggagatgtgttaatttgctcaaataatgaaaccacatctggtacagcagctgcaattggaatcatcacttggttaagcttatggtaatccactgtcattctcca

SEQ ID NO: 226768 - DNA, 414 bp, Homo sapiens
  misc_feature (1)...(414): n = A,T,C or G
nnnnnttcaaagattcaggagcggccccaccattgaattttgcaaggcgttggtcaagggggaatcttctggcccctcccaggtgggatgaagtaggtctaaagtgamtaatccactccaccatcccaatctccctaagcctttggatcccttcctctacattaaaccaagggagatcaggcatttccacctcgctcacaatgagccatcttttaatccatatttcagcaaaccaatcaaacaaactattagaaccttttttaattccccaagctgcaacattaaaagcagagttcctacttagtgggcccaaatcaataaattcagcctgatccaactctatattccttccccattatcctatgcccttaatatccattcccatgcctgttctccagattgctgtttatataa

SEQ ID NO: 226769 - DNA, 594 bp, Homo sapiens
tggagtcagcagtgggcataggtttgctgtctgttctataggaattaattttgagctggatgagttatccttctgacctgtccctctgcctatttctcatgtcagaaagaagcatcagagccagcagcaaccagcagcctgggctctagtccagtgtttcctgtaaaagagcctccaagagggagatacggtcgagaaaggggatgtggtctcttcatagacatgtaccctgataacctagaaaggcagacatcagagtaccacagtactgaagggaaaatcatcagcacaaagaaaacctaagatttctgtattttccttttaacttaagcttttctgcaactcccacaggaaaacgcaggcaacaggccaagatttatattaccactgatcctgtttgattttaagagaagaaattctactcagatgtmagtgtgatctatctgtgacatctgtcacctattagttacaagagctaatttagtttccttctcctgtgtcatgcttctactggagctgccttcttggtcaaagataaacttttcaaatatgaagacagctttcttttctatcaaggatgcataatattcatat

SEQ ID NO: 226770 - DNA, 643 bp, Homo sapiens
acacaacctaaatccctcacatacagttcacaatacagtttgcattcctatgaaaatataatgcccgtcactgatctgacaggaggtggagctcaggtggtaatgagagtgatagaaacaggctgtaaatacagatgaagcttctctcatgcacccacagctcacctcctgctgtgcaggccagttcctaacaggccatggactggtagcggtttgtgatctggggttagtgatcgctgctttagaggtttaggtgcttcttcatctaaccatcctgaaggaagaatgaatggaaaaggcacattgacaccttaatcaccttcaaccagaagacacatacatcacttctgctcccattccattgatgatcattcgtctcatggcctatttagatacaaccaaatctgagaaatgtagttactggctgggcagttattttgcatgacaggagcacatgattttttttttttttttttttttttttttttgagacggagtctcactctgtcgcccaggctggagtgctgtgacgsgatttcggctcactgcaagctccacctcctgggttcacgccattctgcctcagcctcccaggtagctgggactacaggggcctgctaccacgcccggctaatgttttttg

SEQ ID NO: 226771 - DNA, 587 bp, Homo sapiens
tatcaattgtaatgtctcctttttcatctctgattttattcatttgggtctcctgtcttttcctcttagtctggttagaggtttttcaattttgtttatcttttcaaaaaaataacattttgttttgttgatgttttttgtttgtttaaattttatttatttttgctctgatttttatttctgttcttctactaattttgggtttggtttgctcttgccttttgagttctttaacacgtattattaagttgtttacttgaaaattttctactttttttgatgtaggtgcttatttctataaacattcatcttcatactgctttgctgtatcccacagcttttgatatgttgtgtttccatttccatttatttcaagaaatatttacatttctttcttaatttcttcactgaccactggtcattcaggaacatattgttaaatttccacrtgtttttacattttccataattcctcctgttattgatttctagtttcattccactgtggtcagagaagatgcttgatattacttcaatattttttaatgttttaagacttggtttgtgacctaacatatgatatatcc

SEQ ID NO: 226772 - DNA, 585 bp, Homo sapiens
cagtcaagtagacatctaaaaattaaccatcacagatggaatgtttcatttatcaactcatctgaaaagctcattgaaaatatttttaatgttgtaaagtataaatggaaatatttatagaaagccttcatcagtgtttctccaaattaaatggcagtagagaatagataaggaatactactttcatcacttctggacagtaccaaataacatgacattcttaaaataagttcatctagaagtcattcaatagcttcttgtaacaaaattttggttgaacaaaagttttttatatgagctaaatattagataatgttaaaaattactgtttgatagatatggatatgatattgtgactatgcagaaaaataycatttttgaggctacatgtagaaaaatttaggaatgtcatgacatcattttattaatttactttaaaatagttcagcaataatgtatatgccaatacaaattgaaataaaaataattcagctgagaaatgaagcatctatttttaaaagttaatatttgttgtgatggctaattttatgggtcaatttgactgggctaagggacgcccagata

SEQ ID NO: 226773 - DNA, 564 bp, Homo sapiens
caaaaaggcaaggcaactcaaaacaaaagtgggacaactcaaagcatggaggggtcttccaggtcacaaccattccagagacaaatggttgcattcttctgagtttctgattagcctttccaaatgaggcaatcagatttgtattcatctcagtaggcaaagrgatgactttgaatagaatgggaggcaagtttgccctaagcaccttgaattttccttttattttagggattttaggggccaaagatattttcctttcacatttccccctttttccttttaaaaatctttcagagaaagcattttagaagaaaataagtctctggtcccaggttttgtctgatctctcatggctaggagtaggtcctcagttattaggaaatctcacttttagaaggctgttaagtctcatgtcctacaaaaagaaaatagggggaggaagggagaaaaacaacaacaaacaaaagaacaatcgtggaaaatagatatagtccacattaccctgaattccatatattagtaggcaagtataaaagtggcttatgtatgtaaataggttgctgt

SEQ ID NO: 226774 - DNA, 252 bp, Homo sapiens
tacctactgttagctggcttacttaccasacctttcctgctcattcctacagctctggtcaggatggtcttctgttgtgttcagtgatcattcctacctcctaacattttctgaagcctctgcatctcacctttgctaaaatatagtatctctctccttcaagataactcttcacattgttcaacaaatacatattaatttattcgacatacactaactgagagtctatcatctgccagggactgttcaaca

SEQ ID NO: 226775 - DNA, 388 bp, Homo sapiens
ataggtggctgtcccatagacacatgccactcaacaatctaaacttgagctctccatctttgcttccaagtttgcttttcctcgtgtattttttatctctattctaggtaccaccattctttttatccaaggcagacactctggtgatatcttgatcactttgatcaactttattctcccttcccacttagaattaatcatacactttcactaattttattatatacgtgtaggtgtgtatttaaacacatcagctctatctctggtgctttacttctaccatcactgatttatcaaggctcaccrccttgtgagtcactgtcacagccttctaactgttacactttgcagaggctttgacatcctccaatccacttaccacagtgta

SEQ ID NO: 226776 - DNA, 446 bp, Homo sapiens
aatgttagcccacaaaggccgttgttttcaaactaactccagatccctgccaagtatctcagtktgactgtgtcctctctctttctccattcaaatactatggtaccttgtttccaaatatccatccccttccacataagaagtatataacactaacccccctgaacatgagttgcagagcttctgtgttagtggctaaaattttctcagactagtagaagacttggtcatgttaaaagagcaactttggccaaattaaatttaagagtttaattgtgcaaagaatgattcaccaattggcagcctcccaagccagagtaggctcagaggctccagggcaaccacatggtggaacaagatttatggacagaaagatgaaagtgatatatagaaaatagaagtgaggtacagaaaacagaagtgaggtacagaaatagccagattgg

SEQ ID NO: 226777 - DNA, 470 bp, Homo sapiens
tttaaaaaattcttgtgagacaactatatgtttctaagtaatccccttcacctctgtaaacaactgtgatgaacttctcttttttcctgagacagggtctcactctgtccctcaggctagagtacagtgatgcaatcatgactcactgcatcctcgacctcctgggctcaagcgatcctcccacctcagccttccgagtagctgggactacaggtacacaaaaccacacacagctaaagctaatttttgtattttgtgtggagacaaggtttcaccatgttscccaggcttgtctccaactcctgggctcaagcgacttgcctgcctcagccttccagtgtgctggaattacaggcgtgagccacctggcctgtgatggactaattttcaatgattcagaagttataacaaacgctgctttacttcaaatggtattgttataatagtttttaatacaattgtaaggcaca

SEQ ID NO: 226778 - DNA, 574 bp, Homo sapiens
acctctttaaaacataaatctcacagaacctaagaaacaaaaatacaataaaaaagtatacgggcaaaaaatagcacaataaatggaatggtacctcccatctcaatactaaaatcggatgtaartggccaaaatgctccacttaaaagatatagaatggcagaatgggtaagaattcaccaacgaactatttgctgccttcaagagacacacctaacacataaggacacaaataaggtaaatggatggaaaaagacattcatgcaaataaacccccaaaacgagcagagggagctattcttacattagacaaaaaaaactttaaagcaacagcagttaaaaaagacaaagagggtcattataaaatgataaaaggccttgtccaacaggaaaatattacaatcctaaatatatatgcacctaacactggagctcccaaatttctaaaacaattactaatagacctaagaaataagatagacatttaacacaaaaataatggaggacttaatactccactgacagcactagacaggttatcaagacagaaaggcaacaaagaaacaatggatga

SEQ ID NO: 226779 - DNA, 561 bp, Homo sapiens
aaagaactaaaagtagtactgccatttgatccagcaatcccactactaggtatctgtccagaggaaaagaagtcattatatggaagaagacacttgcacatgcatgtttacagcagcacaatttgcaattgcaaaaacatggaaccaacccaaatgcccatcaatcaacgcgagtggataaagaaactgtgagatatgtgtgtgtgtgtgtgtgtgtgtgtatatatatatatatatataatggaatactacccatccctaaaaagaaatgaattaatggcattcacagcaacctgaatgagattggagactattattctaagtgacataactcagcaatggaaaaccaaatatcatgtgttctcattcaaatgtgggagctaagttatgaggatgcaaaggcataataaagccatggtggactttgggggctcagggggraaagggtgggaaggggacgatgaataaaagaccacaaattaggtgcagtgtatacttctcaggtgatgggtatgccaaaatctcacaaatcacccccaaagaacttactcatgtaaccca

SEQ ID NO: 226780 - DNA, 342 bp, Homo sapiens
agcagtccctgagctttttggcaccagggactggtttcgtggaagacaatttttccatggaccaggggcaagggatggtttcgggatgattcaagcacattacatttattgtgcactttatttctattattattacattgtaatatataatgaaataattatacaactcaccataatgtagaatcagtgggagtgtagaatcagtgggagcccttygcttgttttcctgcaactaaatggtcccatctgggggtgatgggacacagtgacagatcatcaggcattagattctcgtaagaagcacacaacctaaatccctcacatacagttcacaatacagtt

SEQ ID NO: 226781 - DNA, 550 bp, Homo sapiens
aactggctcctttcagataataagcacaagctattttgtgcagcacggccaggcagagctttccacaatggcagaaatgtcctccattggtggtgtccagaattggcagccactgctgcctggggcttttaagaaagggaaacgcacatgtatacatacgtaacaaacctgcacattgtgcacatgtaccctaaaacttaaagtataataataataataaaataatataaaaataaaaaaataagaaagggaaacgtggctggtgcatttgaggaactggatctttaattttactccattttaatacatttaaatatagtggccacatgtgcctcgtggctgtcacaayggaccacgcagattgggtcggtagaggaacttcgggtttgtatgtctaggctaggagcatgtctaggagcatgtctggcctagaggcctctctgtccgtgtgatcccagcaggggatggaggctaagtcgacactgacctgcagcagctttgctcctgactgtggctgtgacaatgctgggggctcagtttccctatctat

SEQ ID NO: 226782 - DNA, 447 bp, Homo sapiens
tatactaccttctttctgctgacctttaggctgggaccactgactagacaaggacgccaaccaggaaatgccaaccacacaagagccagcacctgctggcatggctggagtgcaatgagtacctggaccttggccagcctccctgagacccagcccctgaggccagcgactcataaactaggttctgtttccttgcctctggccttcggtaataattccccctccctccccatttttcaaaggtttccagtatctttgcatgtgaatcacacacacgaaacctcaatatgaccagctgatatggtttggctgtgtccctacmcaagtctcatcttgaatgatagctcccataatttccatgtgttgtggaagggccccagtggaaggtaattgaatcttgagggtgagtctttctcatgctgttctagtgatagtgaataagtctca

SEQ ID NO: 226783 - DNA, 609 bp, Homo sapiens
aatgtaagaacatttccttttgcctgaagagcttcctatattttttggtagagttttctatgttttatagagtcaattaattatcacagtttttgtttgacaaagtctgtattttgcctttatttttcaaatatattttcattggatgtagaattctaggttgacgtttttttctttcagcaatttaattatataacttcattgtcctttgtcttgtgaaatttctggtgagaactctgttatcattccttattcctttgcacatagtatgtgtttttctctggctccttttaagtttttctttttaaccccatttccagcaatttgattatgatatacctgttttattttaattacttcttagtttatttatttatatttatcaagtatagcatatgttcagctccttgaatctttgggtttatagttttctcytaatttggagaatttttagctgtgatttcttcatatttatttttggtctcctttctctattcttccctcactgaactccaattacacaaaaattagacccctttgtaatgatcccacaggttactgagcctctgttcatattttttctctgtacttcattttgcatagttttta

SEQ ID NO: 226784 - DNA, 556 bp, Homo sapiens
aagactgggctggacttctaagcccagatgagggaatggagccaggagtcatcctctcccctctgctcctaacacaggttataagtaaactgttttacaaaagaagaaataaccatattcaaaagcaagggcaaactgcaggcccaggagtgagaaggcccatggaggtgagcagaggctgaaacagtgggttcaagggactggggaccagagtgagtgaccagcaagactttccaagcctccagtgcttattggaggagctgctgttaaccatgcaacctgtggggccaggccgaggcaactgcagagtcaggtgagaggagcaatgtccatgtgagacattgcaaacaaaaattgcaaatcacaagacacttacagccccgagaatcaaytggtagacagtacacgtgggaaaaggcacacccaaggaaatggaaataatagcacaatctgaaaacaactttaaggagggagggttcagaatctcaaggaagactgaggaggaaactgaatccctgaaatgggaattggggggttattcatccagaacaggcct

SEQ ID NO: 226785 - DNA, 581 bp, Homo sapiens
ctggacttctaagcccagatgagggaatggagccaggagtcatcctctcccctctgctcctaacacaggttataagtaaactgttttacaaaagaagaaataaccatattcaaaagcaagggcaaactgcaggcccaggagtgagaaggcccatggaggtgagcagaggctgaaacagtgggttcaagggactggggaccagagtgagtgaccagcaagactttccaagcctccagtgcttattggaggagctgctgttaaccatgcaacctgtggggccaggccgaggcaactgcagagtcaggtgagaggagcaatgtccatgtgagacattgcaaacaaaaattgcaaatcacaagacacttacagccccgagaatcaattggtagacagtacacrtgggaaaaggcacacccaaggaaatggaaataatagcacaatctgaaaacaactttaaggagggagggttcagaatctcaaggaagactgaggaggaaactgaatccctgaaatgggaattggggggttattcatccagaacaggcctgattcctgggaagaggactctaagatgaagatct

SEQ ID NO: 226786 - DNA, 581 bp, Homo sapiens
ctggacttctaagcccagatgagggaatggagccaggagtcatcctctcccctctgctcctaacacaggttataagtaaactgttttacaaaagaagaaataaccatattcaaaagcaagggcaaactgcaggcccaggagtgagaaggcccatggaggtgagcagaggctgaaacagtgggttcaagggactggggaccagagtgagtgaccagcaagactttccaagcctccagtgcttattggaggagctgctgttaaccatgcaacctgtggggccaggccgaggcaactgcagagtcaggtgagaggagcaatgtccatgtgagacattgcaaacaaaaattgcaaatcacaagacacttacagccccgagaatcaattggtagacagtacacgtgggaaaaggcacacccaaggaaatggaaataatagcacaatctgaaaacaactttaaggagggagggttcagaatctcaaggaagactgaggaggaaactgaatccctgaaatgggaatkggggggttattcatccagaacaggcctgattcctgggaagaggactctaagatgaagatct

SEQ ID NO: 226787 - DNA, 570 bp, Homo sapiens
ggatgttctggctgacagcgcccacttgagggcccagctgacagccagcatcagcctctagataggtgactgaatgagcttgaagagacccagaagaaaaccacccagctgagccctgtcaacctccagcgtgagagttaatcatagaaccctgttgttgtgttaagtcctcaaattttgggagtgattcattgtgcaacaacasttaacttgaaccattgttttctctccagcttcagtgagtgaaagctttattgtatggtgttttttaagcttagtgagactaagacacagaagacatgaaatatggttggttacatgtggtttgtgctcttcatattcccattgatttatgggtaaagtgtgtcatggagccagtgttagtgcaagtttacaaatggcagatttgtaaaaagtaatgcttattaatcaaacctaatggtctctgatgtttttatgtgagtttcagaattcagttttgctaattgtcttcttattaatttgtgattctcctatgcaagttagtcaaatgatctcactgtggttgaaatgacaatctcagcgcataga

SEQ ID NO: 226788 - DNA, 523 bp, Homo sapiens
atcttcatccataaaggcaaatattttttatggatggaggcttgtaatgatgaggtatttctggaaagcaatgtagtatactagattataaacttcccaaacattaaaataaagcactttgggagggacattaactcttttaggccacttatacaattcccaaagcacccatcataaatccaggaaattgcattgtcattgttatactcaggaataattwcgctccaatacatttccacatcatacataattctattttagggagtaaagatgtttagcttatgtcaggagagtctactgattggttctgtctcgcaccagtattattttaaatcaaggactgctgcagcaaaatcagataatttctcagaagacttacacggaaacatattctacagttgtttatgtttgagatgagagctttcaattcaaatcattgttccaaaatagatgaatgtcaagtgtgatattggttaatgtacatcaggaacttggggaaactgaactgaagttgaaaatcaag

SEQ ID NO: 226789 - DNA, 447 bp, Homo sapiens
aaggcctcagttttctttctaactttttcttctactttatcctttgcttactttgttctagattctctggcatccttagagttctaacttgttaggcacagtcttcctgttggatttttgcattagttatttcttctgtgtggactttatacctccagacatctgtgtagaaacctccttatttccttgaagacattgctcagatactatcttcttcctgattgttcactctacattaaattgcaccctcggcactctcaatctttttatttctctgctctttttccccccaaagctttattaccttctaacatacattaattatttactttttaakgtatatacttatttatcttctattcacaatggtatgcaatgttctcaatacagcaacctatgactgttttgttcactaatgtatataaaatatttataagaaagcctgat

SEQ ID NO: 226790 - DNA, 542 bp, Homo sapiens
tgaaaccagtaagagataacataaaagaagtggagaataagactatcaaattttagartaattaaccctaaaattttttaaagttcataaaatatataaaagaaaaaggaaatacataatagtatattattaaaagagaactgaccctgtaattcaagaatataatttgtttcaggaaaaaaattgagaatcgtgaacaagaaaatatatcctacttaggttattgaaatgcaaatactaacataagatgcaaatagtgaggaaaaaatggtcatttactgagagaaccaagtcaagctagcatgagttctccaccaacattcagtcccagaaaacaattgtaaaatgttaccatgcccacaaaatttggaggcaaagaagtatgacccaggcaaagaattgtgacccaaagaagtgtgccttccaaatttggaggcaaagaagtgtgacttcgttatttacataataagttatatatttataactttaatatatacattcattcaaaatgccaaatgacttatgggaactcatcaataact

SEQ ID NO: 226791 - DNA, 542 bp, Homo sapiens
tgaaaccagtaagagataacataaaagaagtggagaataagactatcaaattttagaataattaaccctaaaattttttaaagttcataaaatatataaaagaaaaaggaaatacataatagtatattattaaaagagaactgaccctgtaattcaagaatataatttgtttcaggaaaaaaattgagaatcgtgaacaagaaaatatatcctacttaggttattgaaatgcaaatactaacataagatgcaaatagtgaggaaaaaatggtcatttactgagagaaccaagtcaagctagcatgagttctccaccracattcagtcccagaaaacaattgtaaaatgttaccatgcccacaaaatttggaggcaaagaagtatgacccaggcaaagaattgtgacccaaagaagtgtgccttccaaatttggaggcaaagaagtgtgacttcgttatttacataataagttatatatttataactttaatatatacattcattcaaaatgccaaatgacttatgggaactcatcaataact

SEQ ID NO: 226792 - DNA, 542 bp, Homo sapiens
tgaaaccagtaagagataacataaaagaagtggagaataagactatcaaattttagaataattaaccctaaaattttttaaagttcataaaatatataaaagaaaaaggaaatacataatagtatattattaaaagagaactgaccctgtaattcaagaatataatttgtttcaggaaaaaaattgagaatcgtgaacaagaaaatatatcctacttaggttattgaaatgcaaatactaacataagatgcaaatagtgaggaaaaaatggtcatttactgagagaaccaagtcaagctagcatgagttctccaccaacattcagtcccagaaaacaattgtaaaatgttaccatgcccacaaaatttggaggcaaagaagtatgacccaggcaaagaattgtgacccaaagaagtgtgccttccaaatttggaggcaaagaagtgtgacttcrttatttacataataagttatatatttataactttaatatatacattcattcaaaatgccaaatgacttatgggaactcatcaataact

SEQ ID NO: 226793 - DNA, 633 bp, Homo sapiens
ctatataagcacaatgctcatagcagcactggtttgtaattgcaaaacaatgggagtaaactaaatgtccacagataagacagcaatttaataaaatatggttagtttatacattgaagtactaagcagttgtaaaaaaaatgagagaactctttgaactaatattaaggatcatattaaaagttgtattttagtattaacttatactaaggatggctactgactggaagcaatccttaggttctagagactactggatatcactgtgtattcgctgagaaaagttgagagcctgagtcatacatgcaaataaagtgtaagtgaagtcttccaacaactggaatgagcttgcaagtggattattctgcaatcaagcccacagatgagatgtggcctgcaccttgactaaagctttatgcaaccttgagcagaggagccagataagcagagaaaagtmtcccgatctctcacaactgtgagatataatgggtgttgttttaagtctctatacttggggtaatttgtttcatagccataaaaaaccaatacagtgatataacgaaaaagttgcaactttacacaggatgtcacctgaaacaagtgatcaacgcttataccaccagttatgagatg

SEQ ID NO: 226794 - DNA, 532 bp, Homo sapiens
tttttgcttaacaatttttggatgttctcttatctgatccagcattacttgattccaaaacagacttcatataactgccaagtaaaatgtctgaaactcaaatccacttacgtttactcaactgcccataagattaagctaaaaatatatagcctggtatatgggggattcatgattagtcctagtcctctctgtacagactcatttcctgcctttcttgcattctggctgtattttccagaatttgctacatagatttttttwttgagtgcctgctaagggtctgccctaacaagcgcctcatttctctcccagccccatggaccatagcttgctgctttgtctcttgaaaagccttctctccttctctgttcaataggggcttacattttgccttatatgtgaagcccttccctactcttttcctaatccatcatcttctgtccttcccatgtaacactgtgcatattttaattggttttcatgctatatcactttctttgactagctgactttctcattagactgtaat

SEQ ID NO: 226795 - DNA, 402 bp, Homo sapiens
gaattcagttccatatcatgatagaactgacgttcagatttccacacttgttgctggccacagaatgccctctaaccctgtaagccacctctattctttctatggccatctccatctccaaatcagccatggtgcctcaagtcctccttgtgttaggatcactaaatttctcttctgtcttccccttctgtcttccatttctgccttcctcttcacattcctcttgctacaagtcagaattttccacttgtaaggggtttgtagtattacattaggctcatatgccttaaggtcaattgtggcatataatataacacaatcacaggagtgatatctcatgacattcacaggtyccagggattcgagatgtggaattttggggctattcctagaaattttccc

SEQ ID NO: 226796 - DNA, 530 bp, Homo sapiens
ctctggaacatctcaattttaagaaaagctacatattgaaattgaagatttgtaaattgaaaatgttgaaacaatcaatgcttatatgccccttacaacacgttagtgtttccctaagggctaacatyccaatgtttgaagacaactgctgaagatatatctttattcagtaaaggagctatacgtaagttatgctcaacaatatgaatacacatgtgtacatagccccatgttggtattagtagtgttcaaattcatagaccctaaaagatgacatgtcctctttctgatttttgtataattagttaaatattttaatattttatcaatatttatttacatataaataaatgtaaaagataatcttgtctattttctcctgttctttctcagcttgacatgcactgatcttaactaagatttgtctgtaacactaagtctgatagtctgcaaactacattgcccattctcaccttacagctagttaccagactttgccagtaggaaaaaacacagtagaccagaaaata

SEQ ID NO: 226797 - DNA, 584 bp, Homo sapiens
ttaatgactgccctgctgagtttaggaattgcatggggcctttagccccctgtttttgtggccaatttttcccttttggaatgggatcatttgcccaatgcctgtaccatcattgactcttcgaagtgagtaactcgttttttattttacaggctcctaggcagaagggacttgccttgtctcagatgagacttgggacttgaactttgagttaatgttggaatgagttaagactttgggagattgttgggaagacacgattgtgttttgaaatgtgagagrgacatgagatttgggaggggccagagatgaaatgctatggtttggctctgcagccccacccaaagctcgtgtcaaattgtaatccccagtgttggagtaggggcctggtgggaggtgattgattcatgggggtggacttctcccttctgttctcatgatagggagtggtgagtgaattctcacgagatctggttgtttaaaagtgtgtaccactttcccctatcctctcttcctccttctctggccatttaagatgtaccggcttcccctctgccttctgccatgattgtaagttttccgag

SEQ ID NO: 226798 - DNA, 376 bp, Homo sapiens
gccaacactttccctacaacaacagttccctgcccagagactcctaaaggcagtggcctgttgcaatcccttgttaaggccttaaccagagccagcattaaacttttcagrgaactgtgagaatgagttgttaaacatagccgttattaaaaataaaattcctggctgggtgcactttgggaggccaaggtgggtggatcacttgagctcaggagtttgagaccagcctgggcaacatggtgaaaacccatctttacaaaaaatacaaaaattagccaggcatggtggctcatgcctatggtcccagctacttggaaggctaaggtaagaggattgcttgagcccagaaggcagaggttgcagtaagctgagatct

SEQ ID NO: 226799 - DNA, 604 bp, Homo sapiens
aagcttcctgactcctagcccaatacttttccaaacacaccacctatttttctatatctgatagaaagtatatgcataagttgtatrtaatgtcaactcactttcaatacaggccaatcatgattggctatcggtagcttttgtgaaaatcttaggaaactaatgactagaaagttgaacctttcagagttcccattctcatgtcatatgctatttctattttgaaataaaaatccctccaaatgaaactttatccatcaaaatgacagagaaatgaagaatagatacaagaagaaagcaaaatgttaatttcaataccgatttatctattttactttaaaattatcttaaccaccaagtcattctatttttaggaagatacattctttttgaagtgttaggaactatgataactgtttattcttaactttaactcctaaatgaccagtatgtgtattagtagataactggacacagagcaaggtcagtcaaggtgactgagtgtggcagaaacggcagtatctccagcaactgcagatggataaatgataatgagtccagataatggtttctgatacaaccattaaaataatgcttatgagta

SEQ ID NO: 226800 - DNA, 585 bp, Homo sapiens
aaacattttaaaaggtagaatcatagtatatggtcttttgtcacttactatgttttgggcatatttctatggcagtcaatacatccttgcatcatcatttttaatggctggatgtatcttaagttaatcattgccaccccagaggtaaatttttttatgtatacattttaatggactcgmgcaatcatttttggactgaattcatagaagtagaatttctggaggaaaataacataaaacagttttagggtttttaatagaaattttcaaattatcctgcaggaaaattggttcagtttatactcccaccaacaaggacagagctccagtttcccccttccatttgtcctctatgctggtctctaagcagaaaatctcattgttttcattacatttctttggtttctagtgcttttgaaccttttttatatgcttatttgccatttttattcttgtggaaagtgtctgtttctccattgcctattttctggccaaactccaaagtcacatttcacttaatttttatcctgctgattgaaagcattttaacttagtgattttaatgtaaacaggagcaggacagac

SEQ ID NO: 226801 - DNA, 570 bp, Homo sapiens
gtcatccctgccccttcagtaagcagcccagcccctgccctcagcagtcacccctgggtgattttgggtgggtgactcctggggctccctggtccatattcagccctcacctgctgctctttgagcctctcttttcacatctgtaaaatagaagtggtgttgcttgccttccatttgtgaagtttaaatgagatttgtaattgctgttgtttttatgttaatccctagtacatggcctgctgtaaacacccaggacagccaggaaatgtttgttgttgtttgattttcctcatccccagtctcaacgggaagccaggccratgagaacagccacttgtcatcaggctctccctttagaagtcactgaaagggccccaggatgtggtgaggagggccccaggcactagaattaagagaagaactaacttgccaccagattgctcggtgaccacagaaaaatcacttcttcccctgggcctcagttttctcctctgtaagatgatactggataagatcagtgtctttaaaacttgttttttagctggagccccctttgttccaatgaaccct

SEQ ID NO: 226802 - DNA, 422 bp, Homo sapiens
caaaatcctcatttggatgtctttaccattttaaagaaggacagttaagtacaccttatactcacctagaagcatgtgattttataattggaaggaacttgagaaatatccaattcagtttttcattcagtgtgaggattcattaccagtttatagcaataaggaacattgttgcataaatcagtcaattccatttttggtcagcctctaatggttgaaaaatatttatagtgagctaaaatctgttaatttcccatttccaggttggtcttagttttgacataggtttcatgttagtagtggaaagagctgtagtagaaagacaataagagtacrtggtgtattattcgggattctttctgatacaggtaacagaaactaactcaaaatagcttaagtagaaaagggagactataccaatc

SEQ ID NO: 226803 - DNA, 538 bp, Homo sapiens
aaagcttctgcacagcaaaagatacaatcaataaaataaagagacaacctataacgtgataaaatatttgcaaactacccatctgacaagggattaaaaaccagtatataggcgcagtggctcatgcctctaatcccagcattttgggaggccaagatgggtggatcactttaggtcaggggttcgagaccagcctggccaacatacaaaacctcgtctctactaaaaatacaaaaattaactgggcttggtggtactgtaatcccagctactcgggaggctgaggcaggagaatcacttgaacccgggaggcagaggttgcagtgagctgagatcatgccactgcactccagcctgggcagcagagtgaaggctctgtctaaaaaaagaaaaaagaaaaamcccagaatatataaggaactcaaacaactctataggaaaaaatataataatctgatttttaaatgggcaaaatgtctgaagacatttctcaaaagaagacatacaaatggcaaagagatatatgaaaaggtgctca

SEQ ID NO: 226804 - DNA, 576 bp, Homo sapiens
gttgtctaatgaccaaatgtgggtatgctgcaacccacaaattttgatgagtcatattttcattttcatttagttcaaaayattttttaacatttctcttgagaattctttggcctatgtgttatttgggaccatgttgtctaatgaccaaatatttggtggctttccaactgtctttctgttactaatttccagtttaattccattgtgatgtgagtatactttgtaagatttttactctttcaaatttgttagaagtgtgttttatgccccagaccatggtctatcttggcgaatatttcatctgagtttgagaagagtgtatatttgtactcgttggatgaagtagtctatacatatcaacaggtccagctgattgacgatgcccttcagctcagctatgtcctgagtccatcaattattagtagataggtgttgagatatccaactataacagtggatctgtctggtttttcttgcaattctcccctttgatggattccatattttgaggctctgttgttaggtccctacatattaaagactgctatgtctttctggagaattgacccctag

SEQ ID NO: 226805 - DNA, 573 bp, Homo sapiens
tgattcacctccaggttgcaattctagttgttgagttgaaataaaatatgttaccackgggctttagttgccttagaaaaatctgttttcctcatgcagtctcaaaaataagaaagatcagtctgtgtgctctcacagccatgcctgtgatgaaacttcaggggaagcagtgataagatacggtgttcacatctttggattttgtacctgctctttgtctgtcactgttatattaataaaatattttaaagcagtgcaaaatttatattttgaagagtttatctgtacaggtggaatttggcagggcatattttatcacccagttctggccatttggaaggatgattctattacttaaaaggatatgcttgcagggtaactaaaaaactccttctttagaagcatttttgcaaacatgtaaaactaataattctgtctgcaagtcatatggttaaactgttatgtaatcattaataaaggtgtttatatttatatgttgattatacacaacaaagtatatttataaaatattctttttaaatataaaaatataattatagcagtttaccagaa

SEQ ID NO: 226806 - DNA, 356 bp, Homo sapiens
ttagtagtcacaatttagtagttagaatttatagaagtcaacagatttccaaaatgaattctgaactatttcttggaaacagacaaagacacagttgtgttaacatcagagaaatcaaagtagagaacatccctagaaaacagacatctgtcattgtccttagagcagttttttttagagaaaaatttgatataaaaaaggaattgtcatccctctgggcatggacattgtctrttaactaacggaattgtttggcttataacagccagcgaatgtgaactataattcagatttatatattcatttgatcatatctgccaaaacaggaggaaaaacagggacaagagtggggaatt

SEQ ID NO: 226807 - DNA, 356 bp, Homo sapiens
ttagtagtcacaatttagtagttagaatttatagaagtcaacagatttccaaaatgaattctgaactatttcttggaaacagacaaagacacagttgtgttaacatcagagaaatcaaagtagagaacatccctagaaaacagacatctgtcattgtccttagagcagttttttttagagaaaaatttgatataaaaaaggaattgtcatccctctgggcatggacattgtctgttaactaacggaattgtttggcttataacagccagcgaatgtgaactataattcagatttatatattcatttgatcatatctgccaaaacaggagraaaaacagggacaagagtggggaatt

SEQ ID NO: 226808 - DNA, 566 bp, Homo sapiens
agctggtgtcccggacaccttctctgaggaccttcctgcttccccaagtgctaataccttcgtgctcttttctgctgtcctgacaattagccttcatcagatggctcttttatgtctattgcagattattgggttgcatgtgcatctccttcacttaatgtacctttttaccgtaatgactgaatgaatatggagcttttcacgctacgttgttaaatctacttgttcttcattattrgcatgaaatcacctttttgttcttctgcatggtagaagttaatattgagtgtcaacttgattggattgaagatgcaaagtattgttcctgggtgtgtcagtgaggttgttaccaaaggagattaacatttgagtcagtggacggggagaggtagacctaccctcaatctgggtggacatcatctaatcagctgccagtgtggataggataaaagcaggcagaggagcatagaaggactggactggcttagtcttctggcctccatctttctcccatgcttgatgctttctgccctcgaacatcagactccaagttcttcagttttgag

SEQ ID NO: 226809 - DNA, 373 bp, Homo sapiens
ttatttattttgaggaaaaagccctagaatatttgaataatatcatagttgaataaaagttgattttttttttttgagacagagtctcactttgtcacccaggctggagtgtagtggyacagtctcagctcactgcaacctctgcctcctgggttcaagcaattcttaggcctcagcctctggagtagctgagactacaggtaggcaccactatgtccggctaatgtttttgcatttttggtagagacagggtttcaccacattgcccaggcgggtcttgaactcctgagctcagacaatccacccacctcagcctcccaaagtgctaggattacaggcatgagccactgtgcctggccaataaaagttgatt

SEQ ID NO: 226810 - DNA, 373 bp, Homo sapiens
ttatttattttgaggaaaaagccctagaatatttgaataatatcatagttgaataaaagttgattttttttttttgagacagagtctcactttgtcacccaggctggagtgtagtggcacagtctcagctcactgcaacctctgcctcctgggttcaagcaattcttaggcctcagcctctggagtagctgagactacaggtaggcaccactrtgtccggctaatgtttttgcatttttggtagagacagggtttcaccacattgcccaggcgggtcttgaactcctgagctcagacaatccacccacctcagcctcccaaagtgctaggattacaggcatgagccactgtgcctggccaataaaagttgatt

SEQ ID NO: 226811 - DNA, 373 bp, Homo sapiens
ttatttattttgaggaaaaagccctagaatatttgaataatatcatagttgaataaaagttgattttttttttttgagacagagtctcactttgtcacccaggctggagtgtagtggcacagtctcagctcactgcaacctctgcctcctgggttcaagcaattcttaggcctcagcctctggagtagctgagactacaggtaggcaccactatgtcyggctaatgtttttgcatttttggtagagacagggtttcaccacattgcccaggcgggtcttgaactcctgagctcagacaatccacccacctcagcctcccaaagtgctaggattacaggcatgagccactgtgcctggccaataaaagttgatt

SEQ ID NO: 226812 - DNA, 591 bp, Homo sapiens
ttagaaggcagagcttggtttttaatccagatgtacttgactccaaagcctgggttcctaacctctacaaagcctattcccgcctatccatccctgaaaacaatcggaaattcaaactgaggcataattcaattatgcttgttttttatataaccaggttgcttaattgcatagtaaaatttactgtttgatcaacaaattataattatacttcaaatgggtcttttattggcttgctttactctcaaagtacgtttttaaaaaataaatgtgaatgaaacaaaagggaacgaaagcaatttactgggcctaaaagtccattaatttgtgtttcaatcacacctttgaagatcacagagcaatgtttaaataaatatatctcttttayggtctaaaagtatcaaattgtgtgttttatttaaattttaagaaaattatcaggattgcttgacagtgcatttgtctaaatgacattttttccagataatttccattgaaaaatcatttcattaatgctttttataaatgtcatcattaaggaatatattggccatttatttgtacttttactgagatggaggcaaatgacca

SEQ ID NO: 226813 - DNA, 351 bp, Homo sapiens
atatccacatttccatcaagttacaccacgcttgcccatgttgtaaaatatatttgcataatttcattatcatgataaagtgaaatatgagttgcattatgacattaaaataatataccttctctaaggtctgtaactctagtttcacaaatgtgacagattattttcttatcctattcatgctttatgtggggaattaacttccagttgaattatatataatttgcrttgttctttattataagacataaactacaagagctcataaattttataaatttaaattgatatcagtagcagtaatgttttgtatactttgcatttctttacataaaactgactgtattagca

SEQ ID NO: 226814 - DNA, 351 bp, Homo sapiens
atatccacatttccatcaagttacaccacgcttgcccatgttgtaaaatatatttgcataatttcattatcatgataaagtgaaatatgagttgcattatgacattaaaataatataccttctctaaggtctgtaactctagtttcacaaatgtgacagattattttcttatcctattcatgctttatgtggggaattaacttccagttgaattatatataatttgcattgttctttattataagacataaactacaagagctcataarttttataaatttaaattgatatcagtagcagtaatgttttgtatactttgcatttctttacataaaactgactgtattagca

SEQ ID NO: 226815 - DNA, 582 bp, Homo sapiens
tcagcaaaccttgcctgtacragaccttatggaccatagggtctcccttgcagccactcaactctgctgctttagtgcaaaagcagccatggacaatacgtacataaatacacatggctgtgtttcaatgaaactttatttgcacaagcagctgatgggctgtattcaactcacgggacatagtttgctgatctttggtctagggtggtctaacatacatatctagctggttagctcaagagaagccaagatgcttcagttctcttctacattgcttccaattttccaacaggatagcctatgttcattcatatgatgtatctgaggttccacattcagcaaaaagcaagccccactgcatggcattttaaaagcttatccctgtgacatattttcctcattgtccaaagtaatttgcatgccatgttctgagccaaagaatcaacaaacagcctccacccttttatggaaggaaaatggaaagtcacaatataaagtaatgcacatacaggggtgaaataaatctgtagccatttttataatatgccacagggaaccctgtaaaaatacaaaagcagtgaa

SEQ ID NO: 226816 - DNA, 461 bp, Homo sapiens
tttcagaacacctactataaacatgttcaaaagtgtaaataaaaatattactgaatgaatgaacagaaagaaaatgttaacagaaatttggaagctataactgtgaactaaatggaaattttagaactgaaaattacaatgttaaaattagaattttgcttaataggcttaacagcagaattgagattccaagaaaagcacaataaatgaagagagataaatagaaatgttccaatctaaaaaacagagaaagaaagattgaaaaaatgattagaacacagcttcagtgatagatatatgaaacaatattaagtcatctaacagttggaatcagagcctaaaaaaagagcagagagargaagaaaaatattttaaagaaatagtagttgaaattatcataactttggtgaaaattacaaccttgaaatggaaaggaaaaacaatagcaaatgccaagcagg

SEQ ID NO: 226817 - DNA, 455 bp, Homo sapiens
aatgccatgaacagacatgccttgttcagatttgtggaatttttaaaaaactatcaaatgggacaatcataaagaacaaattccacccaaaaaaatgttgaagtttggtataatttctatcatcatgatgccacatttgtaaactaggataggtagagttcttctwaacaattttcattcactatgattacatttttaaaagaccacttacacttcaggagatatagccaaaatagaagcttttcatctattggccatacaaaacggatcaattaattatttactagatgtaatgcattgttttctgtactaccaactggaaagaattctttatattcattcaaacattacctataagtcttctttgattctaagattcagaatacaaataataataataataaaatttgagcttttcctctctggagtctgttgacatgtaagaaaataactac

SEQ ID NO: 226818 - DNA, 467 bp, Homo sapiens
ttccctatgtaccagcaatggtcaattgtaatttgaaattaaaacacagtgccacttgtattagcaaagaaatgaaatagtcataagtatcacaaaatatgtacaagatttatgtgaggaaaaacacaactctcttgaaagaaaacatagaagtcctaattaagtggaaagacattgcatgtacatgaaaaggaagactcaatattgttaagaygtcagtcttcccaacttgttgtatagattcaatgtaatcccaattaaaaccccagaaagttatttttcggaagccaacagattctacagtttcggtgaaaagacaaaaagtccagaatacctaatacaatgtaaaagaaaagaacaaagttggaaaagtgacactacatgacttgaagacttactatgaaggtacagtactgaagacagtaggaagacagtatggtatcagtaaaagaacaaatagagaattc

SEQ ID NO: 226819 - DNA, 515 bp, Homo sapiens
tattgaatgcctcatcatccttcactgacttctccactccctaactgttgttctttccctccgcaaataaaagacttggactccaatacttatatcagcttctgcttctgggggaacccatgctcaggcctacatgttcttccaatgtgtagcataaaggttggagtgataaagtccaatttgatctgttttgcaggtgcatcaggtactggggactggttgccaccattacagcattagttggtgctatagactgaatgtaagtgtcaccctgaaattygtatgttgaaaccctaatccccaatgtgatggtatttggaattggggcattggaaagtaattaggtcatgagggttgagccctcatggagggattagtgcccttggaagaagaggaaatgacaagaacctcctttcaccccccagtctctgtgcatgcaccaagcaaaggccatgtgaggacataccaggaaaaggccctcaccagacaccaaatctgccagcactccagtcttg

SEQ ID NO: 226820 - DNA, 516 bp, Homo sapiens
ctattgaatgcctcatcatccttcactgacttctccactccctaactgttgttctttccctccgcaaataaaagacttggactccaatacttatatcagcttctgcttctgggggaacccatgctcaggcctacatgttcttccaatgtgtagcataaaggttggagtgataaagtccaatttgatctgttttgcaggtgcatcaggtactggggactggttgccaccattacagcattagttggtgctatagactgaatgtaagtgtcaccctgaaattcgtatgttgaaaccctaatccccaatgtgatggtatttggaattggggcattggraagtaattaggtcatgagggttgagccctcatggagggattagtgcccttggaagaagaggaaatgacaagaacctcctttcaccccccagtctctgtgcatgcaccaagcaaaggccatgtgaggacataccaggaaaaggccctcaccagacaccaaatctgccagcactccagtcttg

SEQ ID NO: 226821 - DNA, 510 bp, Homo sapiens
aaatcccagctatttgggaaggtgagacaggagaatctcctgaacccaggaggcagaggttgcaatgagattgctgagattgcgccactgtactccagcctgggtgacagaragagactctgtgtcaaaagagaaaagaaaagtgcctaagggataaatacatccttgcttttttattttgagtcctcttcctagttttactctggatcaagtatcagggctgcttcagagattacatggaacaattactagaaatagatgctgaatagatgtgccattccaggtctttaaaaatgacatataccagccctatgtatatgaggactaagcaactgaaaaattccttgcagactactatatacgtgtcttaaatcccctcctctcttgccccatcaacccttcaatgagtctctatttcccactctttgtggatattcagagactatatttggaccccttcccatagatacaaacccattttctctattactacctcctatatatccttga

SEQ ID NO: 226822 - DNA, 510 bp, Homo sapiens
aaatcccagctatttgggaaggtgagacaggagaatctcctgaacccaggaggcagaggttgcaatgagattgctgagattgcgccactgtactccagcctgggtgacagagagagactctgtgtcaaaagagaaaagaaaagtgcctaagggataaatacatccttgcttttttattttgagtcctcttcctagttttactctggatcaagtatcagggctgcttcagagattacatggaacaattactagaaatagatgctgaatagatgtgccattccaggtctttaaaaatgacatataccagccctatgtatatgaggactaagcaactgaaaaattccttgcagactactatatacgtgtcttaaatcccctcctctcttgccccatcaacccttcaatgagtctctatttcccactctytgtggatattcagagactatatttggaccccttcccatagatacaaacccattttctctattactacctcctatatatccttga

SEQ ID NO: 226823 - DNA, 603 bp, Homo sapiens
tagcttaaaaaattatttgtaaatagctatttgcaaaaggtaaaggtaaaaaagcagaatgtgagaaattgattttgaggaactagttctcttgttacaaaaagactccaagaaaacctctcaagaactagttctagagatagctgacacttaatattcacgaaatcaaggtaatacaaagaaaagatttaacaaaaattgtgtatttgggacgtcatgtgcaggtaaaatgagttaatttgcgtttgcagtatgccatttacattatgatgatgctaagactctcaaaatattttggtttctgaggaaagaagtgatatatacaaacatacgtggaggactataatgaaggatttaatggtccggtgatctctaccttctctgtaggtggagtaaaagcaattggcttcatacaagcaaacaaaaatgatgtgggtgacatgtaaaaaattatccaattgttaaatatgaaatcrtgtattgggttgtctaattttctttattgcagatttcagagcagccaagttttcatcttagtttaggtagagctctttgtttagatgcagagctgggaagttaatcctctaatgtagaggtcagcaa

SEQ ID NO: 226824 - DNA, 543 bp, Homo sapiens
atcatatcaattgatgcaggaaaagcatgaaacaaaattccgcatccattccttataaatactctcagttagtggactaaaaacaagcatcttcaaactgataaagacaattaggaaaatctgcaaatatcatacttgatagtgaaaggcagaatgtttttccctgaggtgtgatctcaccacttctattcagcattacgcaggaactttttactagtgcagtaaaacatgaaaatgaaagaaaagcaaatgataaaggaaataaataaataaaacatctttatttacacatgacctgattgtccatttagaaaatctgacggaatctgttaaaacaagcaagcaagcaaacaaaacctaataggactaataagtgaatttagcaaggtttcccgacacaatatctatatgcaaaaatcarttgtatgttcactgtttgcgtgatgggtactctagaaacccagactctaccattctgcagtatatctatgtaacagatccgcacattatccctgaatctaaaataaaataaaaatttaaaaa

SEQ ID NO: 226825 - DNA, 598 bp, Homo sapiens
aaaaatttaaaaacctaagaacagagaaagctaatttatggtagtaaaagttggaagttaattacttgaggtggtaggggaatttattagaaagaagcacagaaacaatttctgggattatatgatggaaatattccatgtcttsaattgggtggtagttacatgagcatacacaattattataactcatccaactgtataaaactcaattgtaaaaaaaagaaacaacaaccttgttggaattttgattgggattgtgttgcatctgtagatcaagctgggaagaactgacatcttgatgatattgtcttcctatccataaacatggaattactctctatttattctttgatttctttcatcaaagttttgtagttttccttatataaaatttgtatatattttcttagatttatacataagttttttttaaggtgctaatgttaattgtattatgttttcaatttcaaatcacaattgataattgctggtgtataggaaagcaactgactttttaatattaatcttgtgtcttgcaactttgctataattgtttattagttccaggagtttttgttattgttgttgcctctttggg

SEQ ID NO: 226826 - DNA, 598 bp, Homo sapiens
aaaaatttaaaaacctaagaacagagaaagctaatttatggtagtaaaagttggaagttaattacttgaggtggtaggggaatttattagaaagaagcacagaaacaatttctgggattatatgatggaaatattccatgtcttcaattgggtggtagttacatgagcatacacaattattataactcatccaactgtataaaactcaattgtaaaaaaaagaaacaacaaccttgttggaattttgattgggattgtgttgcatctgtagatcaagctgggaagaactgacatcttgatgatattgtcttcctatccataaacatggaattactctctatttattctttgatttctktcatcaaagttttgtagttttccttatataaaatttgtatatattttcttagatttatacataagttttttttaaggtgctaatgttaattgtattatgttttcaatttcaaatcacaattgataattgctggtgtataggaaagcaactgactttttaatattaatcttgtgtcttgcaactttgctataattgtttattagttccaggagtttttgttattgttgttgcctctttggg

SEQ ID NO: 226827 - DNA, 553 bp, Homo sapiens
gtggatgatctttataatgtgctgttaaattctgattgctggtattttgttgaggacttttgcatccacagtcatcagtgatattgggctgtaatttttgtggttgttttattgtctggctttgatgtcagggtaatgctggccttgtagaataagtttagaagagtttcctcctttttactttttcgsaataatttgtaaataattggtgttagttcatctttaaatgttttgtagaattcagcagtgaagctattaggtgccaaacttgatgggggactttttattactgcttcaatcttggtttcttctatgctttccaactgttgacataattgttcatagcagaatcttatgatatttttttatttttgtggtctcagttgtaaggtctctttttgttatttatgattttattttttatagtcttctcttttagttaatctggctacaggtttgttgattctgagattgtctattataaaaagactttttgttttgctggtcttttgtatttttttaggctctattttatgtgtgttctgatatttat

SEQ ID NO: 226828 - DNA, 553 bp, Homo sapiens
gtggatgatctttataatgtgctgttaaattctgattgctggtattttgttgaggacttttgcatccacagtcatcagtgatattgggctgtaatttttgtggttgttttattgtctggctttgatgtcagggtaatgctggccttgtagaataagtttagaagagtttcctcctttttactttttcgcaataatttgtaaataattggtgttagttcatctttaaatgttttgtagaattcagcagtgaarctattaggtgccaaacttgatgggggactttttattactgcttcaatcttggtttcttctatgctttccaactgttgacataattgttcatagcagaatcttatgatatttttttatttttgtggtctcagttgtaaggtctctttttgttatttatgattttattttttatagtcttctcttttagttaatctggctacaggtttgttgattctgagattgtctattataaaaagactttttgttttgctggtcttttgtatttttttaggctctattttatgtgtgttctgatatttat

SEQ ID NO: 226829 - DNA, 553 bp, Homo sapiens
gtggatgatctttataatgtgctgttaaattctgattgctggtattttgttgaggacttttgcatccacagtcatcagtgatattgggctgtaatttttgtggttgttttattgtctggctttgatgtcagggtaatgctggccttgtagaataagtttagaagagtttcctcctttttactttttcgcaataatttgtaaataattggtgttagttcatctttaaatgttttgtagaattcagcagtgaagctattaggtgccaaacttgatgggggactttttattactgcttcaatcttggtttcttctatgctttccaactgttgacataattgttcatagcagaatcttatgatwtttttttatttttgtggtctcagttgtaaggtctctttttgttatttatgattttattttttatagtcttctcttttagttaatctggctacaggtttgttgattctgagattgtctattataaaaagactttttgttttgctggtcttttgtatttttttaggctctattttatgtgtgttctgatatttat

SEQ ID NO: 226830 - DNA, 554 bp, Homo sapiens
ggtccctcccacaatacgtgggaattataggaatacaattcaagatgagatttgggagaggacacagagccaaaccacatcaagtctcctgtctctgaaaatatagcagttgtctggtctggtttctgcccctatccccccatctctcactaccttacccattggttctatccattggctggtgttatatagtgtatgtcctctatgcattttgaagcttcctattattttcctaatattcctataattttttgtagcagtgttcctcaaacgagaggttaggagccatccttgaggwtgcagagctaatttataccctccactccttggatatttttagtctttaccttgaaacatgtggaaagcttgtcaaactcagtgcaaaatcctattggaattttgattggtattgcatttaatagtgcaaagaacaattgtctacaattgtgtctacaaaattttttgttctttggcattctctcttcacccagttaaaatcacgggtctctaaggctacaggaaggcaaccacagcgaggagctgcacgttttctc

SEQ ID NO: 226831 - DNA, 594 bp, Homo sapiens
ttgtgcatatctcattatcccaatacaatttactgaagagactgttcattttctattttgtgttcttggcatctttatcaaaaatcaattgaccataaacatatagatttatttctgggctctcaattctgttccataggtttgcrtgtctggtttttatgccagtgccatgctgttttgattactatagctttgtagtatattttgaagtcaagtattgtgatgcctccaactttgttcttttgacttgtaattgctttagctgttttggggtcttttgtggtttacatgcatttttggattttgtttctatttctgtgaacaatgtcattggaattttgatagagattgcattgaatctgtagattactttgggtagtatggatattttaacagtattaaatttttcaattcattaacatgggatatcacattaatttgtgttttaatttctttcatcaatatcttatagtttttaatatacagctctttcacctccttggttaaatttatttccatattttctttttaggctattgaaaatgagattgttttattaatttcttttttagatagtttgttgttgatgtatag

SEQ ID NO: 226832 - DNA, 376 bp, Homo sapiens
ctgcattcttgggcttgcaacctccctcatttatcttcaaagttggcaatgccagccaatctttttcatcatgccatctatttggttgtctctcttctgcttccctcttttcacttaggatccatggtcacacccagataatccaggataatctccccatctcaaagtttttaacataatcatatcagcaaagtccatttttccatgtaaggtaacatattcaaacaggttccagagattaggattgtggacattgttggagaccattattatgtctatcatgaaagagatcatgttttatctgaraactgaaataaggtcagggtggttggagagtagaaagtgagaagaaaggtaatataagatgaggctgggg

SEQ ID NO: 226833 - DNA, 598 bp, Homo sapiens
tactgttacgccagagtcagattggaaagtaactcatgagatagagggttaaataaaacctatctaatgagaatttatggtttgtagggcatgactccccagaccccttagataggaatttgggcaagataaaaatcggagcttggtcctcaaagtacacgtcaagagaagagtgggctggtctgggtggaaagtagtagcagagaacagtacactyggaaagatggggcaaagcgggctgcttgaaagaggatgagccagcagctctaacagttctgcattgctgattttattatgtcagaccctttaagttcctgtctgtgtctcaagtctctgcctttgtctctgactagtttcccgcttctgcctcaagtccccacccagttcccgccccaggtttgtagaattctcccttgctgtctgttgatgtacatgtgctgcctagcattagatatgaattctgcctaatggcagcattgctccgtaccaccatcccaggaaggtcgtatcgtggttaaatctgtacttattgcacctgcgtatctcttaggaatttctcctttgccctctttccctcttctcagcatgtagctagcta

SEQ ID NO: 226834 - DNA, 598 bp, Homo sapiens
tactgttacgccagagtcagattggaaagtaactcatgagatagagggttaaataaaacctatctaatgagaatttatggtttgtagggcatgactccccagaccccttagataggaatttgggcaagataaaaatcggagcttggtcctcaaagtacacgtcaagagaagagtgggctggtctgggtggaaagtagtagcagagaacagtacacttggaaagatggggcaaagcgggctgcttgaaagaggatgagccagcagctctaacagttctgcattgctgattttattatgtcagaccctttaagttcctgtctgtgtctcaagtctctgcctttgtctctgactagtttcccgcttctgcctcaagtccccacccagttcccgccccaggtttgtagaattctcccttgctgtctgttgatgtacatgtrctgcctagcattagatatgaattctgcctaatggcagcattgctccgtaccaccatcccaggaaggtcgtatcgtggttaaatctgtacttattgcacctgcgtatctcttaggaatttctcctttgccctctttccctcttctcagcatgtagctagcta

SEQ ID NO: 226835 - DNA, 558 bp, Homo sapiens
atttatcccttcttcaccattttattcaccttgctaagcacacagcatatagtatttgcttaatakctcatgaatggataaatgaaaaaaaatccaacaaactaaataccgagaatagagactctctcctgaagagtcctatcttttgaatattttacacatacttgttccaatctgtctacacgctagtactagactaaaatatctctttaattacatcacctcctgctttacaaaaatggttaatgcttccctattgtcaaattcaacttctaagttgttccactgactgttaataggcgctttatgttcttatttctcataactctccctcacatccacctcatgggaaatacattgggaagtgctgtattaagcaaagttaagcctttaaataccagtatacatgttaagtccacaggagggcatgtatcacttctcaagtttacttaaccctaggacactttattcaaagagcatctcctgggattattgtttcatggagtccaatttgggaaacattagcttccgttatacaatcaaaattcctcagcctgc

SEQ ID NO: 226836 - DNA, 533 bp, Homo sapiens
ttcaccttgctaagcacacagcatatagtatttgcttaatagctcatgaatggataaatgaaaaaaaatccaacaaactaaataccgagaayagagactctctcctgaagagtcctatcttttgaatattttacacatacttgttccaatctgtctacacgctagtactagactaaaatatctctttaattacatcacctcctgctttacaaaaatggttaatgcttccctattgtcaaattcaacttctaagttgttccactgactgttaataggcgctttatgttcttatttctcataactctccctcacatccacctcatgggaaatacattgggaagtgctgtattaagcaaagttaagcctttaaataccagtatacatgttaagtccacaggagggcatgtatcacttctcaagtttacttaaccctaggacactttattcaaagagcatctcctgggattattgtttcatggagtccaatttgggaaacattagcttccgttatacaatcaaaattcctcagcctg

SEQ ID NO: 226837 - DNA, 581 bp, Homo sapiens
caggctcataggtggaagggacttgccttgttttggatgagactttggactgtggactttggagttaatgctgaaaatgatttgagactttgggggactgttgggaaggaatgattggttttgaaatgtgaatatatgagatttgggagaggctggggtgaaatgatatggtttggctatgtgtccccacccaagtctcattttgtagctcccataattcccatgtgttgtggaagggacccagtgggagatgattgaatcatgggggcaggtctttcctgtgctgttcatgtgtaggtgaatatgtctcatgagatctgatgctttttaaaaatgggagtttctctgcacaagctctttttacctgcagccatccatgtaagatgtgacttgctcctccttgccttccaccatgattgtgaggtctccctagccatgtggaactgtaagtccagtaaacatctttctgttgtaaattgcccagtmtcaggtatgtctttatcagcagcatgaaaacagactaatacaagtatgttgtttatttccacgtttgtgaactcccagatttttctggaattaga

SEQ ID NO: 226838 - DNA, 551 bp, Homo sapiens
acattttcatcttgcagatttgaaactctatacccattcaacaacaactctctttttcccctttctccttgccgctggtaataaccattctactactttctgtttccattaatttatctactttaggtaccacaaataaatagaatcatatggtatttggctttttgtgagtgtcttatttcacatagcataatgtcctcaatgttcaactatgttgtggcatatgatgggatttccttcttttttaagtctgaataatattttattgtttctatataccacattttgcttattgtttcatttgttgatgggtgkttgggttacttaacaccccttggtattgtatatagtgccactatgaacatgggtttgcaaatatctctcagagatcctgctttcaattattttggatacatactcagaagtagaattgcaggatcatatggtaattatatttttgagtttttgaggaaccttcttactgtttcccatagtggcggcaccatttaaaattcctaccaacaatgcacaagggtaccaatttttccaca

SEQ ID NO: 226839 - DNA, 551 bp, Homo sapiens
acattttcatcttgcagatttgaaactctatacccattcaacaacaactctctttttcccctttctccttgccgctggtaataaccattctactactttctgtttccattaatttatctactttaggtaccacaaataaatagaatcatatggtatttggctttttgtgagtgtcttatttcacatagcataatgtcctcaatgttcaactatgttgtggcatatgatgggatttccttcttttttaagtctgaataatattttattgtttctatataccacattttgcttattgtttcatttgttgatgggtgtttgggttacttaacaccccttggtattgtatatagtgccactrtgaacatgggtttgcaaatatctctcagagatcctgctttcaattattttggatacatactcagaagtagaattgcaggatcatatggtaattatatttttgagtttttgaggaaccttcttactgtttcccatagtggcggcaccatttaaaattcctaccaacaatgcacaagggtaccaatttttccaca

SEQ ID NO: 226840 - DNA, 546 bp, Homo sapiens
ttgtataattgtaggacttctttatgtattatataattttggatattaaccctttttcatatatatgatttgcaaatattttgtcccattacacaggttgccttgtcactctgttgtgtccttcagtgcacaaaactttttaagcttgatttagtctcatttgtttatttttggttgtgttgtctgagcttttggtttcctgttaaagaaattattctcaagtcctgagaatatcctgaaatayttcctgtatgttttcttttagaagtttcgtggctttagatctttaattattttgagttaatatatatggcataaggatccagcttcactattttgcatttggatatccagattatttcagcattatttgttgtaaaaggtgtccttcctccatgttgtggtcttggcattcttgtggaagatcatttcatcattacatgagggtttatttctgggctctcatcctattccattggcttacatgtctgtctttatgtcagtactacactggttttattatggtggttttataatttgttttga

SEQ ID NO: 226841 - DNA, 466 bp, Homo sapiens
agataattccaaacctatatccagattacatcaatttatacattcaccagctctttgtgaggtttctattctcactaaaactttgtcagtttgagttttgtccattttgatgactgagcactggttcttttagtttttaaactttaacaaataaaaattatatgtatttatggtttacaacatggtattttgatctgtgcacacattgtggaatgactgaatcaagctaactaaaatattaattacctcacgtatatatcatttttgtgatgagaacatataaaatctactctcagcaattttcaaatatacaatacttagttaattaatgatgtgtgttaacaccatgtagtacaatggatctcctgaacttattcctcctgtytagctgaaattttgtattctttgaccagaatctctccaattcaccctgtccttgcccctggccactggtaatcaccattct

SEQ ID NO: 226842 - DNA, 517 bp, Homo sapiens
ccaattcaccctgtccttgcccctggccactggtaatcaccattctactctctgcttctgtgaatttgacacttttagattgtgtattgwttaaattttttttgatgattatgaggttgaaacctttctatatgtttattaaccattgtaatgttctgtttaagacttttgctccatttcacattggcatgtctatctttttcttattcagacggaagagttcttttatattgtagctatagaccttgtttaatttgagatactttttcctgttctatagcttgacattttactttataaattgtctattgatcaaaagtttttaattttaatgtatttctttatatttaataataccccaaatcatgaagtttttcttctttgttatatgttagaaacttaattgctttctactccatatttcatctataatcaaaaccagaatttatttttatatgtgctgggaagtaggggaaaattttatatttctacatagggctacccaagggacctagca

SEQ ID NO: 226843 - DNA, 517 bp, Homo sapiens
ccaattcaccctgtccttgcccctggccactggtaatcaccattctactctctgcttctgtgaatttgacacttttagattgtgtattgattaaattttttttgatgattatgaggttgaaacctttctatatgtttattaaccattgtaatgttctgtttaagacttttgctccatttcacattggcatgtctatctttttcttattcagacggaagagttcttttatattgtagctatagaccttgtttaatttgagatactttttcctgttctatagcttgacattttactttataaattgtctattgatcaaaagtttttaattttaatgtatttctttayatttaataataccccaaatcatgaagtttttcttctttgttatatgttagaaacttaattgctttctactccatatttcatctataatcaaaaccagaatttatttttatatgtgctgggaagtaggggaaaattttatatttctacatagggctacccaagggacctagca

SEQ ID NO: 226844 - DNA, 534 bp, Homo sapiens
tcaaaaattagttgggcatattttcatgagtctaagttttctatttttaaaaattgaatcttttgcctattcctttgctaatatcrtagtgtcttaattactgtagctttgtaatgagttataatattgaatagattgatttctctcatttaattcttccttgtcgcaattgttttagttattctaggagctacaatttttaatgtaagttaataaggttccttatgtatacaaaatatatagtgggatttgataggaattgcactaaatctatacattactttgggaagaattgacatctttattatagtgaatcttccaatccatgaacatagtatgtctcctcatttatataggtctttgatttctttagcagcattttgtaattttcagcatacagatgccatacactattagatttatacctaagtatttcattttcttttgggtgattataattgatattgtgattttaattttggatgattataaatggtattgtgattttcattttagtttccacttgtttattgt

SEQ ID NO: 226845 - DNA, 534 bp, Homo sapiens
tcaaaaattagttgggcatattttcatgagtctaagttttctatttttaaaaattgaatcttttgcctattcctttgctaatatcgtagtgtcttaattactgtagctttgtaatgagttataatattgaatagattgatttctcycatttaattcttccttgtcgcaattgttttagttattctaggagctacaatttttaatgtaagttaataaggttccttatgtatacaaaatatatagtgggatttgataggaattgcactaaatctatacattactttgggaagaattgacatctttattatagtgaatcttccaatccatgaacatagtatgtctcctcatttatataggtctttgatttctttagcagcattttgtaattttcagcatacagatgccatacactattagatttatacctaagtatttcattttcttttgggtgattataattgatattgtgattttaattttggatgattataaatggtattgtgattttcattttagtttccacttgtttattgt

SEQ ID NO: 226846 - DNA, 534 bp, Homo sapiens
tcaaaaattagttgggcatattttcatgagtctaagttttctatttttaaaaattgaatcttttgcctattcctttgctaatatcgtagtgtcttaattactgtagctttgtaatgagttataatattgaatagattgatttctctcatttaattcttccttgtcgcaattgttttagttattctaggagctacaatttttaatgtaagttaataaggttccttatgtatacaaaatatatagtgggatttgataggaattgcactaaatctatacattactttgggaagaattgacatctttattatagtgaatcttccaatccatgaacatagtatgtctcctcatttatataggtctttgatttctttagcagcattttgtaattttcagcatacagatgccatacactattagatttatacctaagtatttcattttcttttgggtgattataattgatattgtgattttaattttggatgattataaatggtrttgtgattttcattttagtttccacttgtttattgt

SEQ ID NO: 226847 - DNA, 532 bp, Homo sapiens
tgtggtgtataatcctttttaatgtctgttgaatttctggtgaatttggtttgagatttttgcatcaatattcatcagraatacttgtctattgttttcttttccaagagtatacttatctggctttggtatagtgtagtgctgacatcataaaatgagtttgggaatgttcctttctcttcaaatttttttttttttttttgagacagggtgttgctctgtcacccaggctggagtgcagtggcatgatcttggctcactgcaacctccgcctcctgggttcaagtgattcttgtgcctcagcctcctgagtagctgggactacaggcacacgccaccatgcctggctaatttttgtatttttagcagagacagggtttcaccatgttggctaggatggtctcgatctcctgacctcatgatccacctgcctcagcctcccaaagtgctgtgattacaggtgtgagccaccgtgcctgggcttctcctcaattttttgcaagagtttaaggaagattgttgtttattcttt

SEQ ID NO: 226848 - DNA, 532 bp, Homo sapiens
tgtggtgtataatcctttttaatgtctgttgaatttctggtgaatttggtttgagatttttgcatcaatattcatcaggaatacttgtctattgttttcttttccaagagtatacttatctggctttggtatagtgtagtgctgacatcataaaatgagtttgggaatgttcctttctcttcaaatttttttttttttttttgagacagggtgttgctctgtcacccaggctggagtgcagtggcatgatctyggctcactgcaacctccgcctcctgggttcaagtgattcttgtgcctcagcctcctgagtagctgggactacaggcacacgccaccatgcctggctaatttttgtatttttagcagagacagggtttcaccatgttggctaggatggtctcgatctcctgacctcatgatccacctgcctcagcctcccaaagtgctgtgattacaggtgtgagccaccgtgcctgggcttctcctcaattttttgcaagagtttaaggaagattgttgtttattcttt

SEQ ID NO: 226849 - DNA, 532 bp, Homo sapiens
tgtggtgtataatcctttttaatgtctgttgaatttctggtgaatttggtttgagatttttgcatcaatattcatcaggaatacttgtctattgttttcttttccaagagtatacttatctggctttggtatagtgtagtgctgacatcataaaatgagtttgggaatgttcctttctcttcaaatttttttttttttttttgagacagggtgttgctctgtcacccaggctggagtgcagtggcatgatcttggctcactgcaacctccgcctcctgggttcaagtgattcttgtgcctcagcctcctgagtagctgggactacaggcacacgccaccatgcctggctaatttttgtatttttagcagagacagggtttcaccatgttggctaggatggtctcgatctcctgacctcatgatccacctgcctcagcctcccaaagtgctgkgattacaggtgtgagccaccgtgcctgggcttctcctcaattttttgcaagagtttaaggaagattgttgtttattcttt

SEQ ID NO: 226850 - DNA, 544 bp, Homo sapiens
tttgaataatcacttcaccgtgagcatttccaaaactgaacttctgatcttttccctaaatctaaagactttctcagatcagttaaatgacaactccatacttaagtttgctcaggccaaaaacgctggagtcatcctttatttttcttttcctctaaaaccctgtatttaacccattaggccatcatggtggcactacctttttcagactatgtctgtgtctggtggaatagttattctcattaattaaagacagtaaggctcagagatgttaagagaacagcccaaatccacacggttgggaagtgaygaagtcagatttcaaatttgtcttttctgactgaccacaactaatatgctctttccataatactagtgcttctcctaaatacatgttatagttacttcttttatttacatagtttagaaatatgatttgacctattgtataactggagctttataaacagtacatgttatttttattaggttctgtacgcattctttatgcatgctgcggttatttcctaaatacttgctaact

SEQ ID NO: 226851 - DNA, 578 bp, Homo sapiens
tgaaaatattgtagctatctggtaagaccaatggggatttagttattgaaagatgctgctacagaaagttcctaaaactaattttgtcagtttattttatttatcaaggtgtttatatgtttttaatgctgcataaaaagttaccataaagtgagcagcttaaagcagcacagattcgttatcatwcggttcccattggttaggttcctaggtctgggttagctgggtcctaaactcaaggtttcaccactctaaaatcaagatgttggctgggtatagtggctcacgcttgtaatcctagcaatttgggtggctgaggtgggaggatcgcttgagctcaggagttcaaaaccagcctggacaacatagtgagaccttgtctcaataataataataatacaatgcagagatcatcttcaaaaaaatacaagtctacttgctgttatttgcattatctgacctctataaacaatcatgaccagagccatgtcttcataaagttaataataaaatattacatgtagaaatttatagtttcaaaaaataaaaataaaagcaaataaaggtctcacttgggt

SEQ ID NO: 226852 - DNA, 578 bp, Homo sapiens
tgaaaatattgtagctatctggtaagaccaatggggatttagttattgaaagatgctgctacagaaagttcctaaaactaattttgtcagtttattttatttatcaaggtgtttatatgtttttaatgctgcataaaaagttaccataaagtgagcagcttaaagcagcacagattcgttatcatacggttcccattggttaggttcctaggtctgggttagctgggtcctaaactcaaggtttcaycactctaaaatcaagatgttggctgggtatagtggctcacgcttgtaatcctagcaatttgggtggctgaggtgggaggatcgcttgagctcaggagttcaaaaccagcctggacaacatagtgagaccttgtctcaataataataataatacaatgcagagatcatcttcaaaaaaatacaagtctacttgctgttatttgcattatctgacctctataaacaatcatgaccagagccatgtcttcataaagttaataataaaatattacatgtagaaatttatagtttcaaaaaataaaaataaaagcaaataaaggtctcacttgggt

SEQ ID NO: 226853 - DNA, 601 bp, Homo sapiens
gataagatacaaggtgtttacattgcctctaagtatctctccacaaattactatttacaaagaaaaaagtaacctgcagtgaacagactggtggcacaccaccttcccaagtaattaatcaaagtagcatcatcaattattgggacaaactgactctttgtgcctcctggtatgttacactgaggacacagcattatttttatcgtgttcctgccaaaagttaataatctgaatctaatcatgaggaaatatcaggcacatcaaaactgagggacattctacaaaataacaggtctgtgctttccaaaaatctcaaagtcgaaaagaacaaagaaatgctgagaaactgtktcaaatcagaggctaagaaacatggcaagtaaattcaatgcatgatcctagatttcaccctagatggagaaaagtagccgcaaaggacattattctggcaattgatgaaatttgaatatgggctatgtattagatgataatattgtatcagtattaaatttccaactttgataactgtaatgtggttttgtgcaaggatgcccttttcataggacatgctagctgaagtgtctatgggtaaagggatata

SEQ ID NO: 226854 - DNA, 549 bp, Homo sapiens
taggagtcgtctcccaaatcagatatctatgtccaagttcttatcttaagttctgcttcctggggaccaagatgaaaataccagctttagctgtttcgtagtggcaacttgcatataaattcagraaaaaaatgttattttattttctgttaaagttttctgcatgtgcagttacagaaagaaataatgcattgcctcttgtaaaatagaaggcagagtttggggataattaagaattttgtttggcattaatattggggggccctaggtatctttgctatttttattcattctttaggtaatattatctagtcttgtggctctaaatactacctaagtgcccattattttcaaatatttattttcggtgcaggcctttttcacatgtgtcaagatgccttttagatgtcaccacttggatctcaagtagacttccttaacctgacatgtcaagattggacttatgatctcttccaaagccttctccacatatgttctttcccttcttggttaatggtaacttttttcttccactcattcatactaaac

SEQ ID NO: 226855 - DNA, 459 bp, Homo sapiens
gtgaaaataagtatagaaaaattagttgaaatcaagggtgaggttaagatatcaaatggattccatgagggcagggatactgttctcacccagtgccagcaggaagggctttcctggagttttctagtagcagtgcaaatgggaggaaaaaaaaaataagtcatagtagccataagataaaaaccaaccagtcastgagatgaaattcaaatattcctggcaccaagtcttggaagaaatttctcctgtggatctttatgtagacaatagtgtaaaatgtagtgaatgatgagcattcttacatggaatacaataattattttcatggctctatttctgttaatttccccaaatgtgtgctgatgtttgaatacttaaatacagcacaggcaaatcaattctgtgggggtgtcataatttggtcctgatacactgttcttggctgatgttaatgcaggt

SEQ ID NO: 226856 - DNA, 565 bp, Homo sapiens
gcagtcagaatacacaagatttatgaagtctgctgtcttacatgggtgaggttcatggtgccccagaacaattacaagagtaacatgaaagatgtgtgatcaccaatcaccataacagatataataataatgaaaatgttgtgagaattaccaaaatgtgacacagagacgagaagtgagcacatgctgttggaagaacgtcagtgagagatttgcttgatgcaaggttttcacaaacctttaatttataaacaatgcagtatctgtggagtgcaataaagtgaagctcgataaaatgatgtatgctagtatgagttttacttaccacagtttcaatgatgcaaagtcctctagattattgccaataattcaaattagatagttttaatatttttttgctatacatctctttgagaaacagttcttcaaaaattatggaattttttcaattgcactaactttgtctttttgtccttatcttttcctatattaatctrtagtcaaatggtggataagcagaattctgtcaagagtaactccaaagctcagagagaaggttaaagag

SEQ ID NO: 226857 - DNA, 564 bp, Homo sapiens
gagcctcctcgcttccctaacagcagtgtcagtctagactccggcctctctccagtcctacttcttaaggagccctgtgttccccagttctctgggcatggcttcttgggaaatgccccatgatgttttcctcctgcctcccccatcactcctgttctggcctgtgtagattccactcagtctcagagctacgcttcagggggactcgctccacaaagcccccarccacaccaaaagggtatagccatttccttctcatgatgccttgcacatttgttcacaccaccaagaagccctgggaagagtgtcccaaagtcattcctgtcatatcagtagtatgctgggagacgatagggaccatgagttaacgtctttatgtcctccatgaactcacaaaataattacttctgattgaaaatatatagaggcatttaaaaagttctctcgctcatgtactgtccttaacctttggggtctacgtagagtatatactgagaccaggtgatcccagtgatgtacatacgtgatgtttcatgaaaacagtgagatcttgtgtctgctatc

SEQ ID NO: 226858 - DNA, 638 bp, Homo sapiens
tttgttgcccaggcttgagttctgtggcatgatcatagctcactacagcctcaaactcgggctcaagtgatcctcctgcctctgcctcccaaatagctaggactacaggcacgcaccaccacgtccagctaatttttattttttaatttttgtagagacaagcgtctccctatgttgcccagactggtctcaagctcctgtcctcaatcctcccacttcagcttcccacagcactgagattacaggcatgagccaatgtacctggcccatttccacataattctttagtgaaagacaaaacttcaagaaagctagttacgatgtcctcttacctttattgctctataaaatggcaggcaaattaatttatgcagtactttcaaatggaggaaaagcattccctgaggagaaaaactgcagttatgccaaagaaasactttctttgaattaagcagcaaacaaaaaagtattttaatattttagtttctaattcacaccagaaaggatgtgaagcagcctacacaaacatatgcaataggataattaagaacaatagcagtaataatcattgatacggagcctctcccctgtgccaggcataatgccacatcttttacctggagtgtctccttgaattc

SEQ ID NO: 226859 - DNA, 357 bp, Homo sapiens
tcttcggggtatcacagctgataaaacatccattctctctttccccttcaggaacagaattctgatttataaggaagtacatcatatctaaaataaatgacagtggttcccagcctcccatgcaaccaagaaagccatatggccaactattggccaataagatataaatggaagtgctttgtgaaacttccaggaactctccttagaagaaaggagatgagtcctctttttcccrtacttcatcccagaacatatatgtgatggctggagctcagcagccattttgaatcatgaggccaaggcccctatgaatgtactctgctctgatgtccatggaaccaccctggcagccctaga

SEQ ID NO: 226860 - DNA, 416 bp, Homo sapiens
cccaggcatgttcctgtgcagaataatccatttcagcaataaaatgagatcatastgtgtaaaacttgtttttaccttgggtgtgattctgtttgatttcctggaaacttccgctgccagtcttgttagttcttcacatgtttacccagcagtacttgtgggtgataaaaaagaaaatgtgcccagaatggaaaattagtaaacagatgatgagaaattaaatctgcagtccaacataagaagcagtgattgtgtaggaaagcttacatgacctttggaaaggaggaggctgtatttctgtttcaaattgcagatgaggagcataaagtcacagaaaagttgggtgctcaaggggttcacacataggttttagattagaacgtggtaacgtggtaatgggaagttcatcaaagttc

SEQ ID NO: 226861 - DNA, 529 bp, Homo sapiens
acttgggatggggggaaggatgtgacaggtgtctggtgggtatgggccagggatgttgctaaacatcctgccatgtagaggatgggtcttctcacaaagaattatctgtccccaaacagcagtaacgcccaggttgagaaaccctggcgtagaggaaacagtgtgggttttgagatctgtagacgtatgtttgaggcccatgcgccctctttgttggaggagcctgatggtggtggttgcaggagaagtagagagaaccgtgtrggagactcctgcagtcatttggggagaggatggtggctgagatggtagtggtggagttcaggacatgtgctcatatttgggatatttctgaagatagagctgacggtatttattgattgaatgtgggctaaggggaagagaggaatcagatgagcctaaggcttttggcctgagcaactaggagagtagtggagccatttgctgggatgggaagtaggaagaggagcaggcttggatgaaatgggggtgtggaaaacacgagtca

SEQ ID NO: 226862 - DNA, 552 bp, Homo sapiens
tatgtgatttttttccatttacaaaacacgtcctcatatacatcacaggtttcctttcaatctccaagaaaatcctagcatctttcaaaatccagtccagccactctactcttccctggcctcctccagtcccccaggcatctcacaggattagaagggatstcagggccccatctgtcacctgaactgttcaccacagcctcctcaaggcctccctgcctccaggcagtctctctaccgctgggcttcccttccaaagccaccctccacacagacaacatgttctttcagaagtctatttagacatgtcactcccttgatcaaactttcaatggccccctactgccctaaaggtagagttcaagatggccccagtgagctgaccccagaaatcaattgagattgggaagacctttgcttgtgagtaggtctgctaccccagttagattgtggtgacttttcctgttgtcattggtcctttaaccccacaaacttcctgaagccaaatcacagactttcctgagaacctactttgtgttggacactgtggct

SEQ ID NO: 226863 - DNA, 380 bp, Homo sapiens
tagaaacatatcctcttcactaaagacatttcagtaattgactccttaattcaataaatgaaagcatcattattttgaggtctaagaatgggtacgagcatggggagggcaaagtgtcatttctggttgaatttcctgagaataagaacaccggactttaaacaatatgatatgactttttccccgaamctgaagttatttctatcctatttaatgtcacatatattttaactattatgtaaaaaacattgtgttagatgtcaaaggatataaagatgactgagatcatttcttccctcaaggaatcgccaatccaatgaaaagatgaaactcatctttctagaatacattttcccgtgtttatctttgaaagagtacac

SEQ ID NO: 226864 - DNA, 528 bp, Homo sapiens
caggaacaggaatctgccattagcttgacagcatacagagcaccatatcagggttactatgggaagactctattgtggcatcaraaacacaaaaaacactggatacagttagtttctgttgacagtttcagaagaaaatcccacagattggacaggctgcctgctgaaagggttgtcactacacacagcatgccctgaaccctggaatgaagttacccctatctgtgtgatcaggaactgaacaactctgaggctctttttctaagctcttagattcctgcaagaacctcacacttacctcctcacctggctttggacctcaagctaaaagtgcaaacagtctgcctactttccccataaacatttccccaaaataaagggcttttttttttttttttagcacttgcttacttgtgttctcactttctctgtcttcctctccctccctccttctctccctgctcactgtcatcagctgggtcccaatccagtttctacacctacattcatgactaatgacccaccagc

SEQ ID NO: 226865 - DNA, 528 bp, Homo sapiens
caggaacaggaatctgccattagcttgacagcatacagagcaccatatcagggttactatgggaagactctattgtggcatcagaaacacaaaaaacactggatacagttagtttctgttgacagtttcagaagaaaatcccacagattggacaggctkcctgctgaaagggttgtcactacacacagcatgccctgaaccctggaatgaagttacccctatctgtgtgatcaggaactgaacaactctgaggctctttttctaagctcttagattcctgcaagaacctcacacttacctcctcacctggctttggacctcaagctaaaagtgcaaacagtctgcctactttccccataaacatttccccaaaataaagggcttttttttttttttttagcacttgcttacttgtgttctcactttctctgtcttcctctccctccctccttctctccctgctcactgtcatcagctgggtcccaatccagtttctacacctacattcatgactaatgacccaccagc

SEQ ID NO: 226866 - DNA, 528 bp, Homo sapiens
caggaacaggaatctgccattagcttgacagcatacagagcaccatatcagggttactatgggaagactctattgtggcatcagaaacacaaaaaacactggatacagttagtttctgttgacagtttcagaagaaaatcccacagattggacaggctgcctgctgaaagggttgtcactacacacagcatgccctgaaccctggaatgaagttacccctatctgtgtgatcaggaactgaacaactctgaggctctttttctaagctcttagattcctgcaagaacctcacacttacctcctcacctggctttggacctcaagctaaaagtgcaaacagtctgcctactttccccataaacatttccccaaaataaagggcttttttttttttttttarcacttgcttacttgtgttctcactttctctgtcttcctctccctccctccttctctccctgctcactgtcatcagctgggtcccaatccagtttctacacctacattcatgactaatgacccaccagc

SEQ ID NO: 226867 - DNA, 568 bp, Homo sapiens
cacgtcaacatctactggtttgttgttgttgttgttgttgttgttatggccattcttgcaggaatgagctggtatcccattgtggttttgatttrcattcccctgctcattagtgatgttaggcattttttcatgtttcttggccatttgtatatcttcttttgagaattgtctattcatgtccttagcccactttttgatgggactgattttttcttattgttgagttcgttgtagattctggacatttgtcagaatgtatagactgtgaagtcctttgtcagatgtatagactgtgaagattttctcccactctgtggtttgtgtgtttactttgctaactgttccttttgtcatgcaaaagctcttcagtttaattaggtcccagctatttatctttgtttttattgatttgcttttgagttttggtcatgaaatccttgcctaaaccaatgtctagaagggtttttccaatgttatcttgtagaatttttatagtttcaggtatcaggtttaagtccttagtccatcttgagttttgtataaggtgagagatgaggaaccagtt

SEQ ID NO: 226868 - DNA, 579 bp, Homo sapiens
ggagctgttaaaagttatctaatgtaattggatttctgatacataaatcttctttctaatatctccatcaagtggataattatttctgtttgaacacctctgggtacagataacttactcctaaaaccatctgtttctttgagaggatagaaaatcccacattttgttaagccaccattcttcctcatttactacttcaacccattatggaatttacatttaatgtgtgcttagtaggtcccagacactattctctacactttgagtcttcaagcaaccctatgacatagctaatattaatattaatcccttgattttaatgatgagactaagtcataagaaggttaagtagcttacccaaggccacacaagcagaaggaaaaaaaaaatgaaggaacaagaattcctatctaggaatatgatttctggtcccacttgcttaattaactctataatacctattaaatstagtaagacttctagaatagaaataaaattaacaaattttccagttataaagttttatatatcattgggggaggagatcaaaggtggaattaagtcaagcaataatatttt

SEQ ID NO: 226869 - DNA, 599 bp, Homo sapiens
ttttcagtgccttcttggttgcagacactcagaatggtgccaatttaaagaagtaaatcagtcctgtgaagggagaagtcactgagataagaaaaatgaatagcatgaggatgtgaggcagtgacattcagtcactagcagaccggcagtcattagcatgcaagcctgctattagttctccatgctttatgtgatttccttgaccaagcagggagcctttggaacactagtagcagttaatgtcacacaagttattgtttctttctggaatgccttatattttcagtaccaatgagatccttyactgtccctatgagcctctaaaaatttaaagagaatcgaagaatgcataatttatatatgtcccagaggtaatgaagtgactcaatgatatgtatgaggagatgattttaaattccatgtcttatgcaagaggtgatttttatgtgaaaatggcaagaactggcctcagggataaccagataattatccctctaacagcagggatagatgccaggaggattacagctgaaagctgtggtggctcagctatgcccttgtgaatcacaattgccacaatggaacacatagcaactgat

SEQ ID NO: 226870 - DNA, 624 bp, Homo sapiens
cgtcatcctcctctgctgtggcaggctgcttaaagcataacagaataggagattctgtgcctyttatgaatttaagggaggaagataatgagctagtcatgttcaatttcttctcccaaactcaaaaatcagataaattattccttcccaagaagaagtgaatgagaagccagagactgtatcttctggtggagttgatgttctttcccctttatagaaacatgagaaatgagggaataggcatttatcaacaaaagggattatggaaccatttgcctagggacatcttgcctaaaatatacaatatgtaaaatgttgtcgtgcaaacagtagaatccttcctgctttgcccattagctgattccttctcaccacacctttccatccctcttcccctccacttctcacccagatggccactgagggcttcttgcttaagccacagtttctgtaatgagtctggatgaaaggcactcattcactctgactgactgcagtttgttctatcccgggcttttgcctccactgaaattgctctcgatgtcgtgctttgccctgcacacccctttcttcatattagaaaattcatctcatctgtttagctttcatcccacttaaccatta

SEQ ID NO: 226871 - DNA, 426 bp, Homo sapiens
tcttcttatctctcatctttccagccacagcattgattatgaccactgggatgtagatgattcagggggagcctgaatgcccaggcgctgcattgagcagctccagcaaccaggcagaagggcaggctagagcaagacagagtcacagaaaccaaagcccacacctaaccttgaatgtgcgattgctggtgtgtgtgtgtgtgtgtgtgtgtgtgtgtgtgtgtgtgtgtgtgtgtgtgtgtatttgmatgaatatatatggagtactacaactcagtggtaggtataaaaacacagttaacactgctgaaggacacctgacttctaataggcagtaatagaagaggcttaagaagctttgtggaaacaaatacttagaagagtaactagctccagaccttcagggaatggttgccagtgggaatt

SEQ ID NO: 226872 - DNA, 624 bp, Homo sapiens
cgtcatcctcctctgctgtggcaggctgcttaaagcataacagaataggagattctgtgccttttatgaatttaagggaggaagataatgagctagwcatgttcaatttcttctcccaaactcaaaaatcagataaattattccttcccaagaagaagtgaatgagaagccagagactgtatcttctggtggagttgatgttctttcccctttatagaaacatgagaaatgagggaataggcatttatcaacaaaagggattatggaaccatttgcctagggacatcttgcctaaaatatacaatatgtaaaatgttgtcgtgcaaacagtagaatccttcctgctttgcccattagctgattccttctcaccacacctttccatccctcttcccctccacttctcacccagatggccactgagggcttcttgcttaagccacagtttctgtaatgagtctggatgaaaggcactcattcactctgactgactgcagtttgttctatcccgggcttttgcctccactgaaattgctctcgatgtcgtgctttgccctgcacacccctttcttcatattagaaaattcatctcatctgtttagctttcatcccacttaaccatta

SEQ ID NO: 226873 - DNA, 624 bp, Homo sapiens
cgtcatcctcctctgctgtggcaggctgcttaaagcataacagaataggagattctgtgccttttatgaatttaagggaggaagataatgagctagtcatgttcaatttcttctcccaaactcaaaaatcagataaattattccttcccaagaagaagtgaatgagaagccagagactgtatcttctggtggagttgatgttctttcccctttatagaaacatgagaaatgagggaataggcatttatcaacaaaagggattatggaaccatttgcctagggacatcttgcctaaaatatacaatatgtaaaatgttgtcgtgcaaacagtagaatccttcctgctttgcccattagctgattccttctcaccacacctttccatccctcttcccctccacttctcacccagatggccactgagggcttcttgcttaagccacagtttctgtaatgagtctggatgaaaggcactcattcactctgwctgactgcagtttgttctatcccgggcttttgcctccactgaaattgctctcgatgtcgtgctttgccctgcacacccctttcttcatattagaaaattcatctcatctgtttagctttcatcccacttaaccatta

SEQ ID NO: 226874 - DNA, 668 bp, Homo sapiens
catacgtgagttatttgtctattggaaataaatctatctgaatgttgtattgatctccttgccaggctggcaaaaatcccagggagaggatttaccactgaggatggctctgggtcaaagccttcataatgatatccacttttagaggatcctttggagttttgaaaatgcttacatagaatgagtggtttctggatcactacagcagtgagatattctactttggctttgcgagtcagaactgcagttaattaatgcctttccttcaggctgagagcaagaatgttacaacacctgaggctgcattcaacttcagattagcatatattacacccagtgatcactgaacatgctctaaagatgtgcagggacaatttcaaaccaaatccagtttacracttctttgttttctgtgaaatacattccaaaagcagaaggaaaaggcggccaaagataaatgaccctattttattattctgcatttgttatcagtatatcttaattacttttcttaaagtatgtgtttttgatatcaatctgtgaagtatacttttttggggcttgcttttagagagaatcttgattttaggtaagatgaagctgaaggaaatcatgctagaaagtttagtgtcagtgaaattacgttgtctcatgcatatatgtatgta

SEQ ID NO: 226875 - DNA, 610 bp, Homo sapiens
acaaaatatatttaagacagtgaggggcaatggatgaacctaaaagaaattatgctatgtgaataagccagatacaaaaggacaaatattgtatgattcctcttctgtgaagtgcctggaatagtcaaattcatggggacagaaagtagaaagtcaaattcatggggacagaaagtagaaagtcaaattcatggggacagaaagtagaaaatcaaattcatggggacagaaagtagaccagtggcttgggkgaaggaggaacgggagttattgtttaatagttgcagtttcagtgtggaaagataagttctgatgttagatgatggtgatggttgcacaataatgtgaaagtatttaatgccactcaagtgtatgaaaaatggtttaaatggcaaattttgtattatgtatgttttaccctccacaaaaaaatacaacaaaggacagaactaacctgtttaaaatatgatgaaaactctggagttggaacaaattacttcccctcagtcaccaaagtccatgctatgggattgcagagggggttgcttcatttcctctgttgcatctaggtgccaattacagaggtgacccacatatgctattagacagg

SEQ ID NO: 226876 - DNA, 502 bp, Homo sapiens
gaattcagtgatgccactcagagacactggatgactaggaaggaaatgcagtctggaaaatatagaataagtttggtttaaaatagattgagcctggccagggcacaggctctggagtgggaagaccctgcatgcttgcttcaatccaagaggctctactgcctcccagccttcaggggagtgaagtctttctcacctttgttgctgtaaytaatggatcccttcctccattcaactccttctccattgatccccccaggtttgtatgcagagccagaaacaacttggtaagacagactttcccacagtgtggaggaggcaagattttgccaaagcgtatacattatttttttgcccaatcatgtatagtaggcaatccaggaaacactataaattgctatgttcattacagcacatccactatgtccttggtcttcacctagaccctttttctaccttatctcactaaatttaaacactaacccaagcccatagatattaa

SEQ ID NO: 226877 - DNA, 472 bp, Homo sapiens
tctaactattctcaatggtagggttgcaccgaattattttgtcagccattatcagaagtagaattctcagatgaaagtggcagtcactctgtttaacctcttttccactcasgtatgaagagcctaagagtatgctcatggctcagcatgcaaacagatgtaaacttgaccctagtattttatcttctttcatattagactaaaatattcttatacattttacttagtacttcaacattttaacttttagtttaccttttctgagacagagtcgcgctctgtcaccaggctggagtgcagtggcacgatctcggctcactgaaacttctgcctcccgggttcaagcgattctcctgcctcagcctctcaagtagctgggactacaggcatgcgccaccatgcccagctaatttttgtatttttagtatagacggaatttcaccatcttggccaggagggtctcaatcttgac

SEQ ID NO: 226878 - DNA, 472 bp, Homo sapiens
tctaactattctcaatggtagggttgcaccgaattattttgtcagccattatcagaagtagaattctcagatgaaagtggcagtcactctgtttaacctcttttccactcacgtatgaagagcctaagagtatgctcatggctcagcatgcaaacagatgtaaacttgaccctagtattttatcttctttcatattagactaaaatattcttatacattttacttagtacttcaacattttaacttttagtttaccttttctgagacagagtcgcgctctgtcaccaggctggagtgcagtggcacgatctcggctcactgaaacttctgcctcccrggttcaagcgattctcctgcctcagcctctcaagtagctgggactacaggcatgcgccaccatgcccagctaatttttgtatttttagtatagacggaatttcaccatcttggccaggagggtctcaatcttgac

SEQ ID NO: 226879 - DNA, 611 bp, Homo sapiens
atagattactgtgtgaggttaaagagtaatcattttagaatgggagtaatggagtaatgaaaggtcttataggagagttgatattaaaaattgagatctaggtggggcacggtggatcatgtctgaaatcccagcactctgggatgccaaggcagggagaacacctgatgtcaggaatttgagaccagcctggccaacatggtgaaacctcatctctactaaaaatacaaaaattagccaggcatggtggcacttgcctgtaatcccaactacctgggcrgctgaggcaggagaatcgcttgagtctgggaggtggaggttacaatgagccaagatcacgccactgcactccagtctggggaacagaacgagactctctcaaaaaacagatctgaataagaagagccccagtatgaggatcacagagaagagtactccaggtaaagggaagaatttgtgtaaaagtcctgaagctagaacaagcttagtttgtttccagaaaaagcaaaggctagcatagctggagtataatctacttcccatatgatttaccaattggcgaaagggaacatggtgtaaatgaggcaagagtgacaaaatggaactagatc

SEQ ID NO: 226880 - DNA, 606 bp, Homo sapiens
accgtggcttcaggctttgacaaatatataaaactgtattcatgtgaaaggtaattcctttgtagtagctattttactgcaccttccacattcgtaggtaggctcactcccctctcatggttgattacataaaatgtataatctgaaactgtagatgaagaagaacccttctcttgacacgctcaggtttccaagtgtcagttttttacatggtcacggtaccaaatttgtctttactgtttaataattcgcgaactcatctgggcctgagaaaaataattgattcagtggaattattccttatcattcacccacacccacacccactgcccactcccttcctgctgccgagaagtgcycttccagacatctgggctcagcactttcaccaaatcccttccagtctcttcctcacaaccgttattatcatgataagaacacttaacatgagatctcaacaaaattttcagtgtataatgagtatctataggctaactataggcacaatgctgtacaacaggtctctagattgtcttgcataactgacactttaagccccttgaacagcaacttcccatttccccttcccccaactcctgcaaccac

SEQ ID NO: 226881 - DNA, 630 bp, Homo sapiens
attagttcctctattcttagtacaattgattattcaaattgtgaccgagagctgcagacagtgcccaaggaattttgcattaaacagggaagtggccaccatttctgcttcatgctggtctgttccctcccctaagagggaagctgatcagcaagaacaagctgaatttatatgccttgttatcatcattggtaattagcatttactgagcatcaagggtacactaagttccaagcagaacttaatgctgcccagtgggttgttggtctaatttcagccccagcacctcaacaaagaccaaccaccaaaaacccaaagcaagagggttcagacttgccttatcagaccgagagttgcttgattacacaacaggaaaaagaagtggccagaaaagaacttgaaagaggaaagcagatcttttgaaatgtgtcatttctttccttcacccattgacctcttttgtaggacttttgcaaaggaggggatcattatttacagaaatggttcacagcatggtagagaaaagacccaaaaawtattaaagattacttgttgaatagaggaggttttgatttctgatgaaagtaaaagttctggccaggcacgttggttcacgcctgtaatcccagc

SEQ ID NO: 226882 - DNA, 492 bp, Homo sapiens
gcattaaaatgaaaggaaagacagacaacaggtgggaccctgggyggtcaacactgcccctctttacctgggatgttagtggtgcctcttaagtggtagcaaagcagcagggaaggtttttccttgctgttcctgggactcaacaaattcacttctgtgtctctccagatatgttgtgacaaagttaaaatgggccgaccatattttgcagcctttattatcctagaagcttcagaccaagctgtccctctacaacagagggaagggcctatgtagcctcaccaaagagatcatttcttcctccagcaatccttgagaagacacaaagtatgagttttctgttttgaaaggagataatactgaattgcaggaaaagcaggaacactgggggaaacctaatttcctaggcccttaccaaaaacttctggctatgtactccccgccttaaaagacaagctcattttaaagagacagcccccctcattacgccag

SEQ ID NO: 226883 - DNA, 355 bp, Homo sapiens
aaaccccagcactgaggagttggtattttatcctgcaggccttaaggaacagtgagggcttatcaccagttttaagcaggtttaatgcagataagacttgtggtgtgttttgtaaaggtaatggyggcagcaatggtagattggtagggaaagggtaggactgaaaatgaacctaaaattagtaagcaacagcaatttaaaaaataactaatataggtttgaactaacagagttgcaatgactatggcatagcattaagggataccagagagtatgcagacaatggaagaggttgccaatatcagaaatacagcaagaggaactcctcctataagatagcacgaagattaaacta

SEQ ID NO: 226884 - DNA, 534 bp, Homo sapiens
gatacctagttagctggtaaagcattgcttctgagggtgtctgtgagggtgtttctgaaggagattggcatgtgagtctgtgaaccgagtgggtaagatcccccctcaatgtaggcgggcaccatctgattagttaggggtccaagtggaacaaaaaaatggaggaggggcaaatattttctttctcctgcagatccaggatgtccctctcctgcccttgggcatcagaactccacattctctggcttttcgactccaggattcacacaggtgaccctgggtactcaagccttcagcctcaaactgagaattataccatcagcatccctggttatgaggttttaggctgagccacactatctacctccctggttctccagcttgcagagggcctgtgttggtacttctcagccttcataatgatgtgaaccaattcccccagtaaatcccttctcacatgtatatatgtataggttctatctctctggaaaacyctgactattacagcactttgaatgccaagcacagaggtta

SEQ ID NO: 226885 - DNA, 529 bp, Homo sapiens
gaattctatttaaaaatataaattaaaataaatgtaaacatwaaaatataaaatcctttcatgtgtccaaaagcttatttttctaatgaaatatttttaaaagatctattgaaattaaatgagaaaattcaagttataatgaatgaatatcaaagagttcaatcaattatttaaatggagctggaattttaattttaattttatgaatataaattaaattatttaaatatatctataaaaaataaaactgctactaagcctagtcatcagtgtccctctggttattagtgtgaagaaatatctcactttgtgcatgctatgtctgtatcttcaggtatagtttaagagtataaacttacatatgtctaacttaagacatgaacggtgtatttaataataaagaatattcctcatcttccacatgcaacagttgtgaatattgtactaatttgtgagtgcttccagagccctaatatggaacataaagagaagaagacaacagatgcccagtagttatggggaattatac

SEQ ID NO: 226886 - DNA, 529 bp, Homo sapiens
gaattctatttaaaaatataaattaaaataaatgtaaacattaaaatataaaatcctttcatgtgtccaaaagcttatttttctaatgaaatatttttaaaagatctattgaaattaaatgagaaaattcaagttataatgaatgaatatcaaagagttcaatcaattatttaaatggagctggaattttaattttaattttatgaatataaattaaattatttaaatatatctataaaaaataaaactgctactaagcctagtcatcartgtccctctggttattagtgtgaagaaatatctcactttgtgcatgctatgtctgtatcttcaggtatagtttaagagtataaacttacatatgtctaacttaagacatgaacggtgtatttaataataaagaatattcctcatcttccacatgcaacagttgtgaatattgtactaatttgtgagtgcttccagagccctaatatggaacataaagagaagaagacaacagatgcccagtagttatggggaattatac

SEQ ID NO: 226887 - DNA, 593 bp, Homo sapiens
acaaccataaggtctgactgcctgcggggttggacaaaaagagccatatttttcttcttgcagagagcctataaacagatgtgcaagtagggaagatatcgctaaattcttttcctagcaaggaatattgatattaatactctgggaaaggaattcaatcctggggggaggtctataaatggccgctctgggaatgtctgtccaatgcagttgagataaggactgaaatatgccccggtctcctgcagtaccctctggcttactaggattgggaaactccatcctggcaaatttttggtcagaccagttctctgctctcaaaccctgttttctgttaagatgtttatcaagacagtacgtgcaccactgaacatagacccttatcaggagttctgattttcctcttgtcctgtttcctcagaagcatatgatctttgttctgctttttgccccttgaagcatgtgacctacttcctgttcatacaccccctccccttttgaaatcattaataaaaacttcctggttttaaggctcaggtgagcatcacggtcctaccgatawgtgatgttacccccagcggcccagctgtaaa

SEQ ID NO: 226888 - DNA, 629 bp, Homo sapiens
ctggtttgggcttgatatttcacatttgtaattcaacaccatccagggcacaacttctgaattgggccttccagcgtccccccatcagaactacaaaccaaagccttcctgtcactgctcccacagagtagcacggcttccataagaagacacagcacattgtgctctctgttcacgtaagtcaaatgcccacccctgacactgattagtctagctgctggtaaccatgagagagtactagctctgcatttgcaaatattctttccagagccactgtggttacttctccccatcccacacaaccatgctatgattccactgaactctttcctcttaatgtgtttctccttgtatagacactaaactatgttygtgggtcatccaaatacatcaaattttagccccacatctgtcaggggacacagagttccctgaagcctatcggtttgcacttagccttatccctgtgcagaaaaacagattactttccataaaagtgggatgaattaatggagactgctggttgatcaagctgctggtgtcccatcacccggaagctggatggtaagaaacacactaactcttacaatcccattcaaagaagtcttcaaggaagtgttaattgtgga

SEQ ID NO: 226889 - DNA, 575 bp, Homo sapiens
tggggattgtctgctgctgttcatggaaattttagtgttcacaactccactctttaagatctataagggggattgtttatccctcatggatttcaatttatttctctctcacagaaagggaaataaaacttgctctaaatgtaaacccttccagactgcaataatataaaaggataaatcctttattattttaataactgcactcctttkgtcctctcccatgtgtgtgtgtgtgtgtctgtgtgtgtgtgtgtgtgtgtgtgtgtgtgtacctaatgaaacagaaataatcataaaagggctaatttatggatagattgttcctgaaagatacacataaaacgctattcttctaaaaaaaattatccttactagctatccataatgtataagtttctaccattaaagagttattcctttggtttaagaactatgttaagctataaaattttaatatgaatcaaataatccaaaatttgaaaaacatatttttcatcctacaatccttactgagtacctagagtttatgaggccctggcctgcattaaaggaacacatatatgaagcttagactt

SEQ ID NO: 226890 - DNA, 528 bp, Homo sapiens
tatccttttttttaatgttttccggttttcatatattttttgcatcttgcatgctgctgtaacaaattaataccaacctagtagtttaaaacaacacaaatttattagctaacagttgcagaggtcagaagacttataatcaaggtgcctgtagggctgagttctttttgaagactccaggaaataatccatttccttgcctttccmagcttctagaagccacctgcattcctgagctcatggagctttccttcatcttcaaatccagcagtgaggcctcctttctccctccttctcttcttctccttctccctctcccactctcctactttccgttgttacatctctcactctgatggaggtcctcctgcttccttctcataaagacccttgtgattatactttatccacccagataatcaaaaataatcttcccatcccaacatccttaacttgctcacatctgcaaagttcctttgacaatgtaagataacataccaaaaggctttgggaagtaagatgtgaaca

SEQ ID NO: 226891 - DNA, 541 bp, Homo sapiens
  misc_feature (1)...(541): n = A,T,C or G
tcctcctctgtcccagacatactgtgttccagcacagtcttttgttcacaatgctccccgtagccccaaatgcagccctgagtcttcctctccagtgatctcagtcccagccatgtttcagcacctcccccatgtcccacctcctaatgaagccctcctstgccactgccctcaccacccacagctcttaatatttcccctgtcctatgtcatacacttccttaggttgttgcttatattttcatgtaggcagcctttgttctggaagaccacaggcccctcagaggtaagctctttgtcatatacctgtttgactccccagttcaaacccagaacttttcaccacaacttagcccatggagggggtcccctacatggcatccctgaaagatgtttccccagtctcgccatgaacatttctggtgacaggatgtgcatgacttcatcctgacccactccaatattgaatagctataagttntattaagttcttatttctactaagccaaaatcagcaatatctgctcccaatgctgcatta

SEQ ID NO: 226892 - DNA, 472 bp, Homo sapiens
ccactgcactccagcctgagcaacagagcaaaacactgtctcaaaaaaaaaaaaaaaaaaaaaaaggwgagagagaagaggaaagaaatgtgatgtggcagggttttttgttatttttttaggtttttttttttaagaccataaatatttttccgatagttatactgtttttccttaaaaagcaagcattttataattattatatgcatactgaagcattatttgagaatccttaatacaagttggttatctccattgtttaaattgaaaaacagtaagagaatcaatgtccccatatcatgaggagttagaaactggagttatggttagaattttctatctcactgctttacttcattagtgatgctgccctcatgatagaattcctgctgtagttggttctactttaataatacttggcagctcttgattccttttgctgctaaatatataaacaaaatgttagaagtca

SEQ ID NO: 226893 - DNA, 631 bp, Homo sapiens
ggtgcatcttggaggctgcctaccacagtcctttaagagagaagctaggcctttctgacattctttttcttcttctgattggaaactggatgtggaacttcatcctagattgtagagataatgggaccctaggggttgcatggccacaagatggaatgaatgtatatatttgaatcagattcctctactcaaattacagggtcctggacatcctctagataatagtggtcttatgacattgcctcttgatgtagtagccagatggatttttgaatggcctcccctgaggacaggagtttgttgtgtttataataggatgtatggtatttgatgttggcagacaattctccatgaacattttcacatttctttatgattcatatctttaaagcaagggataatgtctgaatagcaagggacttgaaagctggaaatttagagatttgtctcctgtcgagacatttgcttacattccaaaataataaagataaagatcttccccttctttcctgaagaggatttgtttacatttcaraataaaacataccctctctttttctctctggaaatgaaaataggcatatatacagcagtccctatataagctctgaacctcataagtttagaattc

SEQ ID NO: 226894 - DNA, 542 bp, Homo sapiens
taagttcttatcattcagctcccacttataagtgagaacatgtcgtatttggttttctgttcctgcaatagtttgctaaggttaatggcctccagcttcatccatgttcctgtaaaagacatgatctcattctgttttatggctgcataatattccatagtgtatgtgtaccaygttttctttctgcagtctgtcattgatgggcatttaggttgattctatgtttttgctattgtgaatagtgctgcaaagaacattcatgtggatatgtctttatggtggaatgatttatatttctctggctattaacccagtcatgggattgctgggtcaaatgatagttctgcttttgggtctttgaggaatcgccatactgctttccacaatggctgaactaatttacacttccatcagcaatgtataagtgttcccttttctctacaacctcgccagcatctgttgtttttttactttttaaatagccaacaatctttaaatcttaaaaataaaattctgttctgaatggggcatgctaacatcaa

SEQ ID NO: 226895 - DNA, 542 bp, Homo sapiens
taagttcttatcattcagctcccacttataagtgagaacatgtcgtatttggttttctgttcctgcaatagtttgctaaggttaatggcctccagcttcatccatgttcctgtaaaagacatgatctcattctgttttatggctgcataatattccatagtgtatgtgtaccatrttttctttctgcagtctgtcattgatgggcatttaggttgattctatgtttttgctattgtgaatagtgctgcaaagaacattcatgtggatatgtctttatggtggaatgatttatatttctctggctattaacccagtcatgggattgctgggtcaaatgatagttctgcttttgggtctttgaggaatcgccatactgctttccacaatggctgaactaatttacacttccatcagcaatgtataagtgttcccttttctctacaacctcgccagcatctgttgtttttttactttttaaatagccaacaatctttaaatcttaaaaataaaattctgttctgaatggggcatgctaacatcaa

SEQ ID NO: 226896 - DNA, 578 bp, Homo sapiens
tgtgttaattttacttttagcacagggtaaggaaggcttttcctttaaatgtccttgggaaaacaaataaaaaaaaatattttaacaccagataaggacaagcatagtcagaaagaaaattccagaatatcccacaaagatgaaacgagcacaagaaaacgtggaacagacccagcacatattaggcagtatgtattataactcttcccacgaaagtccagtggaaaagggcctagcacagattatgtctgaaagacaaaattctcattccaccctaatccatgagcctctgggaggcagactgaaggaatttacgcctgccctcttgtgagagtggaaaaaactcaaaccgtttttcctctgctctcacacgacaaccatcaacacagaagatgtctgtgacaaaatgtgtatgagtttctccccatgcaccaagcaaacaatcacttctgcagcagacatcagatgagtgttctccaattcatttctgacactatctagagatactgtmatatcccacagattgaaggcccaatcccacaagactgcccaccacttctgatgccaattacaagctc

SEQ ID NO: 226897 - DNA, 545 bp, Homo sapiens
atgcacacatgatcagcaccttcagaccttcagtgagacccagagcctggaggttgcacaggtctccaaggctctggagaagaccytcctctcctcctcccatcctctagtgcctggcaaactgaaggaagctcctgctgctaaggcagagagtcctcttgaggttcctcagagtttctgctcctcttccattgccgtcacaaccacctcatcaagtgaatctgatgaggcttccagcaatcaagaagaggaagatagtccaagctcctcagaggatacatcagaccccaggaatgtgcccgcagatgctctcgaccagaaagtggcttttttggtgaatttcatgctgcacaagtgtcagatgaaaaagccaataacaaaggcagatatgttgaagattatcatcaaagatgatgagagccacttctctgagatcctcctgagagcttctgagcacctagagatgatatttggccttgatgtggtggaggtggaccccaccacccattgctatggcctcttcatcaaactgggcctcacctatg

SEQ ID NO: 226898 - DNA, 545 bp, Homo sapiens
atgcacacatgatcagcaccttcagaccttcagtgagacccagagcctggaggttgcacaggtctccaaggctctggagaagaccctcctctcctcctcccatcctctagtgcctggcaaactgaaggaagctcctgctgctaaggcagagagtcctcttgaggttcctcagagtttctgctcctcttccattgccgtcacaaccacctcatcaagtgaatctgatgaggcttccagcaatcaagaagaggaagatagtccaagctcctcagaggatacatcagaccccaggaatgtgcccgcagatgctctcgaccagaaagtggcttttttggtgaatttcatgctgcacaagtrtcagatgaaaaagccaataacaaaggcagatatgttgaagattatcatcaaagatgatgagagccacttctctgagatcctcctgagagcttctgagcacctagagatgatatttggccttgatgtggtggaggtggaccccaccacccattgctatggcctcttcatcaaactgggcctcacctatg

SEQ ID NO: 226899 - DNA, 478 bp, Homo sapiens
gacataacttccgaatggaaaaaaatggctgagatttacttttcaaacagcatttggttgatgtgatatttcattttctatagcacttcttgttctcctctgagacatactagcttggaaaacatcactagtggcaggtagggtcagtgatgaaaataatcacggtaataactgcctttcattaaagacccaagatatgccaagcattgygcctgatgcttttcatacattgcattctttccaacagttttttatcacatgcattaacaaactcacccctaggatgaagaatctaagattcataaagcttgggcatgtgcttgagttcacaggtctcatatatgacagacctgagattaaacctgtggtctgaattcttctagagcctactctgttccacttctccatcctaatggccagtcttcttttttcttgattcagttgtcttttcactactacacagtgcatcttgggataa

SEQ ID NO: 226900 - DNA, 478 bp, Homo sapiens
gacataacttccgaatggaaaaaaatggctgagatttacttttcaaacagcatttggttgatgtgatatttcattttctatagcacttcttgttctcctctgagacatactagcttggaaaacatcactagtggcaggtagggtcagtgatgaaaataatcacggtaataactgcctttcattaaagacccaagatatgccaagcattgcrcctgatgcttttcatacattgcattctttccaacagttttttatcacatgcattaacaaactcacccctaggatgaagaatctaagattcataaagcttgggcatgtgcttgagttcacaggtctcatatatgacagacctgagattaaacctgtggtctgaattcttctagagcctactctgttccacttctccatcctaatggccagtcttcttttttcttgattcagttgtcttttcactactacacagtgcatcttgggataa

SEQ ID NO: 226901 - DNA, 603 bp, Homo sapiens
ctgaattcttctagagcctactctgttccacttctccatcctaatggccagtcttcttttttcttgattcagttgtcttttcactactmcacagtgcatcttgggataaaaaggtccttccatctgaagtaccaaaagcaggtgtaaagaagaaaggtgaaagtgataaccaaataaaatttgaggattgtctgtgggcttcatttacatgggatcctgatgcccttagccccaggattcctttaaagttacctttgcccaggggctggcattatccagctctagctctttcctgcattaccacacccttcccctgggttttctctgatgtgcactcttgtccaaatggaaccctgacctgctgactagctgctcactgtgtcctctgaaggctgcaccctgctcccagtggaacaaaccgtccagaatcacctcccttcccccgacttagggtatccaaactcccaggtaggcccattcctcactttaaaacccctctgatagcaatatcttgttcaatgcaaaaggtcattttgacagtgaaatttagacctgttcatcaccactaaacatctccaacacattgtcaaaatgatttgcaaa

SEQ ID NO: 226902 - DNA, 511 bp, Homo sapiens
ggggccaggtggagataattgaatcatgggggcagtttcccccatactgttcttgtggtagtgactaagtctcacaagatctgatggttttataaatgggaattcccctgcacaagctctgccgtctgccatgtaagacrtgcctttgcttctcctttgccttccaccatgatcatgatgcctccccagccatgtggaactgtgagtccattaaacctctttcctttataaattacccagtcttgggtatgtctttattagcagcatgaaaacggactaatacagcagagtttagtgtaggatggagaaaggactagaagagaaggtgggggatctgggtggagggtccagggcaactcaaatgactaggtttggggaatctgaatcaccagtaatagctagatgtggtatggttatgagagtggacaggtctactggatgacaaaaaacagaggcattgcagacacccatcatcctttagaatgtctctgtctactgtcaggcaaagtat

SEQ ID NO: 226903 - DNA, 559 bp, Homo sapiens
cctgccaaattatccataaaaaccatagcctctgagctttctgggagaaggatttgacaattaactcccatccttctgcttggctggccctgtgattattaaactctttccttgctgcaaaagcctgctgttctcagtgccattgcttttgtgggtggaagcaggcaagataaacccatcaggcmattatagaaacagacaaatacttggaaaaagagaaaagtcagagactagagatcctatcagtcctttgggaaaaactaagataataatgaaatccagccagtgaataattggattaacataaagactttaaaaatggagaatttatagtaaaatgatagttggtgaacactggtaaaacagaatgtaaatgttataaacattgacaatttatgaaattttatttttcatacacaaaagtccctggaggtagaaaattgtgaaacgtgagaattacattattacattatctgtcatagtggaacgtcaatcaatactgcataaaactgaaacatagtaacaaaaaaacccataatttataatattactcataatg

SEQ ID NO: 226904 - DNA, 327 bp, Homo sapiens
ctttgtacatatagtagaatttggctgtgactccctcaggtcttggctttgctttggttggtaggctatttattactgattcaatttcagaattcattatcggtctgtttaggaaattatgttcttcctagttcagtattgatagggtgtatgtgtccaggaatttgtccatctcttctgggttttytagtttgtgtgcctacaggtgttcatagcggtttctggtggctatttttatttctgtggggtcagtgataacatcccctttgtcatatctaattgtgttaatttggattttttctcttttcttcttttttaatctagctt

SEQ ID NO: 226905 - DNA, 627 bp, Homo sapiens
attcctttaaactttacctcacttgtgtagtctgtagtaaatgctgtcagtcttctattttgcctcttcacatctgctttactaaatgctgtggggtttgcatggcaaaaactcacagttgcccacttrtctggagaattacccttggccaaatgggaatcactaccaggcatgtcatgcctcctctctccctgcagcctcagtattgactgtagcacattgactgtcccttaactcaaggtgggatgaactgtgtgatgctccaatgtttcaccttggaattgaaacaaagctgttttttaaatgagaccttactcttgcaggctttattgctcctctcttgataccgctcctccaagaaatgaatcaattgagcaagaacccatctcaggctctgattctaagatcacacgagattgtcaacaaaggagatagggatttggggagctaccttaaaaatctgtccatcacacatccttagccaactcagactagttttgcctattgaatacatattgaattttatatatttgagatcatacactatgtgcttattttgtctgttttttctcctctcattctttttcatgcgcatacccgattttctaaatatcactatggtatttt

SEQ ID NO: 226906 - DNA, 627 bp, Homo sapiens
attcctttaaactttacctcacttgtgtagtctgtagtaaatgctgtcagtcttctattttgcctcttcacatctgctttactaaatgctgtggggtttgcatggcaaaaactcacagttgcccacttatctggagaattacccttggccaaatgggaatcactaccaggcatgtcatgcctcctctctccctgcagcctcagtattgactgtagcacattgactgtcccttaactcaaggtgggatgaactgtgtgatgctccaatgtttcaccttggaattgaaacaaagctgttttttaaatgagaccttactcttgcaggctttattgctcctctcttgataccgctcctccaagaaatgaatcaattgagcaagaacccatctcaggctctgattctaagatcacacgagattgtcaacaaaggagatagggatttggggagctaccttaaaaatctgtccatcacacatccttagccaactcagactagttttgcctattgaatayatattgaattttatatatttgagatcatacactatgtgcttattttgtctgttttttctcctctcattctttttcatgcgcatacccgattttctaaatatcactatggtatttt

SEQ ID NO: 226907 - DNA, 398 bp, Homo sapiens
tacaaaaaattaataattatctttatctgagttcttctttccaaaaatgccagaatcttagaacacttgtgattcaattacccattttaatatatatgctattattctgtgttttaattctctctttatgtgaagtcttacaggacacttttgcttttgttttctatactcaaagtttatttatatttacaaaatgtgtactattttctttgctcatcatgccttcctgcatttctgagcttaaatctccacgaaagtggtaagaatggttattttattgtcgatacctgataattccaataactggattcccactgtgactctttctgttgtctgttgttcctcctggtttggcttgtcttgttttgcatctcktcttctttctttgttggatgttg

SEQ ID NO: 226908 - DNA, 419 bp, Homo sapiens
catgccaaagtgaatcattattacacaatcaacagaaatattccacattatyccgacatgggggcatacagctctatctgttcacatatatttatccattgattccttcttttagagaatatttattgaatacttattctgtcctcatgaacgttacattctaaccagagagacgtaatataactaattattccaatctttgttcagttataattatgagaaatactgttataaagaggcacaagatattgtgagcatttatggtccaggccctgtgggtcagggaagggtgaagaaggtgaaaaggaaggcagaagaaactgaagtgtgagggcttcttgatgtagaggaggcaatgagttaggtgttgtcagctacagaagagaagccaaattatattaatgtgtatgagtgaattc

SEQ ID NO: 226909 - DNA, 557 bp, Homo sapiens
ttatctctttaaatattgtctccctctcattttccattcccttggagattctattagatgtgggttggatcttccttatatctctatgtttcttaaccaattttttcatatttttttattttttaaatctcattggtgatttccttggatctgtcatacatttacttctccaattatgtctagtctattatttaacctttaacctttccattgagktttttgtcttttagcaactgcatttttttttttttttttttttttttttttggtgagacaaggtctggttctgtcacccaggctggagtgcagtggcatgatcttggctcactgcaacctccacctcccaggctcaagccatcttcccacctcagcttcccaaatagctgggactgcagtcacctgccaccatacccagctaatttttatattttttgtagagatggggttttgccatgttgcccagtctagtctttaacttgtgagctcaggcaatccacccaccttagcttcccaaagtgctgggattacaggcatgaggcaccacacccagcctagtg

SEQ ID NO: 226910 - DNA, 486 bp, Homo sapiens
ccagctgttatctctttaaatattgtctccctctcattttccattcccttggagattctattagatgtgggttggatcttccttatatctctatgtttcttaaccaattttttcatatttttttattttttaaatctcattggtgatttccttggatctgtcatacatttacttctccaattatgtctagtctattatttaacctttaacctttccattgagttttttgtcttttagcaactgcatttttttttttttttttttttttttttttggtgagacaaggtctggttctgtcacccaggctggagtgcagkggcatgatcttggctcactgcaacctccacctcccaggctcaagccatcttcccacctcagcttcccaaatagctgggactgcagtcacctgccaccatacccagctaatttttatattttttgtagagatggggttttgccatgttgcccagtctagtctttaacttg

SEQ ID NO: 226911 - DNA, 538 bp, Homo sapiens
ctctcattttccattcccttggagattctattagatgtgggttggatcttccttatatctctatgtttcttaaccaattttttcatatttttttattttttaaatctcattggtgatttccttggatctgtcatacatttacttctccaattatgtctagtctattatttaacctttaacctttccattgagttttttgtcttttagcaactgcatttttttttttttttttttttttttttttggtgagacaaggtctggttctgtcacccaggctggagtgcagtggcatgatcttggctcactgcaacctccacctcccaggctcaagccatcttcccacctcagcttcccaaatagctgggactgcagtcacctgccaccatacccagctaatttttatattttttgtagagatggggttttgccatgttgcccagtctrgtctttaacttgtgagctcaggcaatccacccaccttagcttcccaaagtgctgggattacaggcatgaggcaccacacccagcctagtgactg

SEQ ID NO: 226912 - DNA, 589 bp, Homo sapiens
taggctcacaaagaggacacactcataggcaattcccatttttagtggctggagtgttttaacaagagcctcattgtcaagcctcaaccatttgaagctgcttttctgccatgtccctccccaacaccatacccttcaacaaacctgagttttccatatctctacggcctgrtaaagaatggactgctttattttaaatcagaaaggtaaccaaaagaagacaactaaaaataataaggcaaaaataataagatatctaataaaaaccaggaggcagagagaagaggaaagagaggtgtgagggaatataaattccacttcttccttagcaggaagttaacagacactgtcaaatttatgaactcaagcatagactggcagtatattttatactgcaaattctttgacactcccatcaagtggcaggtcgatgtcccctctgcttgagcctgagcaagttttgtgctacaaccaatagtttggcaaaagggaagttattaacttctgataatatgtcataaaaggccatgaagcttccaactggtttacccaaggtgctcgtagcagggtatgatggttaattttatgt

SEQ ID NO: 226913 - DNA, 589 bp, Homo sapiens
taggctcacaaagaggacacactcataggcaattcccatttttagtggctggagtgttttaacaagagcctcattgtcaagcctcaaccatttgaagctgcttttctgccatgtccctccccaacaccatacccttcaacaaacctgagttttccatatctctacggcctggtaaagaatggactgctttattttaaatcagaaaggtaaccaaaagaagacaactaaaaataataaggcaaaaataataagatatctaataaaaaccaggaggcagagagaagaggaaagagaggtgtgarggaatataaattccacttcttccttagcaggaagttaacagacactgtcaaatttatgaactcaagcatagactggcagtatattttatactgcaaattctttgacactcccatcaagtggcaggtcgatgtcccctctgcttgagcctgagcaagttttgtgctacaaccaatagtttggcaaaagggaagttattaacttctgataatatgtcataaaaggccatgaagcttccaactggtttacccaaggtgctcgtagcagggtatgatggttaattttatgt

SEQ ID NO: 226914 - DNA, 589 bp, Homo sapiens
taggctcacaaagaggacacactcataggcaattcccatttttagtggctggagtgttttaacaagagcctcattgtcaagcctcaaccatttgaagctgcttttctgccatgtccctccccaacaccatacccttcaacaaacctgagttttccatatctctacggcctggtaaagaatggactgctttattttaaatcagaaaggtaaccaaaagaagacaactaaaaataataaggcaaaaataataagatatctaataaaaaccaggaggcagagagaagaggaaagagaggtgtgagggaatataaattccacttcttccttagcaggaagttaacagacactgtcaaatttatgaactcaagcatagactggcagtatattttatactgcaaattctttgacactcccatcaagtggcaggtcgatgtcccctctgcttgagcctgagcaagttttgtgctacaaccaatagtttggcaaaagggaagttattaacttctgataatatgtcataaaaggccatgaagcttccaactggtttrcccaaggtgctcgtagcagggtatgatggttaattttatgt

SEQ ID NO: 226915 - DNA, 493 bp, Homo sapiens
caacattaaaaatactgaaagtcttattactaaaagaggaaaatatctttttttcctctgtgtacaaatagctcatctaggctaccacagttaagtctgaagcagggctgtggcgtgggtgaactacagtatttgacatctttatacggattaaggagttgggtcaggaaacctgatgacccaggagagaatgaaaaataagtcacaattattcattataatagtcaccagatcatttgacacattaaatttcagtcttggcttcaacttaagaatatagagttttaggaaaatgttttccatatgcataaaaaacaagaatggagggatgcagaccagcagctattttctgagaacaaaacatcagcccatgtgttgctttacacttttaatctctgttggtacatcagatgccacggaccaagcaatttaagttctggagcccgaaggcagttccaaaccaargcaaggattaaaacctaactcaacccag

SEQ ID NO: 226916 - DNA, 557 bp, Homo sapiens
ctcccatccttgatgcttagaacgaagtctctcccaagaatcacagaactagttataaccaaagactgaaataaagtcctaaggagaatgagatattgagaagcctcttgtttacattgcggcaattgacattttcctgaaattcatacgtctcttcccagactcattaaatgtcctatgttgctaatgtactgcgttctagcaatttgcactgtgtttcctgcactttgcactcatttttccagaaatacttggtaaatattaccattgtttgctatgactgtggccccaytggaactggttcctaggggtgtggtggcagtgagtttggcagtttctctggaagctgcctggttaccctcctaccgactgcccgggggtctggcaagcgggcctgaagcacacatttgaaaccttccacagggccccccaggctgacagccaggtgaacgtggaagcaagagatgcagaaaaatcactgccagccgttttccctgtggccgtgacttgctgggttgctgcccttgtcaccaaaaaaccataaccctaattctaag

SEQ ID NO: 226917 - DNA, 460 bp, Homo sapiens
ccatggatccatcccctgcttcgacagatgtcagctcatggcagtctagccttgggttgcaccctcacctgctccccctgccctgggttattttaaagcaaacccagacagcatttgaccttccccatgggtgttttagtccagatctactgagattgaatattcagtgtggacaatggcaagacctcctgtaaacataagrctctgccccacaatctgcagcagcccacccaggagaccaacccatgacctgcaagagcccacccgggaagccacctgctgtgccaggcttgcaggaagccaggctgctctctcttccaatagtccaggaagctgaactaagtcatccctatagccacctatcccaaatggccagggcatgattaataactggcagtgtctctagtttttgttcctgcttccaacctgagaccagccagagaaagccaaacatgctccc

SEQ ID NO: 226918 - DNA, 519 bp, Homo sapiens
accatcaccccaaactctgcctttatcttcacatggtattctccctgtttgcatgtctgtgaccaaatttccccttttaataagcacatcagtcatattggattaggggacaaccctactccagtataaccttatcttaatgaatgacatctgcaattatcctatttccaacaagtttccgttcagagagaccggaggttaggactctgatatgaattttggggaggataccattcaacccataatagttctataactattaagttgaattattccttcagaagaagtctccagtcccagatgatttcattggtgaagtctatcacacatttaaagaaaaaaaaaaaaaacaccaattctaygtaagctcttctgagaacacttcccatctatgttatgaggtcactattactctgataccaaaaccagacaaaggaagtacaaaaaagagaagtacaaatcattatctctcctgaaaaagtcacagaaatgctcagcaaaatatgagcaaattgaaat

SEQ ID NO: 226919 - DNA, 595 bp, Homo sapiens
gttaggactctgatatgaattttggggaggataccattcaacccataatagttctataactattaagttgaattattccttcagaagaagtctccagtcccagatgatttcattggtgaagtctatcacacatttaaagaaaaaaaaaaaaaacaccaattctatgtaagctcttctgagaacacttcccatctatgttatgaggtcactattactctgataccaaaaccagacaaaggaagtacaaaaaagagaagtacaaatcattatctctcctgaaaaagtcacagaaatgctcagcaaaatatgagcaaattgaaatgtggcaatactcattataaagggttacaacatgaacaagtagatygtaactgaacaagaatatatatttgatctctgtccctgtttcttgacatacaggaactaaaatccttgtagtctctggaagtgatgtgtcttttgtatgctagtaagatggctggtggccagcggctcctagatagcctcaggatgggggctggttaccagggaaaccaatcatgtgatagagggttgaaactttcagctccaccctccgatttctcaggaggggaga

SEQ ID NO: 226920 - DNA, 539 bp, Homo sapiens
gaggagttgggtgatttatcagttcagytgcttcaaacatagaaccttattttaagtatgtgtagattcaagcaattcaagtaagtatgggtctgtctatgctcactcaaccaattccttctcacactggtttcccagcaatagagaagaatcacagttgatgaagcccagaagttaagcatcagcccctgtgctcaagaatggtcacactggaatctctaatatatatacaggcagactcggtctgtggtatcagaagatggcttctattctgtaaatgattctgaacttcaatgcttcacaagaggaacatctgaatgattataactggggtcagcaaactcaactcttgggtcaaatcctgaccacaacctgtttttttgtggtcgattttttgtttctgaggcacggtcttgttgcccagactggagtgcaggggcacaatcatagctcactgccaccttgaccttatgggctcaagcaatcctcccacctcagcctcccaagcaggtgggactacaagcatgtgccaccatgca

SEQ ID NO: 226921 - DNA, 539 bp, Homo sapiens
gaggagttgggtgatttatcagttcagttgcttcaaacatagaaccttattttaagtatgtgyagattcaagcaattcaagtaagtatgggtctgtctatgctcactcaaccaattccttctcacactggtttcccagcaatagagaagaatcacagttgatgaagcccagaagttaagcatcagcccctgtgctcaagaatggtcacactggaatctctaatatatatacaggcagactcggtctgtggtatcagaagatggcttctattctgtaaatgattctgaacttcaatgcttcacaagaggaacatctgaatgattataactggggtcagcaaactcaactcttgggtcaaatcctgaccacaacctgtttttttgtggtcgattttttgtttctgaggcacggtcttgttgcccagactggagtgcaggggcacaatcatagctcactgccaccttgaccttatgggctcaagcaatcctcccacctcagcctcccaagcaggtgggactacaagcatgtgccaccatgca

SEQ ID NO: 226922 - DNA, 539 bp, Homo sapiens
gaggagttgggtgatttatcagttcagttgcttcaaacatagaaccttattttaagtatgtgtagattcaagcaattcaagtaagtatgggtctgyctatgctcactcaaccaattccttctcacactggtttcccagcaatagagaagaatcacagttgatgaagcccagaagttaagcatcagcccctgtgctcaagaatggtcacactggaatctctaatatatatacaggcagactcggtctgtggtatcagaagatggcttctattctgtaaatgattctgaacttcaatgcttcacaagaggaacatctgaatgattataactggggtcagcaaactcaactcttgggtcaaatcctgaccacaacctgtttttttgtggtcgattttttgtttctgaggcacggtcttgttgcccagactggagtgcaggggcacaatcatagctcactgccaccttgaccttatgggctcaagcaatcctcccacctcagcctcccaagcaggtgggactacaagcatgtgccaccatgca

SEQ ID NO: 226923 - DNA, 557 bp, Homo sapiens
attaacatcaaatgagctagagagaggagttgggtgatttatcagttcagttgcttcaaacatagaaccttattttaagtatgtgtagattcaagcaattcaagtaagtatgggtctgtctatgctcactcaaccaattccttctcacactggtttcccagcaatagagaagaatcacagttgatgaagcccagaagttaagcatcagcccctgtgctcaagaatggtcacactggaatctctaatatatatacaggcagactcggtctgtggtrtcagaagatggcttctattctgtaaatgattctgaacttcaatgcttcacaagaggaacatctgaatgattataactggggtcagcaaactcaactcttgggtcaaatcctgaccacaacctgtttttttgtggtcgattttttgtttctgaggcacggtcttgttgcccagactggagtgcaggggcacaatcatagctcactgccaccttgaccttatgggctcaagcaatcctcccacctcagcctcccaagcaggtgggactacaagcatgtgccacc

SEQ ID NO: 226924 - DNA, 471 bp, Homo sapiens
aacaaccaggcatgcacaccagttccaagggtacagcactgtaatacccaaaggctagtaaaaaccaaagtgccccaaaatagagaaaaacttcaatacctcatgatgtgtgcaggggagcagcacacagcagttaaaaggaggtagatgtagatgtcccgatattaatggatgtttcttgaataatgttaaataacaaagcaaactacagaaatgtgtattgtgatcccattttgtctgctattataggcatatgtaaatatgtgttcatgtgtaaacttatatgactgtaaaagagtatccggaaaaataagcagtaaattatttgcagtggataccccatgggatatatakggggtgggtttcactcttcccttgaattcttttgaatggtttaaatttttgtcaatgagtgcaacatagtatttctttaaaacctggtattcacaactatctagtataaaagtacac

SEQ ID NO: 226925 - DNA, 517 bp, Homo sapiens
gtaagagatattgaaaaattaaaggccttgcttcaaaggggaggtggggagacaggctataagtatgtattacaacctgttgtccttattacacacttcaaaattataatacagaagcaaatgggacaagaaagaaatggatgaaggttcagaaagacagagatacaaagccaggtgcagtggcttacacctgtaatcccagcactttgagaggctgaggcaggggggtcacttgaggccaggagcttgagaccagcctggccaacatggtgaaaccccgtctctactaaaaaatagaaaaattagccaartgtggtggtgcatgcttgtaatcagctacttgggagactgaggcaggagaatcacttgaactcaggaggtggagattgcagtgagccaagatggtgccactgcactccagcctgggcaacagagtgagactccatctcaaaaaaaaggacagagatacaaacagcagcactgccgacatgatgccagaagtgcagtaggaaaggcc

SEQ ID NO: 226926 - DNA, 517 bp, Homo sapiens
gtaagagatattgaaaaattaaaggccttgcttcaaaggggaggtggggagacaggctataagtatgtattacaacctgttgtccttattacacacttcaaaattataatacagaagcaaatgggacaagaaagaaatggatgaaggttcagaaagacagagatacaaagccaggtgcagtggcttacacctgtaatcccagcactttgagaggctgaggcaggggggtcacttgaggccaggagcttgagaccagcctggccaacatggtgaaaccccgtctctactaaaaaatagaaaaattagccaaatgtggtggtgcatgcttgtaatcagctacttggkagactgaggcaggagaatcacttgaactcaggaggtggagattgcagtgagccaagatggtgccactgcactccagcctgggcaacagagtgagactccatctcaaaaaaaaggacagagatacaaacagcagcactgccgacatgatgccagaagtgcagtaggaaaggcc

SEQ ID NO: 226927 - DNA, 436 bp, Homo sapiens
catgagaatgattagggtcagcattagactgcactaattttaattcggaagaccaaggtttgcagtgtcatggctgacattaaagaattacttcagtacttattccactcccattctttgttgagtaatggctccaaacaagcaagaaatatttcttctcaatttttgcctcccatagcaaaagagagcctttagtattaaaaatattcccaggaatttaggaactgagtagccagagagggttcttaattcatccattaatattaactgrttttttaatctaatatgcagcatgcataaaacaatattctgggctatagagaaatacagaaatgacctttgaggacaaaagcaggtggcaataaattaacatttagtaaacacgtccagttggccaggctgtaaacaaatttgacatcacagtcaaaatggagtt

SEQ ID NO: 226928 - DNA, 503 bp, Homo sapiens
tcgtaaccaacaaatttcactgtgctttgtgttttaaaaatgctgagggtgaatggggaacgagggwtgaaacagttcagtctactctagtatcacagattcctgcactgaaatgagaaagaaaatggcatagttcctgcttcaagtcattatcctatgcatggataaacaataataaaacaaaaacaaaacataaaaagaaataaaacaaacactaaacactaaactaattaccaggtcagggagcacagattatacttgctataggagttcattaaggagggattccaaaaaccactggcttcttctaagaaaacttcttagaagaggtaggatttgggttgggccttgaacagatatgtaggaaggagaaaaaaggaactttaacacagagagaaggcacagcgtcaggaatgagcacagggggcttatggaatagagagcgaacctgtctgcaaagaggagtggtgtgtgttgaggaacagtgagagtaaggctggctg

SEQ ID NO: 226929 - DNA, 503 bp, Homo sapiens
tcgtaaccaacaaatttcactgtgctttgtgttttaaaaatgctgagggtgaatggggaacgagggttgaaacagttcrgtctactctagtatcacagattcctgcactgaaatgagaaagaaaatggcatagttcctgcttcaagtcattatcctatgcatggataaacaataataaaacaaaaacaaaacataaaaagaaataaaacaaacactaaacactaaactaattaccaggtcagggagcacagattatacttgctataggagttcattaaggagggattccaaaaaccactggcttcttctaagaaaacttcttagaagaggtaggatttgggttgggccttgaacagatatgtaggaaggagaaaaaaggaactttaacacagagagaaggcacagcgtcaggaatgagcacagggggcttatggaatagagagcgaacctgtctgcaaagaggagtggtgtgtgttgaggaacagtgagagtaaggctggctg

SEQ ID NO: 226930 - DNA, 503 bp, Homo sapiens
tcgtaaccaacaaatttcactgtgctttgtgttttaaaaatgctgagggtgaatggggaacgagggttgaaacagttcagtctactctagtatcacagattcctgcactgaaatgagaaagaaaatggcatagttcctgcttcaagtcattatcctatgcatggataaacaataataaaacaaaaacaaaacataaaaagaaataaaacaaacactaaacactaaactaattaccaggtcagggagcacagattatacttgctataggagttcattaaggagggattccaaaaaycactggcttcttctaagaaaacttcttagaagaggtaggatttgggttgggccttgaacagatatgtaggaaggagaaaaaaggaactttaacacagagagaaggcacagcgtcaggaatgagcacagggggcttatggaatagagagcgaacctgtctgcaaagaggagtggtgtgtgttgaggaacagtgagagtaaggctggctg

SEQ ID NO: 226931 - DNA, 590 bp, Homo sapiens
cagtttaaattctaccattttcttaaactaaaggcaatcatgtaagcctataaattcagacagttacacaatcttaatcagttaaaaccagaagtaaatgtagagatcttttagtatagtctcctcattttatagatgtgggaactgaagataaaggagatctcagataagaaagcaggttataccctacattttgacatcctctctaatgcagtcttgaacaatatatttgtttaatactgcaaatatgtctgattatcacagttgtaagctctggaaggcaaggattgtgatttctgtgtctgtattttgcatggtggcttatatatacaaggttgttctaactaagttctgcccattagaactttctatggtggagtaaattttttacattctgagctgtctaggatgttaatcactagccaaatacagctgttgagcatttgaaatgtggttagtgtaactgaggagttggatttttaaagttgtttcattttatttcccttaycttaactaccgttaaattatttaaatttaaatagccatatattgctagtgattagtatattgaatggtgcagctctcactca

SEQ ID NO: 226932 - DNA, 564 bp, Homo sapiens
aaatcagcagagaaaggagcagcccaatagaaaacttgacacagattatggaaagggaattcgtaaagaatgacccataacatgaaaagaaagtcacagatctattgcrtttttttctctatgtgttcttcactgttttctgcttgtaaaatagatcctcctttcaaggttacatttttttctagtttatattttgttttgcctttaatattctaattcacttagcatttatttaaatgtatgcttcactgaggcaggagaatggcgtgaacccaggaggtggagcttgcagtgagctgagatggtgccactgcactccagtctgggcaactgagcgagactctgtctcaaataaataaataaataaataaataaatgtatgcttcaatattagagtccattcaatggtagtctttttcctccttcctagattgtaaactcctgagggcaggaacaatgtgctccttgttttcttagactctgcagcatgtagcaagtgtgtaagatacaatcctcaggttaagagaggtaaagagagataatcagagaagttttgagaggagt

SEQ ID NO: 226933 - DNA, 564 bp, Homo sapiens
aaatcagcagagaaaggagcagcccaatagaaaacttgacacagattatggaaagggaattcgtaaagaatgacccataacatgaaaagaaagtcacagatctattgcgtttttttctctatgtgttcttcactgttttctgcttgtaaaatagatcctcctttcaaggttacatttttttctagtttatattttgttttgcctttaatattctaattcacttagcatttatttaaatgtatgcttcactgaggcaggagaatggcgtgaacccaggaggtggagcttgcagtgagctgagatggtgccactgcactccagyctgggcaactgagcgagactctgtctcaaataaataaataaataaataaataaatgtatgcttcaatattagagtccattcaatggtagtctttttcctccttcctagattgtaaactcctgagggcaggaacaatgtgctccttgttttcttagactctgcagcatgtagcaagtgtgtaagatacaatcctcaggttaagagaggtaaagagagataatcagagaagttttgagaggagt

SEQ ID NO: 226934 - DNA, 543 bp, Homo sapiens
attgtaggtgagaatacagtctcacaggtctcacaggcctgaaatcaaggtcttggcaaagctgtattactttttgtaggccctagaagaggactccttgcttatttgtgctggcagaactcaattccttgtacttgtagaactgaggtcctttttcttactgcctgtagactgaggacttttcccagattctttaccacattccttgtccaatgttttcttttcatctactttgaaagccagcaatagtggattgaattcctctcacattgcagtactcagaaaccaccgttttaccttcttcctctacctatttttaagggctcatgtaattagtacagataatctgattaatttccctatcccaaggtccttaaccttagtcacacctgcgaagtccctttttgctggtaaggtaacatccacagattctggggattagaacctgaacatctttggttgtgatgttggtagcgggggaaatattctgcctaccctactgtgctacttcaatgataycttagctaatatccatcccatttt

SEQ ID NO: 226935 - DNA, 519 bp, Homo sapiens
tagacagaccattgagtctatgattaatagatagagaaaactgatttgttatggcattgcatttagcattctgaacaaatgaaaatagaggcatggtaagagttatgatacagagcacattaaggtcccaatgccacaagacatgcagtaacattactgtaggaaatgatttctaagtctcagagaaagaattgtcatttcctaagtaactgtaatcagttttcraaaatgagacctaggatctcaagcggtgtattctgcacagcagtatattccactatggataaacattaactatactcttgtatcatgctttctcattctttcgtttcattgctttacctgcttaaagctctatagcttctcataaatctttgaatgctataatttactttttagcattgtttttagatcaagcactgtttccttaagaatacatgataaaatttcaaaaatttcaaagtaattctttcaagtccagcattgtttaatgcaatcagaatgttgtgttttttaata

SEQ ID NO: 226936 - DNA, 522 bp, Homo sapiens
aaggaatattataaacaacttaatgatcataaattcactatgtagacrcaatggacaaattccttgaatgatacagactataagagctcattcaagaagagacaaataacctgtcttatgtatgtgaacctgtctcatatatatatatatatatatatatatatatatatatatatatatatatatatatacagtcttatatatatgaaattgaatttctctgtggattccctattgaattccatgacttaaggttatactaatacctattctttgtatactcttccataaaatagaagaatagagagctcttccaaactcataacaaaccaaagatattacaaaaaatttctcattaatatagtcatgataatccttaacaaaatattatcaaattaaattaattcatgagtaataagttatggccaaatgggggttgccataggaataaaggtttggctcaacattttaaaatcaattaataattcatcttatcaacagactagaaaacaagaaccatat

SEQ ID NO: 226937 - DNA, 453 bp, Homo sapiens
tactataaagctacactaatcaataaagtatggtatggtgtacagatacacgtataaatcaatggaatagatagctcatgaatagatcatacacaagcatcaattgactttcagcaagaagcaaaggtaattgaaggggaaaggattatattttccaaaaatgtagtgcaggaacaatcaggcatccatatgagaaataatgacttttcccttgcaccatacaaaaaaacaacttgayatgggtcatagatctaaatttacaagctaaaattctgaacattttgaagaaaacataaggtaaaaatctttgtgagcctgaattaggcaaagatttcatagatgggtcataaaaaactaaagcgatagaaaattgatatattaaacatcattaaaattaaaatcctctgttctccaaaataaactattaagaacatttaaagccaagttaggaaa

SEQ ID NO: 226938 - DNA, 511 bp, Homo sapiens
catcactgcgtagcaaagacatggaaccaacctaggtgcccatccatagtggactggataaagaacatatggtacatatacaccatagaatactatgcagccattaaaaagagctaaatcatgtcctttacagtaacatggatgcagctggaggccataatcctaagcaaatttatgcaggaatagaacacaaaatattgcatgttctcatttacaagtggcagctaaaaattcagaacatatggatataaagatgggaacaatagacactgctgattagatgggagagggaaggaggggagcatagrtagaaaaacttcctattggatgctatgcttactacctgggtgacaggatctgtaccccaaaccttggcatcatgcaatatactcatgtaacaaacctgcacatgcagcccctgaatctaaagtaaaagttgaaattaaaaacaaaacaaaacaaaacaaaacataaaacagacaccagatacaaaggctacatattctatgtc

SEQ ID NO: 226939 - DNA, 482 bp, Homo sapiens
caagcaaaaaagttaattcctacattgtgattttggcaaagaatatctctttaagaatttagtcactaagtgtagaaatttgcatttttttagccttaagagaaagtaatagaagatatatattaaattatcttgtttaatcttcacaaatatatactgaagaaaataccattttttccctattttaaagttgaggaagttgataactgaatagattaggcaacttgacagaagttccatcataaataatggagccaggaatgaaactcagttgtctcattayaatattgaaaaagaagggagtgtaaaacctcaaataacatcagtagctaagggacatggtgtagttacactgatgattaatatcaataatgccattactaagtattacactagtcaatggataaaatattactgctgcatgatagcggcaaaagtgataaaactgtcaagagataagatattcaaagcaaaaagtcact

SEQ ID NO: 226940 - DNA, 612 bp, Homo sapiens
ttttgtcattctaaaaaatgtttaaataatatgtaacaaggccttaaaattcttcacatagccaggcggagtggctcatgcctataatcctagcactttgggaggctgaggtaggtggattacttgagtgcatgagttcaagaccagcccgggcaacatggcaaaaccacatctgtataaaaagtacaaaaattagctgggtgtggtggcatacgcctgtagtcccagatacctgggaggcttaggtaggaggatcaacttaacccaggaggcggaggttgcagtgagccaagattgcaccactgcattytagcctgagcaacagagcaagatgttgtctcaaggaaaaaaaaaaaaaaaaaaatattgttcacctaggttttcaagtgaaaaaaataaccccactaaagaataactagaaaatgcagacaaaagatagaaaagatgttctatgaattattgtctataatagcaaaatgcgggggggcgggcaggagaaacaacctaaatgttcatggggtaaggggggtagttaaaaaaattatggcacatccatagacacaaagcaacttgaggttagaaagaggggaatgtactatatatgtttacaat

SEQ ID NO: 226941 - DNA, 612 bp, Homo sapiens
ttttgtcattctaaaaaatgtttaaataatatgtaacaaggccttaaaattcttcacatagccaggcggagtggctcatgcctataatcctagcactttgggaggctgaggtaggtggattacttgagtgcatgagttcaagaccagcccgggcaacatggcaaaaccacatctgtataaaaagtacaaaaattagctgggtgtggtggcatacgcctgtagtcccagatacctgggaggcttaggtaggaggatcaacttaacccaggaggcggaggttgcagtgagccaagattgcaccactgcattctagcctgagcaacagagcaagatgttgtctcaaggaaaaaaaaaaaaaaaaaaatattkttcacctaggttttcaagtgaaaaaaataaccccactaaagaataactagaaaatgcagacaaaagatagaaaagatgttctatgaattattgtctataatagcaaaatgcgggggggcgggcaggagaaacaacctaaatgttcatggggtaaggggggtagttaaaaaaattatggcacatccatagacacaaagcaacttgaggttagaaagaggggaatgtactatatatgtttacaat

SEQ ID NO: 226942 - DNA, 593 bp, Homo sapiens
aggcctaaaaacactgttgaatatttttctacctggttttctcacaagtaaaatgagaagtccaaactgtgcctcagaactgagatatgaattattagttaatagtttccttaaagctttgaagacgtgctaagtacarttttaatgactctgtgatgatgatgacagaaaacatgccaagagcctaccccattcccttcaacatctaaactgccattaattagacagctgtggtggggttttgagttaactttggcatcaatcaactctcatttcctaggactcttttcagtaggtaatttcctttttccagtagttatttctgaaaaccaacaacacacattgaggaaaaactgacctaatgtcatagtttagggtttggcaactttctatggctcaagaaggaagaaaaaaaacagtttatataaggtcttatacaaggaatgagaaacaagacaagtttctttgttataaaattgataattaaatctatgaaatgtttaataactaatgctccaaaatttcaggaggataatacacataataattataatagtagtagcagtagcagctgtagcagtagtagtaataaa

SEQ ID NO: 226943 - DNA, 593 bp, Homo sapiens
aggcctaaaaacactgttgaatatttttctacctggttttctcacaagtaaaatgagaagtccaaactgtgcctcagaactgagatatgaattattagttaatagtttccttaaagctttgaagacgtgctaagtacaattttaatgactctgtgatgatgatgacagaaaacatgccaagagcctaccccattcccttcaacatctaaactgccattaattagacagctgtggtggggttttgagttaactttggcatcaatcaactctcatttcctaggactcttttcagtaggtaatttcctttttccagtagytatttctgaaaaccaacaacacacattgaggaaaaactgacctaatgtcatagtttagggtttggcaactttctatggctcaagaaggaagaaaaaaaacagtttatataaggtcttatacaaggaatgagaaacaagacaagtttctttgttataaaattgataattaaatctatgaaatgtttaataactaatgctccaaaatttcaggaggataatacacataataattataatagtagtagcagtagcagctgtagcagtagtagtaataaa

SEQ ID NO: 226944 - DNA, 339 bp, Homo sapiens
ccaagaaaagcagacaccaaagacaatgagatgctggaaagaaaaagtaagagagcgttcgcaccctcccttagtatccccaagtstcagtcccacaagaacaagccatacttcaattcttacctgtggattgccttaaaattacctgttgtatccttaaaataaatctctcattttataaaatttaattcattttttaaaagacttgtattccttgcaaccaagtatgtcctgattaagtcagccacagaaacagaaaaccatagttatctgcgaatacacaaaacatcatgattaggacacagagggatttagagtgcaaatcacgagaggaccctc

SEQ ID NO: 226945 - DNA, 565 bp, Homo sapiens
cgagcaagttatgggggaagagtgtgccaagcttcccaccctgtctgggtgtgccacttgcccagcaccttggtgtgtttgccaacccagaagctcttcaaaccccattggtgagaggttttctggaagctctattatattgatcaaatcactgatcactgatcattaactcattctctatcccctctccccttcctggaggttgagtyggggcaacagcactgaaaattccaacccttaattacatggttgattcctctggctaccagctcccatccttaaaacctaagggcccaccaagagtcacctccttagcataaactcaggtatggttgaaaggggcttgctatgaataacacaaaagtgcttctatcactcagaaaattccaagggttttaggaactctgtgccagaaaccaggaacaaataccaaatacaaatttttttttgttatatcacaaaatcacaataatagagaaagatttagctaaaacgttaactctgagttgaaggctaagaaggctccctggaacataaaagcaattataataccatgtaagaacca

SEQ ID NO: 226946 - DNA, 564 bp, Homo sapiens
gagacttgggaccgcctgtgcatcctgctatctcttagcacagtttgcttccttgaggcccaaataccattgtctccatttcctctactgctcaagtagaagcttagcttttccattactttcatttcctctgccgcccaagtaagagctcagtttttttccattgtctccagagtctatagagctgttttgtgcctctatatcyttgcacatacaattccatctgcctggaaatctctttaccctttctcacagtaagaaattctgtttattctccaacactcagatccttggcaaatagccctctcatctccatattctgctgctctttaatctaagatattaattactagcccctgatactagcaacagctcttctgaaactacattattcaaactgtggtccttagaccacagcagcaggagattaaaaatgagaattcatgggccatactcctgaactactgaattattatatcctaaaatggggtctgggaatatgggttttaacaggcttaccaatctttgagaagccctactatgcaataatttaatctcagataa

SEQ ID NO: 226947 - DNA, 564 bp, Homo sapiens
gagacttgggaccgcctgtgcatcctgctatctcttagcacagtttgcttccttgaggcccaaataccattgtctccatttcctctactgctcaagtagaagcttagcttttccattactttcatttcctctgccgcccaagtaagagctcagtttttttccattgtctccagagtctatagagctgttttgtgcctctatatctttgcacatacaattccatctgcctggaaatctctttaccctttctcacagtaagaaattctgtttattctccaacactcagatccttggcaaatagccctctcatctccatattctgctgctctttaatctaagatattaattactagcccctgatactagcaacagctcttctgaaactacattattcaaactgtggtccttagaccacagcagcaggagattaaaaatgagaattcatgggccatactcctgaactactgaattattatatcctaaaatggggtctgggaatatgggttttaacaggcttacsaatctttgagaagccctactatgcaataatttaatctcagataa

SEQ ID NO: 226948 - DNA, 397 bp, Homo sapiens
actgggttttgatccagctgaactggatacaaagatcttagtttcttcatcagcaacctrggcataaatagttaggcatacttcatagtgttatgtaaagattagttgagataatgcatgcaaaatgctgaggataatgcctggtacatagaatatcctcatatatgttagctaaaataacaataataaccttttcttgagacagggtctggctgtgtcactcaggctggagtgcagtggcactatcagggctctctgcagccttgacttcccaggctcaagcaatccacgcacttcagcctcccaaatagctgggaccacaggcatgcaccaccacacctggctatttttttttttctagtagagatggggtctcactatgttacccaggctggtc

SEQ ID NO: 226949 - DNA, 575 bp, Homo sapiens
acaggtagtaatcaaggtcacagacatatatagggagtcarcggaatgagaagagaataaacagtcaaggaggaaagactgatgctatggtttccatgtatgtgtccctccaaaatttacatgttggaacttaaaccacaaggtgaaggtattaagaggtgaggccacctggaggtgattaagccatcagggctctgccctcatgagtgggatgagtgtctctataaaagggcttgagggagtgagttcacctcttctgcccttctgcttcctccaccatgtgaggatacagtttcatctctttggccatgtgaagacacagcaagaggcactatcttggaagcagagagcaagtgctcaccagacatggactctgctgacaccttgattttggacttcctagcctccagaactgttgtctgtaaattatccaatacaaggtaaattttgttataacagcaaataaacgaagacaactagcgaccataaatagcaaaaaagaagagaaataaaaaggaaaagccaaagagatagaaaggaaataagaagagtgggaaaccatattaatacttaag

SEQ ID NO: 226950 - DNA, 575 bp, Homo sapiens
acaggtagtaatcaaggtcacagacatatatagggagtcagcrgaatgagaagagaataaacagtcaaggaggaaagactgatgctatggtttccatgtatgtgtccctccaaaatttacatgttggaacttaaaccacaaggtgaaggtattaagaggtgaggccacctggaggtgattaagccatcagggctctgccctcatgagtgggatgagtgtctctataaaagggcttgagggagtgagttcacctcttctgcccttctgcttcctccaccatgtgaggatacagtttcatctctttggccatgtgaagacacagcaagaggcactatcttggaagcagagagcaagtgctcaccagacatggactctgctgacaccttgattttggacttcctagcctccagaactgttgtctgtaaattatccaatacaaggtaaattttgttataacagcaaataaacgaagacaactagcgaccataaatagcaaaaaagaagagaaataaaaaggaaaagccaaagagatagaaaggaaataagaagagtgggaaaccatattaatacttaag

SEQ ID NO: 226951 - DNA, 575 bp, Homo sapiens
acaggtagtaatcaaggtcacagacatatatagggagtcagcggaatgagaagagaataaacagtcaaggaggaaagactgatgctatggtttccatgtatgtgtccctccaaaatttacatgttggaacttaaaccacaaggtgaaggtattaagaggtgaggccacctggaggtgattaagccatcagggctctgccctcatgagtgggatgagtgtctctataaaagggcttgagggagtgagttcacctcttctgcccttctgcttcctccaccatgtgaggatacagtttcatctctttggccatgtgaagacacagcaagaggcactatcttggaagcagagagcaagtgctcaccagacatggactctgctgacaccttgattttggacttcctagcctccagaactgttgtctgtaaattatccaatacaaggtaaattttgttataacagcaaataaacgaagacaactagcraccataaatagcaaaaaagaagagaaataaaaaggaaaagccaaagagatagaaaggaaataagaagagtgggaaaccatattaatacttaag

SEQ ID NO: 226952 - DNA, 430 bp, Homo sapiens
gaaagaaaaagtagatttctcttctgagaactttgtcagtgaagagttacatcacttcatataatagctggtaagsaaaggattttcaccataatggctcttgaaatattatgccacttttgaggcaatttcttctgctttattacaatgactttttcacctaaaacatacgagacaagtcctctataagaagtgatattttggtattctggttccaggcaaagtcacactccccaatttacttgacacaacagtttctcatcagagtatcatgcaaaacaaatttgaattgcactcatgtttgtataaatccaaatctgttttgaatatgtgaaaaagaggctagggagatggcttcttcttcagtcttttttcacatgtaacaactccacatttctaagcactctcttgtctggactttattttatgc

SEQ ID NO: 226953 - DNA, 478 bp, Homo sapiens
aacctgccctgcacattttgtacttgccagcctcataatggtgtgagtcaatttttgaaaataaattaatctctagacaggtagagagacagacgtaaacatcatataatataygtagggctaggcatggtggctcatgcctgtaatcccaacactttgggaggctgaggtggggggatcacttgagcctagggtttgaaaccagcctgagcaacatagtgagacctcatctctacaaaacataaaaacttaaccgggtatggtggcacacacctatagtcctagctatttgggaggctgaagcgagaagatggcttgagcccaggaggtcaaggctacaatggaaccatgatcatgccagtgcaccccagcctaggcaacagagcgagatcctacctcaaatataaatatatatatatatacacacacacacatgttgtatatacacatatttattggttctgtttttctggaaaag

SEQ ID NO: 226954 - DNA, 481 bp, Homo sapiens
catattcaacaggcgatatttttgccatattctcatcagaacatttgttttcagaagtagacatagcaaatatcattgaagcctcaatgtttctccgtctctcctcagaagtcattagcatccatgttttcataatttatcttccaggtattttatgcataagcaatatttatatttatttgacattgccattaccagtaaaataatagagaattgtttttgaatgatttkattgtttaaataaatgtcatcttactgtacaacaatttgcttttctcactcaactttttgtttttgagtgttatcatgttaatacatgtaactggaaaatgagattttttattatagtttttaagttaagaatagaataactaatttattttacttgaaaaaatctttttacagagtttcttcttaaattttcatcttaaattacacctttctaatttaaatgaacagtttttatatactgattgtatta

SEQ ID NO: 226955 - DNA, 622 bp, Homo sapiens
ctatgagcgaattccacaatatcacaaatcagataaataattcttattttgtgaaaaaggtggagtataaaatgaagagagagaatgtaattggaagtgttactgtaatgctatctcacctgataagtggagtggaagtcctatattcrttttctgaggctgctataaaaaattacaactaggccagggccagtggctcacacttgtaatctcagcactttgggaggccaacgtaagagtatcccttgagcccagaagtttgagatcagcctgggcaacatagggaggctccaactctaaaaaaaaaaaaaactaccaacttggtggcttgatgacttaaacaatagaaatttattctctcatattcttaggggccagaactttaaaatcaagatgtttagggggttggtttcttcgggaggctctaagggcgaatccattccttacccctctcctggtttctgacggctgctggcaattgttggtgccctttggcttacagttgtataactctattctctgactctatcttaacatgtccctggcccctgtgtctccctgtatgctctatgtcaaatctccttctcctttctgttagaagaacactagtctttggatttag

SEQ ID NO: 226956 - DNA, 581 bp, Homo sapiens
cccaacattctgagatctaaatgtaaaataatgaatcttcaagtttagcaaggaaagaaagaaaatctcttcttagaggtaagaaattggatcatgcaacctcaaaaataagtgtatatctataaatataatattaccatttcacatgaattcatttgtaacttgtctacccagcactgttttctgaacgtatccatattgatacacagagacataattcattcatagttaactgaagtagagtagttcaatgtattctataatgtgtttatgcagtcccgcatgatgaacattaatgttctttccaatttttcaccaatataaacacakcaatgaatttgtctaaacatgtttgcttgtatacatgagcaagaatttcacaagtgtatatatacaattagggtagcaaatatacaaagcttttagatactgccaatttgacctccaaagtatttgtaccaacttactttccaaccaacaatatattccacagtttcattttctctacatattcactaaccctttgaatggtatttcattttttaatttcattttccctgaatactaatagagtttccatt

SEQ ID NO: 226957 - DNA, 449 bp, Homo sapiens
gaccaagaatatgataggatctgcagagctgctcctgctaaccaaaatgtctcttgggctcaggagtgccacaggtgaggcctggcaggagattatgctgtcatgccttggggagaagggctgtgagcctgacaccaccgcaccatcagggcagaacgagaaygaacgctgcggcaccgatctggcctacgtgtactttgtctccttcatcttcttctgctccttcttggtgagcaacattgtgcttttgccttgctatgtggcccatcccatcctacccctaaccctctgatacatagaccggagatgtttgcttcagtgtatgtttgtgcctccctcccctcctctctccacacccccaccatgcacacactcacactcacgtccacacccaggttaagaactagatcatcctctggagaactcttggagattagagtgcctgtcag

SEQ ID NO: 226958 - DNA, 580 bp, Homo sapiens
ggctgaaagtttccctataggactcacagaatatttccatacctccaatccaacagaatttggtttcttaaacattgctccagaagaatcccacagataamaagcatcatttgtgacattagcttcctctctgatgattatgatgaggtcaaatgtcctatgttagtctggagccatgggtattgtctatttgtttatttttcatgtatgaatgtgtgcctaaatctaagtgtgatatcaacttccttaagatttttttgcatatctaaatctgcacatgttcctatacacaaaaacatgatcatactgtagcacactgaggacaaaaacagcacagttttactactattcatgtggacataggcaagtcgcttaatttttcagaacactgtttaactgtactctaaaatgcatgagtgaactaaatgtctacaatccaatctcattaacttccattatttttaacttctatataaagaaaaaacaaatagaaaaatatattaatattctacctaagattttattgtcccgtttaaacatttagttttaaacaagcatatttgatttattagagcccgta

SEQ ID NO: 226959 - DNA, 580 bp, Homo sapiens
ggctgaaagtttccctataggactcacagaatatttccatacctccaatccaacagaatttggtttcttaaacattgctccagaagaatcccacagataacaagcatcatttgtgacattagcttcctctctgatgattatgatgaggtcaaatgtcctatgttagtctggagccatgggtattgtctatttgtttatttttcatgtatgaatgtgtgcctaaatctaagtgtgatatcaacttccttaagatttttttgcatatctaaatctgcacatgttcctatacacaaaaacatgatcatactgtagcacactgaggasaaaaacagcacagttttactactattcatgtggacataggcaagtcgcttaatttttcagaacactgtttaactgtactctaaaatgcatgagtgaactaaatgtctacaatccaatctcattaacttccattatttttaacttctatataaagaaaaaacaaatagaaaaatatattaatattctacctaagattttattgtcccgtttaaacatttagttttaaacaagcatatttgatttattagagcccgta

SEQ ID NO: 226960 - DNA, 585 bp, Homo sapiens
ataatttgtgagatgccataattttatagcattaatgtcaacattagaagaggggaaaagcttcaaatcaatgacctcagcttccatcttagataactagagaaagaagarcaaattaaatctgaaggaagcagaagaaagtaaatttcagataagaaattaatgaaatagaaaataggaaaaaaatcaataaaatgaaaagctggttctttgagatgaagtgataaatctcaagcttgacagattaggaaaagaaaaagaaaagatacaaacaagtagtatcaataattagatagaagacattactacatactctagtaatattaaaaacctaataagggaatattataaataaatttatctcaatacatttgaccacttagattaaatttgtagttaaaaccttcccataaagaaaaccccaagctcacatggcttcactggttaagtaatacaaatactatacaaactgttccagaaaattgaaaaggatggactacttcccaagtcattctatgaggttattactaaattgatgttaaaatcaggtaaaaacattacaaaaagtgaactatcaattactat

SEQ ID NO: 226961 - DNA, 585 bp, Homo sapiens
ataatttgtgagatgccataattttatagcattaatgtcaacattagaagaggggaaaagcttcaaatcaatgacctcagcttccatcttagataactagagaaagaagaacaaattaaatctgaaggaagcagaagaaagtaaatttcagataagaaattaatgaaatagaaaataggaaaaaaatcaataaaatgaaaagctggttctttgagatgaagtgataaatctcaagcttgacagattaggaaaagaaaaagaaaagatacaaacaagtagtatcaataattagatagaagacattactacatactctagtaatattaaaaacctaataagggaatattataaataaatttatctcaatacatttgacmacttagattaaatttgtagttaaaaccttcccataaagaaaaccccaagctcacatggcttcactggttaagtaatacaaatactatacaaactgttccagaaaattgaaaaggatggactacttcccaagtcattctatgaggttattactaaattgatgttaaaatcaggtaaaaacattacaaaaagtgaactatcaattactat

SEQ ID NO: 226962 - DNA, 448 bp, Homo sapiens
taccctgcccagatactatacttttygcacggtttttggaatctgtagatcaggagatttcctcatgtgcctacacaatcagggccccaggtttcaagcacaaaactgggtggctgtttgggcagacactgagatagctgtaggagttttttttttcttttgtaccccagtggtgcctggaaccccagcgacagaaccgttcactcccatgaaaagggggatgaagccagggagccaagtggtcttgctcagtgggtcccactcccatggagctcagcaagctaagaaccactggcttaaattctcactgccagcacagcagtctgaagttgacgtgggacgaaccagcttggaggcgggaggggcacccaccgttactgaagctttagtaggcggttttcccctgacagtgctaaggaggctgggaggtgtggactgggcagaattc

SEQ ID NO: 226963 - DNA, 605 bp, Homo sapiens
tactgctaccccaggagatcaggaaaatacaagacagttattacatttagattttgtattggtcaggattctctggaggtatgaaactaataggatatatgtatatacgaaagggagtttattaaggagaattgactcacacgatcacaaggtgtagtcctaccataggccgtctgtctgcaagctgaggagcaaggamgccagtagtggctcagtctgagtcacaaaacctcaaaagtaggaaagccaacagtgcagccttcagtctgtggctgaagatcccagagcccctggcaaaccactggtaaaattctaagagtccaaaatctgaagaacgtggagtatgatgtgcaagcgcaggaagcatccagtaggggagaaagatgaaggctggaagactcagcaggtcagctaattccaccttctgcttgctttttctagccatcctggcaaccaattggatggtacccattcagattgagggttggtctctctctcccagtccattgactcaactgttaatctcctctggcaacaccctcacagacatacccagaaacaacactttgcatccttcaatccagtcaagttgacaatattaccat

SEQ ID NO: 226964 - DNA, 605 bp, Homo sapiens
tactgctaccccaggagatcaggaaaatacaagacagttattacatttagattttgtattggtcaggattctctggaggtatgaaactaataggatatatgtatatacgaaagggagtttattaaggagaattgactcacacgatcacaaggtgtagtcctaccataggccgtctgtctgcaagctgaggagcaaggacgccagtagtggctcagtctgagtcacaaaacctcaaaaktaggaaagccaacagtgcagccttcagtctgtggctgaagatcccagagcccctggcaaaccactggtaaaattctaagagtccaaaatctgaagaacgtggagtatgatgtgcaagcgcaggaagcatccagtaggggagaaagatgaaggctggaagactcagcaggtcagctaattccaccttctgcttgctttttctagccatcctggcaaccaattggatggtacccattcagattgagggttggtctctctctcccagtccattgactcaactgttaatctcctctggcaacaccctcacagacatacccagaaacaacactttgcatccttcaatccagtcaagttgacaatattaccat

SEQ ID NO: 226965 - DNA, 605 bp, Homo sapiens
tactgctaccccaggagatcaggaaaatacaagacagttattacatttagattttgtattggtcaggattctctggaggtatgaaactaataggatatatgtatatacgaaagggagtttattaaggagaattgactcacacgatcacaaggtgtagtcctaccataggccgtctgtctgcaagctgaggagcaaggacgccagtagtggctcagtctgagtcacaaaacctcaaaagtaggaaagccaacagtgcagccttcagtctgtggctgaagatcccagagcccctggcaaaccactggtaaaattctaagagtccaaaatctgaagaacgtggagtmtgatgtgcaagcgcaggaagcatccagtaggggagaaagatgaaggctggaagactcagcaggtcagctaattccaccttctgcttgctttttctagccatcctggcaaccaattggatggtacccattcagattgagggttggtctctctctcccagtccattgactcaactgttaatctcctctggcaacaccctcacagacatacccagaaacaacactttgcatccttcaatccagtcaagttgacaatattaccat

SEQ ID NO: 226966 - DNA, 541 bp, Homo sapiens
ttattttacagattttgtcaatttcttggaatcttagggtggagcagtccagattctccaagctgagcaatttggcttctccacttttttttgaaagtagatttggtgcaaaggtgtttaattaccttccagcctctctaaataggtatgagattccaagctttatgatccttgatagctgtaaccagcttatgtaaagatgctcaaagtagctcccatggcctatttcttttttcttttcttcctgaagtttcccaaatacctctaagctgcaacattcgcatgcccaaggggtatattcaatcctattactgtgctgagtgtgaaacagtccacccacagaatggtctctgccctcagggtgaattaaatgagataccagatgtggtggaatactgcattgagtaggtgcttgataatagttggatgtgaatgtaaaagaactgtcttgyctctacactcattcattattgagaaatagctctaaatattggccagttttcaataagtgtagatattgctaatgaaaccaacacagact

SEQ ID NO: 226967 - DNA, 556 bp, Homo sapiens
gcagagaataagggggataaaataacactgaggatatacagtgatgattttggcaatgaaaacccagtagttggttagaaggaacagagtcaatgattctgaaagagtagtatttttaatccatgtggtaagaataatttgcagacctgggacattaagtaaccttagttgtaagtaaaacttataagcaggtgaaagtcttgctttccttaaattttataaaacctgtcaaaacagttaccatacaatataaattggttacaattcctattgttcctgacacattgaactcccatgatactctgcacaaaataraatgtcgtgaagacttgttgggtgaatacttatatatgtgcatactgttttcccactctcccataattatactctatcagagaagttatacttcatttaaatttttcaatgttaaggagataatatggtatccagatttaattatttccatcatagttaaactttcaggtacttgtgtattacttttttaaatgctcatagaaaaatataataaccttaaaaatatataaagtagtagagt

SEQ ID NO: 226968 - DNA, 606 bp, Homo sapiens
actttggtcatgaaacttgcctgctaactagcctccagtcctctactctcctgttacttcagtctattcacagagtgacaagtgattcttgcaaatctggtcatgtcattcctgtgattaaaattcttctatgacttcactttttacttatccagcattgctaactccttcccttggtttgggaaccccttatctggctcttgccactttctcggatctcatcatgttaaatctcccaygtatttactgtgcaaagtcacgctgatttatttgtttatattttgttgagcatttcaaacttattttttccttagatcctttacacgggttatttcctcctcttagaataattttacgacagatttctgatgactggctttgtctcatctttcaggcctctactcaaatgttctgtcctcaaagtgatccactcattctagtccccaagaccaagcccacctaatgtctctacatactaccatccccatctctattttctcttaggccctactttacctccttcacaaaatttttcacaatgctataactatttttgttcattaggttttctatctatctccccacatcaaaatgtaagctccccac

SEQ ID NO: 226969 - DNA, 571 bp, Homo sapiens
tatttgaaaaaaatgtacctgtatcagttcagttaacaaaggaaataacaggagaatttccttttttttccattttagcacagatcaagtttgattttgcacaacaaataaaactagcaaatcatgtgatagataatactgtaaaacctaaagctctttacctagaatcaaataaagtggcatagctttgagaagagaggctgagggaaaagayactctcataaattgataattggatttccagtattaccctccactacatttgttgaaatattatgaagtttcggataattacaaaatttgtattcttcattaatggccacaaacccttgattgtccatgacatttgacccatgtggttccactgctaatgttacgatatagttctttaatatgcaaggcctgcattcaaaaagatagttaatatagaaaatatatgactgttgaggagaaaacaaatcagtgaacaataacataaagctataaaaaataattatgtatttatttattgaacatttgctagtgagctcagaaatgcaaaatttactgtcatttaaaagtaagttaagta

SEQ ID NO: 226970 - DNA, 571 bp, Homo sapiens
tatttgaaaaaaatgtacctgtatcagttcagttaacaaaggaaataacaggagaatttccttttttttccattttagcacagatcaagtttgattttgcacaacaaataaaactagcaaatcatgtgatagataatactgtaaaacctaaagctctttacctagaatcaaataaagtggcatagctttgagaagagaggctgagggaaaagatactctcataaattgataattggatttccagtattaccctccactacatttgttgaaatattatgaagtttyggataattacaaaatttgtattcttcattaatggccacaaacccttgattgtccatgacatttgacccatgtggttccactgctaatgttacgatatagttctttaatatgcaaggcctgcattcaaaaagatagttaatatagaaaatatatgactgttgaggagaaaacaaatcagtgaacaataacataaagctataaaaaataattatgtatttatttattgaacatttgctagtgagctcagaaatgcaaaatttactgtcatttaaaagtaagttaagta

SEQ ID NO: 226971 - DNA, 571 bp, Homo sapiens
tatttgaaaaaaatgtacctgtatcagttcagttaacaaaggaaataacaggagaatttccttttttttccattttagcacagatcaagtttgattttgcacaacaaataaaactagcaaatcatgtgatagataatactgtaaaacctaaagctctttacctagaatcaaataaagtggcatagctttgagaagagaggctgagggaaaagatactctcataaattgataattggatttccagtattaccctccactacatttgttgaaatattatgaagtttcggataattacaaaatttgtattcttcattaatggccacaaacccttgattgtccatgacatttgacccatgtggttccactgctaatgttacgatatagttctttaatatgcaaggcctgcattcaaaaagatagttaatatagaaaatatatgactgttgaggagaaaacaaatcagtgaacaatarcataaagctataaaaaataattatgtatttatttattgaacatttgctagtgagctcagaaatgcaaaatttactgtcatttaaaagtaagttaagta

SEQ ID NO: 226972 - DNA, 507 bp, Homo sapiens
actcagctaaccccttcccatggagggagtatttaaaccaatgctagccatgacggtattgctgaccgcaggggtctgaaatcaagttcccacaaatcttgccacctagggctacctaccatgcattgygtctctaaataaactagaaagacagtctaggacataaggactgcacacatatgtgagtcttagtgctgaactaggctcagagactatggattgggggaagacacagaatattcagagacaccaactgcaccagctgaggcagccaagagcatgctggcatcacccaacccctaaccccaggcttcacatttcacagctccaaaagaaaccccttccttctgcttgaggagaggagagggaagaacggggaagactttgtcttacattttggatatcagctcagacaaagcaggatagggcaactgtcaaaggaatgaggcccctgctttaagccctagctcccagatgacatttcttgacataccctgaaccaaaagg

SEQ ID NO: 226973 - DNA, 507 bp, Homo sapiens
actcagctaaccccttcccatggagggagtatttaaaccaatgctagccatgacggtattgctgaccgcaggggtctgaaatcaagttcccacaaatcttgccacctagggctacctaccatgcattgcgtctctaaataaactagaaagacagtctaggacataaggactgcacacatatgtgagtcttagtgctgaactaggctcagagactatggaytgggggaagacacagaatattcagagacaccaactgcaccagctgaggcagccaagagcatgctggcatcacccaacccctaaccccaggcttcacatttcacagctccaaaagaaaccccttccttctgcttgaggagaggagagggaagaacggggaagactttgtcttacattttggatatcagctcagacaaagcaggatagggcaactgtcaaaggaatgaggcccctgctttaagccctagctcccagatgacatttcttgacataccctgaaccaaaagg

SEQ ID NO: 226974 - DNA, 492 bp, Homo sapiens
caaagagattgaaataattttaaaaaatcaagcagagattctggagccgaaacatgcaattgacatactgaagaagatattacatgtgctattctttaatagcagaatagatcaagcagaagaaagaattgttgagcttgaagacaagctatgtgaaaatacacagtcagaggagacaaaaaaataaagaattaaaaacaatgaagtatgcctacaggatctaaaaaataacctccaaaaagcaaatctragagtattcaccttaaggaagaagtagagaacgagataggagtagaaagtttattcaaatggataatcacaaagaacttcccaaacctagagaatgagatctatatcaggtactagaaggttataggatgccaagcagatttaacccaaagaagactacctcaactcatttaataatcaaattctctaaggtcaaggataaagagactattctaaaatcagtaagaacaaagaaataaataa

SEQ ID NO: 226975 - DNA, 492 bp, Homo sapiens
caaagagattgaaataattttaaaaaatcaagcagagattctggagccgaaacatgcaattgacatactgaagaagatattacatgtgctattctttaatagcagaatagatcaagcagaagaaagaattgttgagcttgaagacaagctatgtgaaaatacacagtcagaggagacaaaaaaataaagaattaaaaacaatgaagtatgcctacaggatctaaaaaataacctccaaaaagcaaatctaagagtattcaccttaaggaagaagtagagaacgagataggagtagaaagtttattcaaatggataatcacaaagaacttcccaaacctagagaatgagatctatatcargtactagaaggttataggatgccaagcagatttaacccaaagaagactacctcaactcatttaataatcaaattctctaaggtcaaggataaagagactattctaaaatcagtaagaacaaagaaataaataa

SEQ ID NO: 226976 - DNA, 492 bp, Homo sapiens
caaagagattgaaataattttaaaaaatcaagcagagattctggagccgaaacatgcaattgacatactgaagaagatattacatgtgctattctttaatagcagaatagatcaagcagaagaaagaattgttgagcttgaagacaagctatgtgaaaatacacagtcagaggagacaaaaaaataaagaattaaaaacaatgaagtatgcctacaggatctaaaaaataacctccaaaaagcaaatctaagagtattcaccttaaggaagaagtagagaacgagataggagtagaaagtttattcaaatggataatcacaaagaacttcccaaacctagagaatgagatctatatcaggtacwagaaggttataggatgccaagcagatttaacccaaagaagactacctcaactcatttaataatcaaattctctaaggtcaaggataaagagactattctaaaatcagtaagaacaaagaaataaataa

SEQ ID NO: 226977 - DNA, 492 bp, Homo sapiens
caaagagattgaaataattttaaaaaatcaagcagagattctggagccgaaacatgcaattgacatactgaagaagatattacatgtgctattctttaatagcagaatagatcaagcagaagaaagaattgttgagcttgaagacaagctatgtgaaaatacacagtcagaggagacaaaaaaataaagaattaaaaacaatgaagtatgcctacaggatctaaaaaataacctccaaaaagcaaatctaagagtattcaccttaaggaagaagtagagaacgagataggagtagaaagtttattcaaatggataatcacaaagaacttcccaaacctagagaatgagatctatatcaggtactagaaggttatagratgccaagcagatttaacccaaagaagactacctcaactcatttaataatcaaattctctaaggtcaaggataaagagactattctaaaatcagtaagaacaaagaaataaataa

SEQ ID NO: 226978 - DNA, 576 bp, Homo sapiens
gaagtttgctgcaggggggagcccacatggagaacctctgctaggccattgaggaaaggaaatgtggggtcagagccctcacatagagtccccactgaggcactgccttgtggagctgtgagaacaggaccacaatcattgaagccccagaatggtagatccatcaatagcttgcactatgttcctggaaaagccacagacactcaatgccagcccatgaaagcaaccaggagggggacaaagccacatctgcacaaggctgtgggagcccatctcttgcatcagcatgacctgaatgtgagacatggagtcaaaggagataatcttggaaatttaaggtttaatgactgccctrttaaatttcagacttccatcaagcatatagccactttgtttcagccatttcctcccttttggaatggaagcatttacccaatccctgtacccccattgtgtctaggaaataaccaacttgcttttgattttacaggctcataagcagagaggacttgccttgtctcagatgagactttggatatgaacttttgagttaatgctggaataagttaagatttg

SEQ ID NO: 226979 - DNA, 632 bp, Homo sapiens
gttttgtgggagggactcagtaggaagtagttgaataatgggggcagttatccccatgcttctgttctcaggatagtgagtgtgttttcatgagatctaatggttttataagggccttttccctttggtcagaacttctccttcctgtcttcatgcgtttgcttctccctccaccatgattgtaagtttcctaagacctcctcagccatgcagaacagtgagccaattaaacctttttttgtatgtataaattatccagtattgggcagttctttatggcagcatgagaataatacagataggtttaatttcaytagatattattttttaatgccagaatacaaagtgactctatcatgaacaaataaaattaacataaatagaatagattcaatcatgcaaaaagtattttaatggtataatatataaattattttatatatgcagtaatctcaattattcccctcactttgataacaagagattatttttatgaattctactataaacagaaattgagtattcatattggcctaaccttcacactgaggtggagaactccattttcccatgtagcatgttgtttcattttcttcagatatcctgaaaccaccctcacaagtataactcaa

SEQ ID NO: 226980 - DNA, 583 bp, Homo sapiens
ccatgttttcatttttcaccctaagattgagaaaagtgaaattaaaactgaagtcatcagaaggaagaaaacagtaaaatcagtgaagaagagaaaacggacaaagaaacacagagaagggagaaaattagcaaagctaaaatcagtaaaacataataaaactaaaaaatacagagcaaatggagaaaatttaaaggcattacaattggtttttgaaaatattaataaaattgaggacaaagtaaaaacaatgatcaagatttaaaaaatgatcaatattgaggatgaaagagggcagtgacatcagcacgatgccagtataggaagccaccactctcccttccccccacaggcacactgattcaatgacgatactggaaacaattccctttatgagaaatcaagaaaccagttcaaagcctcctgcaatcccctaaagtaaacagagaccratatattttgactgcttctccctcagagaggaaagataagagtgaactaagcatctatcatcctagcttttgggggagcatcctaaagtacaggtttctctcttgcttgtgtaggagcacttaacgatacc

SEQ ID NO: 226981 - DNA, 610 bp, Homo sapiens
tgaaatgttagagatatacctatcagaagacattttattctttgggaaatacaaaatatcattggatatttcattggataaataagtatattggacattaggactcttagaattcaggacccaggaaaactttaggaaaaatctcagtttagagaaaagtgaatgagggtccccaagatcctcccggttagtcatcaaagaggcaaaatgattttaaagattgtacatctcaagtcacactgtaagtgaatcaccttgccttcttgctgatcaagacatgagatttacagtgtgaagtccgtcaatgagatttacgtcctgactcagtccctgactacctcatgycactcagctataccactgatgtagagggcctgtggcccaccaaccctgcagcacattaacttattttggctgatatggaacaaactgaaaaattatcacttttggaagctttaagagagaaaagaatcctatgggagagtagtaagtaggtattttgtcaactttgtttctttgcttctcagtgcctaaaaaggagtaccatacaataacaataatatttatattttatataaaactgttataatttctcagtaattagtactca

SEQ ID NO: 226982 - DNA, 557 bp, Homo sapiens
aaatcatgccttcagaagcaacatgtataaaactaaaggccattattttaggtaaaataattcagattcagaaagtaaaatcccacatattgtcacttataagtgagagctaaataatgcgtacatatggacagagagtgctgagtaacagacattggagactcagaaatgtggcaggatagcaggagggtgaggaataagaaattacctaatgggtgcaatgttcagtatttgggtgatgaatacactaaaagtacagacttcaccactatgcaatatatccatgcaacaaaactgcatttggaccatctaaacatataaaacatagaaattaaaattttaaaaataaaagaacacatcataaaacaccatggaaatatcttaagaagttaaatttataatagaactggggaggatcccgagaataatgatgrtataatatctgtcattgcagagtcaatgataactttatttaactgaaactaaacaacctcaaatgatttctggtctcatcatgtttataattcttgatgactgacatatacatcacaaaaagg

SEQ ID NO: 226983 - DNA, 521 bp, Homo sapiens
aatacacataaagctccctaacttgttyctgtaacacagaatgctttagagtaggaaaagcctgaatggaaagacagactaatatctgagtaattaatgtgaaaaggaaaaaaaattgatgtctgctttgttcctgcaggtttttttttcttatcttctcaaatgaaattatatcagcccccacaaaaagactaaagttagtaaacttttgtgtatcatctggataatcaatacaaacataataaattacttactaatgcacgtgggttgagctgaccatccatctttcccacatgtaattgatcctgatgtttcaccatctgctgttacatatcctagtttgcattgatatttcgctttttcttttaaggcatatgtatactgagattcagaaataaacccattctcaatatctatacttgatttggaacatgtttctaaaagggaagagaataagaaaaagacaagcatatgatcaataacattttataagaatttaagtaatatgtaaatataaaaaa

SEQ ID NO: 226984 - DNA, 446 bp, Homo sapiens
atcatcaaagtgactttatgctgggagaaattttccaaacagcagcatggagaaggagaattcagcagaaagtgccacacttgctgagtagaagaaacaaaactcagtgttcccaaagaagatgagttcactagaatctgcaggaaacagagtgagaaaagaagaaactatggagtgaaagggctctacaaatttccacagcaactccctagattatttggctgaatattgacactctggagagtagagcaaaactccccaagaatggacaaaggatacctatcagatgaagaacactaccagagaacaaaaaggtaaaggattcccagagcacacacacaacacagggagacatttaaatggaatcaatcagagtagaaagactcgtttgaacatctaggtcacgtagtagagacatcaraagcagcttaatattctgaacaaac

SEQ ID NO: 226985 - DNA, 492 bp, Homo sapiens
ttagttttatttcccttctcctagctgcgtttgtctgcccagtatgccatgggccatggagggcctatgtaatggaatgactttccatttatgataggcagagagagattgacacatggggtggtgatttcttggtgtactattacttggacctggaaagtagccatggaaagaagctggtgcagataggtagtcatatttggaacatccagaaagtcagtgacaagtatgactaacagaaaatgcttattttgaatagtttgggggagttactgacagatccatcattctggtaagtttcttccagtggcaataccttgaaacagttgaactacagtgttgctatgcctgtctaggcactgtagtaacaggagaggtataattagaagttttaaaacaagagtgaccatttctaaattttagaatgtccacataatgagtggcatgagactatgttagcatggcatakaatgtctagaaaatctataagtc

SEQ ID NO: 226986 - DNA, 621 bp, Homo sapiens
aaagccagtataatattctggtcaatttgccatagttgtgctggcttctaatatgccatcaacatatataagcaaagtctcatttttcaattggaggtcccaaaactccttagcatgtatttcccccggacggttagtgagtttttgaagccttgatggagcatcatccagcaatactatcatttagctttagtgtcagagtcttcctattcaaaggcaaacacttcatgggactctggactcaggggaatacagatgaaggcatccttcagattcaagactgaacaccagtacaactcactggttaaagtcatgaataatgtataagcatcagktatcaccagataaatggctttgaaaatttgcctagtagccctcaaatcctgtacaaaccaataatcctcagttccatgtttttgtcctggcaagacaggtatgttacatgagaaacaaggaattcttcctgtattgcaggaaggccattagcagaggctaaatgcattgctgtgccttttctctcaaagggcgctgctttagatttggcagcgccactcctgcacaaaacttgacttgtactggagatgcagtttttgttttccctggcctcccatctgcccatgt

SEQ ID NO: 226987 - DNA, 626 bp, Homo sapiens
ttgctaccagggccattgcttctggggtcttcttagtgagcagagctgcaaagtatatgtgtatatacacagaaacatatacacattcagatgcatattatatgtcttgctaaggaaatgtttttataacacattttattaagaatatttcttacgaacttgtggattttaacaaatgtcctcctgacatatatcaagatgactttatccctttgatactgatgtgatgagtgctattcatagatttcctaacaatcgaacacctatgcatgcctaacataaaaccyacctagtcatggtgaactagtcttttaatactttttattcttcagtaattgcattgctagtattttatttagaatttatgctgctatgcatccatattttcaaattatattggttttcagttctatttttggtactttgtcaggttttgatatcaaagttaaggtggttgtactagtttcctggggctgctgtaacaaattattacatattgggtagcctaaaacaatagaaacgtattctctcataattcagaaagccaggagtctgaaataacggtgtcagcagggttggttccttctgggggctcagagggaaaatctgttccatgcctctttcct

SEQ ID NO: 226988 - DNA, 564 bp, Homo sapiens
ctagatccatataaagaaatttaaaaaactgttaaagataactatgtaggtgatctaaaccagtataagtgcatttttcagtataataccatttctattctatttgacttaagactactgcatgatgtgataattataaatctagttgagagtcacacaaatataaagatataatttttgactatattagtataagaaggaaaagttccacaaaggagtaaggtctttgtacactattgaaattaagttggaattaatctgcactagaattttataaattgatatgttaagggtaatcctcaggaaaaacactaagaaaataactaaaaaatacacagtaaaagaaatgacagcaaataaaaattgtacactatgaaatatatatttaacacaatacaaagcagtaatggaggaattgagaaacaaaaataaattacatatagaaaataaatagcaaaatagcagacataaatyttgccttatcaataattacattaaatgtaaacagattaaacattgcaattaaaaggcagagatttgcagaatttagttcaaaactttatc

SEQ ID NO: 226989 - DNA, 592 bp, Homo sapiens
cctcttttgctgtatcccagagattttgatagactgtgtcatattatcattcggttcaaagaacttttaaatttccatcttgatttcattgttgaccctaagatcattcatgatcaggttatttaatttccatgtatttgtatagttttgagcattccttttggagttaatttccaattttactccactgtggtctgagagagtacktgataaaatttcaaattttttaaatttattgagacttgttttgtggactctcatatggtctgtcttggggaataagtatgtatattctgcagttgttggctagaatgctcagtaaatatctgttaagtcaatttgttctagggtgtagtttaagtctattgtttctttgttgactttctgtcttgatgacctatctagtgctgtcagaagagtattgaattcttccactattattgcgttgttgtctatttcatttcttatgtctagtagtaattgctttataaatttgggagctccagtattaggtgcatgtatatttagaattgtaatattttcctcttggactaatccttttatcattatataatgtccctctttttgtttt

SEQ ID NO: 226990 - DNA, 597 bp, Homo sapiens
ttccctgtttctattaggaaattttctattatcttcgtctttgttcctctatatgtcaaattttccccttctggctgcttctaagattttctttttatcattggttttaagccatttgattatgtcttagtatagctttcttcatgctccttgtgctgcagtttgttgagctgcatagatctgtgggtttacagtttacatcaacttttgaaaaattttgccaattttttcttcaaatatttttggacttcccctctctcctctgtctttcgtagacatcaattgaatgtatattttgttgctggcagtttgcaccatcgttyattaattatttatttatgttttagttagttttcactccatggtttattttagagtgttttttactctgtgtgtatttgtgtgtattggtatgtcttcataatcttttcatctccaatgagtcatctgtcattaaccacgtccactaactttttaaaaaatctcagacattttagtgttcatgtctagaagttggtttggatcttttcatatgttccattttgctacttaacatgtttaatctttcctccagcttcttgaacatatagaatatag

SEQ ID NO: 226991 - DNA, 578 bp, Homo sapiens
aaacctgtttttcatagttttgatgatccaggagcctcagcacagtttagttaggtcctctgttcaggttctcacagggctgcaatcaaggtgtcccctggactgcatttccatctgcaggcttggctggggaagaatctgcttccaactcatttaggcctttggcgtaatttactcccttgcagctctatgactcrggatcctcacttcccatggttgttggctggaggccaccctcaggttctagggactgtcctcatttccctacccagtgaccctcattatagcagtttataatacggcctttgcttctttaaggacatcagaaaaatatgtttctaatagtctactaagaaaaattcataaccagtgagacataatcaccttaatgattatttgtatcatgccagttttatgacatgagtgacatctgatcatggttgtgatagaatgtaacctaatcaagcaagcaataatcttttcaccttcagttataagcaagtcacagtttccacctgacaatgaatgggaaggacctatcagataatgtattcaacccctttcctattggtctgccc

SEQ ID NO: 226992 - DNA, 555 bp, Homo sapiens
caagattcaacgtttggcaaaaacatcttgagtgattctaattgtgaacaaaatgaataaatattgtagttcaacattaatttatgtaacaaattaatgaccataccctataccaagcattgctcaggacacatggtaatattataaaataaaaactattttcatggagcttacgttgcataggaagagagttagaaaatatataacatgcataataaataagtatgttattttgctatgaggctataactgttataaaattggagcaggatcaggtccagcgggagttctaagaatcatgtttgaaaatccaaatatgtttgtcaggacagtaatctatgtaaagttaacatatgaataaaatcttkaatacaatgaaaaagttaagcactgaaggtctggaaaaaaatgtgttacatgaaataagaatgagtaaaaagacactaagtttggagggtgcctcgcttggttaaggaacaacacaaaggccagtgtctgaagcaaagttaagttaccaaaagcaagaagagaagagataagctcagagagtgaaga

SEQ ID NO: 226993 - DNA, 552 bp, Homo sapiens
gcaagaagagaagagataagctcagagagtgaagakagtaaggccatggagggacaaacttttataatgattttggcctgactcaacattaaaaggagagctctctggagagtttcaagtaggggagagtttatataccttaaaggaattaatctggctatatgtaatattagatactgtatatatgtgtgtggagtatagggggagccaatgtgagaccagttagcaatgtatcataggagaccaagtgaggcataatgatagcttggatctagaggtaaatggagatggtaaatggagatgctaagatatttggaaatgtaactgtctagaattctccaccaggtgaaattatctttcaaagttgaggtcaaattaagcatattttacataaaaaagctgagaaattagcaacagtagaatttcgctaaagaaatgtctaaaagaaaatagttttatcaagtcatgagggcatactggaattaaggaaggctaggtttctaattaaattagaaaataattaaattatattattttatgttaaaatgcatg

SEQ ID NO: 226994 - DNA, 552 bp, Homo sapiens
gcaagaagagaagagataagctcagagagtgaagatagtaaggccatggagggacaaacttttataatgattttggcctgactcaacattaaaaggagagctctctggagagtttcaagtaggggagagtttatataccttaaaggaattaatctggctatatgtaatattagatactgtatatatgtgtgtggagtatagggggagccaatgtgagaccagttagcaatgtatcataggagaccaagtgaggcataatgatagcttggatctagaggtaaatggagatggtaaatggagatgctaagatatttggaaaygtaactgtctagaattctccaccaggtgaaattatctttcaaagttgaggtcaaattaagcatattttacataaaaaagctgagaaattagcaacagtagaatttcgctaaagaaatgtctaaaagaaaatagttttatcaagtcatgagggcatactggaattaaggaaggctaggtttctaattaaattagaaaataattaaattatattattttatgttaaaatgcatg

SEQ ID NO: 226995 - DNA, 656 bp, Homo sapiens
aataaagtagaaaaactggatatttttggatatcattcagtaaatatgagcttcttctacaatagaaacacaatcatatagactctacatttacagctgccaaatttgggaataaatacgttcccaaatcatgataaaagtaattttattcaatagaagttttctgcttcttcttcttcttatgcataacatatgcccatttcaatttctttcagagatttcaggagaatgaagaaaattaactgcaatgaggaatatgctgtaataggcgctaccagaattaaatgacctgcataatgttttattatcagtctatcagaataaagacaccaagacttagtgacaagtttaaattaacctaatcaacatgtgctaattctgcaactcaaaattattttaatccaagaaacttatcgttaygttgaaaagttttgagagatatagtaagatatttgtatctataattatttctctcatctagtgtaaaaatatagactacactttaacaagacagctaaagggtttattgggagatagattcagcaatttgttttaggaagtatgtattgtgtcactgattatctactgctgctttttttaattattaccttatatttctgttatactttgaaagtggtagatttggtatttattag

SEQ ID NO: 226996 - DNA, 460 bp, Homo sapiens
ttggctgtaagcataaactgtgtattattattgataaattaaccaactaaagtattggtaacctctctatacgggcgatatactagaactctcatttttgattaactgaattaatgctgatgtgtcttcgttaaagcaagcatttaacatcttgattttataaacatgaataaaaaaggacaaattatgaaaaggatartgtgattttttgagaaaataataattacaagaagaaaatctaccaacatgataataaaataactcctttcaatattttctgagactcattaattcaaaaagtgcacactccagtgtaatcacaccatgctgaagtgtcaccaagggaacccatccatgcatccaacagcattcagatgaagaatcaaatattatcacattctaaaaggtaattactctcacctgcaagtgagtaccttccaaggaaaactgctatcctgaa

SEQ ID NO: 226997 - DNA, 598 bp, Homo sapiens
taataactgatggattgattgttatgyatttcattatttttacaacacagagtgcttcatgttagagaaatatcaatgcgtggcttttgtaagccatctctttggatcattctggaatgcttaccctcttttcctgcttagtatgctgctattcagccctcaaattccagcacgtatgccccctcctccataaaaaattcctctaatccccaaagaatgagctaattcctcctgctggctcccccaggactttgaacatgtatctattatagctctttgtgcattgtactttgggttgatgtatctatctaactcccctgcatctgtgagtagggaccatgtcccatttacctctgtgtctcagtagccaggcacagctgttgctcagtgataatagttgaattaacaaatgaaagacttggctatcattaagatcccttccagatctcaaattctttggccagtttaacacataagagctctcaatctttcactcctctctcacttttattcctttcagcgactttttggtgatactgttcaatatggaaatggcacatgtaaaacaaacaacgaacatttactggacactttacta

SEQ ID NO: 226998 - DNA, 564 bp, Homo sapiens
tcttaactatgatgctgtcttacctctcagtaaatgagtatctgattaacaaagaatttttcatgaaataaaatgcagcagaaattactctgtgtgtgtgtgtgcrtgtgtgtgtgtgtgtgtgtgtgtgtgtgtgattgacaaatctccagccactcccttctgaggagagaggatcctgattccccagctcactttgatgctgagcataggaagggtgtggttgtgcatgttggaagcaggagttctggggcagagtggaattgttgtgcttaataaaggagtggcaaggtgggttcccagggaagatcctgagctggagaaaagagccagggaaactgatccctgaagaagagaaagttgaaaaagaagagaagatcatggtggctggaagaggaaacacgtgaaagagaattttaagttgatggctgtggggtaatgtgcaaggtaaactgttccctacctcccccatgaaactgtacattctactttgctcacttatgctcttgtgcaaataccattttggggggagggcggaaggcttgaagaagagaataagaagac

SEQ ID NO: 226999 - DNA, 573 bp, Homo sapiens
gtaaatgagtatctgattaacaaagaatttttcatgaaataaaatgcagcagaaattactctgtgtgtgtgtgtgcgtgtgtgtgtgtgtgtgtgtgtgtgtgtgtgattgacaaatctccagccactcccttctgaggagagaggatcctgattccccagctcactttgatgctgagcataggaagggtgtggttgtgcatgttggaagcaggagttctggggcagagtggaattgttgtgcttaataaaggagtggcaaggtgggttcccagggaagatcctgagctggagaaaagagccagggaaactgatccctgaagaagagaaagttgaaaaagaagagaagatcatggtggctggaagaggaaacacgtgaaagagaattttaagttgatggctgtggggtaatgtgcaaggtaaactgttccctacctcccccatgaaactgtacattctactttgctcacttatgctcttgtgcaaataccattttgrggggagggcggaaggcttgaagaagagaataagaagacaatttttctctgggctaccagaaataaaattttaattt

SEQ ID NO: 227000 - DNA, 578 bp, Homo sapiens
gctgtcttacctctcagtaaatgagtatctgattaacaaagaatttttcatgaaataaaatgcagcagaaattactctgtgtgtgtgtgtgcgtgtgtgtgtgtgtgtgtgtgtgtgtgtgtgattgacaaatctccagccactcccttctgaggagagaggatcctgattccccagctcactttgatgctgagcataggaagggtgtggttgtgcatgttggaagcaggagttctggggcagagtggaattgttgtgcttaataaaggagtggcaaggtgggttcccagggaagatcctgagctggagaaaagagccagggaaactgatccctgaagaagagaaagttgaaaaagaagagaagatcatggtggctggaagaggaaacacgtgaaagagaattttaagttgatggctgtggggtaatgtgcaaggtaaactgttccctacctcccccatgaaactgtacattctactttgctcacttatgctcttgtgcaaataccattttggggggagggcggaagkcttgaagaagagaataagaagacaatttttctctgggctaccagaaataa

SEQ ID NO: 227001 - DNA, 557 bp, Homo sapiens
ggagggctgtttcaggcaggagactggcatggccaaatccatttcagaaagatcatcctggaaagacataaagaaagatttttttaacatcatttacgtgacctgaaggtagagttttgattcatgctctagaaggggtatttattagctctaatggactaagagactaatgggccttgtgtgcccggcgaaggtgctttgacctaccctgtgggtgatggggagcctctgaaggatttgaagcagggcagagacgtggacaaatctgccaaaagaaaacaaacaaacaaacaaaaacatcaacagcatgttatgttaatgtgcgattccatttaggcttttggaattttraaaatagctcaaagaccccgttatgaccttgacagaggccaggttggaaatttctgaatccaatgattctttagctcccctctaagtctgacagtctaagattccataataaggaaggtacagctattgccaaaacgtataatgcatcacagtgtcagactttgggattatctgctgctgggggttttccacaccactgctcccct

SEQ ID NO: 227002 - DNA, 557 bp, Homo sapiens
ggagggctgtttcaggcaggagactggcatggccaaatccatttcagaaagatcatcctggaaagacataaagaaagatttttttaacatcatttacgtgacctgaaggtagagttttgattcatgctctagaaggggtatttattagctctaatggactaagagactaatgggccttgtgtgcccggcgaaggtgctttgacctaccctgtgggtgatggggagcctctgaaggatttgaagcagggcagagacgtggacaaatctgccaaaagaaaacaaacaaacaaacaaaaacatcaacagcatgttatgttaatgtgcgattccatttaggcttttggaattttgaaaatagctcraagaccccgttatgaccttgacagaggccaggttggaaatttctgaatccaatgattctttagctcccctctaagtctgacagtctaagattccataataaggaaggtacagctattgccaaaacgtataatgcatcacagtgtcagactttgggattatctgctgctgggggttttccacaccactgctcccct

SEQ ID NO: 227003 - DNA, 621 bp, Homo sapiens
gttctggctgttaatttcataatttccaacttaaacagccttccagctagacaattgacttgatgggctcctgtatgtatccactgatgtgaaaagtttagcaaccagagcccttttttcggaagggaagatttatttcagtctagatgcagtcagcatccaactttgcagaatttgctagagaggaaaagcctggcttcataaacctggctacctacacatsgttcacaaacagcaggtcaaagtcaaggatgaatccaggacacctaaatcatactgactgatatggtttgactgtgggtccacccaagtcccatcttgaattgtagctcccataattctgcatgtcatgggagggatctggtgggaggtaattgaatcatggatgttggtctttcccatgcttttcttgtgatagtgaataagtctcatgagacctgatggttttataaaggggagatcccccacataagctcttttgcctgctgccatggaagacgtgcctttgcttctcctttgccttctgccatgattgtgaggcctccccagccatgctgaactgtgagtccattaaacctcttccctttataaattacctagtcttgggtatgtctttattag

SEQ ID NO: 227004 - DNA, 621 bp, Homo sapiens
gttctggctgttaatttcataatttccaacttaaacagccttccagctagacaattgacttgatgggctcctgtatgtatccactgatgtgaaaagtttagcaaccagagcccttttttcggaagggaagatttatttcagtctagatgcagtcagcatccaactttgcagaatttgctagagaggaaaagcctggcttcataaacctggctacctacacatggttcacaaacagcaggtcaaagtcaaggatgaatccaggacacctaaatcatactgactgatatggtttgactgtgggyccacccaagtcccatcttgaattgtagctcccataattctgcatgtcatgggagggatctggtgggaggtaattgaatcatggatgttggtctttcccatgcttttcttgtgatagtgaataagtctcatgagacctgatggttttataaaggggagatcccccacataagctcttttgcctgctgccatggaagacgtgcctttgcttctcctttgccttctgccatgattgtgaggcctccccagccatgctgaactgtgagtccattaaacctcttccctttataaattacctagtcttgggtatgtctttattag

SEQ ID NO: 227005 - DNA, 621 bp, Homo sapiens
gttctggctgttaatttcataatttccaacttaaacagccttccagctagacaattgacttgatgggctcctgtatgtatccactgatgtgaaaagtttagcaaccagagcccttttttcggaagggaagatttatttcagtctagatgcagtcagcatccaactttgcagaatttgctagagaggaaaagcctggcttcataaacctggctacctacacatggttcacaaacagcaggtcaaagtcaaggatgaatccaggacacctaaatcatactgactgatatggtttgactgtgggtccacccaagtcccatcttgaattgtagctcccataattcygcatgtcatgggagggatctggtgggaggtaattgaatcatggatgttggtctttcccatgcttttcttgtgatagtgaataagtctcatgagacctgatggttttataaaggggagatcccccacataagctcttttgcctgctgccatggaagacgtgcctttgcttctcctttgccttctgccatgattgtgaggcctccccagccatgctgaactgtgagtccattaaacctcttccctttataaattacctagtcttgggtatgtctttattag

SEQ ID NO: 227006 - DNA, 621 bp, Homo sapiens
gttctggctgttaatttcataatttccaacttaaacagccttccagctagacaattgacttgatgggctcctgtatgtatccactgatgtgaaaagtttagcaaccagagcccttttttcggaagggaagatttatttcagtctagatgcagtcagcatccaactttgcagaatttgctagagaggaaaagcctggcttcataaacctggctacctacacatggttcacaaacagcaggtcaaagtcaaggatgaatccaggacacctaaatcatactgactgatatggtttgactgtgggtccacccaagtcccatcttgaattgtagctcccataattctgcatgtcatgggagggatctggtgggaggtaattgaatcatggatgttggtctttcccatgcttttcttgtgatagtgaataagtctcaygagacctgatggttttataaaggggagatcccccacataagctcttttgcctgctgccatggaagacgtgcctttgcttctcctttgccttctgccatgattgtgaggcctccccagccatgctgaactgtgagtccattaaacctcttccctttataaattacctagtcttgggtatgtctttattag

SEQ ID NO: 227007 - DNA, 507 bp, Homo sapiens
gtacaggtaacctaatgcaataggaatagcttgaacctgattaatatctattccacccactgcattataaacttcttcatcatccctrtatcctctgtgtctcccacttggggaaaaaaactcaatacctgtttgatgaatggatgagtaaatgaacacatgaacaccccaactgacttgttcaggaaatgccataaaatattcctgtacaatccctctctaataattattctttgagcttggactcggtaccatattctctctcaacagccttatttcctccctctgaactgtaatatgatgggtcttcattcaaacagcccattttccagattcctttcattctagttcttacttggacctttgtctaacccttgaaatctaggagggtgccccgtataaaggtaggtatttctaaggtgattttaagcccatggtagattcaaaataaagccactgcaggtcattgttttggggtatttagcatctatgcagtctgatcattga

SEQ ID NO: 227008 - DNA, 507 bp, Homo sapiens
gtacaggtaacctaatgcaataggaatagcttgaacctgattaatatctattccacccactgcattataaacttcttcatcatccctatatcctctgtgtctcccacttggggaaaaaaactcaatacctgtttgatgaatggatgagtaaatgaacacrtgaacaccccaactgacttgttcaggaaatgccataaaatattcctgtacaatccctctctaataattattctttgagcttggactcggtaccatattctctctcaacagccttatttcctccctctgaactgtaatatgatgggtcttcattcaaacagcccattttccagattcctttcattctagttcttacttggacctttgtctaacccttgaaatctaggagggtgccccgtataaaggtaggtatttctaaggtgattttaagcccatggtagattcaaaataaagccactgcaggtcattgttttggggtatttagcatctatgcagtctgatcattga

SEQ ID NO: 227009 - DNA, 512 bp, Homo sapiens
atgcccaaggagcctccaaaacatgtcgtgatatctctgctggtaatacctgcaacagggagacagagaaacacaaaatgctgagttattaaaagacacttgacatggtacaactatgtcagagtagtaaaagctagcttcagctttggagtccaaaaggcctgggttgaaagcccggttctttaatccartttcagttttctcttctgcatggttccaaccaaaataattcttgaaatgagaagagatatgtgttgcacatactagttggtaaaaaatgctagcactctttcctttgaccattctttattgagccaccttgaggcaataattctatctcatccttctgcatttgcccccatgcctacctcagtgcccgggccatgataggcaccattaccctgaacttttgcacatatttgtccctactctaaatgcccctcctcctccctttccatcatctttccaaaggctactcaagcttccattcaaatgtcatttactccatgaac

SEQ ID NO: 227010 - DNA, 512 bp, Homo sapiens
atgcccaaggagcctccaaaacatgtcgtgatatctctgctggtaatacctgcaacagggagacagagaaacacaaaatgctgagttattaaaagacacttgacatggtacaactatgtcagagtagtaaaagctagcttcagctttggagtccaaaaggcctgggttgaaagcccggttctttaatccaatttcagttttctcttctgcatggttccaaccaaaataattcttgaaatgagaagagatatgtgttgcacatactagttggtaaaaaatgctagcactctttcctttgaccattctttattgagccaccttgaggcaataattctatctcatccttctgcatttgcccccatgcctacctcagtgcccgggccatgatrggcaccattaccctgaacttttgcacatatttgtccctactctaaatgcccctcctcctccctttccatcatctttccaaaggctactcaagcttccattcaaatgtcatttactccatgaac

SEQ ID NO: 227011 - DNA, 512 bp, Homo sapiens
atgcccaaggagcctccaaaacatgtcgtgatatctctgctggtaatacctgcaacagggagacagagaaacacaaaatgctgagttattaaaagacacttgacatggtacaactatgtcagagtagtaaaagctagcttcagctttggagtccaaaaggcctgggttgaaagcccggttctttaatccaatttcagttttctcttctgcatggttccaaccaaaataattcttgaaatgagaagagatatgtgttgcacatactagttggtaaaaaatgctagcactctttcctttgaccattctttattgagccaccttgaggcaataattctatctcatccttctgcatttgcccccatgcctacctcagtgcccgggccatgataggcaccattaccctgaacttttgcacatatttgtccctactctaaatgcccctcctcctccctttccatcatctttcyaaaggctactcaagcttccattcaaatgtcatttactccatgaac

SEQ ID NO: 227012 - DNA, 567 bp, Homo sapiens
gggtgattttataaaagaaagaagtttaattgactcacagtgcagcatggctggggaagcctcaggaaactcacaatcatggaagaaggggaagcaaacacatccttcttcccatggcaccaagaagaagtgccaagcaaagggggaaacccccttataaaaccagcagaactcatgagaacccacccattatcatgagaacaacatgagagtaaccacccccatgattaaattacctcccaccagattcctcccatgagacgtggggattttgggaactgcaattcaagatgagatttgggcggggacacagccaaaccatatcaccaagcatagcaaaatgagactgaaytgggaaaactttaacatcctaccctacagacaaaataccaaatgaataagcacagtgagaaatagacagcttagcgggagaacaaaagaaaaggccttagagttttagattactccccactcagtagggtaatgaaaccagggtacaaattataattagtaaaatgaaggaggaagtaatctcactctcctctccatagattagggaaactcaga

SEQ ID NO: 227013 - DNA, 539 bp, Homo sapiens
tagaacaaaaagactgaccttcctctgaataagagaagagtcttcctttcttcaacctggaacattggctttcatttcctgcccttggacaggaaatgttgaatggaaatgtcaactcttccagggtctcaagcctgctggccttcagactggaaatacatcactggctgcccaggttctcgggccttcagacttggactgaaacgaaagcatcagccctcctgggwgtccagcttgccgactgcagatcttgggacttgtcagactccatatcacatgaaccaattcattgtaataaatctctatattatatatacattttatataaagataaataatagagacagatacaggtattctattagttctgtttgtctggagaacctgactaatacacttcccaatgcctcccttagggctattgatgatttttcctttatttaaagtaattaaatatgtttttatagttagtagagcacactgagttaagactgtgttttcaatactttcttgaccactctcaaagtaagaaatacatt

SEQ ID NO: 227014 - DNA, 489 bp, Homo sapiens
taaaccctctgagcggaactccacagctttgtgactgcagccttggccctgcagccccacaggtatccacaaagatagttggcatcttcaaaatacttaataattttcagccacagtgataatgaccatcatagcataaggataacaatagcaggttttaaaaggaccgtatattgaccacaaataggtgtaatcacacactctccrtggtgctgcttaggctatcatttttcctatgcagctctgacccaattgcagaaagagaaattctgcagaacttggagagggtgaaaagtgcccatctcctgggctccctcaccattcctgagctctcagaatgagtctctgttcaccaggagggcgctagtgtgcaggagacagtggccaagcctccaccacagctgccttgccaggttccttgtcaatacctgttgacatttccctgagtaatcattctgggcacctcggtatattttttcatatcgctgg

SEQ ID NO: 227015 - DNA, 489 bp, Homo sapiens
taaaccctctgagcggaactccacagctttgtgactgcagccttggccctgcagccccacaggtatccacaaagatagttggcatcttcaaaatacttaataattttcagccacagtgataatgaccatcatagcataaggataacaatagcaggttttaaaaggaccgtatattgaccacaaataggtgtaatcacacactctccatggtgctgcttaggctatcatttttcctatgcagctctgacccaattgcagaaagagaaattctgcagaacttggagagggtgaaaagtgcccatctcctgggctccctcaccattcctgagctctcagaatgagtctytgttcaccaggagggcgctagtgtgcaggagacagtggccaagcctccaccacagctgccttgccaggttccttgtcaatacctgttgacatttccctgagtaatcattctgggcacctcggtatattttttcatatcgctgg

SEQ ID NO: 227016 - DNA, 601 bp, Homo sapiens
tatgccacacactgttttattttacgggtgcagccatattttttgaaataataataatgataaaatttggatagtgtattgcagtttacaaagcacttttccttatcaactcgtttgatccgatggcaatcctgacaggtaagagttattttatttcctttgatctatttattctcggagtctttccacaacatgaatttttattattattcgctgtgtcacagatgagaaamctgcattgcccaaggtcacacagcttttaaaaataaggttcagagttagagagatctgcactcaaatcctgacactgctaggttgttgctgtatcactttgaacataagacttgggctctctgtggctcatttctttatctacaaaacggggataatgctatctttctgggattttggagggattaaagatgatgtgggcaaaccatctgcacagtacccaacacttaggagaggatcaacaaaagctattataatcaaaataataataatatgaaatatttgagaagggcagggtttgagccaggactttatgtcaaacctcagttctctgttcacttggttggagagcaattagaatcttctctct

SEQ ID NO: 227017 - DNA, 601 bp, Homo sapiens
tatgccacacactgttttattttacgggtgcagccatattttttgaaataataataatgataaaatttggatagtgtattgcagtttacaaagcacttttccttatcaactcgtttgatccgatggcaatcctgacaggtaagagttattttatttcctttgatctatttattctcggagtctttccacaacatgaatttttattattattcgctgtgtcacagatgagaaaactgcattgcccaaggtcacacagcttttaaaaataaggttcagagttagagagatctgcactcaaatcctgacactgctaggttgttgctgtatcactttgaacataagacttgggctctctgtggctcatttctttatctacaaaacggggataatgctatctttctgggattttggagggattaaagatgatgtgggcaaaccatctgcacagtacccaacrcttaggagaggatcaacaaaagctattataatcaaaataataataatatgaaatatttgagaagggcagggtttgagccaggactttatgtcaaacctcagttctctgttcacttggttggagagcaattagaatcttctctct

SEQ ID NO: 227018 - DNA, 601 bp, Homo sapiens
tatgccacacactgttttattttacgggtgcagccatattttttgaaataataataatgataaaatttggatagtgtattgcagtttacaaagcacttttccttatcaactcgtttgatccgatggcaatcctgacaggtaagagttattttatttcctttgatctatttattctcggagtctttccacaacatgaatttttattattattcgctgtgtcacagatgagaaaactgcattgcccaaggtcacacagcttttaaaaataaggttcagagttagagagatctgcactcaaatcctgacactgctaggttgttgctgtatcactttgaacataagacttgggctctctgtggctcatttctttatctacaaaacggggataatgctatctttctgggattttggagggattaaagatgatgtgggcaaaccatctgcacagtacccaacacttaggagaggatcaacaaaagctattataatcaaaataataataatatsaaatatttgagaagggcagggtttgagccaggactttatgtcaaacctcagttctctgttcacttggttggagagcaattagaatcttctctct

SEQ ID NO: 227019 - DNA, 592 bp, Homo sapiens
agtatttgctggtatttgtgacactgtgttgtaattccttggccatctgtccttccttctccctccacctgtgcattccttcaaggagaggaccatgttctcattcattttgatatctctagcacttgtagggatgtccttctattatgatattagcttgctgatgggaatgttaatawccctgtcaacatagcttttattcatttattcactgattcatttattattcctagactcagaatattttacaacattgtaaagggcattacatgtatcatccagcctcttcatttgttcagaaattgaggctcagagaggtaaagttaacttacctggtgctacccaccttagcagaagtagagttggtagttaactccatgacctctccttcagcccagtgtctttctctcagtcctacatgttcaggagacctatccagctcacctactatgtttcaggcactgtgctatgtgtacagaaaggatgttaatatgatatggttcctgcctccaagcgatttacagtctagtaggaaagcagagaccttttccacatactctaaaccacctatgaagatttatgcctaactgat

SEQ ID NO: 227020 - DNA, 592 bp, Homo sapiens
agtatttgctggtatttgtgacactgtgttgtaattccttggccatctgtccttccttctccctccacctgtgcattccttcaaggagaggaccatgttctcattcattttgatatctctagcacttgtagggatgtccttctattatgatattagcttgctgatgggaatgttaataaccctgtcaacatagcttttattcatttattcactgattcatttattattcctagactcagaatattttacaacattgtaaagggcattacatgtatcwtccagcctcttcatttgttcagaaattgaggctcagagaggtaaagttaacttacctggtgctacccaccttagcagaagtagagttggtagttaactccatgacctctccttcagcccagtgtctttctctcagtcctacatgttcaggagacctatccagctcacctactatgtttcaggcactgtgctatgtgtacagaaaggatgttaatatgatatggttcctgcctccaagcgatttacagtctagtaggaaagcagagaccttttccacatactctaaaccacctatgaagatttatgcctaactgat

SEQ ID NO: 227021 - DNA, 470 bp, Homo sapiens
tagttgattgcataaatattttttgctttgtttagtttagccaaaacatacacaaaagagagaaatcaaactactcatgacagccataatacatgctaccacatttctaatttcgattgcaaaactactcttcagaaactcacattaaactgctccctggtgcattgctaaatttgcgtgggcagttttatttactgcagtcccccaacacgttgrctcctctcctaggactagaaagttacaaagaaactttctaagacggcactggtcagcagaagtctacttctaagttgcttaaatatttcaaggtaatgcagcaatgcaataaaatgaggtaatagagatgagaacaatcccagcaactccgcgaacagcagaggctgctcaagccaagaagctccgcattttcccccaactaattttataccctgctcctgggcagtactaatttaagccattacccacgctcc

SEQ ID NO: 227022 - DNA, 470 bp, Homo sapiens
tagttgattgcataaatattttttgctttgtttagtttagccaaaacatacacaaaagagagaaatcaaactactcatgacagccataatacatgctaccacatttctaatttcgattgcaaaactactcttcagaaactcacattaaactgctccctggtgcattgctaaatttgcgtgggcagttttatttactgcagtcccccaacacgttgactcctctcctaggactagaaagttacaaagaaactttctaagacggcactggtcagcagaagtctacttctaagttgcttaaatatttcaaggtaatgcagcaatgcaataaaatgaggtaatagagatgagaacaatcccagcaactccgcgaacagcagaggctgctcaagccaagaagctccgcattttcccccaactaatkttataccctgctcctgggcagtactaatttaagccattacccacgctcc

SEQ ID NO: 227023 - DNA, 608 bp, Homo sapiens
gatgaattagtaagaacatatcaaacaagacaaagaggctcattgttaatgtgcgcaggtgaggctttgcaggctgcttgtgggtgagggtaaaagttttcttaacctcaagcctggattctgaccatagaaacattcctcctgagtgagtagtgcttctagagtgctttccttcaaggacctctccggcatctggctcaatcacatgccatctttttctcctttacatctgcttccttgccccactttggcacccagctaagtgtgggcagatggtgtggccttggggactccagaagggccttggtgtccttcagtagcatggagtgtatagcagggtctgcccgtgaaggaccagggaggtgaagggccttacaggactcatgtggaatgcttgtgaatgcattatttccaaatatccctgagtatttgcaagcgtttttatatacctttacttccattttgctttgacaacaccattaccattcsttgacgatgaggaactgatcggaaataaacctaattgttatttgcttaacagtttcaagacctgcaacttgcagcagtctcctgacggtctctgtacattttctctgtccccttctaat

SEQ ID NO: 227024 - DNA, 602 bp, Homo sapiens
gatgtctcaaacagcttgaacaattccaaaccagaggatatttgctagggaaaatataaattctgtactctggctgaaacaaccaattgtacaagagcaggatggaagaatatttagcctggcaataatatgtgtgacaagagtyagattttggttacaaatgtcaccagtctacaatgtgacatgtccacactgagaaaatagtaatgatgggcatgaagagttctaaaaaagttctaatcatcctgtctccttctgtcatgggcctactacaaaaggagtgttcattttggtaaagatgttaagataaaaattagctggcatgagtccagaggaaaacatctaggctgaggagatattttggttgatgattttagggttactaaacccagaaagagaaaattaaggactgtcttcaaatattttgaagataatcagtagcctagcacttaggcttatgttgtatggagtgatgaaaaatgggtagacatttctggaaagcaaatttcagctcaggttctcaatgaagcctccaatgatgggagcttctttgaagtggaaagggcaaataataagtttcctgtccgagaagtgaggatgca

SEQ ID NO: 227025 - DNA, 594 bp, Homo sapiens
agttaccactactactagtagggttagttcaggtttttttgtttgttcgtttatcagtattttccaaatatttcagtttttatttcaaagttaaaaaatgataccttaaacatttaataataggccctgagtagctgttctttcagggaagctgaagccctggagaagatcactggcattctgaaattcaggctgtgctctaattatttgaaagttcttaacacatatatggagaaactcagccagtctataaatatatgtagaagcccttcttaattcaaaagcatgacattaaacatttcagggaaaaaaacataaactcccaaagagtctccatctcattagagaattagatacgctcacrttaaattataactcacaaagcagggtgcactagtgtaacaatgaattcaaggagagtgatttgagccaggctgaggacaactggaagacttcaaaaggcaggataaagtcactttctgctgcagagacaatttaattaaaaagaagctcctttctacccctcctccaggtaatagagaattcattgtattctgagaaattgaagatcttacaagaaggcagattgcatga

SEQ ID NO: 227026 - DNA, 594 bp, Homo sapiens
agttaccactactactagtagggttagttcaggtttttttgtttgttcgtttatcagtattttccaaatatttcagtttttatttcaaagttaaaaaatgataccttaaacatttaataataggccctgagtagctgttctttcagggaagctgaagccctggagaagatcactggcattctgaaattcaggctgtgctctaattatttgaaagttcttaacacatatatggagaaactcagccagtctataaatatatgtagaagcccttcttaattcaaaagcatgacattaaacatttcagggaaaaaaacataaactcccaaagagtctccatctcattagagaattagatacgctcacgttaaattataactcacaawgcagggtgcactagtgtaacaatgaattcaaggagagtgatttgagccaggctgaggacaactggaagacttcaaaaggcaggataaagtcactttctgctgcagagacaatttaattaaaaagaagctcctttctacccctcctccaggtaatagagaattcattgtattctgagaaattgaagatcttacaagaaggcagattgcatga

SEQ ID NO: 227027 - DNA, 565 bp, Homo sapiens
gcatgaccttccatttgcaatatattctttcaggaaagggagtaattaggattgcctrgaaggggctgctttatttcattgaggagataactttaaacaggcttcctcactacatgcaccacactcaacaagcaaactccctacactggactcctatagggcctaattctcacctcagccccagctttacccagattctctaacctgttattattaagctacttagctgccttccacccttcatccctagaccccaaacaccctagtagactgtgaattccttttattctttcatgtattcattcaccatttttttcaacacatgctatgtgctagcaacacaaagataaataaaacaccccccatccccataaagttgatagtctagcagcagtaactgacttattagtagatatttacagctcaatggccgacacatgcatggagcatccaagagaaggaagaggatgtgcctaaccagcgtgaagccaggcaacagggtttggaggacattgcaagaagagtgggtggcaggaataaaggcactaaccatggtgaaaaggga

SEQ ID NO: 227028 - DNA, 565 bp, Homo sapiens
gcatgaccttccatttgcaatatattctttcaggaaagggagtaattaggattgcctagaaggggctgctttatttcattgaggagataactttaaacaggcttcctcacyacatgcaccacactcaacaagcaaactccctacactggactcctatagggcctaattctcacctcagccccagctttacccagattctctaacctgttattattaagctacttagctgccttccacccttcatccctagaccccaaacaccctagtagactgtgaattccttttattctttcatgtattcattcaccatttttttcaacacatgctatgtgctagcaacacaaagataaataaaacaccccccatccccataaagttgatagtctagcagcagtaactgacttattagtagatatttacagctcaatggccgacacatgcatggagcatccaagagaaggaagaggatgtgcctaaccagcgtgaagccaggcaacagggtttggaggacattgcaagaagagtgggtggcaggaataaaggcactaaccatggtgaaaaggga

SEQ ID NO: 227029 - DNA, 603 bp, Homo sapiens
agtggtttgaatggttactttagacagtggtgtcaccaacagaggtgaaatatataacaggtacaagaatgtaatatataatgaggcatagtgggtgctggggatgagataataaattcagtttggaggcctatgagacatccatgtggaagtatccaacatagagctgaataatgaaggcaaaaggagaagagttggattaaagatatataggggtcattagcatcagggcataggtaaacccatgatattggataaaatcctctttcatayagaaaccatcatattcatccttaaacccttagtcccctgcagagggctttgcacaatgtatatgctcaataaatgtctgttaaataaatggctaaaaacagatccagaattagttgtatcctttatttaaattaaaattgcttcaatggttacttgtgtaatgctaatccaggttttctcaaatcagagtctcaaatacagggtatgtacttttgtttcacatgaaatacaaccagtttcatacacaaataattacaaactcttacatgtaacatggaagcagaacagaattctaagactcataatatcatgtcattaaaaagcaatatt

SEQ ID NO: 227030 - DNA, 607 bp, Homo sapiens
gttatcatggcctgaacctgaatatcagattcccttaataaacagaaacagtgaatgtgttcctgcttcttcctgatcaggaaggrggtctgcagtcctctggtcttgtttgtttcgtagcatttcattttgtattcagcatttctttgagcgccctctttgcttcttggaaccttgccttactaccattgccattctcataggtccctgctctactggacctaaaatggtagggaagaaaggaagaggaggggagtaagaagagaggaaaaggtgagctctattctccgtcagcgtgtctgtggctgtattgattcggaagtttaaaatctaaactccctgtctacagtcttggcctgtcttgaaggttgtgagtcaacttagtgaatacatgcaaggtacttttaggctgtctggctgggagataagttgggtccaaagaaagtaatagttcaacatagcattctccttagatggcagcctccaggcaagaagaaaagcccatggctttgcctggaagttcttgtgcaggtccagcgtgtcaccaactggtgcttcagacactgagatgaggcaaatacttagcattcagtttcttaacaaagtg

SEQ ID NO: 227031 - DNA, 474 bp, Homo sapiens
ttttcactcatggaatcctcaccatcaagaaataaaatacttcttgtacacragaagtcccattatgcctctcacattatgagccaccatgcctagcctattttacttttatttttgaagaaaattcaaataattgcatagttctagattgccagttaatttctttcagcattttaaagatgttttattgtctcctagctttcaccacttctgtcatccatatttttgttcctttgaagttaatgtgcctttcttttctctcactgcttttaagagttttgttctgtctttgattttagaagtttcattatgatgggcctaggtatgtgttttctttgatcttttcctattttgagttgtagtgtttcctaaatgtgtggtttgatgttctttgtcaatacatgatattcttagctgataatctcttctaatattacttctgcctaattccttctttatccttccgatctcatc

SEQ ID NO: 227032 - DNA, 541 bp, Homo sapiens
accatgctccaaatgggaacaataaatattgggaaggcttcccattgagcatataaacttttaaaagtttcaataactcttgaatatgattacaaaataaagtagaatttttgtagaagtttgaaatatagaagagcaaaaaaacccaacttttggcatatttagttccattttcattctaatttagtggctagaattagaatatgcagtctaatatagaattaccatatatagcatacattatatatgtcatatataatatagttattatattcactatagattatatatgccatacatgatatttaacatatatactatacattatrtattgtatgtcatatatgatgtttatatatttagaatctatatattacaatatattattatttatttgaatgaaacattcaaatatatgtatttatcccattaattgtttttaccaaaaccagatcataatgaatgtttataatgttcttctttcataaacacaactaaagtttggcctgagatatatgtattacaaattaaaatatggttt

SEQ ID NO: 227033 - DNA, 541 bp, Homo sapiens
accatgctccaaatgggaacaataaatattgggaaggcttcccattgagcatataaacttttaaaagtttcaataactcttgaatatgattacaaaataaagtagaatttttgtagaagtttgaaatatagaagagcaaaaaaacccaacttttggcatatttagttccattttcattctaatttagtggctagaattagaatatgcagtctaatatagaattaccatatatagcatacattatatatgtcatatataatatagttattatattcactatagattatatatgccatacatgatatttaacatatatactatacattatgtattgtatgtcatatatgatgtttatatatttagaatctrtatattacaatatattattatttatttgaatgaaacattcaaatatatgtatttatcccattaattgtttttaccaaaaccagatcataatgaatgtttataatgttcttctttcataaacacaactaaagtttggcctgagatatatgtattacaaattaaaatatggttt

SEQ ID NO: 227034 - DNA, 541 bp, Homo sapiens
accatgctccaaatgggaacaataaatattgggaaggcttcccattgagcatataaacttttaaaagtttcaataactcttgaatatgattacaaaataaagtagaatttttgtagaagtttgaaatatagaagagcaaaaaaacccaacttttggcatatttagttccattttcattctaatttagtggctagaattagaatatgcagtctaatatagaattaccatatatagcatacattatatatgtcatatataatatagttattatattcactatagattatatatgccatacatgatatttaacatatatactatacattatgtattgtatgtcatatatgatgtttatatatttagaatctayatattacaatatattattatttatttgaatgaaacattcaaatatatgtatttatcccattaattgtttttaccaaaaccagatcataatgaatgtttataatgttcttctttcataaacacaactaaagtttggcctgagatatatgtattacaaattaaaatatggttt

SEQ ID NO: 227035 - DNA, 561 bp, Homo sapiens
taattttaaataaaaagatgagataaagccttaaaaaggggaccagccttaatccaggttgcwaaggtaaaaagaatttttttcccactacttagcatctaacccctttcttgtgattgggaaattctccacatgtattgtctcctgtgtgggaagcatatattctatgccaccaccaaaactaaacaaaaatctgagtgtggccttcctcaaagccttggcaggcaggccactggcacgtgatccacactcaaccagatgctctgcaaatgatgcaaagaagtgggtgaagtgaaacatccccaccactggcagccacagtggtggcagtgcaggtggaggcatggagaagtggtggtgccagcgatacctgggtcctgcagtcacagccgtgtgtatcctcagcgtacccttcctgttgtctggtcttggctgtggttctggctgcttaggttctatcagttcctgctcattccctgagcctcattttcgagcctctcctttcacctcattttgcttaaatcaacttgactcattttctattatttatcgtagagaacg

SEQ ID NO: 227036 - DNA, 554 bp, Homo sapiens
gctaggagaacacttaggaagaagtgtcactgagtcactgagagaatctgtggtggcaatgaaacacatcactcaaatctcccactgcagagatgtttacacacagatggccccggctgctgcgctcctctggatccaatactgtatccatgctgaggccacacttctacaggctcctcctagccaatgactaagcatggtgggagtgarcctaatcttctgaaacatgggatacctccaatttgcaattttggttcaaagattctccatgagcctgaccaaatccttgttggagccatgtttcctatacaatcccactaccccaatgagactacctaacctagtctgaagtgtttcccacccagtcttccttctttctccctctcacgcacaggggacagacctccatcacagtctgaaggctctccttgctgtctctggcttacccctcaacttctgtttttcacagatgttttttctaacaactcttgtacttctaatctcacttgataattgcttctaggagaatataaacatacacagcatcaaagata

SEQ ID NO: 227037 - DNA, 312 bp, Homo sapiens
tatcaaaatacttcatgtaccccataaatatataaatctactatgtacccataaaagtgaaaaaaaaatttaaaaaatgtaaaaagattcataatttccagcagccccatgatggcatyattttattgtattcagcatatagataaggacacaatggcacagagagattatatgacttgtgtaaggtcattagctactaagatacaaagccagacccaatcccatgcagtctagttttggagttcaacttgacattataatatttgattattttgcttcattttaggaagaaaggccgagtagcttaagctt

SEQ ID NO: 227038 - DNA, 533 bp, Homo sapiens
aaggtaatttagaattaaagtggccattatgtagaatgttccaggtgaacaacacagaactttacagagtgcatctaaaattgaggactctcaaattaagcccactcaggaacacctatcttgtgcagaagcttctaaaaagayttcaaaacattttattgactctttaaaaatattcttttgcaaaggtgaataaaaatcttaagtgactaattgataagaaaatttgaatctattaaccttttcccttagttactatcctatcccaaaagtgaaaagaaatctaagatgtttataaaggttaggacctcaggtagagcaggtttccttctttttcagaggtatccatgctgagtccaggcaaagaaaatactttctttgatctatttgttaataggttccaccctgaagttggtaatctagtaaggaaacaagctaagttgaaaaaaaactacctagctaactaaatttgtctccaaaatatatctttcttgtattgagctggctatgtaaaaactcttcataaaaatttg

SEQ ID NO: 227039 - DNA, 369 bp, Homo sapiens
acatttcctaatactaagaagtgttggattcataactcatagtacctgaagctgacacaaagaatgtatttgttttcacacactgaataatctcctgaaaaagtccattttcattagcttctgagttttattgttgacttatatcctgaagttatcttacagtatctgcaaaagtaattatggaagccatttggaacaagagcagagagaaacaactggcattataatacatagcatgttggaggcacagtgatattaacaaacccactcattaaaagtgggcrgaaagatattcacctggaggaaattgcaattgctcactgccaggcatggtgtagtcatgagaatccatttctgaaacaggcaaac

SEQ ID NO: 227040 - DNA, 549 bp, Homo sapiens
ccttatactaaattccttataaatcattgtcactcatttcacacttctttgacaaccaaacctcagctgtgaatgtgacaaaagtctccatatctgcattgtccaataggagaaccagtagtcccatgtggttctttaaatttaaatccaaataatttaaaattaataaaattagaaatttactcacacttgctgtatttcaagagatgaattgttatttgtgactagtggctagaacattaaactgtacacattatattgcatttccattattatagaatgttttatttgacagtactgcaattctaagtcaacttgtctgtgccattcccctacagaaatgtcagttaacgagatgatttgtcttctccaaaaatattccaggtgaccagggtccatctyggaaaatttgatacagtagccagaggaagctcagataataaaagattaaccagcatcttgaagttagcaaacaccaagtgactgacagatttcaacagtctctcagtactcataagtcagcagggacacactcaggttcatgtgctt

SEQ ID NO: 227041 - DNA, 635 bp, Homo sapiens
agggcttctccttataagggaaggagtcttactgtgcttaatttctgaattataatttatgaattcgtaagttaggcacaggaagacgtaattcattcaggaatgtttagacccagattagacaaaaacaatgtcatgtgcccactagagacacagaaatatattaaactatggttataactaagcaaaactctttgcattaatacaaggttgcaataaaatcataatagtagctgagtttacatttagcaatctaggtaatgttttcctatttctctaatgttctgtgttatatyctgatatggttttaatggttttgtctcctgcaaaactcatgttgaaacttaatcctcaatgcaatagtgttgggaaatgggacctaataggaggtgtctggtcatgagggctttgtcctcaataatgaattaatgtcattgtaaaaggatgacacaggccctagtttgcttctttgtccctctgccttatgttacatgatgatgcaataagaaagccttcaccagatgccagtgccttgatcttggtattctcagcctccagaaccatgagccaatacatttatgttcattataaattactcagtctcgggtactgtagtttcttctcccccctggggg

SEQ ID NO: 227042 - DNA, 486 bp, Homo sapiens
tgggacctaataggaggtgtctggtcatgagggctttgtcctcaataatgaattaatgtcattgtaaaaggatgacacaggccctagtttgcttctttgtccctctgccttatgttacatgatgatgcaataagaaagccttcaccagatgccagtgccttgatcttggtattctcagcctccagaaccatgagccaatacatttatgttcattataaattactcagtctcgggtactgtagtttcttctccccsctgggggatatattccgagacccccagtgcatgcttgaaaccacagtagcactgaaccgtttgtatattaatagcatattttttcatatacataatacgtatgatgaagtttactttatgaattaagcatagtaagagattagcaacaataataaaataggtcaattataacaatacactgtgataaaagttatgtgaaggtacttgttctctttccctctcttgtaaacc

SEQ ID NO: 227043 - DNA, 486 bp, Homo sapiens
tgggacctaataggaggtgtctggtcatgagggctttgtcctcaataatgaattaatgtcattgtaaaaggatgacacaggccctagtttgcttctttgtccctctgccttatgttacatgatgatgcaataagaaagccttcaccagatgccagtgccttgatcttggtattctcagcctccagaaccatgagccaatacatttatgttcattataaattactcagtctcgggtactgtagtttcttctcccccctgggggatatattccgagacccccagtgcatgcttgaaaccacagtagcactgaaccgtttgtatattaatagcatattttttcatatacataatacstatgatgaagtttactttatgaattaagcatagtaagagattagcaacaataataaaataggtcaattataacaatacactgtgataaaagttatgtgaaggtacttgttctctttccctctcttgtaaacc

SEQ ID NO: 227044 - DNA, 484 bp, Homo sapiens
agtataatatgggtcactttgttcttccatttagacaagcgcrattctgaaaatgatgcatgcagaaaattttagaattgggtaaagtccttctacaatgactctctcaatatgtaaggagaccgtcccctccttatttaccactgtgataatgacagcatgaaaagaaagcattggaaaccagctttttctccaaaggggttcaacaaaggatttgtccagcatggtagtccagaagaaatagttcttgttgtcagataaatttgaggattttcaatacacactagtatattaaagagtgataaatattatagctaaaaataggcataatgtcaaaaatgttttatattataactactaatgtggagaggttggtaagtcatgtatgtctttcccctctaaggaaaacaggcaagtttctgattgggcacttaatattctctaagaaaagatcttctaatggtaccaaggttgtctcagctca

SEQ ID NO: 227045 - DNA, 640 bp, Homo sapiens
cccccaggggggagaagaaactacagtacccgagactgagtaatttataatgaacataaatgtattggctcatggttctggaggctgagaataccaagatcaaggcactggcatctggtgaaggctttcttattgcatcatcatgtaacataaggcagagggacaaagaagcaaactagggcctgtgtcatccttttacaatgacattaattcattattgaggacaaagccctcatgaccagacacctcctattaggtcccatttcccaacactattgcattgaggattaagtttcaacatgagttttgcaggagacaaaaccattaaaaccatatcagaatataacacagaacattagagaaataggaaaacattacctagattgctaaatgtaaactcagctactattatgattttattgcaaccttgtattaatgcaaagagttttgcttagttataaccatagtttaatatatttctgtgtctctagtgggcacatgacattgtttttgtctaatctgggtctaaacattcctgaatgaattacgtcttcctgtrcctaacttacgaattcataaattataattcagaaattaagcacagtaagactccttcccttataaggagaagcccttataa

SEQ ID NO: 227046 - DNA, 420 bp, Homo sapiens
taaaatatatttatgtcctgccgattgagtatattcatcattcagaaccatgatagacagcaaaatcgcagcaacattatcctatatcaataatatgcrtttaatctaagtttaaaaataacttatctgagataatttttctttctttgctccttccaagaattcagttccaacttgatttgcgagtggaatgaaggttccgagatagttttaagttaaaatttttaaccaggacacagaagaacaggaataattcttcagacctgcagtatatgtttcgccagagatcaattgttggatgtctttggttcagagttgcttgtacatccaacatgttccataagaatgggcttaaataaatgcactctcttgaataattggacatacagcaattatataattcatctcttatcctcctcc

SEQ ID NO: 227047 - DNA, 389 bp, Homo sapiens
tatattcatcattcagaaccatgatagacagcaaaatcgcagcaacattatcctatatcaataatatgcgtttaatctaagtttaaaaataacttatctgrgataatttttctttctttgctccttccaagaattcagttccaacttgatttgcgagtggaatgaaggttccgagatagttttaagttaaaatttttaaccaggacacagaagaacaggaataattcttcagacctgcagtatatgtttcgccagagatcaattgttggatgtctttggttcagagttgcttgtacatccaacatgttccataagaatgggcttaaataaatgcactctcttgaataattggacatacagcaattatataattcatctcttatcctcct

SEQ ID NO: 227048 - DNA, 420 bp, Homo sapiens
taaaatatatttatgtcctgccgattgagtatattcatcattcagaaccatgatagacagcaaaatcgcagcaacattatcctatatcaataatatgcgtttaatctaagtttaaaaataacttatctgagataatttttctttctttgctccttccaagaattcagttccaacttgatttgcgagtggaatgaaggttccgagatagttttaagttaaaatttttaaccaggacacagaagaacaggaatwattcttcagacctgcagtatatgtttcgccagagatcaattgttggatgtctttggttcagagttgcttgtacatccaacatgttccataagaatgggcttaaataaatgcactctcttgaataattggacatacagcaattatataattcatctcttatcctcctcc

SEQ ID NO: 227049 - DNA, 210 bp, Homo sapiens
ccccaccattgatactaaaggcaggcatgtggattccacttagttgctggagtggtagggactcggggatcagtgtgtccaggccagggtctatgtacaagggaagtaaattaaggaagtttgattttgccacctcagaaagaggttctctgctkagtggggaggaaacagaaagttgtatcatgcaaggttgctcctttcacagaattc

SEQ ID NO: 227050 - DNA, 625 bp, Homo sapiens
ctgcagcctcttctcctttcaaaactcagccatcaaaggaagttcagaatctcaagttttgtcaagcaaatcacagagcccagaaccttacaggtgctctagctcaatgggctccagatccacctgttgtaaaatccaggtaaatttcaagaaagcatataatttgggaaataaatttcttaagtcaggtccctaaaatatgaaacacygaaatcagacatccagctgttagagatggatttcataaaaagaaaaatgtacatggggaaatacatgattcagaataggaatagttattaaatggagtaaatttagacccatgaaaaactgaactctttttttctgatttttatcattttactgaaaacttggtcattgtcttggcacagggccttcagtcctgtgggaacttattatctggttcaaaatcccatttggtgctgcaaggggaagcagattattcaagggctctcagtaagtcctggccaagcagggaatacccatattgctagaaacccagtccaaggaaattttgtctgcttaggctctacatagctagttaaccaccaccctggaggtattcagtggaaaggattcagcttctttgggtggtgcttgtttaggg

SEQ ID NO: 227051 - DNA, 528 bp, Homo sapiens
cattatcccaataactgattttcttatttgcacattatccttgtgtattagtgattcactgaccaactcctcaccagagaagccatctcrcttacatgggttcttgctgcacactgaatgcctaagggcacaatgtgtcaaacacctgcctcacttagcccccaatcttggtggaccacaacctcactcagccacttcccttgatgggatccaagtcttgccatactgttttccttaactacattttttactcagttccaaattatataaggctacaaccacactcagccttcttcctcccttatcctggacctcttcaactgcctccagcaaatattcagtaagatccagggaaaaggaggaggaaggaggaagcctgtggtaaaaactttgacttacatgtttaattaggctttgaatctagtattacagcatcctcattcctataacagtgtttgaaattagcaatggagtcattgattagccttctcttatattaggatattacatccttatacaatttttagt

SEQ ID NO: 227052 - DNA, 433 bp, Homo sapiens
gtttttttaaaaggtcacagtggtaaagtgattaagggcatgaatgctacccytggactgtttaggttaaaatcccaacctcccctcttactaggacagaaagttaaatggatatgaatagccattggtgccagtcagtcaaatgtgtgttcaaatcccaaacctatcatcacttaataactgcatgttttaaaataagcctctgaacatccctgagccaaaggatggggaaagttgtgtgcaacaactggatgttaaaggggagcaattccagtgaggagaaagaaataaaatgaggattccaatgacagacgcttacctgctatatttgatggacagtagtaagttggtaggctggtgtgaatcctttgggagaggggccatttgggaaggactctggtcacttctgcagtagagtcaacttctaaccttc

SEQ ID NO: 227053 - DNA, 596 bp, Homo sapiens
gccattggtgccagtcagtcaaatgtgtgttcaaatcccaaacctatcatcacttaataactgcatgttttaaaataagcctctgaacatccctgagccaaaggatggggaaagttgtgtgcaacaactggatgttaaaggggagcaattccagtgaggagaaagaaataaaatgaggattccaatgacagacgcttacctgctatatttgatggacagtagtaagttggtaggctggtgtgaatcctttgggagaggggccatttgggaaggactctggtcacttctgcagtagagtcaacttctaaccttctcagtgttccccatctttgtgtgttctcaccagctgacatgcagagcccaatgataggygccccttatcaggtaaaggaggcaagaaaagcattttgacaaatcacttagaattgaagtattcattaaatgatttaggtgaaaatgcccaaacataggtactaagctgtaaaactcagttatatcagccttcttgttcaaagaaactaaaataacatgctgctagattctgagatggaggtggtcttcactgggcttgagtttactatttgtggagaagattt

SEQ ID NO: 227054 - DNA, 567 bp, Homo sapiens
ctttgtcgcattagccaagctggctatcagtaactatatcagcctcaacactttctttatctaactagtacagagataccatctgcttaataaggcatgtgtttatctggagagagtgacttttttcagattagcacattcctataggccttttgtgacccttacaggattcttcattgtcaggcaggtagcatggggtgtgatctgagtcctttattcctctgyaattgttgctttcttgaagaagcagacattatcctgtggagctaaggtatcaaaacattggtaaacagcactgtctgtctggggtgcttgggtggcaaaaacctctgaagatttttgagttggcagtcaaagtcttctacagttttctgtctggccttgtcgctcactacagcttacctatgccttttcctcctgtcacctcgtattcatttgcacatctatgcttatttttctcactctgatagagccccttcatctgctcctttctgcccttataaatcttccctttgtttaatggtttagttcatctcgctttgaaactttctctggtctctctaattc

SEQ ID NO: 227055 - DNA, 633 bp, Homo sapiens
tcagcctcaacactttctttatctaactagtacagagataccatctgcttaataaggcatgtgtttatctggagagagtgacttttttcagattagcacattcctataggccttttgtgacccttacaggattcttcattgtcaggcaggtagcatggggtgtgatctgagtcctttattcctctgcaattgttgctttcttgaagaagcagacattatcctgtggagctaaggtatcaaaacattggtaaacagcactgtctgtctggggtgcttgggtggcaaaaacctctgaagatttttgagttggcagtcaaagtcttctacagttttctgtctggccttgtcgctcactacagcttacctatgccttttcctcctgtcacctcgtattcatttgcacatctatgcttatttttctcactctgatagagccccttcatctgctcctttctgcccttataaatcttccctktgtttaatggtttagttcatctcgctttgaaactttctctggtctctctaattcttgactatcaatgacttccctcctttaaattcttaacttttattttttgagagtcatatggtgaggttgtgatacacacaagctctggaaccatttggttaagg

SEQ ID NO: 227056 - DNA, 542 bp, Homo sapiens
tgtagtgcctgcccagtaggaagataagaataatgacttactatttttcttattaaacacacacacactcacacacaagcatatacacatatacacacaaaaaagcactcctcttttgtcttccttgaccatactatcattattctgtctccttcctttgatgtgttragacaattgtctgtattcactgtcctccaatttttacctacttctgttttctcttcagcattctccaatcatcgccaatctctgaaatcacttttctgatggatatttatggccaccactttactgaatctaacaattaattcttagactatctacactggcctatgaatagtttgagtatacatcctatacttttcctgggacaatcatatctctgtctattgtcctgttttaattatttatagctgctgctttcattctgcaatgcatccagatttggataatatattataaggtcattttaactcttagtaccatatgacccaatcactccatgaaatactttttatacttgctcccctgttaccacatgc

SEQ ID NO: 227057 - DNA, 283 bp, Homo sapiens
tatatttcacaaatgcagatgtgtaaaaaaggacatctcttcatttattgaaggaaatttcaatgtttttacattgagagtcagggaagctgatggtattactctcagtccaagcctgaaagcctcaggacctaggtgtctgctagtataagtcctggagtccaaaagctggcaagcctggagttctgatgtccaaggaagcagaagaaaagcctttcccagctctcggagggaccakttcaccttctgtatttgttctgtctgggacccttgctgatttgat

SEQ ID NO: 227058 - DNA, 441 bp, Homo sapiens
tatccttccgtattattatcagaagtgactttcattgacattcactgtaagtccatgcacgtactaatgatagattaaacagttaaaccaccacatttattcatttgacatgattattgggtgacttatgtgcaaagcggtgtgaaaccgaataccacatatagtgtctgtcttttgtctttgaaatgctgctactgaagtggcactttcaaaagagaagtcatgacaccttgaatgttgtcctggggccaggatcatttaaaataattaatagaagtggaaagtgtattaaaatttctaaaggctttaaaatgtgaatttaactaaattcaaacatttattgagcacctcatkcacaaggtacagggctagacaaagtgggttgtgcaaaaaggaataaatcatggtctttgtccttgagaagcctttggtttaacgggg

SEQ ID NO: 227059 - DNA, 534 bp, Homo sapiens
tgttaatcactttgaaagaagagaggcaaagaagtctgtttttcattccatctctttgcctgtgtaaataattactatcagtttctaggctttaggaccagtgccataaagacattttaaggttcaatttcacagactcatttctgactatctcaggacaccatgggaatgatctgtgtactgtgttgttttctggagtgacttggccatgcagcccttttgctatgacacagcagcagaaatcaggcctgttttatttagtgcctccttttttcttccattgttctcatgtgtttcagaccctcaccacctggtgaccggctgtaaccccctctccagcttccttagggggcaatatccctatragaatgtgagtcagaaacacagtggccactggatccagcactgctagagacaagcgaagatcaagcaagctgaggtcagcacaggtagacaggttcagctggaaaaaggactgggtgagctgtgcttggaatgagactggcaagtctgatctggtgttaggcagaattc

SEQ ID NO: 227060 - DNA, 415 bp, Homo sapiens
gagtttgagatagttaatttacagttaatgtctacatcttgaaacatagcccactcttctttgtatatgtaacagttatgtttcagtaattccatttaggaatttttgaggcaaaggtagaaatttgctgtgtgtttagtcacaagataaatacacagtcttcagtcttcttcaatatcttctaactgcggtcactttcctctaatggtaactcacagaaaaccaataacatctccaataaaagggttaatgatayctgattctcctctggggcccttagattctgctgagtctcttctcagatctggggaaatatgattagctgtgaagtcaaggcagagtatcctgccgctgatggactcactctgtctcttctcagggaggatggccagggctgtggctccttccagaaccc

SEQ ID NO: 227061 - DNA, 563 bp, Homo sapiens
aagctttgaatacaaccctgataatgctggactctcagttctcccctctctattgggatgtgtggggagggatgaggagggcatgtaccttgtgcttatgttttcacagggatggctcttgagcccaagtgttttcaggtaattggtatcaaggatcctgacattgagagaatgaaattttgatactgaaactgatccttcaatatgaactggaattattccccgctgagccaaactgctcatttatctcgtacgtgacaaaaaatctgctgtagcatatggtttcaccttttattgaaaaaaaaaaagagtcattttaattgctagttaagactgctgggttacttaaatttgcaggctttttattaayggtgatctatttcatttaaagcagcaataaatgagatttggtgttagcctcccaattattaaatttcatgggcactgttagaagactcgaggtcacccttttgagagtctgagccatttacatttaaggatttagtatacttgaagtgagggcagagttctgacacatagcaggttcttaatacatgtttgaa

SEQ ID NO: 227062 - DNA, 398 bp, Homo sapiens
tcagtcctaattgcttagtgttgcctgacgctctctttccattatgtgaatttatatttttatcttctwgactttcagttgctgataggttctccgtgattgacttattacattcctgtttggcctacatttacttggagtacacctgtatcattttgagagagaccttcttagtcttgctaaattgaaagcttcatttatttacttttttatttttgtctagagttggactggcaaggcctctgaagttgtgagttgacttcgcctaggctgcttgttcttcagtctcagaacatccttagccacaggtcatctttaagagcaatttacttatttcatcttggtgagaaagagcacttaacatgagatggacccacttgacacataggtgaaatatt

SEQ ID NO: 227063 - DNA, 415 bp, Homo sapiens
agatctttggcaatagaataaccatcagtcctaattgcttagtgttgcctgacgctctctttccattatgtgaatttatatttttatcttcttgactttcakttgctgataggttctccgtgattgacttattacattcctgtttggcctacatttacttggagtacacctgtatcattttgagagagaccttcttagtcttgctaaattgaaagcttcatttatttacttttttatttttgtctagagttggactggcaaggcctctgaagttgtgagttgacttcgcctaggctgcttgttcttcagtctcagaacatccttagccacaggtcatctttaagagcaatttacttatttcatcttggtgagaaagagcacttaacatgagatggacccacttgacacataggtg

SEQ ID NO: 227064 - DNA, 617 bp, Homo sapiens
ttaccccaagcccttcatccattttttaaaaataggcaaatgagaccagagcctaattaacagtcaggatgactttttcctctttttctctcgcaatcactggatactgttgtgtcttagaaatgtccattaggttcaccctcccctctccagtcgctttgctgtttccaatcattacttcatcacacaatatatggattttagaaacagcttcctggcttgcttctctgccttcagcctcatttcttttcatttcacgccgtgcaccattactgcaatactattccaaagatacccctttccttttgtcacactgtccaggagcctatagtccacgcattagcccaatcactctgtctgacttttgaggctttccatacctgggacttgtcttagctccagctgccataacaaaatcccatagactggatggcttaaacaacagaaatttatttcttacagttctggaggctgagaagtacaagatcaaggtgctggcagagttgttttcattctgaggccttttcttctggattgtaggtggccaccatcttgctgtgtgctcacatgacctcttttttgtgtacccatartgagagagagagaaagagagagag

SEQ ID NO: 227065 - DNA, 578 bp, Homo sapiens
ttgtacctttccatgtggaattattccccaaacggtgtatctcaaaacacttgtgtctgcattccagataacattcaggaccctgtctggaaagctgggatcgctgtggctgtagaccatgggctggcagtgggggtgtccagggcggtgcttgagaacgtcagactggccattttaattccccggctgagatatgcataggaccaacagggtcactgagcagacaaggagcctgtgagaatcattcaaaaacatccccagccacagagatggatccsgtttcccagtcatccccttaatagtttgaagttcctggcaaaggttccaaagtgaaaagcgattgcaattagcatccaattcttgcagccttgcagcctggtgctctgccctgcatgtcagagttggcatccggctggatccagaggaaagggaaactgctctctctctctcctctgcctccacttctcttggggtaacaaaaaggatcttcgagaaatcatgttcagtatttcaagctctatttctatggcacttatcttttgagaggagtcttcacctcttcagtgatgacttggtag

SEQ ID NO: 227066 - DNA, 615 bp, Homo sapiens
agtcacaaaatgccactatcatgcaaaaatagaaaatgccatctaagaaggaattcttgtgtcttgaggacagctacacatgagaagcagatgtgttctgtcaatttctcaacctttaacaaaattcaaccaaaacaatggacagaatayagttattcccctcatcagtttatctgcagagaatataaatactgttaactattaagactttgaaatcaaaaggaaggagaaagggagagaagcctcacagcctgggtttgttccgacttcacagccagggccagccttggagtgtggcctgtgctgagaactggagaaggcggacagaaaacacgattcctgcaaaagtgtcagcgtggaaccagctcagccacagaaagcagcattcaaactgggctccaggatgaaatgaaaaagtctgggatgatgcataactcgagatgtcagaaaataaggaacgaaaaggcaaatgatgggggaaagcaccctaggaagggactgatgagtgctttaaatttgtgccagaagaacctagtaacacgcaaccctgcttgtaaaatgccttgagagcacagagtttgtatgccaaaagtctctcatgtgagaataaagctt

SEQ ID NO: 227067 - DNA, 615 bp, Homo sapiens
agtcacaaaatgccactatcatgcaaaaatagaaaatgccatctaagaaggaattcttgtgtcttgaggacagctacacatgagaagcagatgtgttctgtcaatttctcaacctttaacaaaattcaaccaaaacaatggacagaatatagttattcccctcatcagtttatctgcagagaatataaatactgttaactattaagactttgaaatcaaaaggaaggagaaagggagagaagcctcacagcctgggtttgttccgacttcacagccagggccagccttggagtgtggcctgtgctgagaactggagaaggsggacagaaaacacgattcctgcaaaagtgtcagcgtggaaccagctcagccacagaaagcagcattcaaactgggctccaggatgaaatgaaaaagtctgggatgatgcataactcgagatgtcagaaaataaggaacgaaaaggcaaatgatgggggaaagcaccctaggaagggactgatgagtgctttaaatttgtgccagaagaacctagtaacacgcaaccctgcttgtaaaatgccttgagagcacagagtttgtatgccaaaagtctctcatgtgagaataaagctt

SEQ ID NO: 227068 - DNA, 520 bp, Homo sapiens
tgtgttccagctgtcattcaatgtttctgaagctatttccgcaaacttttcccagcagcctcactcatccctagagatgatccacattcagaagacaatgacagatcatgcacgttcagaggagaatactatgtgtcttcattgcacaaagatataccatgcmtaatcttcacattcagcacatagggcatttttgaaggtattaggtcagtatttgttctctgtttcagcgttgaacagatagactcaatgatagccattctggtattgtttccttcatatttattaaataaacaatgtgaatatgtgatctaattggtggaagatttggttattacatctctaataatgctttatttatatgtatattactatgtaatataaacacaatcaaaatttattttcagatccgcagttcccttgtgtgcaagtaatgcctgatttctgagcacagtggcatttattttcatatcatccaagagcaccagctttgaaatgtcattttaaaatataagcaact

SEQ ID NO: 227069 - DNA, 520 bp, Homo sapiens
tgtgttccagctgtcattcaatgtttctgaagctatttccgcaaacttttcccagcagcctcactcatccctagagatgatccacattcagaagacaatgacagatcatgcacgttcagaggagaatactatgtgtcttcattgcacaaagatataccatgcataatcttcacattcagcacatagggcatttttgaaggtattaggtcagtatttgttctctgtttcagcgttgaacagatagactcaatgatagccattctggtattgtttccttcatatttattaaataaacaatgtgaatatgtgatctaattggtggaagatttggttattacatctctaataatgctttatttatatgtatattactatgtaatataaacacaatcaaaatttattttcagatccgcagttcccttgtgtgcaagtaatgcytgatttctgagcacagtggcatttattttcatatcatccaagagcaccagctttgaaatgtcattttaaaatataagcaact

SEQ ID NO: 227070 - DNA, 471 bp, Homo sapiens
gtggaactggcgattatgatccctctaggaacccagctcagagctcttgaagagggagacaagaagtaaataacccactaaagaagccgggtctggtcacaggagaggtgtttctgtgaacacttttatgaaaaggtgcgatgtacttgggggcagtcagggctctgcacaattagtgaaggccattgcattttcagcacttgacatggggtgggtgataargaaactgacaagtctagtccctgccacgtggccagcctcgcagggctgagaaggcgatgggagagggctgacttgtggtctgatttgcccaggccagcgaggtccatgctgtgacctgggtgaaattactaatggcgctcccgtgcacccctagcacatcccgacatggaagatgagttctgtggacagccagctgtgaggagatggcatggttaaagctccctcgccattgcctcctagttgcagaaa

SEQ ID NO: 227071 - DNA, 479 bp, Homo sapiens
tttcttgtatcctcaaaatccaaagagatcaagtaatgcaatacaaaagagaacagggttttatacctgagaggaatctgtctgcttacarttctcggggttccataagaaaaaaacagaggttcaaccccaaaaagaagtctttgataccttttctgttttccttaagtgatcccagattgttagaaatccttttaagatctactcatgtggcataaaggatggcaagaaggagggacagaccgaagtaaatggacaaacaccgagaaatcagtcaactgagttgttttacaaagtgagagcagaagccttaaaacaatacatatgcatacacacattgcccaaatatcaggtttaaccaatttgactatagagtctttgacttttgactatagaggtcttttaaaaaatatatctctcctaatggtaattcctcctcaagctgttttattttgcttctgctgctgagagaggaggaa

SEQ ID NO: 227072 - DNA, 479 bp, Homo sapiens
tttcttgtatcctcaaaatccaaagagatcaagtaatgcaatacaaaagagaacagggttttatacctgagaggaatctgtctgcttacagttctcggggttccataagaaaaaaacagaggttcaaccccaaaaagaagtctttgataccttttctgttttccttaagtgatcccagattgttagaaatccttttaagatctactcatgtggcataaaggatggcaagaaggagggacagaccgaagtaaatggacaaacaccgagaaatcagtcaactgagttgttttacaaagtgagagcagaagccttaaaacaatacatatgcatacacacatwgcccaaatatcaggtttaaccaatttgactatagagtctttgacttttgactatagaggtcttttaaaaaatatatctctcctaatggtaattcctcctcaagctgttttattttgcttctgctgctgagagaggaggaa

SEQ ID NO: 227073 - DNA, 554 bp, Homo sapiens
atttctctcacactatatgtttttctcttttatgaacatggtggagaattagaatggaaacccaaatctgtttaaaccaataaaagctagggggraaaacaaagcaatgtgacacacacctccactcccaacacattgttcccgctagtttctccacctttccacgagcacgcatgaatttagtcaggttttctgtccaagttgttaaaggagttttgaaaggtaattgctgcagaacaaactctgaaaagctctgttacagcctaaacatttcctctttttctcttagttgcctattgcttaaatgtcatgttaaattagcaaaatggtaatagttttctaaaattgagacttgctctgaaaaagaccccaaatcacgtacttgcccacccccatccctccactcacattttaggggcaggaactaagaagaattttttagaaatttttttaaattaattaaaaaaatttttttagagacagaatctcactctgttgcccaggctgtagtgcagtagcacaatcgtagctcactgcaggcttgaactcctgga

SEQ ID NO: 227074 - DNA, 552 bp, Homo sapiens
gttgttttaatcaatttttttctttaaatcaaccgcgctcaaaatgttagaccctttggaaagtcgayatacttatttaaagccatctcatcagagtggtatttttctcctccatagctcgtggtgtgtatttttaaagggaaagaaaaaagattctcgttcccaaaggccttttttcgagggtactttccgtgactgcgaccagcgccccttaagtcaagttgggaagacctcgcaggccggcctcgcgcttgctcaggcgccgcgggtggagacgcgagcgcacacgcggcggaaaggggcgccgggcggctgcgcggccgggaaagcgcgtccccccgggagggcgcggaaggcacactgtgttccgtggggcctcgtaaataccctgcggccagagaaccactagagctactggtccgggcgcgggctctggggcgcccagggcaggggggtcagcccgtcctgcataggaagagtcgcaagagcggctgaagagggtgtgggccggacgggggcgctgggaggagataacgcaaggccggagttaat

SEQ ID NO: 227075 - DNA, 552 bp, Homo sapiens
gttgttttaatcaatttttttctttaaatcaaccgcgctcaaaatgttagaccctttggaaagtcgatatacttatttaaagccatctcatcagagtggtatttttctcctccatagctcgtggtgtgtatttttaaagggaaagaaaaaagattctcgttcccaaaggcctkttttcgagggtactttccgtgactgcgaccagcgccccttaagtcaagttgggaagacctcgcaggccggcctcgcgcttgctcaggcgccgcgggtggagacgcgagcgcacacgcggcggaaaggggcgccgggcggctgcgcggccgggaaagcgcgtccccccgggagggcgcggaaggcacactgtgttccgtggggcctcgtaaataccctgcggccagagaaccactagagctactggtccgggcgcgggctctggggcgcccagggcaggggggtcagcccgtcctgcataggaagagtcgcaagagcggctgaagagggtgtgggccggacgggggcgctgggaggagataacgcaaggccggagttaat

SEQ ID NO: 227076 - DNA, 542 bp, Homo sapiens
atagacaaatttctcatcaaaagaaacaaagattaagtagcacctcatggagagatttatcattatcgcctcaaggaaatgtttttcacccaatgactaagatgataaactttaaagtaatggtgatgatggtaataataactcttactgtttcttaagtggctactatatgccaaacccatacttatgtgtgtatacacatatatatttatatctctaatataaatatatataaattttatatattatatattataaatttagattacatgtatatatagacagagagaaagaggtgggggagactgtatttgcctaatagtgatgtttaccttgtaagtatgagtaaggaaacagcttggatcycaaaagctaaattcacaaagctttttaatgctagatcaacatgccaatcacaaccatattttagtttattaaaagtaattatttcttgcttagaccccataaaattccatgaaatatcctggcttatcagttgaagacccaatggtggggagagggtgggcaggaagaaggctgcg

SEQ ID NO: 227077 - DNA, 567 bp, Homo sapiens
ttttccacagcaattataccattttacaatcccaccaacaatgcacaagggttccaacttctctgtattctcgccaacacttgttattttatgttttgttttatagtggtgtaaaatcaaggaaaaatgactgaggcaagtctagatcaatttcgargtttattttgccaaggttaaggatgcacaagggaaaaagagacactagccacagttggatctgcagcccatacatttgccaaagaaagtttggagacttcagtatttaaaggggaaagagcaggcagtagaggaaagaggaaagaaaaaggaggacagtagataaaagtggtaatcggttgcattcttttgaggctttgatcactgttcactgaattcacattttacatgtgaaaagaggggctggagaaacagtcaactacacatttgtgtggccttctcctcagtgaatctgcatttctacataagataaagtaaacatagaatagaagaagcagtcaagtatgcatttgtctcaggcaagcagaaggatgacttccaatcttatccttgtcccttacctatgaatat

SEQ ID NO: 227078 - DNA, 493 bp, Homo sapiens
ttcataattattttttttctgtgtcagcatctatatgtgcttaacatgcaataagccataatgataccaatagtgatatgtcatagatcaattctgtattccagtgaaaagatttggattatttttacatctattatataagaatatagtgtttttcttttatacatgaraagaaaaacctgaaagcaccttgacatgcaaagtagcaatcaagaaataaaatcaatagattggggtctcaaataccccaatccaggtctccagaggggtaacctttacctattagctagtgctaatgagatccttgccttctctacaggggaaatgttcacagccacaaagaaaactagtaattagctgaggttttctgtcaaacagaaatgcacatacgcttttcgggctttttctgccatggttcaatatgatgctagagaagaaaataaaagagtagtattttttttcaacacacttaactaaaaatatggcagaaaac

SEQ ID NO: 227079 - DNA, 493 bp, Homo sapiens
ttcataattattttttttctgtgtcagcatctatatgtgcttaacatgcaataagccataatgataccaatagtgatatgtcatagatcaattctgtattccagtgaaaagatttggattatttttacatctattatataagaatatagtgtttttcttttatacatgaaaagaaaaacctgaaagcaccttgacatgcaaagtagcaatcaagaaataaaatcaatagattggggtctcaaataccccaatccaggtctccagaggggtaacctttacctattagctagtgctaatgagatccttgccttctctacaggggraatgttcacagccacaaagaaaactagtaattagctgaggttttctgtcaaacagaaatgcacatacgcttttcgggctttttctgccatggttcaatatgatgctagagaagaaaataaaagagtagtattttttttcaacacacttaactaaaaatatggcagaaaac

SEQ ID NO: 227080 - DNA, 493 bp, Homo sapiens
ttcataattattttttttctgtgtcagcatctatatgtgcttaacatgcaataagccataatgataccaatagtgatatgtcatagatcaattctgtattccagtgaaaagatttggattatttttacatctattatataagaatatagtgtttttcttttatacatgaaaagaaaaacctgaaagcaccttgacatgcaaagtagcaatcaagaaataaaatcaatagattggggtctcaaataccccaatccaggtctccagaggggtaacctttacctattagctagtgctaatgagatccttgccttctctacaggggaaatgttcacagccacaaagaaaactagtaattagctgaggttttctgtcaaacagaaatgcacatacrcttttcgggctttttctgccatggttcaatatgatgctagagaagaaaataaaagagtagtattttttttcaacacacttaactaaaaatatggcagaaaac

SEQ ID NO: 227081 - DNA, 493 bp, Homo sapiens
ttcataattattttttttctgtgtcagcatctatatgtgcttaacatgcaataagccataatgataccaatagtgatatgtcatagatcaattctgtattccagtgaaaagatttggattatttttacatctattatataagaatatagtgtttttcttttatacatgaaaagaaaaacctgaaagcaccttgacatgcaaagtagcaatcaagaaataaaatcaatagattggggtctcaaataccccaatccaggtctccagaggggtaacctttacctattagctagtgctaatgagatccttgccttctctacaggggaaatgttcacagccacaaagaaaactagtaattagctgaggttttctgtcaaacagaaatgcacatacgcttttcgggckttttctgccatggttcaatatgatgctagagaagaaaataaaagagtagtattttttttcaacacacttaactaaaaatatggcagaaaac

SEQ ID NO: 227082 - DNA, 499 bp, Homo sapiens
atctatgcctactttttagtctaatcagaataaatctcactcatttttcacaaagcagttcttcaaatatttgaagagagctcacttgttcccctgaggactcctgccttatagaaaaaaaatacaagaaaagaaaattgcctgccctttcaacaattgctcagatgacacgatctccagacacctcattatactggtcatcctgtttgaacwtgctccagctcatcagtgacactctggaagcagcttgccctcaactagacatagaaattcagctgcaggctgattgctgtgcaatacataaggaattgctgtacaatacagaaggaagatacagctacctcctttctatggcaaacattccattcatcctgaattattaggatacagacagcctagtttagcctagattagcattcatacctagactgttggtgatctgtggactatttaatatgtaaggcatgatgcacaggctcagaggttataaactgaggtt

SEQ ID NO: 227083 - DNA, 499 bp, Homo sapiens
atctatgcctactttttagtctaatcagaataaatctcactcatttttcacaaagcagttcttcaaatatttgaagagagctcacttgttcccctgaggactcctgccttatagaaaaaaaatacaagaaaagaaaattgcctgccctttcaacaattgctcagatgacacgatctccagacacctcattatactggtcatcctgtttgaacttgctccagctcatcagtgacactctggaagcagcttgccctcaactagacatagaaattcagctgcaggctsattgctgtgcaatacataaggaattgctgtacaatacagaaggaagatacagctacctcctttctatggcaaacattccattcatcctgaattattaggatacagacagcctagtttagcctagattagcattcatacctagactgttggtgatctgtggactatttaatatgtaaggcatgatgcacaggctcagaggttataaactgaggtt

SEQ ID NO: 227084 - DNA, 499 bp, Homo sapiens
atctatgcctactttttagtctaatcagaataaatctcactcatttttcacaaagcagttcttcaaatatttgaagagagctcacttgttcccctgaggactcctgccttatagaaaaaaaatacaagaaaagaaaattgcctgccctttcaacaattgctcagatgacacgatctccagacacctcattatactggtcatcctgtttgaacttgctccagctcatcagtgacactctggaagcagcttgccctcaactagacatagaaattcagctgcaggctgattgctgtgcaatacataaggaattgctgtacaatacagaaggaagatacagctacctcctttctatggcaaacattccattcatcctgaattattaggatacagasagcctagtttagcctagattagcattcatacctagactgttggtgatctgtggactatttaatatgtaaggcatgatgcacaggctcagaggttataaactgaggtt

SEQ ID NO: 227085 - DNA, 586 bp, Homo sapiens
acttggtgtttcttttgcccacagagtcctgtaggacattgtatcaggtaagaaaaggggaaggagtggaggatgaactggtggggaaagcaaattggcaataaaatccatcagctaaccagctttsggttaccagagagctgaagtatagggaaaagatggtgatagagtgactggcccagccagaagtaattgcaactacagctaaacaaaacccactttaaccaatagctacacattgcttttctctcaacttttttccatgagttcctgagatgcaatgaggctcaagtgatttaagagtaataaatactttgttctatatcttctgatagtgaatgtttcagttgctcataaccagggtggtaccatttcctgggggcacttgaaaatgtggaggtgttaagggttgccataatgaccaggaggtattagtggcatttagaggcagggcctaggaatggcctggcacaatgaagcattgtcccatccaaaatggcaacagcatctcccataagaaacctgatagtgaacaccatgaatgggctagaagaagcaatgagcaactcaggcagtggttaaacaa

SEQ ID NO: 227086 - DNA, 392 bp, Homo sapiens
ggaggaagtgactcatggctgatgggaaaattgaacgttttcaatgaatagcagaaaatcaggttagaagacggaagggtaaagctatgctttagtagttgtgtcatataaaaattgcaaaagagaggcagctctggagaccrtctgaaggaggctcacagatgttgaccctgttcaaatgccacagccttcaacctgcctgttcagtgggcagggacgttcgtggcgcctcagccagaggcctctgtggtcattagaagaggggattcaccatccttcattctgtcctgtgcatgctccactactctgcattttattttattatggtaataaacacacattgtaaaatttattgtcttacccatgtttaagtgtatagttcagtagtctta

SEQ ID NO: 227087 - DNA, 635 bp, Homo sapiens
gaaatgaatggaatcactgaatggactcgaatgggatcatcatcaaatggaatcgaatggaatcatctaatgaacttgaaaggaatcatcatcaaatgaagtcaaatggaatcaccaaatcgacatgaatggaatcatcattgaatagaatcgaatggaatgattgaatgggctagaatggaatcatcttkgaatggaatcaaagggaatcatcatcgaatggaatcgaatggaaatgtcaaccaattgaatcaaatagaatcatcatggaattgaatcgaatggctcactgtcgaatcaaatcaaatggaatcatcatcgtatggaattgaatggaaacattgaaaggaattgaatggaatcatcattgaatggaaccgaatgaaatcatcaacgaatggaatccaatgtaatcatcatagaattgaaaccaatggattcattaaatggactcgaatggaatcatcgagtggactcgaatggaatcatcatcaaatgaaatagaatgcaatcatcaaatggaatcgaatggaatcatcatcgaatggaatctaatggaataatagaatgaactcgaatggaaacatcgcatggagttgaatggaatcatcatcgaatgagatcgaatggaatca

SEQ ID NO: 227088 - DNA, 635 bp, Homo sapiens
gaaatgaatggaatcactgaatggactcgaatgggatcatcatcaaatggaatcgaatggaatcatctaatgaacttgaaaggaatcatcatcaaatgaagtcaaatggaatcaccaaatcgacatgaatggaatcatcattgaatagaatcgaatggaatgattgaatgggctagaatggaatcatctttgaayggaatcaaagggaatcatcatcgaatggaatcgaatggaaatgtcaaccaattgaatcaaatagaatcatcatggaattgaatcgaatggctcactgtcgaatcaaatcaaatggaatcatcatcgtatggaattgaatggaaacattgaaaggaattgaatggaatcatcattgaatggaaccgaatgaaatcatcaacgaatggaatccaatgtaatcatcatagaattgaaaccaatggattcattaaatggactcgaatggaatcatcgagtggactcgaatggaatcatcatcaaatgaaatagaatgcaatcatcaaatggaatcgaatggaatcatcatcgaatggaatctaatggaataatagaatgaactcgaatggaaacatcgcatggagttgaatggaatcatcatcgaatgagatcgaatggaatca

SEQ ID NO: 227089 - DNA, 459 bp, Homo sapiens
aagggaatcatcatcgaatggaatcgaatggaaatgtcaaccaattgaatmaaatagaatcatcatggaattgaatcgaatggctcactgtcgaatcaaatcaaatggaatcatcatcgtatggaattgaatggaaacattgaaaggaattgaatggaatcatcattgaatggaaccgaatgaaatcatcaacgaatggaatccaatgtaatcatcatagaattgaaaccaatggattcattaaatggactcgaatggaatcatcgagtggactcgaatggaatcatcatcaaatgaaatagaatgcaatcatcaaatggaatcgaatggaatcatcatcgaatggaatctaatggaataatagaatgaactcgaatggaaacatcgcatggagttgaatggaatcatcatcgaatgagatcgaatggaatcatcgaataacatcgaatggaatcatcg

SEQ ID NO: 227090 - DNA, 635 bp, Homo sapiens
gaaatgaatggaatcactgaatggactcgaatgggatcatcatcaaatggaatcgaatggaatcatctaatgaacttgaaaggaatcatcatcaaatgaagtcaaatggaatcaccaaatcgacatgaatggaatcatcattgaatagaatcgaatggaatgattgaatgggctagaatggaatcatctttgaatggaatcaaagggaatcatcatcgaatggaatcgaatggaaatgtcaaccaattgaatcaaatagaatcatcatggaattgaatcgaatggctcactgtcgaatcaaatcaaatggaatcatcatcgtatggaattgaatggaaacattgaaaggaattgaatggaatcatcattgaatggarccgaatgaaatcatcaacgaatggaatccaatgtaatcatcatagaattgaaaccaatggattcattaaatggactcgaatggaatcatcgagtggactcgaatggaatcatcatcaaatgaaatagaatgcaatcatcaaatggaatcgaatggaatcatcatcgaatggaatctaatggaataatagaatgaactcgaatggaaacatcgcatggagttgaatggaatcatcatcgaatgagatcgaatggaatca

SEQ ID NO: 227091 - DNA, 587 bp, Homo sapiens
accttctattaggttggtgccctagaagaggcaataagggaaagacatgatgaggggaaatttgttattatttaccaatgacaaaatttttatacggaaaatcagaaaaaaatctacagataaaccatgtataagataattttgcaagtttacaggataaaaagccaatatagaaaaaaattcaattgcagaattctataccaaaaacaaaaatactagaaattaaaaatttttaaatatcagttataatggaatctcaaatcatctaatacctataaatcaacctataaaaaatggacactatctcaatgcagagaagtataaactgttattgagagaaattacagaagttctaaataaacgtaagtatacgwcttgttcatgaattgaaagactaaatattttaaagatgtcaattctccacaaatttatagattcactggaatcaaatttataattccaaccaggtttttattgttggtactggtggtggtggtgctagtgttggttaatagtgataggcattctaaaaggtacctagaaacaaagccccacaaatagacaatgaaatcctgaagaagatttct

SEQ ID NO: 227092 - DNA, 587 bp, Homo sapiens
accttctattaggttggtgccctagaagaggcaataagggaaagacatgatgaggggaaatttgttattatttaccaatgacaaaatttttatacggaaaatcagaaaaaaatctacagataaaccatgtataagataattttgcaagtttacaggataaaaagccaatatagaaaaaaattcaattgcagaattctataccaaaaacaaaaatactagaaattaaaaatttttaaatatcagttataatggaatctcaaatcatctaatacctataaatcaacctataaaaaatggacactatctcaatgcagagaagtataaactgttattgagagaaattacagaagttctaaataaacgtaagtatacgtcttgttcatgaattgaaagactaaatattttaaagatgtcaattctccacaaatttatagattcactggaatcaaatttataattccaaccaggtttttattgttggtactggtggtrgtggtgctagtgttggttaatagtgataggcattctaaaaggtacctagaaacaaagccccacaaatagacaatgaaatcctgaagaagatttct

SEQ ID NO: 227093 - DNA, 296 bp, Homo sapiens
acacaaaaaatcattcaggataaaaaaagatagacaaattgtgctactttaaatttaagaatgattaaagaagcaacgggccaacgtgcaatgaggaataaattatttgcactctctctctctgtctctctcttgctctctctctatatatgtttaattattatatatctattatatatataaaaattaatcagaaaaaaatcaattaaaaagtgggcaaarctctgaagatgcacttcacaaaaggagatatccaaatggccaacaggttataaaaagggctcagcctcagcagt

SEQ ID NO: 227094 - DNA, 502 bp, Homo sapiens
ttttgtcactagaccagccttaacagagatccttaaaagaattctaaacatataaatgaaagaacaatacctgctaccacaaaaacacccacataccctataaagyaaccatgcagtaggaactacaaaacaaccagctaacaatctcacaataggaccaaaaacgcacgtcaatattaacctcgagtgtaaatgatctaaatgcccctacttcaaaggcacagagttgcaagtatgatttaaaaaaaaaaaaaaaaaaaaaaaaaaaacaagatccaactacctgctatcttcaagagacccaactcacacataacagtcataggctcaaagtaaagggttggagaaagatctatcacacaagtgaaaaataaagcaggagtttctatgtttatatgagataaaacggactttaaaccaacaacagcaaaaaagtgataaagaacagcattacataatgacaaagtggttaattcaacaacaagagttaactagcctgaat

SEQ ID NO: 227095 - DNA, 511 bp, Homo sapiens
tttttgtcactagaccagccttaacagagatccttaaaagaattctaaacatataaatgaaagaacaatacctgctaccacaaaaacacccacataccctataaagtaaccatgcagtaggaactacaaaacaaccagctaacaatctcacaataggaccaaaaacgcacgtcaatattaacctcgagtgtaaatgatctaaatgcccctacttcaaaggcacagagttgcaagtatgatttaaaaaaaaaaaaaaaaaaamaaaaaaaacaagatccaactacctgctatcttcaagagacccaactcacacataacagtcataggctcaaagtaaagggttggagaaagatctatcacacaagtgaaaaataaagcaggagtttctatgtttatatgagataaaacggactttaaaccaacaacagcaaaaaagtgataaagaacagcattacataatgacaaagtggttaattcaacaacaagagttaactagcctgaatatagaggc

SEQ ID NO: 227096 - DNA, 508 bp, Homo sapiens
cagagatccttaaaagaattctaaacatataaatgaaagaacaatacctgctaccacaaaaacacccacataccctataaagtaaccatgcagtaggaactacaaaacaaccagctaacaatctcacaataggaccaaaaacgcacgtcaatattaacctcgagtgtaaatgatctaaatgcccctacttcaaaggcacagagttgcaagtatgatttaaaaaaaaaaaaaaaaaaaaaaaaaaaacaagatccaactacctgctatmttcaagagacccaactcacacataacagtcataggctcaaagtaaagggttggagaaagatctatcacacaagtgaaaaataaagcaggagtttctatgtttatatgagataaaacggactttaaaccaacaacagcaaaaaagtgataaagaacagcattacataatgacaaagtggttaattcaacaacaagagttaactagcctgaatatagaggcacccaacattggagtacccag

SEQ ID NO: 227097 - DNA, 602 bp, Homo sapiens
cacaacgctattcacaatagcaaaggaatgaaatcagcctaggtgcacatcaatggtggattggataaagaaaatatagtacatgtataccatggaatactatgcagcaataaaaaggaatgatatcatgtcctttgcagcaacatgaatgcaggtggaagccattatcctaagtgaatttacatgggaatagaaaacctaatacctcacgttcctgcttataagtggaatataaacatcggttactcatggacataaagactgtaagaaaagacagacactgtggactattagaggggggagggcgctactacagtggaaaaagttgaaaaactacttattgggggctggtgcagtggctcacgcctgtaatcccagcactttgggaggctgaggcaggcagatcacaagagagatcgagaccatcctggccaacatggtgaaacactgcctctacaaaaaatacaaaaattgactgctcgtggtggtgcacrcctgtagtcccagctacttgggaggctgaggcaagagaatcacttgaacccaggaaggggacattgcagatcacaccactgcactccagcctggtgacagagcaagac

SEQ ID NO: 227098 - DNA, 557 bp, Homo sapiens
ttcttatttaaaaaaaaaaccttctatttctaatgattcctcattctttttataacttttctctcttacctcctcccaaccattttatataatagacaggtttgccttgaagctaatgaggcttaatcttcaaagatccaaactttataggtaccttattagattctaggaggagctccagaaattagttcatataatcatatgctttggaaaaaaaaatttaaagtgatctattttaactgtaattagataagatcactgtcttgtcttttccaaattcctctccatcatgttcgtttggtattgggtcacactagaatggccataggctttttgggcatctrgctaaaggaaagtctgagttgagtctattatgtggttgaacactaccacgtataatgaagtatttattgttctattattggaatagcttccagaaacactcctattgcccacactactaatgtaactggcactaaggtgtggaggcacaaggacaaaggcaattttgcaacatagctatgtcctacacttcatacttctgaaagcatgtgtgg

SEQ ID NO: 227099 - DNA, 557 bp, Homo sapiens
ttcttatttaaaaaaaaaaccttctatttctaatgattcctcattctttttataacttttctctcttacctcctcccaaccattttatataatagacaggtttgccttgaagctaatgaggcttaatcttcaaagatccaaactttataggtaccttattagattctaggaggagctccagaaattagttcatataatcatatgctttggaaaaaaaaatttaaagtgatctattttaactgtaattagataagatcactgtcttgtcttttccaaattcctctccatcatgttcgtttggtattgggtcacactagaatggccataggctttttgggcatctggctaaaggaaagtctgagttgagtctattatgtggttgaacamtaccacgtataatgaagtatttattgttctattattggaatagcttccagaaacactcctattgcccacactactaatgtaactggcactaaggtgtggaggcacaaggacaaaggcaattttgcaacatagctatgtcctacacttcatacttctgaaagcatgtgtgg

SEQ ID NO: 227100 - DNA, 563 bp, Homo sapiens
cccaacttgtgtctttattaagtgacccaagagaatacagtgtgacagagaaggctttgattttcttagcccagaatcaggtattctcagttgactgtccactcaaattaaaaagagagttttataggaggaattgaatgtaatggagtgaactttttatttcaaccctttacctgaatgtttttttgcttgttttcaactttccactgacatgtctacattaatatattttaaagagtaatttgttaagttaaaagacattttttcactatgtgcatttactatgatttggcagagtcaaattacttagccaaatttgtttctatgttgccaaagattatattctgaattaaatgaaaattggtgtttctttgctccaatgctgactcagttggaaggcagaacaaggaaggatactgtmttagtccgttttcacactgctaataaagacacactagagactggataatttataaagaaaaagaggtttaatgggcttacagttccacatttctagggtggcctcacagtcacggcaggaggcaaaatgcacatcttacatg

SEQ ID NO: 227101 - DNA, 481 bp, Homo sapiens
ttggttatcttggcatagatgtcatcttggaaggtatgggtacagtggcttacacctgtcatcccagcactgtgggaggccaatgtgggaagatcacttgaacccaggagtttgagacagcctgggtaacatagtaagacctcatccctacaaaaaattgaaaaattagctgggcatggtggctcatgcctgtagtcccagctactagggaggctgaggcaggaggactgattgagtccagtaagtggaggctgcactgagtcatgattgtgccactgtacttcagccctccctgggtgagagtgtgagaccctgtttcaaacaaacaaacaaaaaaytaaaaaaaaaaagacagttgtccaaagggagttttgttttttaccataaagacaggaatgtggctgtacctgtcccaaatatcttccagttcatagcctttgtgactgtgttatacagagaggaactttggcgtctccgtcat

SEQ ID NO: 227102 - DNA, 478 bp, Homo sapiens
catccactgtgtgtttggggattttggggaaacagtaaacactgcatggggttgctttcagcctgtgaacccacggactccagacctggggcgtctcaagggctggggagcccaggctggtttcggctgcgtggtggagaccctctgctgggctgagtggctttggggttttcctcctcaggaaatatgttctgcctcctctgtcacaatcccctctggcggggtgccaggcagctctgaacagcgatttgttcatwtttccatggggcatgcctcctttgacccatttttatgagcctttttgaggctcatgagatgcagtgaaatacctcttctctcagagtgaaatcataatgaataatgaaagcaaaaatacaagaacaccttatgtatccaggctgccaaaaggcgctgtaaaaaattacaacaagagctacagtgcaggatgataccctgcaactgagtgtcggccacgggg

SEQ ID NO: 227103 - DNA, 481 bp, Homo sapiens
atgtatgaagacatgcactttgggattatctgtgatagtgaaaaaygggagtccttctaaatatataatactagggaatgatatatccacttaaaagagtattaagcagccattaaaataattattaaaacatttatttttaaatgataatcatgaaaacctgtggcattataatgataaactgtcaggtgtgaaagccgaatgaatgcgaggctgtaactacactcataaatcaactatgtaaattttgcctgaagtaagaggaacactgaacagttcatttgttagggtggtaggattatggataattttctttccttttaatttcccttattgttgtaacattgcaaactaaataaaaatctgggaaaaaatacaatgaaggcaacagacaggtacattgtgttgtatccttcgtaaatcctttcactgaagaacgggattaaatgtggcttaccatagcaaatcataaaataagact

SEQ ID NO: 227104 - DNA, 515 bp, Homo sapiens
aaatggcaaaaataggagaatgtgatatgtatgaagacatgcactttgggattatctgtgatagtgaaaaatgggagtccttctaaatatataatactagggaatgatatatccacttaaaagagtattaagcagccattaaaataattattaaaacatttatttttaaatgataatcatgaaaacctgtggcattataatgataaactgtcaggtgtgaaagccgaatgaatgcgaggctgtaactacactcataaatcamctatgtaaattttgcctgaagtaagaggaacactgaacagttcatttgttagggtggtaggattatggataattttctttccttttaatttcccttattgttgtaacattgcaaactaaataaaaatctgggaaaaaatacaatgaaggcaacagacaggtacattgtgttgtatccttcgtaaatcctttcactgaagaacgggattaaatgtggcttaccatagcaaatcataaaataagactcacatttt

SEQ ID NO: 227105 - DNA, 481 bp, Homo sapiens
atgtatgaagacatgcactttgggattatctgtgatagtgaaaaatgggagtccttctaaatatataatactagggaatgatatatccacttaaaagagtattaagcagccattaaaataattattaaaacatttatttttaaatgataatcatgaaaacctgtggcattataatgataaactgtcaggtgtgaaagccgaatgaatgcgaggctgtaactacactcataaatcaactatgtaaattttgcctgaagtaagaggaacactgaacagttcatttgttagggtggtaggattatggataattttctttccttttaatttcccttattgttgtaacattgcaaactaaataaaaatctgggaaaaaatacaatgaaggcaacagacaggtacattgtgttgtatccttcgtaaatcctttcactgaagaacgggattaaatgtgscttaccatagcaaatcataaaataagact

SEQ ID NO: 227106 - DNA, 480 bp, Homo sapiens
aggatcctttgctgtgccaccttgtttgttctttcctgagggtgatgactcccaaagagcagaacttakaccagtggcaagaagctttatggaagctaatttgtgctcagtgagggaaaggactgcctagaaggcaaggggttcataagctcactgtccctggaggtattcaaccttagaatggaccactgttcactgggatgctatagagaggccagcctggatacagttcatacaattaaataaggcccactacccaaagtccctatgctactaatgaactatttaccaattaattatcacttaattagcaatatagatgatcccaaacttatgatggttttacttaggacttttccactttacaatggtgtgaaagcagcatgtgttgagtggaaatcatactaaattctgaactgtgctcttttccctgggtatcataccagaatatgcagtaagacactctctcaatgctgggca

SEQ ID NO: 227107 - DNA, 332 bp, Homo sapiens
tggccgagcagttaatttcttcaaaaacaaaaacccggcctgcgctcgtctaagcagcggggtttgcacatggagatgtcacaggccccgcgcacagcgcagagggccgcgacccccaagcgcatgtcttaatagaaggtgcggctggaagacccgggctcccgggctccgcttcggtctgccccttcccgtargtgcgctggctagcgcccggcgcaggctgaagccttccttccctccccccaacccctataaaagtctggggcggcgcggcagcagcactgctgctctcccggcttcccgctctactccggccgggccgggtccgccac

SEQ ID NO: 227108 - DNA, 332 bp, Homo sapiens
tggccgagcagttaatttcttcaaaaacaaaaacccggcctgcgctcgtctaagcagcggggtttgcacatggagatgtcacaggccccgcgcacagcgcagagggccgcgacccccaagcgcatgtcttaatagaaggtgcggctggaagacccgggctcccgggctccgcttcggtctgccccttcccgtaggtgcgctggctagcgcccggcgcargctgaagccttccttccctccccccaacccctataaaagtctggggcggcgcggcagcagcactgctgctctcccggcttcccgctctactccggccgggccgggtccgccac

SEQ ID NO: 227109 - DNA, 548 bp, Homo sapiens
gtacatccactatttaaagggtctgcattcacctgttatatcccargtgatttttggatgtgagaaagaagtggctacactgacctttccatttttggatgtcaacggctgtccgatgcatacacgccaatgttcacattgtgtctctaggcaaactcctagacgtgggtctggggcctatggagatccgtggtgtttagcatgtgcattgtaaggcccagtgtccattctattgggagataggaccaggaatgaaggtgtgaattcagggcatgcagcctcttggtgtgcagtgagcactgttcaggctaccatttgtacaaacaggtctcctgtggcaggcacaaccttgcagatgacagcggacacctgtagggttagttgtgacatttctagggacccccagcctacattcactttcacctagacaagcctctgacactggcgtgtgtatttgtgtgtacacacagacacacacacactgtgtcctcaggttttatcctgtgggtgccgcaccagtggaggagagcacagtgggtggatgcatg

SEQ ID NO: 227110 - DNA, 548 bp, Homo sapiens
gtacatccactatttaaagggtctgcattcacctgttatatcccaagtgatttttggatgtgagaaagaagtggctacactgacctttccatttttggatgtcaacggctgtccratgcatacacgccaatgttcacattgtgtctctaggcaaactcctagacgtgggtctggggcctatggagatccgtggtgtttagcatgtgcattgtaaggcccagtgtccattctattgggagataggaccaggaatgaaggtgtgaattcagggcatgcagcctcttggtgtgcagtgagcactgttcaggctaccatttgtacaaacaggtctcctgtggcaggcacaaccttgcagatgacagcggacacctgtagggttagttgtgacatttctagggacccccagcctacattcactttcacctagacaagcctctgacactggcgtgtgtatttgtgtgtacacacagacacacacacactgtgtcctcaggttttatcctgtgggtgccgcaccagtggaggagagcacagtgggtggatgcatg

SEQ ID NO: 227111 - DNA, 448 bp, Homo sapiens
aggaaattaataatcatctcatctttgtccttgggtctggaaggaagaagtgcgggggtgttgggggggattacaaagatgacaatcttcccggttggtttttctcagcccctccacgggcctggccctgtggtgcctgggtctccagagccagccacctccatcctggacaccggacaccttaactggggctcctttcccctgtatgggctgccagtactggctgacattaatgggtttgagaggagaaaagaccccctgggagcctgtaaaaccttagtcaggaaaagaaaaaaaaaaaaaaaaaaaaaaaagccagagctgtggtctagggcctgagagcagcrtgacagaaatcttgattcaattattctgttcctcagcacaattccctttctcagctctgtgtaagggatgtgtgttctcatgagcacatgcctaagtactt

SEQ ID NO: 227112 - DNA, 567 bp, Homo sapiens
gactctgtgacttttgaggcaggcctgttctagcctgggtggccaatgcttctgtgccagtactgtgtctgcaagtgcatctacccacttgtctttcccttctgctgcctgaccctgaggctgccactcatgtggacttgacagggcaggggccacaaatcatttctatccccagcgcagcctctcggcacagccccggttcacacggatgcctgggaggcctgcgggatggctctgagggtcaggctggggtgccacccagttatgagatgtcgctttgtctcttggttggtttgaactgagagctttcgtcgaggaagctgtggcatggctcaggaatcctgctgggtgaggggaatggaggctgagtcagcacctccctctccggaaggcccagaggaggtggtggcagggagagacttggcaaagcaggcagggctgtgaatagcggccatgggtgaaaggrcagcctcagaccctgggttccttcctgggcttttgatctctagtgagacctccttccgccgctctccccacttaggtcccctccctgtccccctcacaata

SEQ ID NO: 227113 - DNA, 530 bp, Homo sapiens
ttcttaaacataccctactcttttcttttttctcatccatgggcttttgctggyaccacatcttttccctgtctttgtggacacttttctttttggtcaaggccttgattaagactgttcgtactgagctctagaaactccattcaaatccccttgctctgcgctctcctgacactttatgtaaaccctgttaagctaggataacatacatcccagtttgttctggacagtcactgtttatgtctgtggtctcagcttcattatcactttgtaatggtcatgctaattataaaacgtaattacatttctgccttatgttaaagttagatgtggtttatgtcctcattggaccaaggatcatccttgtatcttccaatggccaggctatctatttctgttatataaatgacttccagttaaggaaattggtgagttttatttcatttccatataagtagaacggttagaagatatagtgtgttttataagcagctcagagctgaaatgattctcatctgtaggcattcgct

SEQ ID NO: 227114 - DNA, 530 bp, Homo sapiens
ttcttaaacataccctactcttttcttttttctcatccatgggcttttgctggcaccacatcttttccctgtctttgtggacacttttctttttggtcaaggccttgattaagactgttcgtactgagctctagaaactccattcaaatccccttgctctgcgctctcctgacactttatgtaaaccctgttaagctaggataacatacatcccagtttgttctggacagtcactgtttatgtctgtggtctcagcttcattatcactttrtaatggtcatgctaattataaaacgtaattacatttctgccttatgttaaagttagatgtggtttatgtcctcattggaccaaggatcatccttgtatcttccaatggccaggctatctatttctgttatataaatgacttccagttaaggaaattggtgagttttatttcatttccatataagtagaacggttagaagatatagtgtgttttataagcagctcagagctgaaatgattctcatctgtaggcattcgct

SEQ ID NO: 227115 - DNA, 616 bp, Homo sapiens
  misc_feature (1)...(616): n = A,T,C or G
aacctggtctcctgctacagtttttgggagacatgtttgccaataatttaagttctaaaataatgcccttaaatgaacaaaaaaattgtgtttattaaatacaaaccaactagtgaacaattgaggcttaggtgagaattgggtcaatggaatgagaagtatattttttctcatttcttttagtgtgaaaataaggtcattctttgcattataaatagtacatgtttattataggtaatatcaataatgtccgtactatcactattcaaagatactaatattttagtgtcttttcatcctgtctttttccaggtgtagttattattcaatttataatttggcatcctaccatatatataatttaacatctactcttttaacgtaagtatttcttaatattatcataaattcttgtataacattctttttaatgactccataatattctaccaagtatatatrtattactacatataatagtattacatatataatagtttaactatcttactattatcagaaaaataatatatttactataaaacttttttaatactttaagtgttagggtacatgtgcacaacgtgcaggttagttacatatgtatannnnnnnn

SEQ ID NO: 227116 - DNA, 378 bp, Homo sapiens
gctttttcctcccttagacattgttcctcctttgatttggcctgtgagctaaataacaaaaaactaaaagggtatttrgctttaagaagaatttaatatgcttagagaaaagtagtaaaacataacaatttaaatgaaaattaggtcatattggatatctaccatgtaaccgggcaccaggttaggcgatttgccctgctccttttgcttacccatcactactattgtgagcaatagttctaggctctgctaagtctactggagccctgaggaacagtttccttacaatgtgcacttggaactagctaagatcaaaatgtcggctcttcgaatggattggagagctaggcttactgttaagccttcaccgggtttcct

SEQ ID NO: 227117 - DNA, 466 bp, Homo sapiens
tgactcccttgctacctccccctgtgcccaggaggaatcttcttcctaggtacactttaactaaaacccaacacatttagtctgtacttcctacagtcttatctggctgtcacactttgatccactctacacctgccctaatcaccttagggccaygtactagacaaatagggacaacccttatgcccagagcctattgaaattattccaactacccaatcctaaatttgtttaccctgtattacctgttcctgcctgcagaaaccacaaggaaaacttgcccagtttcccccctccaccctgccttttgaccaagcccagtactccctcaagtggcccccctgtagtggctacttttatgtgtcaacttgactgagacataagatgcccagatatttgggcaagcattattctcggtgtgtctgtgagagtgttcttggatgagattaacatttgaatttgtaaa

SEQ ID NO: 227118 - DNA, 466 bp, Homo sapiens
tgactcccttgctacctccccctgtgcccaggaggaatcttcttcctaggtacactttaactaaaacccaacacatttagtctgtacttcctacagtcttatctggctgtcacactttgatccactctacacctgccctaatcaccttagggccacgtactagacaaatagggacaacccttatgcccagagcctattgaaattattccaactacccaatcctaaatttgtttaccctgtattacctgttcctgcctgcaraaaccacaaggaaaacttgcccagtttcccccctccaccctgccttttgaccaagcccagtactccctcaagtggcccccctgtagtggctacttttatgtgtcaacttgactgagacataagatgcccagatatttgggcaagcattattctcggtgtgtctgtgagagtgttcttggatgagattaacatttgaatttgtaaa

SEQ ID NO: 227119 - DNA, 466 bp, Homo sapiens
tgactcccttgctacctccccctgtgcccaggaggaatcttcttcctaggtacactttaactaaaacccaacacatttagtctgtacttcctacagtcttatctggctgtcacactttgatccactctacacctgccctaatcaccttagggccacgtactagacaaatagggacaacccttatgcccagagcctattgaaattattccaactacccaatcctaaatttgtttaccctgtattacctgttcctgcctgcagaaaccacaaggaaaacttgcccagtttccccyctccaccctgccttttgaccaagcccagtactccctcaagtggcccccctgtagtggctacttttatgtgtcaacttgactgagacataagatgcccagatatttgggcaagcattattctcggtgtgtctgtgagagtgttcttggatgagattaacatttgaatttgtaaa

SEQ ID NO: 227120 - DNA, 466 bp, Homo sapiens
tgactcccttgctacctccccctgtgcccaggaggaatcttcttcctaggtacactttaactaaaacccaacacatttagtctgtacttcctacagtcttatctggctgtcacactttgatccactctacacctgccctaatcaccttagggccacgtactagacaaatagggacaacccttatgcccagagcctattgaaattattccaactacccaatcctaaatttgtttaccctgtattacctgttcctgcctgcagaaaccacaaggaaaacttgcccagtttcccccytccaccctgccttttgaccaagcccagtactccctcaagtggcccccctgtagtggctacttttatgtgtcaacttgactgagacataagatgcccagatatttgggcaagcattattctcggtgtgtctgtgagagtgttcttggatgagattaacatttgaatttgtaaa

SEQ ID NO: 227121 - DNA, 598 bp, Homo sapiens
aaaactaaggctgattcagggaggctgcaaagcttaccaataaatcccaaatgaaatgcatttttgggttccaggatgtcccgaatgggagcaagtaatatactyagtgctttacttacttgtggaggacctaggatgtgagggattgttcaaaagcctaaactgcactaaatgggtccatttacaaactatacattctgctcctctgtgtgcttttagacaaaagaaagtttcaatatatttaggagaatttggtgattgtagtatccaaagctaaatggtggagtgagggtgtaggctttctgaatcctgggcatctctctttttctccctctgtttaaagggcaggaattttcctcagagtttcttgtggaaagttgtagacttctcaggatttttctaaatataggagataggttattttggtgttgcctgaagcctcccttttttctagggaactggggccgttagttcaagaaccacttggcgcacagctatacatgtagaaagagtctggcttccccactctggttgggccactctgctggaacccaggaagagtggagagatttagaaagccacacagaatagggaattg

SEQ ID NO: 227122 - DNA, 609 bp, Homo sapiens
tgctaattattaattgaggataggaattctcacctatttcttgtctcatatatagggctgccaccagcacatagtacatcttgaacagattagaaaaatgtgtcccttcctcatgacactttactgccatctaccagaaaattgctattatagataaacaaatcagggatgattatagttgtgagtgattaatggggctctgtagagttgtgcagtgctcaacccacacatctgtatgagacagccctgctaatattcaggcttagtttctgattctcagccaagatagctgttgtcatcttgacctctctagctttcgttccttgtgccttagctctctgactgagtctaggacatagtcccctgccccaccccaccccgcttttttccctaaatcccttgggctgtcttggtttttcctttctggctcatttcatctgtcttcaaacttgastccttcagtgaactggttggtgcccttttgtcaccttctagacaggaagaagtaattcatatttttctataaaacttgtgagtcagagtcacagctccaccagcattcctaatgcctaggagaatttctgtgaccatgtagcccatttctcttta

SEQ ID NO: 227123 - DNA, 558 bp, Homo sapiens
attggatttttccagtggttttgcaaattcctggtataccatgctcataccctaatttgagaagcattaggatacaagatagattgactttgtttgagtaaaatggtttaggtctaaacacagagtgagtctgcttgactggaggcctccaatgaagaccaggcagctgtgggaaatccagcagaaagaagttttgtcagtgagcagagtaaaagaagcaacacagtacaaaatagttgttgaaaagggaaagtgagggacctcagtgtcagattttacttattccctttacttattttaccatatatccagggggcacctgtgttctcctaacagaagctaaattccatgagcatggacctgtctgtcctgttctcagtgcccagagcactgctgggcacaaagtagatgctcagtagctatttatgaatgaacgamtaaatgactaaatgattgaatgagcagagaaagtagcaaggcctacagccatcactgatctgagactctcccacaagaagatcaggaaaaatgtatcacgaataaagaatgaggccaccc

SEQ ID NO: 227124 - DNA, 573 bp, Homo sapiens
ccccagacactggagctatttgaaagggaatttaaaacaactttgattgatatgttaaaggttctaattgaaaagtagaacacatccaagatcagagggrtaatttcatcagagaggtgatagaaaaaatataaaaccataacagagacaaataacatctttaacagctcatttgtagactcaacacaaatagacttgaagaaaggtaagtaagagcaattaccacaaatgaaatcccgcaaggaaaaaaaatgaatataaactttcaaaagaatagaaaatccaagagctaggcagtaatattctggaggacaagaaagagaaaaaggggcagaagaatatatgcaaagaaataatgaccaagagttttctaaaatttataacagccatgaaacagtatatctaagaaactcagaaaataccaaccatgataaataccaaaacaaaaaaagatctagacataacatattcaaactgctaaaacaaagacaatgagaaattcttgaaagacaatcaaatataaaagaaactttatatatagatgaataaacataataattacaacaaacttct

SEQ ID NO: 227125 - DNA, 599 bp, Homo sapiens
gacaggtgtttggtttcttcccccagctcttaaaagatgttgtgacactttctcctggcctccatggtttccagtaaaaatctactgtcatcaaaatcattgtttctctaaggcaatgcatcgttttcctctgctgcattcaataaattttctttatgtctagtgttcagaagtttgattataatgtgttttgtcatggatttatttgggtttatgctgtttgagattcattttgctttatgaatctttatgtttatgtcttttgccatattagggagatgtgtaagctctatttcctttaatacttttccagttccacattctttcttttgcccatccaggactccaatgaaatgaatgttagatcttttattattctacagatccctgaggttawgttaattttttcatctattttctttatatgtttagtttggctcatatttattgctctgtcttcaagtttattgactattttctctctcctctttattcttctgttgagcccattcaatgagttttctattttggtcattgtatctttcagttctaaaatttccatttggtttgtctttatattatttatttatatcactgga

SEQ ID NO: 227126 - DNA, 480 bp, Homo sapiens
  misc_feature (1)...(480): n = A,T,C or G
taaaaaccctcaaaaaactgggtctagaaggagcatacttcaacataataaaaaccatatgtacaaaaaacccaaaagctagcaacagctagtatactgaatagggaaaaactgtaagatttttctctaagatctggaagactacaagggtgcccactttcaccactattattaaacacagtactggaagttctanctgacaatcacacaggagaaagaaataaagggcatccaaattggaaaggaaggaatcaaagtatccatgtttgcagatgatataatcttatatttgaaaaaaaactaaagactccaccacrtaaatgataaacaaattcagtaaaattgcaggatacaaaatcaacatacaaaaatcagtagcatttctatacaccaaaagtgaacagtctgaaaaagaaatcagaaaagtaatcccatttacaatagccacaaataaaattaaattcctaggaattaaccaaa

SEQ ID NO: 227127 - DNA, 578 bp, Homo sapiens
ccatttactataatgtgattattacacattgcatgcctgtatcaaaatatctcatgtaacccataaatacatacacctactatgtacccccaaaaaaactaaaatttaaaattgtttaaaaagaaatgctagtgagccatgtagcaagaatgagaaggtgggtggaggagtaagagacagagagaaggagagaagaaaaaaaggaagggttgggggaagaagggaagaaggaaatattgctttgaatgtgtttaataaaaaggctgcatatcaaaaataatcctkgaaaaaagcaacatgacataaaatatgaagtaatagtaatctggacctaaagtgctatattatgttttagtatcctaaaatgtaattaataaggtgagagatagaaagtaaaagcatactaggtttctcagcttttaccttttgccataagtgaaatgttttaaatttccaaaaattaaggactttcacacaactaaatgttatatagtgattaaaaatatgtacttctggttaaacatacagcatagtaaacccattttccctcagttcacattgattggacttagttccca

SEQ ID NO: 227128 - DNA, 578 bp, Homo sapiens
ccatttactataatgtgattattacacattgcatgcctgtatcaaaatatctcatgtaacccataaatacatacacctactatgtacccccaaaaaaactaaaatttaaaattgtttaaaaagaaatgctagtgagccatgtagcaagaatgagaaggtgggtggaggagtaagagacagagagaaggagagaagaaaaaaaggaagggttgggggaagaagggaagaaggaaatattgctttgaatgtgtttaataaaaaggctgcatatcaaaaataatccttgaaaaaagcaacatgayataaaatatgaagtaatagtaatctggacctaaagtgctatattatgttttagtatcctaaaatgtaattaataaggtgagagatagaaagtaaaagcatactaggtttctcagcttttaccttttgccataagtgaaatgttttaaatttccaaaaattaaggactttcacacaactaaatgttatatagtgattaaaaatatgtacttctggttaaacatacagcatagtaaacccattttccctcagttcacattgattggacttagttccca

SEQ ID NO: 227129 - DNA, 394 bp, Homo sapiens
ccccctcctgcagagccagtgcaccccagatgcgggcagcagtcaggggcttggtggtgggagtgaggcagggaagatgtacaccctcacatctgctcctgccctgtgtgcggcaccttaccgtggccccggctaactatgtccagaagaaaacctcacatgtacgtcaggcrtatggcagtcgcttcccaccacgacccaccaccgctgagttagggcttagaccccaactccaccctgatggtgagaacttgggcacgtgtctcaacctcttgagttcctcctctgaaaaatgcagccaaggatgctactcccaaggctgttgtcaggatgcactgagctaagatggtcatcatctcatttagtgcccagcacccagtctatcatagtcaaa

SEQ ID NO: 227130 - DNA, 603 bp, Homo sapiens
tccaagttgtccctgagaggcgggaggactgagctgcatactccacgatgagctgatgtgggatggtccttcatccactcatctagcatatgtccactggcactgccatttgcagggcacatgccatgctgaagctttagaggtgaagcagacagaatccttgcctccaaggagcttacagcctagagggagagaaagtcctatcaccagacactgataatgcagtcttgctcagcagtagtgcattagaacaataatagactgatgctgaggtacagagctgcgaatatgacatatcaacagggtgggtccccaaatcgcacatgtgcaggatgagaaagatacaatttgcaggcaaaagacttagaaatttaattattaataatcagggtaataattagagtaaacayatgccttgtgcaaaaccctgaacatgttttatctcatggtaggttctaatattatccctctttgaacagcaaaggcaactgagactccgagaagtgatgtagcttgctcaagttacacagttaagtgagggcccagtttatataacttcagagtactaacgtacagctctgaagttgactgtaaactgaattc

SEQ ID NO: 227131 - DNA, 568 bp, Homo sapiens
aaccaaccttgcatcccaggaatgaaaccaacttgatcatgatgaattaactttttaatgtgcttcggattcagtttgctagtattttgttgaggatttttgcacatacattcatcagagatattggcctgtagctttctttyatcattacgtctttgccagattttggtatcagggtgatgctggctttatagaatgagttggagaggagtccttcctcctcaaattttttgaatagtttcagtagaattggtaccagttcttcaccacattaagagattcaagcagaaaaaaagttacagtatttctacatagatgcaaaatttctaaagcatttgataaaacttaatatccattcaagatttttaaacacttaagaaaaaagaaatagaatgaaagttcttaatctaataaaaagtatctgtagaaaaccaaagaaaagtaatgttttatgtcaaaagcttgtcctgtaaagtcaggaacaattaaagggtgcctaatatcaccatttctattctgtgttgtactagagcttctaactagtacatgaaggataagaaaaacaaat

SEQ ID NO: 227132 - DNA, 568 bp, Homo sapiens
aaccaaccttgcatcccaggaatgaaaccaacttgatcatgatgaattaactttttaatgtgcttcggattcagtttgctagtattttgttgaggatttttgcacatacattcatcagagatattggcctgtagctttctttcatcattacgtctttgccagattttggtatcagggtgatgctggctttatagaatgagttggagaggagtccttcctcctcaaattttttgaatagtttcagtagaattggtaccagttcttcaccacattaagagattcaagcagaaaaaaagttacagtatttctacatagatgcaaaatttctaaagcatttgataaaacttaatatccattcaagatttttaaacacttaagaaaaaagaaatagaatgaaagttcttaatctaataaaaagtatctgtagaaaaccaaagaaaagtaatgttttatgtcaaaagcttktcctgtaaagtcaggaacaattaaagggtgcctaatatcaccatttctattctgtgttgtactagagcttctaactagtacatgaaggataagaaaaacaaat

SEQ ID NO: 227133 - DNA, 476 bp, Homo sapiens
tctcaggacagcattccaggcaggaaaattggggtggtgattgggaaagggtgaagggcaaagtacaaaaggcccctgccaggtgaattcctctttttttcagaaaaacaattgatttcctggtcattcttagcaggagactcctaatttcatctcattgctagaattaggtaaagcagcccagctagctgcaaaggagtctgggaagtgagtatttgtatctgggcatatttgcccacttgaacaaaacagggttctgttaggaaggtagctggggacaaaatggacaccgaactgtccagcagcgttcttactcagcgaacagggtttctgccctcaaggcgcacccacatctgcttggccacatacatttggacctttttgctggagcacraagtaggatgttgctggcatgtgccctggagggatgcccagcagtctcctaccatctccagagggagtgtcctgtgcccagc

SEQ ID NO: 227134 - DNA, 381 bp, Homo sapiens
cccctttcctgctgatgtcttggcagtggggagaggaggggtgacaaaaccgaaagtctctctttttttttttttgtaaagtcgtctcttacaggaaaatatgtggtcctttcaaagccctatcccttgtaagggtggtttctctgcactcgggggggtctccctcctgtttccttttgaagatggtgtctggctgtgtggagaagcttgcatgggccaggacaggagtctcttgccctacttgccatcactggacctgctcaggaggggcgggtctggtcygccctggtctccgggaaccgcatccacgttctctgaggctgactggacttcgctttgccctgaaaacttccaattcacagtcaatcttcttcccatatg

SEQ ID NO: 227135 - DNA, 560 bp, Homo sapiens
agtgctgggaccttctgtttctttctatgtaggaccctagggctgtgaacagctgctgaccacccgcctttccataaaacagggctaatgacaagaaggacttccaggaaggactgttgtgcggatgaaatgtgatcatccacrtggcacccccagcatggacctggcacaccgcaagtgctcactgctgtctgccattgctatgatgtggaggtttactcccctatctaaatttcagtgaggcttcaggctgaccatgtcagagctgagcctcagttcccctttataagacgagatgtgatgtggcccccaccaggcgttggagggattctggaagacacacagaagcccattagcaaatgcctggatgtgaaggggaagcacatttcctactgggatttgcaggcatgatggtaatattcttttctttttgtttttgagatggagtctcgctctgttgcccaggccagagtggagtggcgtgatctccgctcactgcaacttctgcctcctggtttcaagcaattctcctgccttagcctcccgagtagctgggatta

SEQ ID NO: 227136 - DNA, 492 bp, Homo sapiens
caaactcttggcgtcaagtgatcctccgccttggcctcccaaagtgctgggattacagttatgagccactatttttggcccagtccagcttttgtattggtttacatgaggcttttagtttggatctttattcaatgcctcttctgtkgatgagatggtgtggggtacagaggcaggggtgctaagaccagcccctcctgcagggagaaggccacgatcctccctgactcttgtgggggcttccgtaatgcccagtactgagtcccctaccctgggacctgtgctctgcctctggaatggaagccactctgtaacccctaaaaccagagaaattggcagctgctcccttggctgagaacatcgctgactccaagtgccccagtgctctccactcatcatttcacagacgaccctgagggaggcagggccagtgtggcctcattccacagacgaggaaacagtctcggccacttggccaaggtcccagagctt

SEQ ID NO: 227137 - DNA, 388 bp, Homo sapiens
aacagcactggtgccaccgtatgaaccacacactctgacacgcggtgacagctgtctaccctggaccccaaccactcrccctatgttggcccttccagtcggcccctcagcttcaggaacaagtcctgatgccaaggatggggtgagacaaacccaggaaattatggaagccgatggccatcctgtggtctccttcccttctcacaccatgggcgacgagaggtcaagggagagcttggaaaaggcctcatttagggtcaccaggcttagcaaataaaaatataggatgtaggctgggcacagtggctcacacctgtaatcccagcactttgggaggcccaggcagggggattgctggaggccgggagttcaagaccagcctgagcaa

SEQ ID NO: 227138 - DNA, 388 bp, Homo sapiens
aacagcactggtgccaccgtatgaaccacacactctgacacgcggtgacagctgtctaccctggaccccaaccactcaccctatgttggcccttccagtcggcccctcagcttcaggaacaagtcctgatgccaaggatggggtgagacaaacccaggaaattmtggaagccgatggccatcctgtggtctccttcccttctcacaccatgggcgacgagaggtcaagggagagcttggaaaaggcctcatttagggtcaccaggcttagcaaataaaaatataggatgtaggctgggcacagtggctcacacctgtaatcccagcactttgggaggcccaggcagggggattgctggaggccgggagttcaagaccagcctgagcaa

SEQ ID NO: 227139 - DNA, 617 bp, Homo sapiens
tgggcatccctgttttgttcctgatcttaaggggaaagttttcagtcattcaccattaagtataatattaactgtgggttttttaatagatgcacatgggcagagttttaatccagacctgtattagtccatttccacactgctaataaagacatacccgagactgggtagaatttataaagaaaaagaagtttataaggaaaaraattataaagaaaaagaggtttaatggactcacagttccacatggctggggagacctcacaatcatggcagaaggcaaaggagcaaaggcacgtcttacatggcggcaggcaagagagcttgtgcaggagaactgcgctttataaaaccatcagccctcgtgagacttattcactatcatgagaacagcgtaggaaaaacccaccctcatgattcaaatacctcccaatgggtccctcccatgacacgtggggactatgggagctacaattcaagatgagattttggtggggacacagccaaaccatatcaagaccccacagactccaaagccccgactcttttcttagccctaggatagggaagataagaggggtggcctcgtcagggaggcctgcagggatgaagttcac

SEQ ID NO: 227140 - DNA, 617 bp, Homo sapiens
tgggcatccctgttttgttcctgatcttaaggggaaagttttcagtcattcaccattaagtataatattaactgtgggttttttaatagatgcacatgggcagagttttaatccagacctgtattagtccatttccacactgctaataaagacatacccgagactgggtagaatttataaagaaaaagaagtttataaggaaaagaattataaagaaaaagaggtttaatggactcacagttccacatggctggggagacctcacaatcatggcagaaggcaaaggagcaaaggcaygtcttacatggcggcaggcaagagagcttgtgcaggagaactgcgctttataaaaccatcagccctcgtgagacttattcactatcatgagaacagcgtaggaaaaacccaccctcatgattcaaatacctcccaatgggtccctcccatgacacgtggggactatgggagctacaattcaagatgagattttggtggggacacagccaaaccatatcaagaccccacagactccaaagccccgactcttttcttagccctaggatagggaagataagaggggtggcctcgtcagggaggcctgcagggatgaagttcac

SEQ ID NO: 227141 - DNA, 617 bp, Homo sapiens
tgggcatccctgttttgttcctgatcttaaggggaaagttttcagtcattcaccattaagtataatattaactgtgggttttttaatagatgcacatgggcagagttttaatccagacctgtattagtccatttccacactgctaataaagacatacccgagactgggtagaatttataaagaaaaagaagtttataaggaaaagaattataaagaaaaagaggtttaatggactcacagttccacatggctggggagacctcacaatcatggcagaaggcaaaggagcaaaggcacgtcttacatggcggcaggcaagagagcttgtgcaggagaactgcsctttataaaaccatcagccctcgtgagacttattcactatcatgagaacagcgtaggaaaaacccaccctcatgattcaaatacctcccaatgggtccctcccatgacacgtggggactatgggagctacaattcaagatgagattttggtggggacacagccaaaccatatcaagaccccacagactccaaagccccgactcttttcttagccctaggatagggaagataagaggggtggcctcgtcagggaggcctgcagggatgaagttcac

SEQ ID NO: 227142 - DNA, 649 bp, Homo sapiens
atgaatacttactgggcacaaaaacgcctttaataaaatttgcctgtatttgcaattatcttagctttagctactaattattactctaaaacagatatgtattcagaattacatatttctttcttcttttaaaaattttattattattatactttaagttttagggtacatgtgcacaacgtgcagktttgttatgtatgtatacatgtgccatgttggtgtgctgcacccattaactcgtcatttagcattaggcatatttcatttttcccaaatcttgggtttatcttccatacatttgaaaatatttggataacacaaatcaaagaaacttttaatttctgtgtgagaaccacagattcaaccatgagaggttcctctattcttgtttttctttacatttatctcccatttaaatagctttaatatttctctcatattcttgggatgatgtaattttctgaatatatatcacagcgtaatatctaatactagttactgtttgcaataggaagaatgccagttactgtttgtaatagtaccagttactgttaacaaagcaatatattacttgctgtttaataaaggttttcttattaaagagatgcagtttttgttaaagctgtggtccctaacataacaaaatgtg

SEQ ID NO: 227143 - DNA, 528 bp, Homo sapiens
aacatcaccagtaaaaacacatgttaacatcaggtacctcctgataccatgcactgagaagtacacatcatctctgtggcattcttcccaataatgcataaccttaatcaaatattgagaaaacatcaggcaaattcaatgtgaggaacattctccaaaataactgaccttcaaaagtgtgaggtcatgaaagacaaggacagactggattcacagtcagagattggagagacacgtcaactcaaggcaatgtgggatcctgaaacatagacaagtatagtagtgggaaaactgggtgaacacagaaagtctgtagtttagttaatgctatggtagaatagcattaactaaattggctaatattggcttctcattttgatagttgtactgtgattacacaggatgctaacattaggggaagatgagtgaaggttatactttatcatttttgcaacttttttcatawgtctaaaattattaaaattttaaactaaagttataaaagagaagtctttaggttgtttattg

SEQ ID NO: 227144 - DNA, 591 bp, Homo sapiens
gaatggaataaaagctggcccagtgattggaggtttcactctggggatggtgccaggaagccagacagcattatgtcccaccagctgctcctgccattgagaggctgcttcctgcttctcgggataattacttcacagctgctcatcactaggagcaagagtggtacctaagatttagggcagccctgccctgaagaaaagggttgtgctgctgcctcaagtcactgatcacaaatttgtctgctcaatgagtcctcttttgtttacrtttcaaaaggtattaaagatcaagacttcttgggtgtctgtgtgtgtgtgtcaggggcagacaggtacaagtaacttggctttgtgggaaaggactttgacactcaggttaaaaggaagacagtactatcgtgataacttgaaaatggaatatattgtcagtgcttcaattgtggctcaaggtatgaaccctgatgcatttggggaaattgtcagattgcttcagcagatagcagtacttggtctttaactaaaagcatggctcataattgagctctgtttacatctgatatcctctcctgaggagggaaatggatgcttgat

SEQ ID NO: 227145 - DNA, 510 bp, Homo sapiens
ccaggggcctcttttattcttcttctccatgaagcacatatattgaaagatgcggtctaccaattaaactgtacctattaaataataagaactgcatcggccaacaatcattttattgagtattttcacatttcatgcactgtgtatattacatttgttaactttttaaatcctcgcaatggccctaagaggtggatgtgattactgttcccattttatagtcgaggaaactgagacacagagagattaagcatcttgtacaaggtttataactkgtaagtggtataatcaatgtgtcttccactgttcagttatagctatataacttctaattagaaggcaataacgagggtcctcaaatgagttgatataattttagccagaagcaaaaagacttgttttttcagtttgtctgtgcaacctggtcggggtaaatatatgtttttttgtgtgtgtgactttccataatgttgaaactcttataagactcccattattgtttttgaagac

SEQ ID NO: 227146 - DNA, 523 bp, Homo sapiens
catacagttgagaggttaagggcccatgcaccagaatcctgctgcatggttggcttcactgtttatcagcagagtgaccttagtcaagctgtttaacatcctgagccccaggcttcttatttgtaagtggagtggtagggaggactacataagatagyacatggaaatgtttgaacggcacttggcgtttagtaagcgctcagcaaatgccagctcttattatggttatgcatttacatcaaagaatatggataacacaggacctgaggcttactggataacacaaaggagatagagtgaggtgcaagagctcaatggacggtaaatttgctcttctgatttcctctccggcatcaagcaggtgggatgcctccagaaggagagctccctgacctcaggatgggtaccccaggacaccccctgtatcatctctaaactacaggtgtataaagtgactctaagtgacattccctgagcagcttcagggacctcatggttagtgatctcaaaagctgcccagctc

SEQ ID NO: 227147 - DNA, 523 bp, Homo sapiens
catacagttgagaggttaagggcccatgcaccagaatcctgctgcatggttggcttcactgtttatcagcagagtgaccttagtcaagctgtttaacatcctgagccccaggcttcttatttgtaagtggagtggtagggaggactacataagatagcacatggaaatgtttgaacggcacttggcgtttagtaakcgctcagcaaatgccagctcttattatggttatgcatttacatcaaagaatatggataacacaggacctgaggcttactggataacacaaaggagatagagtgaggtgcaagagctcaatggacggtaaatttgctcttctgatttcctctccggcatcaagcaggtgggatgcctccagaaggagagctccctgacctcaggatgggtaccccaggacaccccctgtatcatctctaaactacaggtgtataaagtgactctaagtgacattccctgagcagcttcagggacctcatggttagtgatctcaaaagctgcccagctc

SEQ ID NO: 227148 - DNA, 523 bp, Homo sapiens
catacagttgagaggttaagggcccatgcaccagaatcctgctgcatggttggcttcactgtttatcagcagagtgaccttagtcaagctgtttaacatcctgagccccaggcttcttatttgtaagtggagtggtagggaggactacataagatagcacatggaaatgtttgaacggcacttggcgtttagtaagcgctcagcaaatgccagctcttattatggttatgcatttacatcaaagaatatggataacacaggacctgaggcttactggataacacaaaggagatagagtgaggtgcaagagctcaatggacggtaaatttgctcttctgatttcctctccggcatcaagcaggygggatgcctccagaaggagagctccctgacctcaggatgggtaccccaggacaccccctgtatcatctctaaactacaggtgtataaagtgactctaagtgacattccctgagcagcttcagggacctcatggttagtgatctcaaaagctgcccagctc

SEQ ID NO: 227149 - DNA, 595 bp, Homo sapiens
attcctagaaatagaataagtagatctaaagatatatacattttaaatttccttggtgataaatatctagtcaaggagcttttagccatttaaatctaatgacacaaaatgttacaaaaaatctaatgacacaagtgacacaatctgactccctcaaatgttacgtgagaatgcttctttccccaaaacttgttgaaaatagggataattaaatttatttttcaagtttatgaaggaagagaaatgtctgtttaattgaaaagctaattaattacacagttacttaatttggtatacatttttacattaagatgtttcttaaatcaaagtcttatttctcctctgaacttagaagagatgctaatattttaatttttaaattaacatagcctgtagtcccagctactcgggaggctgaggcaggagaatggcgtgwacccaggaggcggagcttgcagtgagccgagatcgtgccactgcagtccagcctgggtgacagagtgagactctgtctcagaaaaataataaaataaaataaaataaaaaatatattaacatatggtaaaattgacttgatttttgtgtgcagttctgt

SEQ ID NO: 227150 - DNA, 614 bp, Homo sapiens
gtgtttattccagtaatgacaaaacattgccctttccatgatggaaatgctccagcgtaatcaacctgccaccaggtagctggctgatcaccccagggaatggtgccatattggggctcagtattggtctctgctgccaggtcagctttgaggaktggaagtccatgtctctcagcccatacataacctccatctctgccactatggccattgtgttcacgagccaattaagctattgcaggggggtctggtgaaggatgcttactggtatttacagaatgggtcatcctattcacttgattattaaagccctcctctgctgaggtcaccgtttggtgagcattcagatgggacacaaatatctttgcatccttcgcccactcagaaagctctatccacatacctcttctcccattttcttttgctacaaattttctaataatgttctctccaattccctcaccatctggccaaaccattggctacagcccatgaatcagtgtgtaatcatatatctggtcatttctcctttcaagcaaagtgaaccgcctgcagttctgcccattgtgaagattttctttcattattgtctttaaggatgtcctagaagaaag

SEQ ID NO: 227151 - DNA, 644 bp, Homo sapiens
tgtctactcattaatacacatgtgtggtcctggctttcatgcattaattattaaaaatttttcaagcaatcttcctgagtataaactaaagtgaaatttgtgttctatattaagattcaaaaatatgcaaatctcaagggatcccaggtctgagagctacataatttatatgaagacacaaacactttggatataattattctgctgcccatagttatttcagactaaattaatttaggcagatccagaaacctttttagcatctcagtagggaggatggcctacaattccttaagtttcatgtatcactcttgtataactaattattatcagcatccttattatcaatgatagaatgatgaaagctaaytgattaatagagtatttgagcatcagtaaacataggaaagccccctcatttttcttaagttattatttaattaagcagtgaacatgaaattcaaccccacaatacatctgcttttattttgatggagatgaaaggtgtttataagcacctttgcgaaaagattctcaattagactgttcgcctcaaaagattccataggattatctctgaagaacagctgagaacagagtatgtcaggctatttctttttttttctttatttcttctaaaacaa

SEQ ID NO: 227152 - DNA, 644 bp, Homo sapiens
tgtctactcattaatacacatgtgtggtcctggctttcatgcattaattattaaaaatttttcaagcaatcttcctgagtataaactaaagtgaaatttgtgttctatattaagattcaaaaatatgcaaatctcaagggatcccaggtctgagagctacataatttatatgaagacacaaacactttggatataattattctgctgcccatagttatttcagactaaattaatttaggcagatccagaaacctttttagcatctcagtagggaggatggcctacaattccttaagtttcatgtatcactcttgtataactaattattatcagcatccttattatcaatgatagaatgatgaaagctaattgmttaatagagtatttgagcatcagtaaacataggaaagccccctcatttttcttaagttattatttaattaagcagtgaacatgaaattcaaccccacaatacatctgcttttattttgatggagatgaaaggtgtttataagcacctttgcgaaaagattctcaattagactgttcgcctcaaaagattccataggattatctctgaagaacagctgagaacagagtatgtcaggctatttctttttttttctttatttcttctaaaacaa

SEQ ID NO: 227153 - DNA, 644 bp, Homo sapiens
tgtctactcattaatacacatgtgtggtcctggctttcatgcattaattattaaaaatttttcaagcaatcttcctgagtataaactaaagtgaaatttgtgttctatattaagattcaaaaatatgcaaatctcaagggatcccaggtctgagagctacataatttatatgaagacacaaacactttggatataattattctgctgcccatagttatttcagactaaattaatttaggcagatccagaaacctttttagcatctcagtagggaggatggcctacaattccttaagtttcatgtatcactcttgtataactaattattatcagcatccttattatcaatgatagaatgatgaaagctaattgattaatagagtatttgagcatcagtaaacataggaaagccccctcatttttcttaagttattatttaattaagcrgtgaacatgaaattcaaccccacaatacatctgcttttattttgatggagatgaaaggtgtttataagcacctttgcgaaaagattctcaattagactgttcgcctcaaaagattccataggattatctctgaagaacagctgagaacagagtatgtcaggctatttctttttttttctttatttcttctaaaacaa

SEQ ID NO: 227154 - DNA, 506 bp, Homo sapiens
ttgcacagtggtggacatgttctgtatctgtgctgaacagtacagtagcccctacctacatgtagctactgagcactcagatagtaagactgaggaactgcatttttaatttttgtggactttagttaatttaagactaatttaaatagctacatgtattaggattctccrgagaaacagaaccataagtgtgtgtggagagagagagagtgtgtgtgtgtgtgtgtgtgtgtgtgcgtgtgtgtagaggaggggattgattttaaggaattggcttctgtgattgtggagggtggcaagtccagaatttgctggggtagtcggggcaggggtgggggtgcagggtggagatcggggaggagttgaggcctcatctggactctgaaggccatctgctggcagaattccctctgcaggccttccactgataggatgatcccacccacccctattagggagagtggttggctttactcagagtctgctgatttagatgttaatctcct

SEQ ID NO: 227155 - DNA, 561 bp, Homo sapiens
ccagaattcacgttggcagttaatctgaagatatagatggactgctcatgaaatctagagttccttccaaaacaaattattgtgagattaaaatattctctttctgttggcacagcaagtgaaggcaaagtcatgggaacctggtggactttagaaatgcttggcctctcctcccgtggtggctggtgccaagtcaatctgtagctgattattgtctcgaatatgtactcaaatgagctgtgtagtaggccatctgctgtctcctcgactcagctgataggccctggaaaagggaaatcctgccaaaatgcaaatatcctacttaactgataatayagggagaggagatacaggctgtgggggaatgggggtagggaagggaatggggcgtggggaagaaataagtgactgtcttcacccttcctcgatgtctttccatcctcctgtgtttcttcctgttagagaaagaccaggtgtggatcagtagaccccgctcacaattggagttgcggggtcagactggaagtagccagggaattaggctcggttgtgaggatgctt

SEQ ID NO: 227156 - DNA, 587 bp, Homo sapiens
gccacccccattgtgcaaactggcttttccctccagcaatttcgagtgrctgtctattttgtatagcgaaaggaggtttttgtagtggatgacaaatcttgagctaaaaaagaaacatagtatgactcaaacagtgagctgagtttacatagaaattataggcctgtgctgctgtttggtaagattttggaactaattactaggtattcccaaaacaacacttctctgggcatcacgtgcatttctgaaaatttcctgagggtgattgctggccaagagcatttcctgcatgaaaatccgaacagtttcttttttattgttacactctgatgcaagatttctaagaatctttctgtgaatcaaagacttcactagaaataatgctgtgtggagtccctttactacctagggacctattcagctaaacaagcatttctgttgcaatgtaaatcaactttctggaatcaaagagattccagtttaaatttgtctataacacacatgagtgtgagtagagtggttgaatggggaaagcccagtcttgaactgacatgtcttagaacactgaaaaatgtcacaagttatgt

SEQ ID NO: 227157 - DNA, 576 bp, Homo sapiens
catataaatttagtatatgcasagaggcatcacaggaaaaacaaaaaagtagctatctgaaaagccagtgagatttaggagcttgtataccctcttcatatgggagaggggaggggggatattggcaatttaggggagagtaaacggttttgggggaaagatggataggcccttggaagaacagatgagagctggtagcaaagtttatctggatgtggaactcacttctagcctcctctcctgtgataagacttaatcttctctggttgatgaaactccccagatggggattgatgacaactgagtttcttctggaggatctgtctttaggcagataagaggagtttagagaaagactgcatttttatttttcaagtgccttcagctgaaggcaatcaatataccaaagcagtatatttgggggtggcattttctgaactcctttgctcctgtcccctcagctgtaccattttagcacgtgcacctgctagcactgctgtctctttgcctgaaggctttctctgtctgctggagctcacagcacatggtaggacagaagtgcctgggaatgaatgc

SEQ ID NO: 227158 - DNA, 576 bp, Homo sapiens
catataaatttagtatatgcacagaggcatcacaggaaaaacaaaaaagtagctatctgaaaagccagtgagatttaggagcttgtataccctcttcatatgggagaggggaggggggatattggcaatttaggggagagtaaacggttttgggggaaagatggataggcccttggaagaacagatgagagctggtagcaaagtttatctggatgtggaactcacttctagcctcctctcctgtgataagacttaatmttctctggttgatgaaactccccagatggggattgatgacaactgagtttcttctggaggatctgtctttaggcagataagaggagtttagagaaagactgcatttttatttttcaagtgccttcagctgaaggcaatcaatataccaaagcagtatatttgggggtggcattttctgaactcctttgctcctgtcccctcagctgtaccattttagcacgtgcacctgctagcactgctgtctctttgcctgaaggctttctctgtctgctggagctcacagcacatggtaggacagaagtgcctgggaatgaatgc

SEQ ID NO: 227159 - DNA, 367 bp, Homo sapiens
tttctcgggatttattagagaggaagaaagctgggaaaagaaattgaaaacccattatgtgccaggacctgaggatataaatattaataaggcttgatctcagcctttaaggaatttgaagttgtgaggaaaacacacttttataaatgcacatttaacaatgcctttgctaaaggaataaaaatgaaagggagagtgactaaatgcctgattttgtgtgtgtgtgtgtgtgcgtgtrtgtgtgtgtgtcagcagtcctagcgggtacaggagattgatggagatggaggatggtcagagcagatacccaaaagtaacacttgaattggagcttaaaggtcagagaatagaatcataagggaacaag

SEQ ID NO: 227160 - DNA, 569 bp, Homo sapiens
ggactttctgaagaaagtggttattccacttcacaattaccttcttcgatttatcacagaaaaattgcttttattcagtaggtattatttgaaaggctggtctttgccccattttcttccactgaactctccataatgattacagaatgtgagttggttctctttttctatcaatattttatcatttagtacctgtgaaaacaattcccactttaccaagcacactcagggtgtgatgtgttttgaactaaagtacttctaaatatcaagcaaatagcatacaaggacacacagttaatcaaatactgctgttcactgcataacacagagtgtaagatacaaactaacatttctaacatttatacaaataggcataaaaacagataataactgtttctaaaatgtatcatatttctattgttcctctgtaagatttttcccctctcattctaaatayacagcttggcaacttggatcacacaggaattgttctgaacttgagactgtattgtgtaatattggtatactgttagaaacaaaattaatatatttcatacatattgcccttt

SEQ ID NO: 227161 - DNA, 400 bp, Homo sapiens
ggaaagttgagctgtgtacagtttctacagtggggaagaatggtggtttgttaatttgttaactaatttgttaacaggcaaaacagagattgactttggtcatwcaccagaaaattcaattgctctctactgtctacagaatgactctgcagaatagataggaataaaaccaatgtttccaaaggtaaaaagtgtacaggtacaatgtttacagaaaaggacaggatttgtgttccatcagcagccaatcaaatattattattgcttttctttttgatttagcagtgtatacatgaaaaaaggaatttcatttctttcaattattatgttctttaatatattggcttaaatttcctgtttacctgtaacccatacatagatcaagagaaaggaattttag

SEQ ID NO: 227162 - DNA, 400 bp, Homo sapiens
ggaaagttgagctgtgtacagtttctacagtggggaagaatggtggtttgttaatttgttaactaatttgttaacaggcaaaacagagattgactttggtcattcaccagaaaattcaattgctctctactgtctacagaatgactctgcagaatagataggaataaaaccaatgtttccaaaggtaaaaagtgtacaggtacaatgtttacagaaaaggacaggatttgtgttccatcagcagccaatcaaatattattattgcttttctttttgatttagcagtgtatacatgaaaaaaggaatttcatttctttcaattattatsttctttaatatattggcttaaatttcctgtttacctgtaacccatacatagatcaagagaaaggaattttag

SEQ ID NO: 227163 - DNA, 585 bp, Homo sapiens
ctcgttattagttctgactttggcctggcagtttccaaaatctaaaatgctctcttttacctttctaattaaatttgaaagccattcctgaactcctaaatttataaattttaaacaccaatatttcacaaataatagctgttttaatttttagtttggtttcacaatagaaaatctgcagtcttttaataagaataataagtgaatattttagctccctcattcatttgtcaatttcacgaagagatttatataatgtggaagtcaaatttttaacttactggtaagacatgaaacatttattcaatgaggtgctaaatattggtctaattcaaaaaatctgctagtcactattaacattagagatctacmgtatcttaatatgttacatataattagtactaatcttcaatcatttggcatttaaagacattaaaagctactcaaattatctagctaagaagcagctggtaattgataatatctacctctagccttagaaaattgtaatctcagctggatgtctccagatggggttataaaaaaaaagaaatcacgtttctcattgctctcagtaacacttca

SEQ ID NO: 227164 - DNA, 466 bp, Homo sapiens
gtcaagtttaattagtttaaagtttttcttttaacaattcaaatgggatcatgatatatcttgctgtttttcacttaatgtattttctcagtccttccacattggtacactagaacacactcttttaaaaaatggatgcatattaatctattgtgtagatgagccacactttttaaacctcagaatgggagtttatttttcttacaatattttactgcttaaaaaaagtgcaggagaagaaacagtaactatcttggtacttacaccattttgcaattaggtaactayatatgcatagtggttttttaaatgtgatatggctgggtctagagctaggagtttcaatatgagaaatctcaccttctaatttaaattttaacattttgggaggcccaggcaggaggattgcttgaggccaggagtgtgagaccagcctagtcaacatagtgagactccatctccacat

SEQ ID NO: 227165 - DNA, 424 bp, Homo sapiens
aagctgtggcaacaaaacgtatgaaaaaatatttatcagaaatattttatgacttcagttatcaatagggtttcttctctatggcagcataatttttttccagatggaaagataaacatgaggataagcaaggaaatcaagacaagtagctaggagcctcttggaggctacaggcagagaagtaagctgccagtgtggtcttctggagtcgaaatttaaaatgaactaacaggaaggactggggaaatatgaggtaacagatggatagttttaaaatcttcaacatgttttgggaggaggtaactctataagaagaaaaagacaaaagaaggcagaataatttttttattttattttattttattattattatactttawgttttagggtacatgtgcacaatgtgtaggttagttacatatgt

SEQ ID NO: 227166 - DNA, 584 bp, Homo sapiens
ggatttatgaacagggcagcactctgtttatgaaacagaaaggcattccattgggacaaaacagttttttctaaggtagcttgagttggatcaaggaaataacagagtgaaaaaagcagatttgttaacgtcgggttacttcaggttactttatttgcatgggttaacgcggaggggactttattttactgagtcaggttgactggcccccttttgtttggttgctgtgaatctcctgtatttgttgttgttgttgttatttgtttctttgcttgtttgttttccagaaaactgatctggctatatatattatagccttggctataatctctgtcctgatttttggaaggtcagatcttacaagtcaacagcttatgcttaggtttggtgatgtgaaaccttcgcattagtgactccactttggtttggtatgttggggtctagtgcaggagctcagtccagaawaaaagcctcccatagattttatttaacaaaggcaaagccttatagactaccagtttacaagggagggtaattccagagagcagaaggtaaaaaataatgaggcagggaaggagaaaagt

SEQ ID NO: 227167 - DNA, 411 bp, Homo sapiens
aaaactgaatacaggcaaaagtaagattcagtttgacttgcagttctgcttttattaaaccataattacactgatctcggtgtcagggcaatgtgatgtcaatwaagctagctatcttctcaacaaaaatgcctatgttcctttgcacatgaaatactcaagatattacttactggcaacagcagaatttggacctgtggtgctctaaaaatgcccgtctgttctgtatccacaggcttgttctggtacaccagctcatcattaagcaggtgctttgcatctataacttcatcgttataggctatccatgtctaaaatgtccatgattttcaaacactcacattaaatgtcatgattaattaagtctctctcagggaaaatttttgaacttgtaaaattgaaagtagattt

SEQ ID NO: 227168 - DNA, 592 bp, Homo sapiens
tacccaactgctccatcgacattttttaatagactaccctttcattctttctttctttttttttttttttttttttttattggagacagagtctcgctctgtcacccaggctggagtgcagtggcgtgatctcagcttactgcaacctttgcctcccaggttcaagcrattctcctgcctcagcctcccaagtagctgggattacaggcatgtgccaacacacccagctaatttttgtattttcagaagagacggagtttcgccatgttggccaggctggtctcaaactcccaacctcaggtgatccacccacctcagcctcccaaagtgctgggattacaggtgtgagccactatgcctgccctaccctttcattttttaacagactaccctttgaattaccttggcacctttctaaaaaatatatctagatatcagttgattctctattctgttctactaatccgtatggtctacccttgtgccaataccacaatgtctcaattactgtagctctacaataaaactggagatcaggtaatatgtgtcctccaactttattcttcttttaaaaagttattttgcctaagtt

SEQ ID NO: 227169 - DNA, 553 bp, Homo sapiens
taataaatttcccattcatttattcatctatctgctagttctgtcccttcagagaaccctgactaatacaccctataagactgctgttcaagacagcccatcaaactggtcacttacaaactttgcttcagatccctgaaacaaaacaaaacaaaacaaaaacaaaactgaagttcccctcttgtcttgttttatgttcttgggagcttgaccttataaccatgtggcagtacttcctctttgtctctgccattcagagaacaggaactttggggttcatatcatagttagccctaaaaattatattgagcagttaaaaggctttgcaagctcaaaattggctgctctagactccttctgggaagggcaatggagactgcccagtgccgtagaacaacttctgacttcctttcttgaattttcctttttctgagtacctgggaggttacytttggtaaagttcaaaagctacaagtatttgctgttttgcctggctagagtctgataatgagattttttttttttaaaagaatgctatggttaaaagtcagct

SEQ ID NO: 227170 - DNA, 565 bp, Homo sapiens
tgtcatgcatgtgcatgtgtggtctgacaatttcgcagtgcaagggtttttgtctctgctcctctgcctgaggacttttcccagtgcagtgcttgtagtgcagggaagccctgatgtgctgaggatataacarcccccagagataaccctcaaacaatgaaaggtgtaagtgaatagataaatagctcagcttctcaatccccaggtggagcaattttaaaatgcattccacttaactcctcagaggcttctagcagaattaaacatcagttgcccctggacatttctatttattaatgcactgtttattggtatcttgcctttccctgtctccctatctgcactctcttgcttgtgctttctgcactcactttgtacataacctatccatagcccgaatctaaattcagacatcgcaatatttcatttctgaactctttatggttttactaaatttttctttatattttattattcatgggcatttgcttcatctactaacttgtgaattccttaatttacatcctgaaaattctatattactaaacatagcttttgaccttta

SEQ ID NO: 227171 - DNA, 565 bp, Homo sapiens
tgtcatgcatgtgcatgtgtggtctgacaatttcgcagtgcaagggtttttgtctctgctcctctgcctgaggacttttcccagtgcagtgcttgtagtgcagggaagccctgatgtgctgaggatataacaacccccagagataaccctcaaacaatgaaaggtgtaagtgaatagataaatagctcagcttctcaatccccaggtggagcaattttaaaatgcattccacttaactcctcagaggcttctagcagaattaaacatcagttgyccctggacatttctatttattaatgcactgtttattggtatcttgcctttccctgtctccctatctgcactctcttgcttgtgctttctgcactcactttgtacataacctatccatagcccgaatctaaattcagacatcgcaatatttcatttctgaactctttatggttttactaaatttttctttatattttattattcatgggcatttgcttcatctactaacttgtgaattccttaatttacatcctgaaaattctatattactaaacatagcttttgaccttta

SEQ ID NO: 227172 - DNA, 565 bp, Homo sapiens
tgtcatgcatgtgcatgtgtggtctgacaatttcgcagtgcaagggtttttgtctctgctcctctgcctgaggacttttcccagtgcagtgcttgtagtgcagggaagccctgatgtgctgaggatataacaacccccagagataaccctcaaacaatgaaaggtgtaagtgaatagataaatagctcagcttctcaatccccaggtggagcaattttaaaatgcattccacttaactcctcagaggcttctagcagaattaaacatcagttgcccctggacatttctatttattaatgcactgtttattggtatcttgcctttccctgtctccctatctgcactctcttgcttgtgctttctgcactcactttgtacataacctatccatagcccgaatctaaattcagacatygcaatatttcatttctgaactctttatggttttactaaatttttctttatattttattattcatgggcatttgcttcatctactaacttgtgaattccttaatttacatcctgaaaattctatattactaaacatagcttttgaccttta

SEQ ID NO: 227173 - DNA, 466 bp, Homo sapiens
ttttctgtgtttacaatttgatccttagtttagtttagttgttttttaaattaaactaggaatgtcactccctttgtggatcttttctcttgagggatctggaggtattggtttcaaaagcctaaatggacagagaattccttcctgctctttccctccaagtatagctacaaacctggaaattatgcaaggggtgattgaaatagaactctgaaaggcacagagaggaaggagaacttgtyagggaacccaggattggagggacaacatagccacagggcaactcccacccaacaaaataagacaactcaggtctggtgtttccaacccccaacctagcaacagaggatggtctagctggctcattcctcacccagactgactgtatgccgcagacaacaccagtagaacaggcagtgccttcaagggtaaatccattggaagctctgctgaaaataattgtcca

SEQ ID NO: 227174 - DNA, 518 bp, Homo sapiens
attaaaatgtgttggggggtgcacttctgattcaaatgatgaggtgacttcagagtcctatggagtcaagatattctgaaggcccctctaaagagtaagcgactggatcttgtttgtatttatacactttctaaggcattgctggacttataacaataaaataaaaaattagtaaccacccctaagttttttttaatagtgctaaaatcaaaaagtttagttggccctgtacaaattccagtaaaagggctgctatcagaagacrataccttagatcagctatgaagtggggaggctgaaactaagaatcttgtattaggttaagaattttcttttttttttttcctagacaatggctacacctttattgagcatgtatgatatactaaacactttgatattaataattcctcagtaaggagtaaataagctgtgaggaaataagccattattattattattctctctcttttttttattactgtactttaagttttagagtacatgtgcacaacgtg

SEQ ID NO: 227175 - DNA, 419 bp, Homo sapiens
ctgtagtgcgttatttaagcactctgtatcttcatttctgcaactgtatattagagatcataataatatgcctacctcatcgttgttattaagaactaattcttatttaaagcccatagaatagggctttatagaatgatagacatgttctatatctgcattgtcgaattatccattaaccatttgtgattatgggctcttgaaatgtgactaatgcaaccaaggaaattacttttaacttaattaaatgtaaaaagtcacatatggctagtggctactgtattggacrgcatagtgtagaacactgtctggtatacagtaaatattattcagtgtttgttattctattgtcttgacaaagatctgcaaactcagtgtggcaaatactagaccaagaagaatatgatcactgtctaaga

SEQ ID NO: 227176 - DNA, 572 bp, Homo sapiens
cagttcgggagttaggatttcaaaatgtgcattttgagggacacatttagaccatagcgtaggtcatgtttttaaagttgctttcttggccctggaatggcaatgcagtcatctgaattggtcttaacctaccaggaatgggcttatattttgaaaatatttctcgataagggagtaaaataagttgtatgggttttttgtttaagaaaggattcctttrtttactctggtatgcttatccacttctgtgatgtcaaccatgggtagtgacctaacattaatttaattcaacagatatctttgtctgccttgattcctgcatcccctgggctccacagctattcacttgtattgattctgttaactcttacacattaactttgagctgtgtctccttccttttatcattttgtgagtaaagaattttaatttgccaacaaatcctaatgtggactttgtcacgttgtgaaataaagtgattttttggtatggaaatatgtgttaagacagactgttagtctttgcactttaacaactagctgatacacttacgtcacatggatgaaaacata

SEQ ID NO: 227177 - DNA, 579 bp, Homo sapiens
caataggcatttatagaatgcctgcattgtgccaagaattgtgttatgtgctgggatacaaagatgaataagatgtctgcctgtctccaaggaatccatagttgagtggagaagacttgtataaagacattaaccaggagaaatgaagagtgaaaggcagtcatctaaatagagtagattgcacagtcaatggcacagaagataaatgtaatgtatgatgcaagaagtagcaagatttagtatgagatccacagaaggcaggttatggaacattttatgcaccatcttttcgtcattcctgaagcattagtgttcacttctccatcttyctttgcacatggtgaacttgaaatgccctttgactcttcacttctcccccttgtgtatttctatgtgtatttaaaccccaaatctgatccatttctcgagttacttgcaacctcttccataatcccttaaccctttatccacacttttcttctgacctccattctcattgtgacatacctttgtgatacatattggtgcttgtcacatagtagatatttaataaatattggttcaatatgaataagttca

SEQ ID NO: 227178 - DNA, 579 bp, Homo sapiens
caataggcatttatagaatgcctgcattgtgccaagaattgtgttatgtgctgggatacaaagatgaataagatgtctgcctgtctccaaggaatccatagttgagtggagaagacttgtataaagacattaaccaggagaaatgaagagtgaaaggcagtcatctaaatagagtagattgcacagtcaatggcacagaagataaatgtaatgtatgatgcaagaagtagcaagatttagtatgagatccacagaaggcaggttatggaacattttatgcaccatcttttcgtcattcctgaagcattagtgttcacttctccatcttcctttgcacatggtgaacttgaaatgccctttgactcttcacttctcccccttgtgtatttctaygtgtatttaaaccccaaatctgatccatttctcgagttacttgcaacctcttccataatcccttaaccctttatccacacttttcttctgacctccattctcattgtgacatacctttgtgatacatattggtgcttgtcacatagtagatatttaataaatattggttcaatatgaataagttca

SEQ ID NO: 227179 - DNA, 550 bp, Homo sapiens
ttctttgtggagcatttaggccatttacattcaacgttagtattgagatgttagctactattctattcatcgttctcgctgctgcctgaatatcttggtattttttccttgtgttattgttttataggccccgtgagatttatgctttaaggaggttctattttggtgtactttgaagttttgttttgtttcaagatttagaactgggctcacgcctgttcatcccagcactttgggaggctgaggggggcagatcacctgaggttgggagttcgagaccagcctgaccwacatggagaaatcccatctctactaaaaatacaaaattagtcaggcgtggtggcacatgcctgtaatcccagctactcgggaggctgaggcaggagaattacttgaacccgggaggtggaggttgcggtgaccaagattgtgccattgcactccagcctgggcaacaagagcgaaaacccgtctcaaaaaaaaaaaaaaaaaaaaagatttagaactccttttagcagttcctgtagtgctggcttggtggtgtcgaatt

SEQ ID NO: 227180 - DNA, 589 bp, Homo sapiens
gtgttctagtcagctgccacccagacatggggaaagtcacttagaccctgtgcgcctttgttgttctgaatgttcgggggaaaagcaaaatatgcctttgccatttcaaaggctgatgtgagactgaaatgmgagcataagtaggaaaaaggcgtgaaaatatgagcaccatataaacacaagcatcagtggttcacagccattgtcatgacaacaatcaatcctcagctcctagaaaatttctgctaaccagaactccttcagggctcctctttcagcaggaaaatgattttgaatcaagctgatattgggaatttatcttttgataaagtaacttctgtcctgtgcagttccttcagccccatcaccttccctgtctttatctacattatcaccttgagacttggtcttctggaaataatcaccttgagggcttttaagatccccgctcatcaaagaaagcatcaaccatgctcactaggctgtgcttatggtgggaagaaagcagagtcagacgtttcagagagatatgtaacgagagtttgcagaataaaacttagttacttagaaagctcaatttaccagaaca

SEQ ID NO: 227181 - DNA, 308 bp, Homo sapiens
tgtgttgagtgaagaaaaggtaatttcaaaggtactgcatgactccattcataagacattctcaaaatgacaaaattacacagatggagaacagatgagtggtttccagggcttggggatgaaggatatggtatgactataaaaggagagcgtgagggatctttgtgaatggaacagttccgtgtcttgattatggcgtgattacatgaatcttcacacgtggtaaaattgcatggaactaaacacacacrcgcgcacgcgcgcgcgcgcacacacacatacgcaattgagttctttaaaaccggcaa

SEQ ID NO: 227182 - DNA, 572 bp, Homo sapiens
gacttactataattcattaagtgtggtaactcatgactgtaatctcagcatttagggaggatcacttgaggctaggagtttgaggtcagcctaggcaacattaagacccccatctctaaaaaaaaataaaaaataaattagccaggagtggtggcacatgcctgtagtcccagctactcaggagactgaggtaggaggatcacctgagcccaggagtttttcagtgacttatgattgtgccactgtgctccaacctgagcaagagtgagaccccacctgtttaaaataaaaggggaataaggctggaagcatcacactatctgactatactacaaacgtaraatgcactacaaagcaatagcaatcaaaacagcatggtacttactcgcagaaaaacagacacacaaaacaacagaacagaatagagagaccaagaataaatctatgctcttacagccaactgatttccaacaaaggcatcaagaacacacattgggcaaaggccaatctatccaataaagggtgctgagaaaactggatattcatatgcagaaaaatgaaaccagactccc

SEQ ID NO: 227183 - DNA, 572 bp, Homo sapiens
gacttactataattcattaagtgtggtaactcatgactgtaatctcagcatttagggaggatcacttgaggctaggagtttgaggtcagcctaggcaacattaagacccccatctctaaaaaaaaataaaaaataaattagccaggagtggtggcacatgcctgtagtcccagctactcaggagactgaggtaggaggatcacctgagcccaggagtttttcagtgacttatgattgtgccactgtgctccaacctgagcaagagtgagaccccacctgtttaaaataaaaggggaataaggctggaagcatcacactatctgactatactacaaacgtaaaatgcactacaaagcaatagcaatcaaaacarcatggtacttactcgcagaaaaacagacacacaaaacaacagaacagaatagagagaccaagaataaatctatgctcttacagccaactgatttccaacaaaggcatcaagaacacacattgggcaaaggccaatctatccaataaagggtgctgagaaaactggatattcatatgcagaaaaatgaaaccagactccc

SEQ ID NO: 227184 - DNA, 504 bp, Homo sapiens
gggccagtccaaactgagatgtgctggacaagtcaatgtccaccagctttcaaagattcaatatgaaaaaagaatgtgaaatatctcattcatgaatttgttattgattgcattttgaaataatgtttttgatatattgggttaatatgttactaatttcacctgtttcttttgacctctttaatagggcttgcattatatttctattggacatatatctctatattctaacatagactgtggattagaaagacttaggttcaaatcccacctccaccacttgctcaaggacacttggcaggtgagcccagctacagccaccaaagacaagatgagcccagccatggggaaagagcaactggattccaagccagggttccgtctcaacccagaagcttttacccacttcttgtagggatggcagagcctccacgagtgtgrctggcttgacttttgctgcaataggcaagggggtgcccaagaacttggcctgcagtgactggg

SEQ ID NO: 227185 - DNA, 477 bp, Homo sapiens
ctcattctcttaggtggccgtaagacagatgtcctgggaggctgggtttggaaagccattccaggagcacttgaataattccagatttcagtgggccaaamaggcttaccctctccctcctcctcctctgagctggagcacttcaggccgggctccatgcagggtgctcaggctggatgaagaccccggagactgtcattagggtaagtgtggccctgtctccagggactgctccctgtccattaccagagccagaatccatgtgcattgcaccattgtggatgttgctaagcctaattgctaccagggaactagtttccatagtgacagaggtacagtaggcccttgacattctcaagggatacatcatagcccttcatgaatccgtggattagagactaccacataatttcccccataaaatgcagtaaagtatgactgagaaatgtaatgaggatggctattgagggcaaagtc

SEQ ID NO: 227186 - DNA, 544 bp, Homo sapiens
agtcctttaagcaagcacatttccaactaagcagaaagtctagtatctcttagtaccctctcttcctccccagcgcttgcccctgacaatggatggaaaagccctagggcttgtgtagtgtgatgggccagtaaaaagatcactgsagagccggcccagtccctgcttctatcactgcctcctgaatgatggctctgcattggtctcacacaatccagaggggcttacccatggcggactttatgcctttgccaatcagacgcctgcgcagacctgctcatggctatgccacttctggggtttctgatacagtgcaaatgagcttttactcacctgttttgctactgtccccacaggtcaccagctaagtagctgggtctgggagagtttctagccactgccacactagccacactctgtgccacactctgtgccagaaccggccactttgccatcaaggtaatgcaggctccagtgtgaaggcagctgattgggctatactggcgcttcctaaatttcactgtgtgtgagaatcacccagaga

SEQ ID NO: 227187 - DNA, 364 bp, Homo sapiens
aatacttaaatcagtcctttaagcaagcacatttccaactaagcagaaagtctagtatctcttagtaccctctcttcctccccagcgcttgcccctgacaatggatggaaaagccctagggcttgtgtagtgtgatgggccagtaaaaagatcactgcagagccggccyagtccctgcttctatcactgcctcctgaatgatggctctgcattggtctcacacaatccagaggggcttacccatggcggactttatgcctttgccaatcagacgcctgcgcagacctgctcatggctatgccacttctggggtttctgatacagtgcaaatgagcttttactcacctgttttgctactgtcccc

SEQ ID NO: 227188 - DNA, 544 bp, Homo sapiens
agtcctttaagcaagcacatttccaactaagcagaaagtctagtatctcttagtaccctctcttcctccccagcgcttgcccctgacaatggatggaaaagccctagggcttgtgtagtgtgatgggccagtaaaaagatcactgcagagccggcccagtccctgcttctatcactgcctcctgaatgatggctctgcattggtctcacacaatccagaggggcttacccatggcggactttatgcctttgccaatcagacgcctgcgcagacctgctcatggctatgccacttctggggtttctgatacagtgcaaatgagcttttactcacctgttttgctactgtccccacaggtcaccagctaagtagctgggtctgggagagtttctagccactgccacactagccacactctgtgccacactctgtgccagaaccggccactttgccatcaaggtaatgcaggctccagtgtgaaggcagctgattgggctatactrgcgcttcctaaatttcactgtgtgtgagaatcacccagaga

SEQ ID NO: 227189 - DNA, 564 bp, Homo sapiens
tttttcttggtgtgacccasaaagaccatgggctcaaatcactccagtctcaagctgctttggccttctggcctctcctcagtctttgaccccttgcactagctccacacatcaggtctttctgagcaaggtgtggccttctcttttgcctttagagtaagtgtcaagtaatgctagcagctgtgatggagttctcatcaacgctcatggttccagacaagaacagttgctttttcactcacttacagcctaaaaccaatggtaccaactggtggcaggtctcctccaagtggtaattctgaaccctaggctcttttcatctggtggcttctccatcttcattgtgtggtttctccacaaggagcctgcagaagaggagaggggatggaggattgcctgcacgtggttttcatgggccaagcctaaaattaccacacatgacttgtgctcatattctactggcaggaatggagacacatgcccccaacctccagctgcaggagatgctgggaaatgtaacctagctgtgtgttcaggaagatgaagaattgggttttacaacca

SEQ ID NO: 227190 - DNA, 606 bp, Homo sapiens
attgctatcttcatcctaaagaagtgctagggagacttggcttggtgtttggactctgtcatttgaggaccctggattcccgtcttagctctgttacatactggttaggtaaacactgaaccttgtttttctcctatcactagagtcctagtattggtcaaatttttgatgagatgatgcataaatgtgctagcaccttgccttgcatgtagtaggtgctcaataaatgttaactgctattacttgaattaatatcgttactcaggaaagaatcagagctggggaagttcaatactttgcctgaagcaagacagagtaaatggacaagtagagttccaaatccaaatctttccagctctaaaagctacactctttctccaayctcattgggttctaagacatttggagtcagctcaagataagccttcccctattttcttctcacagctgatgaaattcccttatgcctcatctagtacatctcacaggctttgccactcaggatcaaccacttagtgaacgttacttgcatttatcccatttattatttcaataatcagttattggacatctactataaaggactggtcttatcttattaaggtg

SEQ ID NO: 227191 - DNA, 556 bp, Homo sapiens
tctagattccacagccagcattctactgactgctctgaygaatctcatggagtgaccttggtgcttatcctactagaggtctctgaaatgtaaccttcctccctccagaaaagtctctcctcacctcctcagcttcagtaacttttttctctcagttccccttctacttctcttaacatctccttctctctcttttgctggctccattttctctaccaactccctgagagttaatactgtattttggagtattctctcctttacctcttcttttcatagggtctgtgggcaaatctttatctatagccctgaccccttgtctgaactttaaactcatataaccaactgcttcctagacttctctgcctagataaaccacatgcacctccaaatcaaccagacaccttccctatctcagagttttcctgactctccaactagccacccgacttacatatctcaaggtcatcctagattcattacctacacatgcagttatcttgaccagaccgtacctcccttattcatagtgagctggcatctcttctccatcctc

SEQ ID NO: 227192 - DNA, 624 bp, Homo sapiens
tttttttttccccgattcatcaatgtgggacctcgtactttgtggtgtgtaactcacagccaagctcagatctttccccttgtaacataatcgttgggacagatcagttcattcctaaagtggtaccaccaagctgtgatcccatggtattcctcctcttgtattacctgttttaaactgctggccatccagaggcccaagatgaaaacccagaaatcatcctagacttttaagttaatgtagtcaacaggtaatgaacatattatttgtcaggtgtcataaataatatggcataataataasaccaaacacatacatgctaagtgatgggcacttttgaagtgagataaacagacaagtagacagaagaaatatattaatatataacacttagaagcaaaataggaatagtatgcatctcaaatacttgtgaggattaaatgttctaaataaactcatatatatcacttagaacattttatcttcaccacaaccatttgagatccatactattattattctattttacatactggagaaacgttggctcagagaggattagtaacttactcaagatcacataactaataaacactggagctaggctttgaatccaatcagtgt

SEQ ID NO: 227193 - DNA, 522 bp, Homo sapiens
gattataattgtgaataagtgatgggctcaaacacagtttgtttaacttagggatagcaatgaattgctgtttttaggaagagacactcccaaggtgatactaatctgtgggcaaggtaaggaccactgactgtgcctgacagaaagctagagaaccttcagttgaccttaatttacaccgaaatgattcagattaaaagatggagtcttacatggcccttcaygtttcccacatgtagaagagacttggttttcatgttggttggttcctttattggtgttatgtttcttctgtttcttctctgtttcaattgaatatcaccatcctttctccgcaggtaacggaaggccattggaaatggggcggcgtcacagtccaagtgaacagtgcctttttcacaggcatctatgggatgtggaatctgtatgtctttgctctgatgttcttgtatgcaccatcccataaaaactatggagaagaccagtccaatggtgagtttctgtctctttagaacagcttaa

SEQ ID NO: 227194 - DNA, 515 bp, Homo sapiens
ttctttaagaaggccctatctctaaacacagtcacattctgaggttctaggggttagaacttcaatatatgaatttgagagtttgggggagatacaattcagcctgtaacaccaagattttacccccaaactaataagttctattgtgttcttctcccacttgcagttactgcctggcagtaagtgtcaggaggtgctttggaggtccatgggcaatggctcgctccaagcctggaataaatgacctctggggttgacaggcaccgagagacaactggacccagggctcttaaccctgtccaccaaagccactctgccccatctcccaraagggatcctcaaagctgagctatcccaaggcacacttgttttctaactgagggtgttttcctaaatgccagtggggaagaacaccagtgccgatatgctaggctagacccagccatgcagagtacagaggaactgcccttgcctgcaccaggcaaatctttcatgggtgttttgagcacttacta

SEQ ID NO: 227195 - DNA, 553 bp, Homo sapiens
cacatttctctctgcacagcaaccacagagagaccctgtcctgatcgaagttcctccagaggctaatcataagacaaggatgtaggtgctagttgtttatttggaagatgaaaaaaaaaattggtaaaggagtaagacagagaaatgaaggcagccagtaaagttccagtgggaactagctgggaactagttcctgccttgggaacctggaacttagtcccactgggaacactctcagccaatataggacacaaaccccactcaaggagtaaggcagccaaagaatttatacaactctcctattagtcattggttaaggctgctcccgagggacattaattccttggcttttccagcctaacatatgggtaggcaaaaggcttcaggagccagagaaagcccaccgcccctccaataagtgtgtgctggaagttggaagtcagcaactatgcaccraagtcaggaactatgcacggaagtcaaaaaagaaagggatatgaacagagtgtccacagcctctgctataggccttggccttttattaattgttgaa

SEQ ID NO: 227196 - DNA, 542 bp, Homo sapiens
aattggctcatactagacattgaacaactatctgttaaataaatgaagagatgtgagtgtttattgaattaaaatcatcttcaagaaaaaaaggacagaaaaacagggaacagggagtatcagaatttcaaattttggcaagacaaactctctcagattctctgttccagctacatatcctaccacttttttaaaaatgagtaaacatagggaaccaacattaatcttttaagggtcaaggcaactagaatttgccacagcctagttagaacaaattaagcaactgtgacacttacgaaatgttttaaaattacagaattgctaaatccacatcaatttgcactgtagaatatttcattctctttgattaacaaatctgacttaaaagaagtgtggacscttcaacacagtattgtaagcctacaaaagtcccgcaattgatatgaattgctttcaagctgggtatctacaaggtaacatcagtatacttgctcagagcttccagaagtaaacacacagtgctgtatctgggctctggtgat

SEQ ID NO: 227197 - DNA, 455 bp, Homo sapiens
ttttttcatggcatttgaaaacaaatattctatagctattaaaatttgtgcactatataattcaaaatgtttcctctattttgaactctttatctgacaatttctaagcgctgtgttcaaatacgtagctatgattataaatttgacaatttcttgtttaccaagtttttctttacataatttgataccatgccgtgcaggttgtgttttatgagttaatttctgaaatccttgcatgttctaaaattgstagaatgtccttgctgtgcccttactcttgacagtttcactcaagatagaagtctaaattcaaaacagttctccctcagaacttcaaaaatagcagtatgttgtagcactccaacgaacagatgacaagtctgagaccaatgtgattcttttccccttataggtacactgtttctctttagacattttgagatttttctaagctt

SEQ ID NO: 227198 - DNA, 564 bp, Homo sapiens
acgtggcaaccaacttcccccagagtaagcaatctaagataaagtgaatgaggaggaagccacaatgtcttttatgactttgtctctgaagttgcatactgctgctactacttcattctattcattacaagtgaatcactaattttcaaggggagatggattgaagagttgtatgaaagaatttatggacatattttacaaccaccacaaaggttatctcagacgtacattctattgtgttctatgtgttgctttgcagtttgctttttgtgcatataaagctgcatcattctgtctgactgccatatggtatatttcattgtgaagatataccatagtttcttcaaccattttctgtttgatgggtatttgggttttacttttctttcttcgaagaaarcaagggtctaagtaagggcctaagtgatcatctaagaaaagcgtcacttcttagaggctcacagtctgaagaaaagcttctaagtctctaattccaagaagttggcagtggtattagggagcaaagagacatttagatttcaggtgacgaggtaggtcagaaga

SEQ ID NO: 227199 - DNA, 569 bp, Homo sapiens
tgtcttacatggatagtggcaggcaaagacagagcttgtgtagggaaactcccatttttaaaaccaccagatcttgtgagactcattcactatcacaggaacagtgcaggaaagacccacgcccataaggcaatcacctcccactgggttcctcccacaacacgtgggaattgtggagttacaatacaagacgagatttgggtggggacacagccaaaccatatcagtacatttattaaagtcttagtaaataacacaggtgggaaatattggtttcatgtcgcctacgtatttgcattaaaaacatcattttytaagccaaaatcaatcatgattaagaagaaaaagacagggactctttcttgaaaagaaaaacataaccctccccacaccccacagagattcagaatgagcctggcattaccttgactgcaggtgatttaggtgatttgaatgtctcatcccctagtgtccaacacagagaagttggttacccagatatcagcaggtgaagcttgagagagtgggccagattgtattttccaaagatggctacaaaaatatcaccc

SEQ ID NO: 227200 - DNA, 568 bp, Homo sapiens
aaggaaccaatagcacttagtgactgcggaagacctgaacttgagctccagccagagaagactcagtttcaccawaagctggagctgagcaaactcgctggccagactgggaaatgagtagaatgcatacagctgggccaagctagactttggcacatgcctgcaaattgcctttctgcacatcacatataccctgaaattcctcacagggttgtaaaatttagctctgggtcatatgctttagaagagtcactgcaaaactagtttaagggggatggaggaacaaggagccatgtcttagctcttaggtcacagactaaagaaggaaaaggcctactttcctttagtgactggaagtgggactgaccaatggtgaaagaggtagcctcccatttgagggtgtcctgggtaatgttatcatcaaagaactgacccagagctaacatcagaatcctgtgtctagcagagggaacacaaggtctcttataaggagccagttgggaggggaagctaaattatactgcccaccttggtgggctcccagccagcaggggagggctgcagcctg

SEQ ID NO: 227201 - DNA, 568 bp, Homo sapiens
aaggaaccaatagcacttagtgactgcggaagacctgaacttgagctccagccagagaagactcagtttcaccataagctggagctgagcaaactcgctggccagactgggaaatgagtagaatgcatacagctgggccamgctagactttggcacatgcctgcaaattgcctttctgcacatcacatataccctgaaattcctcacagggttgtaaaatttagctctgggtcatatgctttagaagagtcactgcaaaactagtttaagggggatggaggaacaaggagccatgtcttagctcttaggtcacagactaaagaaggaaaaggcctactttcctttagtgactggaagtgggactgaccaatggtgaaagaggtagcctcccatttgagggtgtcctgggtaatgttatcatcaaagaactgacccagagctaacatcagaatcctgtgtctagcagagggaacacaaggtctcttataaggagccagttgggaggggaagctaaattatactgcccaccttggtgggctcccagccagcaggggagggctgcagcctg

SEQ ID NO: 227202 - DNA, 516 bp, Homo sapiens
cagagaagactcagtttcaccataagctggagctgagcaaactcgctggccagactgggaaatgagtagaatgcatacagctgggccaagctagactttggcacatgcctgcaaattgcctttctgcacatcacatataccctgaaattcctcacagggttgtaaaatttagctctgggtcatatgctttagaagagtcactgcaaaactagtttaagggggatggaggaacaaggagccatgtcttagctcttaggtcacagactaaagaaggaaaaggcctactttcctttagtgactggaagtgggactgaccaatggtgaaagaggtagcctcccatttgagggtgtcctgggtaatgttatcatcaaagaactgacccagagctaacatcagaatcctrtgtctagcagagggaacacaaggtctcttataaggagccagttgggaggggaagctaaattatactgcccaccttggtgggctcccagccagcaggggagggctgcagcctg

SEQ ID NO: 227203 - DNA, 352 bp, Homo sapiens
ctggcctttttagaaactaagtmttttctctgtatttccataagttcctgcttcaggactagtgtttctctgctaagcacaactttggacatcctttctcagtaatcttcctggagctataataaaccaagttgtctgatgctcattgctttatctaagctgggagaagtaggggaataaggctttgccttaagacagcatttgaatattgaccctgcctctagttgtgtcacccagcacaaattctttagcctctctgagcatctccagagactccactgtaaaatggaattgcattacctaccttggaggttattacagggaatagagttagacaaaagggccaggcagg

SEQ ID NO: 227204 - DNA, 557 bp, Homo sapiens
aatttcttggacaaaccaacatgcaagtaaattatattgttttccaggaaaatttcatagaaaaatgggaaagtggccaggcgtggtggctcacaccyataatcccagcactttgggaggtcaaggcaggcatatcacctgagctcaggagttcaagaccagcctgggcaacatggcgaaaccccgtctctactaaaaatacaaaaaattagctgggcgtggtggtgccgcttgtggtcccagttactcgggaggctgaggtgggaggatcactagatcccaggagatagaggttgcagtgagctgagaccacaccactgcactccagactgggtgacaagagtgagactctaccttaaaaaattaaaaaaaaaatttaaaaaaagggaaaacattagggataaactaaagttaacaaatttattagcatgaggataaagacctaattaagagaagccaatgaaattttatccttttctaatacccagttagtatttcccatactgtattctgcggagtgccagtccttgagatgatccaggtaaaggagcttaatg

SEQ ID NO: 227205 - DNA, 551 bp, Homo sapiens
ttggacaaaccaacatgcaagtaaattatattgttttccaggaaaatttcatagaaaaatgggaaagtggccaggcgtggtggctcacacccataatcccagcactttgggaggtcaagrcaggcatatcacctgagctcaggagttcaagaccagcctgggcaacatggcgaaaccccgtctctactaaaaatacaaaaaattagctgggcgtggtggtgccgcttgtggtcccagttactcgggaggctgaggtgggaggatcactagatcccaggagatagaggttgcagtgagctgagaccacaccactgcactccagactgggtgacaagagtgagactctaccttaaaaaattaaaaaaaaaatttaaaaaaagggaaaacattagggataaactaaagttaacaaatttattagcatgaggataaagacctaattaagagaagccaatgaaattttatccttttctaatacccagttagtatttcccatactgtattctgcggagtgccagtccttgagatgatccaggtaaaggagcttaatg

SEQ ID NO: 227206 - DNA, 489 bp, Homo sapiens
ttcaaggaagtcaggaaagatttttttgaggaagtaacacttagaatgaggctggagcagtagaataggccagaaggagagatggagagtgtatcttaggataaaggaccaaaaacagcatagttctgaatggggaagtggctggacttctaccttaagacttgcaggacctgagagcagtgcccatggaggaggaaggaggagatggggtggcaggccaatgaagagacatgtcgggcactcttctaggttttagtaaggattttctggtcttcctttggagtttcctcatgttacctcacaggtaatgtaacaggattyagccattttttcccagcttcaacattctacaattctaaaactctgagcagttttcccagggattttgcgtgggattttgtaataaaaatctctctgcctggactcaggagaagtttccaccctggcccaggctttgtccttgcctctttgattaactttgggccagtc

SEQ ID NO: 227207 - DNA, 613 bp, Homo sapiens
ttccctacttcattctatctctattttctttttgatatccccatcagtctttccacttaagatttgttacctcaccttatccaaacatctgagcctataattctcaagttagtgtttttgtgtctcccaactcccagccattaccaccaatcacactttcacttatgaacattttttctttactgtcaaacctcaggcagttccaaaatagcagtgtagaagcaagatgacctcactcccccagacaaaaaccaaaaacaaatagacagcaccaagattatcaccagcaatatctcagagctcaagtacaaaaaggagacagtccctggggccacagagaaatgaaaaatctctgagaaggctgtaaggtaattgaatttctatattggtaatgccccttctgtccagcaccaagtgcacaaagtatttccctccattcacaatttctacactcaaaaaagtgagatcaaggtggacaagcaggttttccaccatcttgggagccttggcaggagamctgtccctgccttaactcatggaaagcatttcaaatgccagaagggacaatatcactgaggacaggccgagagaagggaaggaggtggaactacca

SEQ ID NO: 227208 - DNA, 486 bp, Homo sapiens
gagagaagaatttctagaattttttcttttttgtcatttgacctatattacttcttcttgtttctacacagctattcactcacaagatacgayagaagagatttaaaaaattaccataataattgacctattatcctctgagtctcatcatctgataaagatttattctcaattatataaaaatcatcagttattgttaaataagaaactcagtatatgtagactcctccagtctcttggatttacatatatagttttaattgtacaatattattgtaaaagttaatatcctttcaatgtatctgatttaaaattaccacagagcattgtgggattaaaggagtactgtgtcaagagaacactgaattttattctatataattcaatggaaggaatcagaaaacagcagctccctgcagggccccaaatggttaattaacattatgtgagtgacagacttgggatctctgagctgatgtggtatga

SEQ ID NO: 227209 - DNA, 418 bp, Homo sapiens
gaattcagtttcttttgtgttgtaattagagatgtcatatggcccccaaatgtccaaatcaagaatagataactgttgaacttatgagaaatggaggtgggtttgaaatggwgattgtacttattagcttatagaaggttgagttatggagtgggtcaccccaacagaaggagtggatgcagacagaagagaaatgagatagcccccccccaaaaaaaaacaactggggaaattaacatttaatattttaatggtgcatgcagcattcataagaaagactgagaagagagggccaggccagagaagtagaagaatatggtgtcaaggaagccaatggaaaagagggagggaaacactacaaaacaatgataattactgttgaattgtgacatgtatatgcccacatgatttagtaacc

SEQ ID NO: 227210 - DNA, 594 bp, Homo sapiens
caaaacagtcttcctgctttttactttttatattgtcatattactataggttgtgtatgtgtgacagagagagagagagagatcaagatggagaaaaactgataaatcatatacagaaaggcagaaagaaagacagaaagaggagaggtagagagaggggaagaggataaagagagaaagagtgatttgtgggaaaaaagacagaaggaaagaattaattttcatattagatgtaaatattgttttggtgaatgcatgcctgaaaaatgtcataacattttcctagttctactgttgtattcatacaaatgtgatgatrtactagctgatataagttagacaatgcttatttgaaattaaaatttataaattttaatcattaatggggtattagcaatctcagagcaacaagttatgaagaacggatctaagataagaaagattagtgaaaaattgatagaattcagtgaagaaagtatcagctaaattggttaaaaacaacagttttcccaataatatactgaaggacttaacctgataaatcagaatgcttaaaataaacttcttagcttcagaatacattgtaaaggaaaa

SEQ ID NO: 227211 - DNA, 590 bp, Homo sapiens
ataatccattgtgtgattgatgaaccaatattgatatgtaattaactaaaagccccagtttaaattagggttcgttccttctgttgtacacttctatgtgttttcacaaatgcataacrtcatgtatccaacattatggtataaaacagaattgtttcactgccctaaaattttcctgtactccccgactcccaccaccatacatccctggtcttcacatatcctcccacatttttggcaaccagtgatttttctactgtttcaatagttttgccttttctagagttttatataattggacttgaccaacagagacctctcagttaactaaaccttagacagattttttccttactatgagccccttgactttctttttgttagcgcatttactttagaaacctggtaattgtaaattgtctctctgtccttttgagtagatttaaatcttcttccagcctcagtttaacaatccaggaaatgtctttattgagaacctgagaatcatccctttcaaatataaacatggaagaggattgcacctctatctatcagtctcgttgggagggtaaggggcataaggattagca

SEQ ID NO: 227212 - DNA, 566 bp, Homo sapiens
tcactttgtagtctgccgtcactgtagtgttgatcaataaagccctcttcaagtctccagtaagtctttaaagctatcagagtatttaaagtcaataattatttatatttacagaacatgtaagtcagcaacttaaagaaaaacaaatagtataaggcaatgtctaaatagtaaagatattctgaatagtatattaacttccataaatgttaaatgacaaatctactccgtttgaagctttcatttattctagatgccataaatcaagcttgtctaactcgtggcccactggctgcattggcctgggatggctttgaatgcagcccaacacaaatccataaactttctkaaaacgttatgagatttttttttgcaatcttttaaagctcatcagctgtcattagtgttagtgtattttatgtgtgacccaagactattcttcttccattgtggtccaggggagccaaaagattggacactcctgctataaatgtttaacacaagacattaacattagacaatcatacaaatgctgctatagatggcaggacatcaaagctgtcatc

SEQ ID NO: 227213 - DNA, 566 bp, Homo sapiens
tcactttgtagtctgccgtcactgtagtgttgatcaataaagccctcttcaagtctccagtaagtctttaaagctatcagagtatttaaagtcaataattatttatatttacagaacatgtaagtcagcaacttaaagaaaaacaaatagtataaggcaatgtctaaatagtaaagatattctgaatagtatattaacttccataaatgttaaatgacaaatctactccgtttgaagctttcatttattctagatgccataaatcaagcttgtctaactcgtggcccactggctgcattggcctgggatggctttgaatgcagcccaacacaaatccataaactttcttaaaacgttatgagatttttttttgcaatcttttaaagctcatcagctgtcattagtgttagtgtattttatgtgtgacccaagactattcttcttccattgtggtccaggggagccaaaagattggacactcctgctataaatgtttaacacaagacattaacattagacaatcayacaaatgctgctatagatggcaggacatcaaagctgtcatc

SEQ ID NO: 227214 - DNA, 573 bp, Homo sapiens
tgtttgtgcttgctttctttcatgtgtctcatcttttacattgattaaatctttgtacaagcatactgtgaatcttcgtgaggcattttaattatctaatccygtgtaaatcaacacaagcattaagtaaatcataaaaagaaacataactcatttctttttaatacgcatattttatcaattatgtttgtgataattaacatatgtgtaattcaattttaaaacacattataaatgtaagcttttatgaatgattgattcattatgatgaaatgtgtcatttttctcgaaattataaaaataatagcatacttaggctaagtaaattactgaactatatcctgaataaatgtaaaataatcaatacatgctaaatgcattatttatttatttcttgaaatgtaggcctaaatatatttagcagtactttttgataaaatagttcattaatttggattttaaatatgatatagaaaaaaatgggttaacctgcaaaatcttcagagcaaaaattatttccgaagtatttattattatagcaactgtactaatttagaaaacagttatagcagg

SEQ ID NO: 227215 - DNA, 593 bp, Homo sapiens
gtttttaaaagaaaggcttgaaaaagatataaaatgcttacatcaatacaaataaacctggtattactatatgtgcatcagacataagagattcaatagcaaacactattacaaagaattaaaatgtaattttataagaatacagttgtcatttcttcaagcwgacatatgtgccaaaaaactgacagaactgcaaagtcaaatagataaatacatcattataataaatgtaaataccttgtcttcacaatttatagaacaattatacagaaactgcatatgaatataaaacatgactatccaccaacttgaccaaattatcacttatataagatcccactcaagaatagtggagacatattcttttcagtcatgcacaggatgcttaccaacatatcacaatacgggtcatacaacaagctttgataaatatgtaaaaattaaaatcatataaagatggtctctgacaactacaaaattaaattaaaagtagtaacagaagtacacatgctaaattatttagaaactaactaaaagaaattcaagtaattcatgggtcaaatattaagtcaaaaggtgttaagaaattattt

SEQ ID NO: 227216 - DNA, 593 bp, Homo sapiens
gtttttaaaagaaaggcttgaaaaagatataaaatgcttacatcaatacaaataaacctggtattactatatgtgcatcagacataagagattcaatagcaaacactattacaaagaattaaaatgtaattttataagaatacagttgtcatttcttcaagctgacatatgtgccaaaaaactgacagaactgcaaagtcaaatagataaatacatcattatrataaatgtaaataccttgtcttcacaatttatagaacaattatacagaaactgcatatgaatataaaacatgactatccaccaacttgaccaaattatcacttatataagatcccactcaagaatagtggagacatattcttttcagtcatgcacaggatgcttaccaacatatcacaatacgggtcatacaacaagctttgataaatatgtaaaaattaaaatcatataaagatggtctctgacaactacaaaattaaattaaaagtagtaacagaagtacacatgctaaattatttagaaactaactaaaagaaattcaagtaattcatgggtcaaatattaagtcaaaaggtgttaagaaattattt

SEQ ID NO: 227217 - DNA, 593 bp, Homo sapiens
gtttttaaaagaaaggcttgaaaaagatataaaatgcttacatcaatacaaataaacctggtattactatatgtgcatcagacataagagattcaatagcaaacactattacaaagaattaaaatgtaattttataagaatacagttgtcatttcttcaagctgacatatgtgccaaaaaactgacagaactgcaaagtcaaatagataaatacatcattataataaatgtaaatamcttgtcttcacaatttatagaacaattatacagaaactgcatatgaatataaaacatgactatccaccaacttgaccaaattatcacttatataagatcccactcaagaatagtggagacatattcttttcagtcatgcacaggatgcttaccaacatatcacaatacgggtcatacaacaagctttgataaatatgtaaaaattaaaatcatataaagatggtctctgacaactacaaaattaaattaaaagtagtaacagaagtacacatgctaaattatttagaaactaactaaaagaaattcaagtaattcatgggtcaaatattaagtcaaaaggtgttaagaaattattt

SEQ ID NO: 227218 - DNA, 593 bp, Homo sapiens
gtttttaaaagaaaggcttgaaaaagatataaaatgcttacatcaatacaaataaacctggtattactatatgtgcatcagacataagagattcaatagcaaacactattacaaagaattaaaatgtaattttataagaatacagttgtcatttcttcaagctgacatatgtgccaaaaaactgacagaactgcaaagtcaaatagataaatacatcattataataaatgtaaataccttgtcttcayaatttatagaacaattatacagaaactgcatatgaatataaaacatgactatccaccaacttgaccaaattatcacttatataagatcccactcaagaatagtggagacatattcttttcagtcatgcacaggatgcttaccaacatatcacaatacgggtcatacaacaagctttgataaatatgtaaaaattaaaatcatataaagatggtctctgacaactacaaaattaaattaaaagtagtaacagaagtacacatgctaaattatttagaaactaactaaaagaaattcaagtaattcatgggtcaaatattaagtcaaaaggtgttaagaaattattt

SEQ ID NO: 227219 - DNA, 561 bp, Homo sapiens
tatacccattacaccagtatggtgaaaccctgtctctactaaaaatacaaaaaaattagccaggcatggtggtgcacgcctgtaatcccagctacttgggaggctgaggcaggagaattgcttgaacccaggaggtggagggtgcagtgcgccgagatcgcaccactgcattacagcctgggtgacacagcragactcggtctcaaaaaaataaaaaaaaaggtacacaggctgcttcagaaaacagtttggcagttcttcaaacacttaaacacaaagttcccatataaccagcaattttactcctaggtctatatccgtgtatacacaaacacttgtacatgagtgtttattgcagcatataataggcaaagtggaaataacatgaatgcttatcaattagtgagtggataaacaaatgtagtatatacatgtaatgatatgttattcagccataattaggaatgaagtacttatacatactacactttggtgaaacttgcaaatgttatgctaagtgaaagaagagagacatagaaggccacatattatatgatgaaa

SEQ ID NO: 227220 - DNA, 561 bp, Homo sapiens
tatacccattacaccagtatggtgaaaccctgtctctactaaaaatacaaaaaaattagccaggcatggtggtgcacgcctgtaatcccagctacttgggaggctgaggcaggagaattgcttgaacccaggaggtggagggtgcagtgcgccgagatcgcaccactgcattacagcctgggtgacacagcgagactcggtctcaaaaaaataaaaaaaaaggtacacaggctgcttcagaaaacagtttggcagttcttcaaacacttaaacacaaagttcccatataaccagcaattttactcctaggtctatatccgtgtatacacaaacacttgtacatgagtgtttattgcagcatataataggcaaagtggaaataacatgaatgcttatcaattagtgagtggataaacaaatgtagtatatacatrtaatgatatgttattcagccataattaggaatgaagtacttatacatactacactttggtgaaacttgcaaatgttatgctaagtgaaagaagagagacatagaaggccacatattatatgatgaaa

SEQ ID NO: 227221 - DNA, 496 bp, Homo sapiens
gcctgtgtaaagatttaggactatgctttcttatatttaagacaaaagtcctcccagtaagtaatatttatcaacaacaagccaaaaataaattataaaataatgttaaaaataaagtttccgtaaaggcaaaatataactaatgaatgctgaattatggaccaaatatagaaatcacaaaggaaatatcagtgaaaccactctacaacttttgaactgctcagtccaataaaggttataaaaatggatcacaacatggcaagaggaaattttcaaaagatgtaatgtttcactttgtttttttttttttttttttttgctgtcaatcccagccactattgaaaggaaaggatttaataaggctacttggagaaattaaatgtgatcaagggagctggaaaaaggtttaattcctaccagtgaaatctagagggtggaagaccagctgaacaattgctttgcaraaaaagcaaacttactcttatattgaaattgg

SEQ ID NO: 227222 - DNA, 548 bp, Homo sapiens
ctgattactatgtctttgtaatatgttttgaaatcaggtagtataatgtccccagctttgttctttttgcttaagattgctttggctatttggagtcctttgtgattccacacaaatttaaaatttatcttctatttctgcaaaaaacatcaygaaaattttgatagggcttgcattgaatctgtagatcactttgtgttgtatagacattgtaatactattaattcttccaatccataggtatagagtatatttccatttagttttgtcttcttcctttttttcatcaatgttttacagtttttattgtaagatcttccactttatggggttagatttattcctaagaacttttgtttatgctattgtaaatgggattattttcttgattttttgggggttaggtcatttttagtgtacagatatgctactggaaactaacacacatttcatttggaatataatgatgctctttttcccttgttttgaaacactaggtaattatttggttcacaggccaaggttgagtcatagaacctcaactaata

SEQ ID NO: 227223 - DNA, 548 bp, Homo sapiens
ctgattactatgtctttgtaatatgttttgaaatcaggtagtataatgtccccagctttgttctttttgcttaagattgctttggctatttggagtcctttgtgattccacacaaatttaaaatttatcttctatttctgcaaaaaacatcacgaaaattttgatagggcttgcattgaatctgtagatcactttgtgttgtatagacattgtaatactattaattcttccaatccataggtatagagtatatttccatttagttttgtcttcttcctttttttcatcaatgttttacagtttttattgtaagatcttccactttatggggttagatttattcctaagaacttttgtttatgctattgtaaatgggattattttcttgaytttttgggggttaggtcatttttagtgtacagatatgctactggaaactaacacacatttcatttggaatataatgatgctctttttcccttgttttgaaacactaggtaattatttggttcacaggccaaggttgagtcatagaacctcaactaata

SEQ ID NO: 227224 - DNA, 548 bp, Homo sapiens
ctgattactatgtctttgtaatatgttttgaaatcaggtagtataatgtccccagctttgttctttttgcttaagattgctttggctatttggagtcctttgtgattccacacaaatttaaaatttatcttctatttctgcaaaaaacatcacgaaaattttgatagggcttgcattgaatctgtagatcactttgtgttgtatagacattgtaatactattaattcttccaatccataggtatagagtatatttccatttagttttgtcttcttcctttttttcatcaatgttttacagtttttattgtaagatcttccactttatggggttagatttattcctaagaacttttgtttatgctattgtaaatgggattattttcttgattttttkggggttaggtcatttttagtgtacagatatgctactggaaactaacacacatttcatttggaatataatgatgctctttttcccttgttttgaaacactaggtaattatttggttcacaggccaaggttgagtcatagaacctcaactaata

SEQ ID NO: 227225 - DNA, 584 bp, Homo sapiens
ctaaatactttttttaaatttttatttgggaggattttatagcatatgattgagaactataatcatcatcattgttacagaagaataatttagaaaaattttttaactacgttaaaaattccactatgggtggatgacaatattgttctttccttccacattctccctccttagactttcttttctttttttctattttttttttgagatgaagtctcgctctgtcactcaggctggagtgcagtgccatgatcctggctcactgcaacctctgcctcccgggttcaagtgattctcccgcctcagcttcctgagtagctgggattacaggtgtgcaccaccacacctggctactttttgtatttttagtagagatggggtttcaccatgttggtcaggctggtctcaaactcctgatctcatgatctgcccgccttggccccgcaaagtgccgggattacaggcgtgagccactgcgcctggcctctctctcrgactttctaccatcagtcagattgaatttgttaaattctgtcactgaccctaaacccaacaaaaggcaagagttatgtttatttagcact

SEQ ID NO: 227226 - DNA, 583 bp, Homo sapiens
attctgggttgaaattttttttttttttaagaatgctgaaaattgacccccagtctatcctggtttgtaaggtttctgctaagaggtcagctattagcccagtggagctttctttgtatgtaatgtgacctttttctgtagctgcttttaagatttttcctttagcattgccttttttttttttgagatgaagtcttgccctgtcactcaggctagagtgcagtggtgccatctcggttcactgcaacctccacctcctgggttcaagagattctcctcagcctccygagtagctgggattacaggcgcctgccaccatgcctaggtaatttttgtgcttttagtagagacagggtttcaccatgttggccaggctggtcttgaactcctgacctaaagtaatccacctgccttggcatcccaaagtgctgggatgacaggcataagccaccatgccgagcccttagcattgcctttaaacagcatggggatgacatgtatttgtgatgatcattttctatagtatctttcaggtgttctctggatttcttgtatctggctgtctacttctctatcaagatta

SEQ ID NO: 227227 - DNA, 583 bp, Homo sapiens
attctgggttgaaattttttttttttttaagaatgctgaaaattgacccccagtctatcctggtttgtaaggtttctgctaagaggtcagctattagcccagtggagctttctttgtatgtaatgtgacctttttctgtagctgcttttaagatttttcctttagcattgccttttttttttttgagatgaagtcttgccctgtcactcaggctagagtgcagtggtgccatctcggttcactgcaacctccacctcctgggttcaagagattctcctcagcctcctkagtagctgggattacaggcgcctgccaccatgcctaggtaatttttgtgcttttagtagagacagggtttcaccatgttggccaggctggtcttgaactcctgacctaaagtaatccacctgccttggcatcccaaagtgctgggatgacaggcataagccaccatgccgagcccttagcattgcctttaaacagcatggggatgacatgtatttgtgatgatcattttctatagtatctttcaggtgttctctggatttcttgtatctggctgtctacttctctatcaagatta

SEQ ID NO: 227228 - DNA, 583 bp, Homo sapiens
attctgggttgaaattttttttttttttaagaatgctgaaaattgacccccagtctatcctggtttgtaaggtttctgctaagaggtcagctattagcccagtggagctttctttgtatgtaatgtgacctttttctgtagctgcttttaagatttttcctttagcattgccttttttttttttgagatgaagtcttgccctgtcactcaggctagagtgcagtggtgccatctcggttcactgcaacctccacctcctgggttcaagagattctcctcagcctcctgagtagctgggattacaggcgcctgccaccatgcctaggtaatttttgtgcttttagtagagacagggtttcaccatgttggccaggctggtcttgaactcctgacctaaagtaatccacctgcctyggcatcccaaagtgctgggatgacaggcataagccaccatgccgagcccttagcattgcctttaaacagcatggggatgacatgtatttgtgatgatcattttctatagtatctttcaggtgttctctggatttcttgtatctggctgtctacttctctatcaagatta

SEQ ID NO: 227229 - DNA, 583 bp, Homo sapiens
attctgggttgaaattttttttttttttaagaatgctgaaaattgacccccagtctatcctggtttgtaaggtttctgctaagaggtcagctattagcccagtggagctttctttgtatgtaatgtgacctttttctgtagctgcttttaagatttttcctttagcattgccttttttttttttgagatgaagtcttgccctgtcactcaggctagagtgcagtggtgccatctcggttcactgcaacctccacctcctgggttcaagagattctcctcagcctcctgagtagctgggattacaggcgcctgccaccatgcctaggtaatttttgtgcttttagtagagacagggtttcaccatgttggccaggctggtcttgaactcctgacctaaagtaatccacctgccttggcatcccaaagtgctgggatgacaggcataagccaccatgccgagcccttagcattgcctttaaacagcatggggatgacatgtatttgtgatgwtcattttctatagtatctttcaggtgttctctggatttcttgtatctggctgtctacttctctatcaagatta

SEQ ID NO: 227230 - DNA, 480 bp, Homo sapiens
gttgttcaagctctaaaatttttattttgcatggttcagtctattgataaaactttcaattgaattttgaaattacctgaatgtattaattctagaagctctgattgatttattttaaagatatgtatctcttccttcatttcctggattgctttcaaagtttttttgtgatgattttcagttttctcttggatctcattgagattccttgcaatccatgattttcattctttatctgtcatttctgagtttccattttggttagggaccattgctggaaagctagtgtgatcctttggtatcrttacattcatatttttcatagtgccagaattcttgcactggttctttctcatctggagatgctggcacttctgatttaaaaaaaaaaaaaaaaagatttattttttgcaggtaagattaaaaaaaaaaagatttttgtgcaggtaggatttttgtttttctttctttccctataaa

SEQ ID NO: 227231 - DNA, 480 bp, Homo sapiens
gttgttcaagctctaaaatttttattttgcatggttcagtctattgataaaactttcaattgaattttgaaattacctgaatgtattaattctagaagctctgattgatttattttaaagatatgtatctcttccttcatttcctggattgctttcaaagtttttttgtgatgattttcagttttctcttggatctcattgagattccttgcaatccatgattttcattctttatctgtcatttctgagtttccattttggttagggaccattgctggaaagctagtgtgatcctttggtatcgttacattcatatttttcatagtgccagaattcttgcactggttctttctcatctggagatgctggcacttctgatttaaaaaaaaaaaaaaaaagatttattttttgcaggtargattaaaaaaaaaaagatttttgtgcaggtaggatttttgtttttctttctttccctataaa

SEQ ID NO: 227232 - DNA, 571 bp, Homo sapiens
agatttttatttttgtttaagtgaagcaaaaaagaacttttggaaaaagtacatttacaaaagaccaaggaaacagaattctctctatgtaaagaagagtgagtttttcacattctgtgagctctcactttgggcattgcatacacacatacacacacacacgcacacacacacacacaccatgaaatctaagaaggtttagaacaatattaaaaattaaatgtatgaggtaatgcagagtgaagggaagaatgtcaacctacttctgaacagacagtgtaaactttttgtgtaatagttgcataccctagtaactaaaggatctgatataatgagatacagctgagctttgggaaattttatcaaccatttgatttcaagtgatttcattctatccttaacttgcagcactgggctttgatattgaaataggaagagaacactgaatcagatattttttttcttgtacttgccatttcaaagaactttacaattattattgccttcccawgaagtaggtagaattaaagtgctttgatttttttgttgttagagtgtgagaaatcctaac

SEQ ID NO: 227233 - DNA, 450 bp, Homo sapiens
atttcaaaagttggtgaatttagaaagcaacaaacaaaccaaaaacagtttctcagagggaaaaattaactttgtcattaacttamcatgattaaattcttttattatttttcccatgattaaataaactctaagggcagaaattagataatagctgcaaatggtaattgtgatatgcccatatttcaattattttctcaattgctactgataacttcaaatctttactgaaacagtatttactgaaacagtatttgcatgaaagaattttaagctgcaagctaaggtaaccaaaaaatgcttcagcactctattccgcaagaatatatccagtacttctagaaagccactctgcacacaaaaggttcttcaagggcattagagccactcatggaggaagtggaataaagtgcagcgggaaccatggctcaccaacagcaatgcagagca

SEQ ID NO: 227234 - DNA, 450 bp, Homo sapiens
atttcaaaagttggtgaatttagaaagcaacaaacaaaccaaaaacagtttctcagagggaaaaattaactttgtcattaacttaacatgattaaattyttttattatttttcccatgattaaataaactctaagggcagaaattagataatagctgcaaatggtaattgtgatatgcccatatttcaattattttctcaattgctactgataacttcaaatctttactgaaacagtatttactgaaacagtatttgcatgaaagaattttaagctgcaagctaaggtaaccaaaaaatgcttcagcactctattccgcaagaatatatccagtacttctagaaagccactctgcacacaaaaggttcttcaagggcattagagccactcatggaggaagtggaataaagtgcagcgggaaccatggctcaccaacagcaatgcagagca

SEQ ID NO: 227235 - DNA, 450 bp, Homo sapiens
atttcaaaagttggtgaatttagaaagcaacaaacaaaccaaaaacagtttctcagagggaaaaattaactttgtcattaacttaacatgattaaattcttttattatttttcccatgattaaataaactctaagggcagaaattagataatagctgcaaatggtaattgtgatatgcccatatttcaattattttctcaattgctactgataacttcaaatctttactgaaacagtatttactgaaacagtatttgcatgaaagaattttaagctgcaagctaaggtaaccaaaaaatgcttcagcactctattccgcaagaatatatccagtacttctagaaagccactctgcacacaaaaggttcttcaagggcattagagccactcatggaggaagtggaatraagtgcagcgggaaccatggctcaccaacagcaatgcagagca

SEQ ID NO: 227236 - DNA, 607 bp, Homo sapiens
ttctggaatattgagtttattgacttttatgaacttagatgaaactcayacagtaaataaaactccaaaagcagaggacaattaaagcacaaaactgttttcttacataggcgtttagtggtggtgattttgagctttttctagtaagtaccttaggtaagaaaaagtagaggaatatgtcatgtacaatcatcttcttcccattccagagatattaagtagtctcatagacaaagcgtggggcttgagaaaaagataattccaatttcatatcctggctcttcctttaacttgctgagtaaagttagagaagttcctttagctacttcaatttccttttccttattttttgtattctattgtgagaattcaatgagataaagtttgccaagtacttaggactcagtagacaccctaagaatgttgcctttccttccactttcttcattctttttcttttagatatcagctcaagatctgagtgaagaaacatctgagatgacgaaaggacctcaaatttatttatttattgtgtttatttacacacaaaaactgttctcagaaaaaagtcaaccatcaactatcccaggttcctccatttctaact

SEQ ID NO: 227237 - DNA, 581 bp, Homo sapiens
cttagatgaaactcatacagtaaataaaactccaaaagcagaggacaattaaagcacaaaactgttttcttacataggcgtttagtggtggtgattttgagctttttctagtaagtaccttaggtaagaaaaagtagaggaatatgtcatgtacaatcatcttcttcccattccagagatattaagtagtctcatagacaaagygtggggcttgagaaaaagataattccaatttcatatcctggctcttcctttaacttgctgagtaaagttagagaagttcctttagctacttcaatttccttttccttattttttgtattctattgtgagaattcaatgagataaagtttgccaagtacttaggactcagtagacaccctaagaatgttgcctttccttccactttcttcattctttttcttttagatatcagctcaagatctgagtgaagaaacatctgagatgacgaaaggacctcaaatttatttatttattgtgtttatttacacacaaaaactgttctcagaaaaaagtcaaccatcaactatcccaggttcctccatttctaactacatttc

SEQ ID NO: 227238 - DNA, 581 bp, Homo sapiens
cttagatgaaactcatacagtaaataaaactccaaaagcagaggacaattaaagcacaaaactgttttcttacataggcgtttagtggtggtgattttgagctttttctagtaagtaccttaggtaagaaaaagtagaggaatatgtcatgtacaatcatcttcttcccattccagagatattaagtagtctcatagacaaagcgtggggcttgagaaaaagataattccaatttcatatcctggctcttcctttaacttgctgagtaaagttagagaagttcctttagctacttcaatttccttttccttattttttgtattctattgtgagaattcaatgagataaagtttgccaagtacttaggactcagtagacaccctaagaatgttgcctttccttccactttcttcattctttttctttyagatatcagctcaagatctgagtgaagaaacatctgagatgacgaaaggacctcaaatttatttatttattgtgtttatttacacacaaaaactgttctcagaaaaaagtcaaccatcaactatcccaggttcctccatttctaactacatttc

SEQ ID NO: 227239 - DNA, 619 bp, Homo sapiens
gtggtttctggaatattgagtttattgacttttatgaacttagatgaaactcatacagtaaataaaactccaaaagcagaggacaattaaagcacaaaactgttttcttacataggcgtttagtggtggtgattttgagctttttctagtaagtaccttaggtaagaaaaagtagaggaatatgtcatgtacaatcatcttcttcccattccagagatattaagtagtctcatagacaaagcgtggggcttgagaaaaagataattccaatttcatatcctggctcttcctttaacttgctgagtaaagttagagaagttcctttagctacttcaatttccttttccttattttttgtattctattgtgagaattcaatgagataaagtttgccaagtacttaggactcagtagacaccctaagaatgttgcctttccttccactttcttcattctttttcttttagatatcagctcaagatctgagtgaagaaacatctgagatgacgaaaggacckcaaatttatttatttattgtgtttatttacacacaaaaactgttctcagaaaaaagtcaaccatcaactatcccaggttcctccatttctaactacatttc

SEQ ID NO: 227240 - DNA, 571 bp, Homo sapiens
aataataaattcttagccgggtgtggtggctcacacctgtaatcccagcactttgggaggccaaggagggtggatcacctgaggtcaggagtttgagaccagcctggccaacatggtgaaaccccatatctactaaaaatacacaaaaattagctgggcgtggtgccgggcgcctgtaatctcakctactctggaggttgaggcaggagaattgctggaacccagcaggtggaggttgcagtgagccgagatcgtgccattgcactccagcccgggctgacaacgagactctgtctcaaaacaaaataataataaattcttagtaataattaattttatgaactttagtcttcatgctgtacattagatgtctacacttgtttatcttacgtatctgctactttgtatcctttgacttatatcttcccatttcctccccctccctgaaccactctctcattctctatgtctgtagttgagctctttttaaaaatattccacatataagtgagctcatgcaatattttctttctctgtctggcttatttcgcttagcataatgtccttcagg

SEQ ID NO: 227241 - DNA, 450 bp, Homo sapiens
ataaaagaattcagcaaagtttccaggtacaaaattaatgtacacaaatcagtggctcttctatataccaacagtgaccaagttgagaatcaaatcaagaactcaacacgttttacaatagctgcaaaaacaaaacaaacaaacaaaatacccccaaaaaacaaaactttggaatatacccaaccaaagagatgaaagacctctacaaggaaaactacaaaacactgctgaaagaaatcacagacaacacaaacaagtggaaacacatcccatkctcttggatgagtagaatcaatattgtgaaaatgaccatactgccaaaagcaatctacaaattcgatgctattctcatcaaaatatcaccataattcaccacagaattagtaaaaacaatcctaaaattcatatggaaccaaaaaagagcctacatagccaaagcaagactaagca

SEQ ID NO: 227242 - DNA, 431 bp, Homo sapiens
gaaaactcttagaactgataaaagaattcagcaaagtttccaggtacaaaattaatgtacacaaatcagtggctcttctatataccaacagtgaccaagttgagaatcaaatcaagaactcaacacgttttacaatagctgcaaaaacaaaacaaacaaacaaaatacccccaaaaaacaaaactttggaatatacccaaccaaagagatgaaagacctctacaaggaaaactacaaaacactgctgaaagaaatcacagacaacacaaacaagtggaaacacatcccattctcttggatgagtagaatcaatattgtgaaaatgaccatactgccaaaagcaatctacaaattygatgctattctcatcaaaatatcaccataattcaccacagaattagtaaaaacaatcctaaaattcatatggaacc

SEQ ID NO: 227243 - DNA, 630 bp, Homo sapiens
tcagtctatagcaccaactgtcaatttacaatgccatgctgcttttttaaccttactggcataaattatgttttcgtctctgcccatttgaaaggagggcaaattctagaatgtgggttctggcattctgcttttgattagaaagctgcacaagaatgtcactctacttatgagaaaatgcagataatctataaaactctaccttttcttgatcctatcagagagctgggattgtaagccaaataaacaaactgattccaaagggtgacaagaatctttgaggagagatggggtccaaggactatttcagttttgacagaacatgagagaaaggcggctgccattaaacaaactaagagaaagttagctaaaaattagaaaacatactaaaagccaagtgtaagctagcatatcaacttaaaataaccataagctcatgcaaggtgagctcacacttatgtgcaggcttgtttccacaggcctgcacgaratgctcacaagacacaaggcaacagaaatatcctgtcaaggattttgaagactgtgttgtacaggttacaaaagcaacataaaataccaaactccacataactattgactacattgacacagcccgccatacttttgtgc

SEQ ID NO: 227244 - DNA, 477 bp, Homo sapiens
gtcataggaatgggctgtgcagaaggattccccctcctgggaaartagatggcttttaatgaaaagggaactggattactcagcgccagggagagctttgcatggggtcatccagcagttgaattcacattctggttatcggtcaaagagcccctgggatgaatttgggatcctgttggtcagcacctggcccttcagatcccaggtttgggaatgttgtgtaatcctaagccctactaaatttggcacctgggctgtttaaatgtcttacatgtggttcatccatgcctggagaaagatcaaatcttaagaaaagaagagccatggcagggccatttggaatataggctggtagaggcctagaaaggagttgggggctgacaccagcttccttccaggaatttatcaggaacatcatttttcatgcttaggtagcaagttttcctattgcttttacttataaatccatttgcctaa

SEQ ID NO: 227245 - DNA, 437 bp, Homo sapiens
ttttaattcttccaagttccacagtagttctaaattcaattaagggaaaaaaaaagaagtcttcttcctgatttataattctgagccatttcttttcataaataataatgatctaaaattrctatgcttgtgtgtacctaggattataataaatgccatgtgtcaaagggggtattactagaataattttcagtatctatataattagttcatataatatatttaatggcctgttacatgtttagctggcaagtttctacatttattaacctcataattttaaattagaaaattatattttgacctacctactgcttttattttgactgcatcccaaatatattaatagtggcatatatgtttaataaatgagccattatttctcccaaggtgtataaccatacacacagtgatgtcaattgcgttaaatgttcctg

SEQ ID NO: 227246 - DNA, 640 bp, Homo sapiens
tattgcccaggctggtgtgcaatggcacaatcacggctcactgcaacctctgcctcctgtttcagggtattctattgcctcagcctcccaggtaactgggattacaggcacacaccactatacccagctcattttttgtatttttagtagagatggggttttactatgttggccaggctggtcttgaactcctgacctcaagtgatccacccrcttcagcctcctcaagtgctgggattatttataggcatgatttttaagtatctttttcagtgtctattgtccattagttaatcttctttgtagaaatctctattcagaccctttgcccatttttaaattgggccactgtctttttattgttaagttgcatgcattcttgatatattctatacaaaagtaccctatcagatatataagaaaaattttcttccattctgtggtttgtcttttcactttcttgatgttgctctttgaaacataaaacttttaaaattgatcagttaatttattagtcattgttttgactttgaaataattgatcaagtccaattttccctttttcttttgctgtttgtgcttttggtgtcatacattcagaatgctttgcctcctccaaagtcatcaacatttattactg

SEQ ID NO: 227247 - DNA, 624 bp, Homo sapiens
ttgtacagatccagtgcaatctctatcaaaataccaaccccatcttttacagaattagaaaaaaaaatcctaaaattcatatggaaccaaaaaagtgctcaaataggcaaaacaatcttaagcaaaaacaacaaagctgaagacattacatttcctgacttcagattatactgtgaggccatagtaacaaaacagcatggtactgatataaaaatagacacataggtcaatggaagagaktaggtaacccagaaataaaaccatgtatttacagccaactaaactttgcctaagttaacaagagcatacactggggaaaggacaccctcttcagaaaaaggagctggggaattggatcagcatatgcagaagaatgaaactggtcccctatctcttatcatatacaaaaatcaactcaagatggaataaagacttaaagataagacctgaaactataaaaagatactcaaagtaaacctgaggaaaactcttctggacattggtctaggtgaagaattcatgactaagacctcaaaagcacaggtaaaaaaaaaaaatagacaatgggacttaattaaactaaaaagcttctgcatggaaaaagaaataagatagtgacaggag

SEQ ID NO: 227248 - DNA, 624 bp, Homo sapiens
ttgtacagatccagtgcaatctctatcaaaataccaaccccatcttttacagaattagaaaaaaaaatcctaaaattcatatggaaccaaaaaagtgctcaaataggcaaaacaatcttaagcaaaaacaacaaagctgaagacattacatttcctgacttcagattatactgtgaggccatagtaacaaaacagcatggtactgatataaaaatagacacataggtcaatggaagagagtaggtaacccagaaataaaaccatgtatttacagccaactaaactttgcctaagttaacaagagcatacactggggaaaggacaccctcttcagaaaaaggagctggggaattggatcagcatatgcagaagaatgaaactggtcccctatctcttatcatatacaaaaatcaactcaagatggaataaagacttaaagataagacctgaaactataaaaaratactcaaagtaaacctgaggaaaactcttctggacattggtctaggtgaagaattcatgactaagacctcaaaagcacaggtaaaaaaaaaaaatagacaatgggacttaattaaactaaaaagcttctgcatggaaaaagaaataagatagtgacaggag

SEQ ID NO: 227249 - DNA, 607 bp, Homo sapiens
tctgtagtctgttttatggcatggattaataatttacttgtgacatttcttaagtattttttcagatgccattcttcccatgagtcatgatgaggtttcttttcagtgacatagtgggtatagatggagttggtcactcttttttcctctcgtgaaataatccacaatatgaaattgagaactgctaccttagagatgtcaaactatttatatgattaaagctttgagaaagtccttcactgacaatttgtaacactaaaataatttttattttttaactgaaatcccagtttgcatgcttaaaattgactcctcagttggccagagagaagtggctttattctaaaactggaagagatcccatccaagaatctaagacctaagaatctaagataacactttgagttgaaagcgtagggtcacctggcctgaaacccagcaggcctggatttatttctgmttccatcacccagtaaccatgagaccttgatcatgttatattccatctctcaagctatttttagcagtaaaattttaaagtatttgttttaccataattaaattcctggtatagtgcctgactcattcattcaataagtaatatatt

SEQ ID NO: 227250 - DNA, 422 bp, Homo sapiens
ctaagacctaagaatctaagataacactttgagttgaaagcgtagggtcacctggcctgaaacccagcaggcctggatttatttctgattccatcacccagtaaccatgagaccttgatcatgttatattccatctctcaagctatttttagcagtaaaattttaaagtatttgttttaycataattaaattcctggtatagtgcctgactcattcattcaataagtaatatattgactgtctcttctaatgatagctgtttggatgcataataaggtaagatgtgattcctgactacaagtgatttacagataagtagtggaggtagaaaaggagatctagcctaacattacagtgctatcacctattccctagtgctgtagataccctgagaaccaggggattaggggtttccccgagga

SEQ ID NO: 227251 - DNA, 422 bp, Homo sapiens
ctaagacctaagaatctaagataacactttgagttgaaagcgtagggtcacctggcctgaaacccagcaggcctggatttatttctgattccatcacccagtaaccatgagaccttgatcatgttatattccatctctcaagctatttttagcagtaaaattttaaagtatttgttttaccataattaaattcctggtatagtgcctgactcattcattcaataagtaatatattgactgtctcttctaatgatagctgtttggatgcataataaggtaagatgtgattcctgactacaagtratttacagataagtagtggaggtagaaaaggagatctagcctaacattacagtgctatcacctattccctagtgctgtagataccctgagaaccaggggattaggggtttccccgagga

SEQ ID NO: 227252 - DNA, 613 bp, Homo sapiens
ttcaccacatcctatgactttccctcacatcttgctgcggaatatgctcccctggcttctttggcagcgagttctcccctgttttgtcccctgccttttcttactcatctggactagcaaatgctgtcatccccaagactctttcctcaggcccctgttctctctgtgctccgattgatcttatccactttcctcacttgagttgtcttctccttgcatgtgatttacaaatctacgtctcttccaatctccaggattctagtttcacttacctgaatgctttgttgatactttaaactcagcacatccaaaaccaagctcgctatttggggccccaatattttagcagtcttttcccctagcatagtgatgaacatacagacattgctatacaacaattyccctttctgcagcctcctctgtcttccttctcatccccttcacctaccccctctccctccctccaatcaattgcctctgccacctattctgcttctgctgtgtagcttccttctgttccccctgtctgctagagcccccattcagactcttcttgcagtggtcttctatgtgatacacaactgggaccccagcctgcttccagctctggcca

SEQ ID NO: 227253 - DNA, 531 bp, Homo sapiens
aaacccatgtttaggcaggcagattattatttaatgtctctttacaattttagttatttcattgtaacgaggttacaaatagctaagtctcatcccatttatgtgagatgcaattcgttttctccatwgctaaaagctccatataagaaatttaatttcatatatacatctatatgatgctttgccaaatctcctcagacaaaattctatgaagttcttgccaccttttctcctaatagaaaaatttgagaatatcatagtctgtattttgccttgagactagtaaagttttcctgccaattccataaaactgtgaggtggaaaactgttctttccaattcacccctgtctctaataacatgaggtctctgtctggccaaagtaaaaatgtataccctcttcaggtgaaggaaaagtggaaattccagaatttgccattttgtgatgatttccagtgtgaaataattaacgccaaaagaaactctccagaacttgctttattcctacagatctttgtgtggagtcaagaac

SEQ ID NO: 227254 - DNA, 598 bp, Homo sapiens
tcctaagtaaacaatcataaactcagttgtgtaggcaatccaatttctcatttgcctattataagccgacmagcgtatacaggatttaattaattctttgggagacagcatggaaagaacttgggcttagaagtcagattaatgttcagttttgccttgcctcttctaagctgtgtgaccttaagttaaattatttaactttttgtggtttggtttgttcattcttaaaataggaatagataattccttacatttttagtgaagaatgcttataaaccacttaacatagaacttggcacacaattgtaggtattacagatgaacttttaaatcttgctatggtacttatggtgagtccatgatatataaaggcaataatacataacaaagcccttctgattaatgcttgaggaaggggaaaatcagagctgacaactcctcctttctaacatgttacatcctcaagtaatacctagctgctttggttcaagaacaaatgagagagggaaattaaaggaggaagaggtgaagaatgaaacaagcaagataaagagactgcagaggtgcctcctagaaacccttgatagaggagaagcag

SEQ ID NO: 227255 - DNA, 461 bp, Homo sapiens
attaacttacacatttcaggcatccaataacttttgcaaatttgaaaaaaagatgtcccagtatggctgatatgtgtgtgtaggctttagagatgggtggcagtgacaaatttgaggcctcccagctttgacagtattctttaatacgtattcaaaggattgccatgtacacattactaagaaattgttayaggaatcagccaggacaagttgtactaggagtgatggactttagactcagcatagatagatctcagcacagatgtctacatgtgtgtggtatgtgaaaagttttctgcttcttagaacatgaattaatggacaatagcactttctttttctatgaagctagtcagcagtttgttctaaatcttcatttacttagattcattcttgttaccatatctctctgatcatggagcttttcccttgcatcctgactttggttatatgtcaatttt

SEQ ID NO: 227256 - DNA, 580 bp, Homo sapiens
ctatgccatagctgcagtgttgggaaatccagtgtctatcacagccatgagagaagtgggtggtattgacagaacacaggcatgggaccagaccagatccccagacacagatctgccacccaaatgagaagccaagggagtgacactagccacagtgccgtctgtctgtgtggggctttctctgcttcgcagaaccttgagcgtcctcagccctggaccacaaagccagtagtccctatggtaactgtttccaccaaaaaatgcccccacaaatttccagcatgcccctttgagacccmctcccacggtgagcgctgacgcaggcaacagaacccagccctgcagtgagggtaagtgggggccagccctttgccaccgcccatgcccagccatgattcctaaactccatcctcagcacaggcatagagtctttggtggcccctccgggtcccctttgtcagcccctggactgtgtggccaaacctgtgcagaagcacaaaacccaggccatgcacaaaaaaaggtcagccctgttctgagtgcctggggatccaagcaggcaactggttagctctgcctc

SEQ ID NO: 227257 - DNA, 634 bp, Homo sapiens
gaccccatctctcaactggaggagtatcacagaattcagactacgttttaaagccacaacccaccacacgtgtccctgaaatcagtccatgtgggtgcccaccccaatgacgtctcaggacctctgctctgaggcatcttgcctaggcggtgaggttttgcatttttactcagtttaactcaggttttatgactcccacatcttgggaggagacagggaggargaaaagttggggcaacacaacctctccagcatcatcaccactacccccgcctcccaaagcctcagaaaaacaagtctatccaccagaaagggcaaagcattctcccacaggcaaatctgccgcacgaatgcagaaggcgctaataaacatgatcataaacttggaatccacaatccacaacatgtcaaaggatttggaagaaactttaactcctgtgaactacattaaattctaatctcctagacattcagaatgaaaatgcagcttgctacagctgggctcccgctctgtcctttgcagactcaaacatccacagcatggtgtttgtgcaataaaactttaagtcaaagcctgtacactgcagagatagaaggacatacccaagattgtcctggtagctcaaaataaata

SEQ ID NO: 227258 - DNA, 561 bp, Homo sapiens
tgaaacaataagagctataatttaatataacaattgtaaaacgttgtcaaacagaaaattcagggaggtggctgggcacggtgtctcacacctgtaatcccagtactttggaaggccaaggtgggtggattacttgagttcaggagttcgagactagcctgggcaacatggcaaaatcccaactctactaaaaatacaaaaactagctaggcgtggtggtgcacacctgtagtcccagctactctggagattgaggtgagagaatcatttgagcccaggaggttgaggctgcagtgagccatgattgtgccaccgcactccagccygggacacagagtgagaccctgtctcaaaagaaaaaaacagaaagaagaaaagaaaattctgggagatgaatgaatagcacacagtggaatgaagacagtaaacgccaaggaagagtagaagttttcccagattaatatccaaggaccaattatttttagcaaaatggtttcctactcttctaggtagctgtatttctttaaatgccaataatatggattctggagccagacccac

SEQ ID NO: 227259 - DNA, 418 bp, Homo sapiens
agaaattatagttaagtggccctgggtaatatcatctgacttgatcttatataagtaaagacttaccaagcttatcagaactttttattcatttttaaatgttattcatttatttttaagactataaaattagaattggatatagtcacgaaaaaactttaaaaattcagaaaaacacaaagaaggtaattaaaattacccataatcccattacttaggtttarctaattaatattttggtatatttctctcctcatatgtatattgctgcttaatataatgtaaacattttaatgtaagttcataaattaccaaatttctttatcataaaatgttagagtaggagaattcctctttcaaaaatctttactgaaaggacaaatccaaaatataagccaaatgaaagaagagctgatgt

SEQ ID NO: 227260 - DNA, 556 bp, Homo sapiens
tcttgctttaaatactgtctaaatcatgagtgtccctttctcaggtaactcaattggatagataggatattttgattgtggcttggatgacattgtttcagtttctgtattattccatcagggtagcccaacacttttcccatcattttttcctgatgctcctctgtgtartttccccattgttacctaagaacattaaggaacatttctgccaaacttagcaacagtattagtaaggagcaaggggctgcagtggaaattttttattctcaaatgctctaccctgaagaattgactgctgggagcatatacgtaaatttctgcttaaagtcataagatgttatttgtcactcaatcaaaataaagatgtcatttttaagatgaatttacagaattgccagaacttaatttttctgagtgaagcaggagatgcctccctctttgctccactgtgcttctgacttacactttgttcttgtgtttttaccttgctgagagaagcgtatgacaaaggattttgtctggggactgtggccaagtatgacttgagaacatt

SEQ ID NO: 227261 - DNA, 551 bp, Homo sapiens
tctttgtctcttaatcttctacttctattaatatattctccaaaatgagaaatgaactaaatttactgaaatttaatttattggttggcttggatatatttatttcagtgttccacaaaagaggagatgttggtagacgattgatgatttgcttgctttcagcatcttgcaacattttatagccaatctgttaagtgattctattttgtaaaagtaagcagttaattttttagaaatgggggtctcactctgttgcccaggttaggctgcagtggtgcagtcatagctcactgcagccacaaactcctgggctcaagtgatcctctcacctcagcttcccaaataggactacaagcatgtgccaccatgcttggctaactttttctttttgaattttgtagagatggggtcttgccatcttgtccaggttggtctygaactcctaggctcaagccatcctcctgccttggcctcccaaaatgctgggattataggtatgagccacctctcccagccttatgtggttttatagacaatgttaccttgtgtgc

SEQ ID NO: 227262 - DNA, 425 bp, Homo sapiens
atgatggagtttcctggctgtttcattaaaggcagtgtctgcgggcagcttcttcccgcctttactccatcttggacgatgaggtcaaaggcccctgggayctccactggagccaggacaccagccctgctctgcctatagtaaggcttttgcatgtgcatgaaatgaacttctatctttttagccactgtccttgagtctctgttgaatgctgtggaattaaatcttatctaatacacccatcttaagggaaatttcgtgagaggagaaaaatcagtattttaatttactggagtccagttagccccataatctgaccactggcccttttcatttgtgcatttaataaacatttatctagtatctgcaatgtgccaggcccttaaggtgatgcaaaatgagcgtgccctgatcccttccctcaa

SEQ ID NO: 227263 - DNA, 559 bp, Homo sapiens
tggaagaccaggggcaaaatcctgtggtttgggtatgatttgtttggccccaccaagtctcatgttgaaatttgatctccaatattggaggtggggcctgataggaggtgtttggtttgtgggtgcagatccctcatgratggcttggtgcagttctcaggtaatgagtgagtggtagctctattagtacttgtgagagctggttgttagaaagagcctggcacctctctcccctctcttgtttcctctcttgccatataatctctgcacacaccagctcccctttgccttccaccatgagtaaaagcttcctgaagccctcaccagggacagatgttggtcccatgctttctgtgcaatctgcagaactaagagccaaatcaacctcttttctttataaattattcagcctcaggtattcctttatagcaatacaaacaggctaatactgacacatatctacatatctgcatgggacccacaaactgtcttttacaggcaagcttttagtccttgtttatggagctatttgggacaaaggacaagacattcatttgac

SEQ ID NO: 227264 - DNA, 451 bp, Homo sapiens
cttttttctagaaagcaattagtactagtagcagtataataggagccataatgataatagtctttatrttagattgagcccttacaatgtgccatatactctgtcaacaatatcacattaccccttcattcttcacagttctctgaaccagatattattagccccatttcgcaaagcagtaaactgagggacagggaggctaagtgatttgtgacaccaagagctaagcagtggcagagttagatttcatattaggttaagtctggttccaaatccagaatgcttgcatttacactacacaatctctagaacacagacttgatgaaaccaagcttacacattactttattaaaagctcattgggccaggcatggtggctcacgcctgtaatcccagcactttgggaggctgaggcaggtggatcacctgaggtcgggagttctagaccagc

SEQ ID NO: 227265 - DNA, 564 bp, Homo sapiens
aaacttacagtgtaaacttggktgagtatttaatctttctgtgctttagtttcctcaactagaaaatgcaggtaggaatcaaagttggataatactgataattacatgagtttgtatatgtttaaaaacttacctcatatttgcaaaaaatcatataagttatttagaaacatccctttttccatttaataaatactgtgtttcaggcattgtgttatatattgagcataccaaatgagtacagacaatccttatctcaacagagaggccagccagatgtaactagaaggtagggaaagggatatggaagtcagccgtgcaaataaaagaaacccagagcttctggaagaaccactgcttcttctgtgctttgcaggattctggtgttaggttagataagttagggtcattgggttgtttttccttttttcagatttgtcagagcaaataccagcttctttttgggaagccgcaggaaccctatataaatatttttatttaattggcagcagcatattgtaatgggtaaaagcatgggttatagaataagatagacctgaattc

SEQ ID NO: 227266 - DNA, 584 bp, Homo sapiens
agcttgggtttaccttcaggccattyggtctatggcctgtgcgcttatggactatgctacatacactgccagtggtatccgtgaacaagataacaacactattactaacaacaataaaagtaattgaatttaaatatgtttttctctatgttagcactgtgctaattgctttaaccttcacaaaaacctggaggtggaaactattgtagaccccattcttacaatgtggaaactaagcctctgagaagttgtatcactgcccccaggccacatagtgggtaagaggaggcacttaggtttggatagagtctgcctgacttccaaagttacagataaagatagggaagatgaaacacagacagtccagtccctcctcatttcttgaaacaagcatgagctttccattagcccgtcactacccgccaccacctctgttagaagtcagggtgaaaaagagtaaattactcacatcagttcaggggtgtgtgtgtgtgtgtgtgtgtgttttggtcagctattacttaaaatctatgttgagtattctaattaatttaggaaacaatgtttaaaaagaagctaaatta

SEQ ID NO: 227267 - DNA, 425 bp, Homo sapiens
ggtaatgtatagaagtcaattttatctccaagcatttctacttcctaaaccattagcaagagactcaaaacaacttcaccaaactattggacctccagtgttaacttgccaacataaaaatctgaaaaactttgtaatcactatcagaaatacaaaagagagaataaattcccaggtaaaaggatttacsgaaaagaattactttatgacaattaggatgaaggttatgagctagaagttcagcataatatgagagggtagtattaaaatcatattttagaaacttctttaatgggaactccatatcatgagtttcaaattcttattggctgtttactcatgttgcctatcatatacatttcttgtttttccccttcctatgtttccaacctaatttgactcattccaataggcatgccatggtg

SEQ ID NO: 227268 - DNA, 445 bp, Homo sapiens
atatttttgagctaattctacatttacatacaattgtaagaaataatatgaaaagatctcgtgtatcctttccctgatttctcccaatgatacattttgcatcttgcaaaatcatagtataatttcacaaccaggacattgacattgtacaatccaccactctcattcatatttcccaagtttcacttacattcatttgtgtgtgtatttagttttatacaattttatcatgtgtatgttcatgtaaccacaccgcagtcaagaagcagaggagttccatccccacaaggaccttttgggtcacsctttttataactacgccttctctccctcctgcatcttcccttccctacccctaaggcctagtggccactaatctgttctccatttctaaagttttgtctttccaaatgtttaatataaatgaactcatacagaatgtaat

SEQ ID NO: 227269 - DNA, 539 bp, Homo sapiens
tatcttttattgggtctatcaatttttgctttataaattttaagattatataattaagtatatgcacattaattttcttatgtgaattggccttttgttgtcattaaataaccttatttgtaacaatgtttcttgccttaaatcctattttgtctgatattagcctgtctttctttgtgtcatatttgtatggaatatattttccatctttctattttaaacattttacatccttatatttactgtgcatttcttrtaatcagcatatagtcattttttagttgtgtggggaatttttagttgttttcttatttgtttttaccatccatcatgccaatattggtcttttaatttttgtccatttatattttatgtaattatttgtatattttggttcaaataggccaccatactatttgttttctgttcattctatatcttttaagttccttttttctctcctttcttgccctcttttatttaaaaggttaatctttctccaaagagataagaaaactgagcaaagcagaaatatatca

SEQ ID NO: 227270 - DNA, 539 bp, Homo sapiens
tatcttttattgggtctatcaatttttgctttataaattttaagattatataattaagtatatgcacattaattttcttatgtgaattggccttttgttgtcattaaataaccttatttgtaacaatgtttcttgccttaaatcctattttgtctgatattagcctgtctttctttgtgtcatatttgtatggaatatattttccatctttctattttaaacattttacatccttatatttactgtgcatttcttgtaatcagcatatagtcattttttagttgtgtggggaatttttagttgttttcttatttgtttttaccatccatcatgccaatattggtcttttaatttttgtccatttatattttatgtaattatttgtatattttggttcraataggccaccatactatttgttttctgttcattctatatcttttaagttccttttttctctcctttcttgccctcttttatttaaaaggttaatctttctccaaagagataagaaaactgagcaaagcagaaatatatca

SEQ ID NO: 227271 - DNA, 584 bp, Homo sapiens
atgctaaaggccacgatacacaatgaaggcccttagtaattaatatctatcaaaaagtaagccactttgtaaagcagaaattcagagagatgcaagaagtagaaatatgaatgacaggagattttccactctcacacacaaacaagtcaaacagataaaaaataagatataaaagttctatataacaaggtggatttttttgtatatcaaagtttgcaccacaataatagagaatatacataggacattcacaaaaataatcatgtattaggttatatgttaggtcatgacattctgagaaataaagtggaaaaatgcaaaaatataatattttctgcttacaattcatagaacaagaaataacaaaaatgccccacttggaaatttaaatataaaactcactattaaactattcttgaaataataattataaaccaaaatttcagratttttacaaaataatgatgttaaaaacactatatatctgaatctgttaatataactgaagtagtgattaaggaagagtttagagcctccaatacttatgccagtaaaaaaatttataaataaatgaaaaaatttcc

SEQ ID NO: 227272 - DNA, 572 bp, Homo sapiens
gaattcaagggacatcatgtccacatattttgagctttccaaatatttgaacttctaatacttaattgctttgtattcatgcagattataattttcaaagtacaattataccatgtattcttgctgaagtccgttattagttagaagtgtttttttagtctttctacccagtagagttggtctaaacatgcaacagcctatgtttaaaaatctactgtgctgattaaaataaggaaataaacttgtactgcttcttyctttctcttgccaaaagcttattaagccaagtacactttacattaataaagaatgtacccagtcatgcagtgaggtacaaatatattgagggcccaccaaatgcagtttcactgctgggttctacaagggtatcaagacaaacaaaatagaatcttccctccatgagttcaaagggtggtcatagaacagacataaatggaaataattttttaaaaataaaaggcacagtaagatttatgcttgctcaatgtcataaacaaaaggcagtgatagaacaagaggaaaaaaatgaatttgtattggtgggatatgaa

SEQ ID NO: 227273 - DNA, 571 bp, Homo sapiens
tctgtctccaaagataggcagggaaggcaatatttttggaaactggtacaagatacatcaggtagaccagctgtgtcctactctccatttctgaaatctgtccactgtctccgtcaagagactgacttcaccaagcactgtatccatttgattaaccttcagagccaaccctcctgcagctgtgcagctgtgcagtctccgtccctggtttggcttcctaattcccatattaatatcaagagggcctgggcagctgaagaatcagcaggagaaaacaagagaatggagcttcaaaaatggtataagccatgcaggcttatagtatgcarccttatatccatcagccaaagctatagattttattatatttacaaagctacttccatgtggctgcacaacttgcttaaaacatgtatctaatattattcgggaaatatcaaggcttgtgttggactatgccctgggttctttctgttgctgaagtggtagcaatttctagtgcattcttttacagggatactatctgtaccattgataacacacaagataatgttaggtactccatggatga

SEQ ID NO: 227274 - DNA, 493 bp, Homo sapiens
accttaattttactagtaacgaaatagaagtccagacaggaaaaataacttattcaaggccatagaaaatgtaaatgcaagggctaaaatcatttttactggccttagttagatccagtaatcgttttcattatgatgtgcttattatataacttggctgagaatgttttgtttcttccctctcttcctttctccctctcttctttcctgtccacttttctctttctccctaacaatatctttccctatttctcttcctcttcttccctctctccttatcatcttccctttcttctttcattttcctcttttgctttcattcactcattcattcatatatttaacaattatttactgagtayctattatgtgtcaggcacagtgttagaagccagggatacagatggaacctggccttatggaacttacagtccaatagggcacatggacactgagcaggtcagggaaagctttctgcagaagtcatatttat

SEQ ID NO: 227275 - DNA, 602 bp, Homo sapiens
tgtctcagttgtgtcttctgtaaatggaggtaatacctcacagggtgactttggactataattatcattataccctgtatcattatcattatgtatcattgtatgctatagttattagtattacatcctgtatctgggccataatacatgctcaccttttgtattcatggaatatgatggtcacattttataatatgggttcaaaattataatatttgataatttcattataagggaaatagtttttaaaaactaaactgtttccttgttcaataaatttcatagatgttatgaaaaatcaattttttgtcataatttttacataatgggaatgagagttagagtccctatgcagggaaaagaaagcctgcggctctttcaaacaaggctttactggttccaaatctgttttcaatcttacacamacaagtttattgcttgagtgaaagcaaaaaccaaaatctcttatgtctttaagcagaaagagctcctagcagctagagctggaattctttataaaaatagtttattgcaaagcacatactatttctcaatatttttaaaggtaaatattagtgaatgaagctctctctataacagaa

SEQ ID NO: 227276 - DNA, 543 bp, Homo sapiens
cgtagagtccttacaggacgttgcccaggtgaatataatgatcagagtggttatgtaacaggtggattagaacagaggacatggcattcagttggctaataatgcttggcatcctgcaataagttgtatcatagttttctgttttaaggaagatatggagaccctatattaagaagaaatgtacaacatgaatttaggcaatttataacatgatcctaaagagtttttgaaatgtttatacaaaattaaacattccctttatcctactcttaatcatcctgcccatccctcattataaggaagccccagatacctgaaagacttctwtgttttcagatattttataaataagattatcggatgtgggaaaagattgttgtcattgaactaattacattaagtctctgtagcaaaagttttaatatgatgtttggatattaatgggagttttaattgatataaaaaaggctagtattcactcagcaaataccaatttaatgcttattatttacttaggtatttgtacaagttctttaaaaatag

SEQ ID NO: 227277 - DNA, 557 bp, Homo sapiens
tctccttatgtcctttgaccctggcttcgaaccatactgaattcacacttctgattcttctccagatacccgatggcttctttttcaccctcagattttaaatatgaatgtttttaaaagtttttcatggtttacactcctggttctttgcttagcattccccagtttcaacactcaactatattttcatgatgcctcaaaatatgccttcacacagaactctctccaaagctgtaacttcattttcttttttttttggagatggagtctcaactctgttgcccaggctagagtacagtgacatgatcttagctcactgcaacctccacctccagattcaactgattctcctgcttcagcctcccaagtagctgggattacaggcacctaccactacacctggctaatttttgtatttttagtagagactgggttttgccatgttggccaggctggtcttgaactcctgatctcaggtgatccactggcgttggcctcccaaattgctkggattacaggcctgaaccactgtaccccgccataactccattttcaaa

SEQ ID NO: 227278 - DNA, 493 bp, Homo sapiens
aatgtatttcagtttcacatttgagcttctacattaacagtccattagtccttttattcttcctttctaacrttgtttaaagactacatggccatgaaatacatggagacaaaaacattatatttttatttcttcagtcacagctttaaaatttccatgttgaatttccttctagtccattttggcaagatactgtaccctctggtcattcctgcttatattatactccagtgtcaggtcagatttgaagttctcttcttttctcccagtagtagactatggccttggctgcttggactttggtgacagtaggacaatatggtctctagatcctcacttcctcttctttttcaaggcctaatcccttagagagactaggcctaagctctagggagagacagaagtcgtggaagaagagcctgctagataactgggctgctcgtttccttctggttccacctcatgctctgctgagagaatggctttctgagta

SEQ ID NO: 227279 - DNA, 493 bp, Homo sapiens
aatgtatttcagtttcacatttgagcttctacattaacagtccattagtccttttattcttcctttctaacgttgtttaaagactacatggccatgaaatacatggagacaaaaacattatatttttatttcttcagtcacagctttaaaatttccatgttgaatttccttctagtccattttggcaagatactgtaccctctggtcattcctgcttatattatactccagygtcaggtcagatttgaagttctcttcttttctcccagtagtagactatggccttggctgcttggactttggtgacagtaggacaatatggtctctagatcctcacttcctcttctttttcaaggcctaatcccttagagagactaggcctaagctctagggagagacagaagtcgtggaagaagagcctgctagataactgggctgctcgtttccttctggttccacctcatgctctgctgagagaatggctttctgagta

SEQ ID NO: 227280 - DNA, 493 bp, Homo sapiens
aatgtatttcagtttcacatttgagcttctacattaacagtccattagtccttttattcttcctttctaacgttgtttaaagactacatggccatgaaatacatggagacaaaaacattatatttttatttcttcagtcacagctttaaaatttccatgttgaatttccttctagtccattttggcaagatactgtaccctctggtcattcctgcttatattatactccagtgtcakgtcagatttgaagttctcttcttttctcccagtagtagactatggccttggctgcttggactttggtgacagtaggacaatatggtctctagatcctcacttcctcttctttttcaaggcctaatcccttagagagactaggcctaagctctagggagagacagaagtcgtggaagaagagcctgctagataactgggctgctcgtttccttctggttccacctcatgctctgctgagagaatggctttctgagta

SEQ ID NO: 227281 - DNA, 532 bp, Homo sapiens
aatgagtaatgtgatgttaaatttctcatacagaaatacctttaaaagcaataacaacagcaaaaaaaacttaacgggtaaagttgagcaaagagaggaagaaaattaacttttattgagttactattgtggttggagactaagatgcatgatttatacgttgtttaatcttcagtaatgaagccttcttatctctggttttcagatgaggaatttgtgattgagacaggttgaataaagcaggaacagtttaataatattaattacttttcactgtggtgaaataagttaatgcacctatagttctgagaatatgcccttacacatgagaagcattcgatatgtttttgctgttttgaaacataatgctacaagttgtaaataaaarcaaattagctcatgggttttaaggaaaatcagtctaaagtaggctatacatttaactatctgaagttaacatcaggaagttttacaaaatgttggctgtgccactaggaatgtgtccatattagtagtagtggtcactcataaa

SEQ ID NO: 227282 - DNA, 420 bp, Homo sapiens
acagttttgacctcccaggcacaagccatcctcccacctcagcctcccaagtagctggaccacaggtgcgtgccaccacactcagctaatggttgtatttttcgtagagatggggttgctcaggctggtctcaacttcctgggctccagtgatccatccgcctcagcctcccaaagttctgggattacaggtatgagacattatgcccaggcttttttgtttattaatataaatattttaactrtatattttctcttaaacttggtattagctgcttttcaccatttccaagtggattttcattatttatctttattacctgtttaactcacatgtacctgtgcatagtttggtagggtgggaggctattgagattcgctatgtagcctaacaccaggttaattttttttgcagacattc

SEQ ID NO: 227283 - DNA, 457 bp, Homo sapiens
aaatgtttgaatgcatgaatgaatgaatgaatgaataaatgaagaaacatgttgatttagggcattcattgaggaaagttatatgcctatttgccttaaagatactgtaacgtaaaaatattttcaaacattattctaggataggataaatgaccaaacttggggaggtgtcaggatgtcatattgaagatggggargagagaagaagaggtagaattggaacagattcagagaatgaacaaaggaagggaaatagctgtactttcaaaccccacactatgtcttttggaaatgaaagacaatgttgagtaggaatttaaaacaccggagatatggtgactgggctgatcacatctctgccacttcctaggtttgtgactttgaggaggtgaactttttttgtctttcagtctcttctttcagaatttgcttcctatatctgcttaaattgaagcat

SEQ ID NO: 227284 - DNA, 564 bp, Homo sapiens
taggttcattcttctgcatatggatatccagttttcccaccatgattcactgaaaagactcttccctacccagtgtatgttctcagcacctttgtcaaaaacgagttcactgtaagtgtgtgaatttgtttctaggttctctattctgttccattaaagtatgtgtctgtttttatgccagcaccatgctgttttgkttactatagctctgtagtgtaacttgaagtcagataatatgatttctgcagttctgttatttttgcttagggtagctttggctattctggatcttttgttgttctataaaaattttagaatttttttctatttctgtgaagaatatcattggtgttttgctagagatttcattgaacatgtaggttgctttgggtagtacaaacattttaacaatattggttcttccaatccatgaacatggaatcccttttcatttattggtgtcctcttcaatttctttcttcaatgttttatagttttcattatagagatctttcctttctttggttaaattaattcctagatatttaattctatgtgttgcta

SEQ ID NO: 227285 - DNA, 556 bp, Homo sapiens
ctcttctgccttaagcgatcctttctttcatccaatttctctgctttgtggatgtgggaaagtgctcattcccagattatttggtgctacttagccctacctcctagttttcacccttctaaatggtggctcagtctagaactaggtgagaggtctttacatacaatggctgtgtatgtggaactcagtgccactggaaaaccaaaagaccagtggatctatcaggcatcacctttattctctgagccaaagattcctgacagccaaggtagggttcatagatgagtcccatggaggagcttctggggatcccatgaacrccatggaatgatatgcaaattgtgtatatgtgcattttttacagggctgatctgcatactcaatgactttttgggcttcctgcatactgatcatagtcttgacctttttctgctagcctaatcctttttcaggggccttgaaagggaaagacattctctcatgccaattccctttaagataggtgtgattagcctccttttacagaggctcagggaggttaaatgaggtactcgtt

SEQ ID NO: 227286 - DNA, 543 bp, Homo sapiens
tataattgaaaattaaatcaaacagctgaacaattaatttgactccaactgctcagggtagtaccatgtaaatccattctcacccagccaactaattaaatatacctttcaatttcacattcaggcagaagagcagtttggtcactgagacaacaattaattctcaaatctggcacagttgtgtagcaagagtaaacggcacatgaagacaacataatgtatttgyatacttttcctacatccactaccatactataaattacagtctagtgtctttactgtggccacatatactagcacaagaagacacactagctagctttgacagtactcttccctacatattctcttctccaagcttctgtttatactgtttcctctgcctaggacacctcgcctatggggccagacaggtaatataaagacgtgaaatatgctgagtataagacaatatagagtggtgggaattgtatcaaactgcaaagaacacgccttttccacaaaacgcaactactactgagttatagccgattgtcatgatga

SEQ ID NO: 227287 - DNA, 595 bp, Homo sapiens
gaataggatgattataagaggctgagaagggtaatggcagggttgggagttgggaagggaagtggagatggttactgggtacaaaaaatagagtgaataagatctggtatttgatagcacaacagggtggctattgtcaataacaatttaattgtacatttaaatataactaaaagagtataattggattgtttgcaacacaaagaaataataaatgctttaggtaatggatgtctcatttatcctgatgtgattatgcattgtgttcctgtatcaaaatatctcatgtaccctgtaaatatatacaactactatgtacccacaagaattaaaaattwaaaaaaaaaagaaaagtgctaagaatagaacccagggaaacaatgacattcaatggtttgatagaggataaggagcctgcagagaagactgaaaaagtgcaatctgaaagatgggggtggggaaaacaggaaagaatactgccatggaagtcaaaaaagtaaaaaaattttaagtagaaggcagtgaccaatagtagcaaatgacacagaaaataaaattaggtaataattgagatatgtacattcaatttcacaat

SEQ ID NO: 227288 - DNA, 595 bp, Homo sapiens
gaataggatgattataagaggctgagaagggtaatggcagggttgggagttgggaagggaagtggagatggttactgggtacaaaaaatagagtgaataagatctggtatttgatagcacaacagggtggctattgtcaataacaatttaattgtacatttaaatataactaaaagagtataattggattgtttgcaacacaaagaaataataaatgctttaggtaatggatgtctcatttatcctgatgtgattatgcattgtgttcctgtatcaaaatatctcatgtaccctgtaaatatatacaactactatgtacccacaagaattaaaaattaaaaaaaaaaagaaaagtgctaagaatagaacccagggaaacaatgayattcaatggtttgatagaggataaggagcctgcagagaagactgaaaaagtgcaatctgaaagatgggggtggggaaaacaggaaagaatactgccatggaagtcaaaaaagtaaaaaaattttaagtagaaggcagtgaccaatagtagcaaatgacacagaaaataaaattaggtaataattgagatatgtacattcaatttcacaat

SEQ ID NO: 227289 - DNA, 535 bp, Homo sapiens
ctgaggtgcctgagctcaggaatgtgatcaaacctccctaatggatgaggaaaccaagacttagagagaggacctgatgaagtagagcttggtttgacatctgaagacaagtagtctcccatctctgccttttattagctgtgtgactctagggaagtaacccagcctctctgagcctcattggaacattagaaatcataagactgaaccagcttgatccactrggctcagacttgagcacagtctgaaaatatgctgctggaaactctcaggaagccagcttggccagtacaactacacggcaagtgtgggtgaatgctgcgacttgctggaggtcaccagcagggaggacatatgtgggatgtgtttcctgagactccagcatctcgccctatggcacggctgtgtgaccagggctctggatggggcatctaaggacttggcgtcttttcccagcgctggcccagccatgtaactttaggaaggccctctcagggactcagcgtttgtgaaatgagagggcaggtttagatag

SEQ ID NO: 227290 - DNA, 394 bp, Homo sapiens
aggcgaagagagaaaagtaagtctccctgcctcctctgcactcccatgtccctcttccccttcccacagaccacgctgtgaccagttccttttatcctgcagagagagtccatgaatgaccctcgacagtgctttgaggtattattattctggagttacatattaggaaactgagrttctgagacaggaagtcactttcccaaggtcacaccacttcagggcaaagctgggagttcaccccagatgtgctgactgaagcccatgtgttgagggtcaccctgcctcccacaaagaggagagaaccagaaagctgagctgagaagtgtgtgctgggcagccagctggacttgctcacaaataggctttggctgcatacactggtcttgaagaattc

SEQ ID NO: 227291 - DNA, 393 bp, Homo sapiens
aggcgaagagagaaaagtaagtctccctgcctcctctgcactcccatgtccctcttccccttcccacagaccacgctgtgaccagttccttttatcctgcagagagagtccatgaatgaccctcgacagtgctttgaggtattattattctggagttacatattaggaaactgaggttctgagacaggaagtcactttcccaaggtcacaccacttcagggcaaagctgggagttcaccccagatgtgctgactgaagcccatgtgttgagggtcaccmtgcctcccacaaagaggagagaaccagaaagctgagctgagaagtgtgtgctgggcagccagctggacttgctcacaaataggctttggctgcatacactggtcttgaagaatt

SEQ ID NO: 227292 - DNA, 480 bp, Homo sapiens
ggattacaggcgtgagccaccgtgcccggccgaaggccaattttttaagccctctgtgcttcagtttctttgtctctaaaaataggttgctgagtgagatagtttggatatttgccccacctacatttcatgttgaaattcaatccacagtgttggaggtggggcytgcttggaggtgatttgataatggaggtagacttcttatgaatggtttagcaccacccacttggtgctgtgacttctcacaagatctggctgtttgaaagtgcagcaccttgccttctctttgtcttgtgcctgctttcactgtgtgatgtgcctgctccccctctgctttctgcccctgtcatgattgtaagtttcctgaggcctccccagaagctgagcagatgccagcatcatgcttcctgtacaacctgcagaaccataagccaattaaacctcttttctttatagattacccagtctcaagtatttctt

SEQ ID NO: 227293 - DNA, 517 bp, Homo sapiens
tgacccactttagtctgatgcactgacacgagtgggaaaccaggagctcatagagtacaagargctgcacacatttagccacccaaagtgggacaaaaacaatgagttcatggggatatttgtgcagccaccatgtctgtgaagtgaggctgtggagagatgtgtgaaaatgccatatctgaggaacccgccatgcctgatatgaacaacttcccaagcataatgtcctcaacttccctcccacctgccaaatctctggtgagtttctcccactggcaaactatgacatgccatccttctctgcaaaagagggacacacaattctttccttttctgagtcatacttccctttgatatcctatataagttcattctcgctacataataactctcttgctacataataaacaaccacaaaatcttagtgacatacagcaataagtatttgttttggtcacatgtcagcaggtcaataggtggttggcttctttggctggggaatggctgggaaacgtgg

SEQ ID NO: 227294 - DNA, 534 bp, Homo sapiens
cacttacctgaacaatttaaacttttattaagtacatattagtaggcaagaaagaaacagtttagttttaatttgcaaataaaatttatgtttatcagtaacctcaggaaaactcgctaatctctgtgcctccatttctctcactggtaaactrgagataatatccatctccacctttacggaatgtctggggcgtcaggggttgggggatgggtcttaggagcggttatccattgaaaaggaggttaggaatcaggtcttgggctgtcaacaaggcaagcaaagtggtctgacttggagtacaggttgatttgttgtggctttgaaggaggctgatgggtattattgtgggttacacttacacgtgtgactgtcaactccacaggatggccaacatgaattaggaaatgaagggagaacgccgggcatacaggaagtactcagccatgttagttccggttccctctatacctactcggtataaacaagaagcaatattcttttctaaagctacaccgaatgtaaaccaccacc

SEQ ID NO: 227295 - DNA, 456 bp, Homo sapiens
acagtacattctaagtacattctaagtactagctgttctcccaagggctgaaaacctgtctgtaagtggtatcctatagaccactgcaaacatcccagatgactagcacaagttcaagtcaccttcaattcctgaacatcarctagattcccccaactatactgtacccagttgaatagaccttgcctaagttttgctatgtcttttagaaaccgggggtccaactgcctggatatatctttggaatacatttctacagccaggccagttcttccagctcatgaagtaatgcaaagttctaagcatatggcactagacacacaatattaacagcagcatctttctttgaataatttctgcaagatcttattgtgaatgcattatttaaaaactaagaactagacataactgagctctgtttcagagcaactgtaccaggggctaacattagaattc

SEQ ID NO: 227296 - DNA, 396 bp, Homo sapiens
gaattctctgatgctgagtgagttgtgacttctggtagaaggcttttccacattcattacattcatagggtttctcccctgtatgtgttctattatgtttagttaggtatgatttattgtaaaagatttttccacattcatgacattcgtagggtttctcccctgtgtgtgttctataatgttgagagagggttgacttatggctaaagaatttcccacattcgggacatgcaaagggtttctsccctgtgtgtgttctctgatgtactgtgaggtctgacttcaagcagaaggttttcccacattcataacattcataaggtttccaccctgtatgaattatctgatgcctggtgagtaatgacttgtggtagaaagttttcccacatgcattac

SEQ ID NO: 227297 - DNA, 555 bp, Homo sapiens
tatgttggctgtgggtttgtaatggatagattttatcacattgaggtatgtcccttgtatgaaaattttgctgagggttttaatcataaaaggatgctggattttgttaaatgctttttatgcatctattaagatgatcacgtgatttttgtttttaattctgtttatgtggtgtatcacatttattgacttccrtatgttaagccatacctgcatccctgatatgaaacctacttgatcatggcagattatctttttgatatgccattggaaactacaaaacattgctgaatgaaatcatggataacaaacaagtggaaagacatcccatgctcatgaatgggtagaatcaatattgtgaaaatgaccatactgccaaaaacaacctacaaattcaatgcaattcctatcaaaataccatcatcatttttcacagaactagaaaaatcaatcttaaaatatggtaccaaacaagaacctgcacagccaaaacaaaactaagtaaaaacaacaaatctggagccatcacattatctgactttgaactatacaata

SEQ ID NO: 227298 - DNA, 555 bp, Homo sapiens
tatgttggctgtgggtttgtaatggatagattttatcacattgaggtatgtcccttgtatgaaaattttgctgagggttttaatcataaaaggatgctggattttgttaaatgctttttatgcatctattaagatgatcacgtgatttttgtttttaattctgtttatgtggtgtatcacatttattgacttccatatgttaagccatacctgcatccctgatatgaaacctacttgatcatggcagattatctttttgatatgccattggaaactacaaaacattgctgaatgaaatcatggataacaaacaagtggaaagacatcccatgctcatgaatgggtagaatcaatattgtgaaaatgaccatactgccaaaaacaacctacraattcaatgcaattcctatcaaaataccatcatcatttttcacagaactagaaaaatcaatcttaaaatatggtaccaaacaagaacctgcacagccaaaacaaaactaagtaaaaacaacaaatctggagccatcacattatctgactttgaactatacaata

SEQ ID NO: 227299 - DNA, 555 bp, Homo sapiens
tatgttggctgtgggtttgtaatggatagattttatcacattgaggtatgtcccttgtatgaaaattttgctgagggttttaatcataaaaggatgctggattttgttaaatgctttttatgcatctattaagatgatcacgtgatttttgtttttaattctgtttatgtggtgtatcacatttattgacttccatatgttaagccatacctgcatccctgatatgaaacctacttgatcatggcagattatctttttgatatgccattggaaactacaaaacattgctgaatgaaatcatggataacaaacaagtggaaagacatcccatgctcatgaatgggtagaatcaatattgtgaaaatgaccatactgccaaaaacaacctacaaattcaatgcaattcctatcaaaataccatcatcatttttcacagaactagaaaaatcaatcytaaaatatggtaccaaacaagaacctgcacagccaaaacaaaactaagtaaaaacaacaaatctggagccatcacattatctgactttgaactatacaata

SEQ ID NO: 227300 - DNA, 555 bp, Homo sapiens
tatgttggctgtgggtttgtaatggatagattttatcacattgaggtatgtcccttgtatgaaaattttgctgagggttttaatcataaaaggatgctggattttgttaaatgctttttatgcatctattaagatgatcacgtgatttttgtttttaattctgtttatgtggtgtatcacatttattgacttccatatgttaagccatacctgcatccctgatatgaaacctacttgatcatggcagattatctttttgatatgccattggaaactacaaaacattgctgaatgaaatcatggataacaaacaagtggaaagacatcccatgctcatgaatgggtagaatcaatattgtgaaaatgaccatactgccaaaaacaacctacaaattcaatgcaattcctatcaaaataccatcatcatttttcacagaactagaaaaatcaatcttaaaatatggtaccaaacaagaacctgcayagccaaaacaaaactaagtaaaaacaacaaatctggagccatcacattatctgactttgaactatacaata

SEQ ID NO: 227301 - DNA, 548 bp, Homo sapiens
atcaaaaaggagggattttaagactggccagatccctaaacatctttgcccaggaaaatgtgctcaagtacaaccagagaggataacaggacagcaggaaacagaatctaggactcaggtgatcccacacaagatggcagttatgtgagatcccaaaagactttaaggcgctagcacagaaaagcagacatcgagcatatytagggaaagccactctatattgaactagaatgacaaaatgccaaagaaagttgccccactaccgacggcaaaaaaaaaaaaaaaaaaatggaacagatgtgttttagcagatggaaagtatctttgaaaggcatgtgataaatgctacaacacttgaagggaaaacagctgttagaaaacaggcaaacaaatatagtcagaaaattagcttcatgctaaaaaataatggatgtgaaagcaaacagaccagccagtggctacttattgcatttgtctgggtaaagcaacataggctagggaaaaagagatgacccagaaaaagtgcagaaatgctcagatttcagaac

SEQ ID NO: 227302 - DNA, 560 bp, Homo sapiens
cttgaagggaaaacagctgttagaaaacaggcaaacaaatatagtcagaaaattagcttcatgctaaaaaataatggatgtgaaagcaaacagaccagccagtggctacttattgcatttgtctgggtaaagcaacataggctagggaaaaagagatgacccagaaaaagtgcagaaatgctcagatttcagaactgtttcagagaaggaatgaaggacatataatgcagaggcacagcgaaaacaccatatgacttagcagtgaatagaatttgcatagtcataatcatgtaaatattactgatttaattaaaaagtgtgctacaattggaagaaacagagggagaaaaataaggtcatggtgtagtgaggaaggtatgctttcatctgctatgacaaagtcaatagacagtgctgatagctattctatttttcatatttattattctgtatttgttattctgttatttgttatttcttagctattctatttttgttatytgattaaaaatatgattaaatatttaaggcagatctttatgacacaaccagactattga

SEQ ID NO: 227303 - DNA, 691 bp, Homo sapiens
ctccaaacccttagaatgtgtgccatcaacagtatcactctgggtgataatgatgtgtcagtgtaagatcactgactataataaatattctactctggtgtaggaggttgttggttgagtgacccaagagtgtacaggaatcgagggcatatgggaactctggactctgcactccattttgctgtacactcaaatctactctaaaataataatgtatctttaaaaatctattactatcacgtagcccttttcaagtctccaactggtctgagccagttctattaaatctcagaaaacactggttaataagctagctctgacccaactggcaagaagaggcagaagagacccaggcgacgggagtatattgcacatgcatgcaccaggaaactggaggaagcttggaggccctttaggctggttctgagcccattgaaactgcagttacaggcacagatgcctggggcaccaatctgaatttgccaacatccaaggccacatgaacacaaatgyacagtctcctctgcgatcagtagctaaagatgttaggccatgactggactaggatgggagatgagctgaggacaatagattatgtagacttttgttgcctcttcccagccccaagcatttcactctttactcttgccacaggcagcagggacgctccctatgaacatcatccccacag

SEQ ID NO: 227304 - DNA, 552 bp, Homo sapiens
gcaggttttctgtcctgtgtaacctctcttatgtacaaggaagagtgaattctcagggaaagctttcccacattcattgtattcaaaagattgttcccaatttttaattttctgatgccaaatgaggtcttcattcagccagaagctgttcccatttttattatattcagaaggttcctcttcagaatgaattatttcatgcttttcatyacagaaacattttccacctttgttaaactcattgaacttcattattgaatagtttctactggtattaattaattctgaaatacagagtgaaaagaaaggttagttgacgaggatatgtaagagaaataaacttagcattatatttgaaggcatggctcagtttaggccattatctcctcatacctatgttatgacaatgtgcacacttccagtcttatacctcttttcaagtcaacacagcagcaacaaattaaatttctaaaagttctaattcatagtcctataatccaggctccaattctgtgtggttttgttgttcttggttgttgttggtggtggtgg

SEQ ID NO: 227305 - DNA, 552 bp, Homo sapiens
gcaggttttctgtcctgtgtaacctctcttatgtacaaggaagagtgaattctcagggaaagctttcccacattcattgtattcaaaagattgttcccaatttttaattttctgatgccaaatgaggtcttcattcagccagaagctgttcccatttttattatattcagaaggttcctcttcagaatgaattatttcatgcttttcatcacagaaacattttccacctttgttaaactcattgaacttcattattgaatagtttctactggtattaattaattctgaaatacagagtgaaaagaaaggttagttgacgaggatatgtaagagaaataaacttagcattatatttgaaggcatggctcagtttaggccattatctcctcatacctatgttatgacaatgtgcacacttccagtcttatacctcttttcaaktcaacacagcagcaacaaattaaatttctaaaagttctaattcatagtcctataatccaggctccaattctgtgtggttttgttgttcttggttgttgttggtggtggtgg

SEQ ID NO: 227306 - DNA, 556 bp, Homo sapiens
acattcattgtattcaaaagattgttcccaatttttaattttctgatgccaaatgaggtcttcattcagccagaagctgttcccatttttattatattcagaaggttcctcttcagaatgaattatttcatgcttttcatcacagaaacattttccacctttgttaaactcattgaacttcattattgaatagtttctactggtattaattaattctgaaatacagagtgaaaagaaaggttagttgacgaggatatgtaagagaaataaacttagcattatatttgaaggcatggctcagtttaggccattatctcctcatacctatgttatgacaatgtgcacacttccagtcttatacctcttttcaagtcaacacagcagcaacaaattaaatttctaaaagttctaattcatagtcctataatccaggctccarttctgtgtggttttgttgttcttggttgttgttggtggtggtggtggtggtgtttttgagacagagtcttgctctgtcatccaggctggagtgtagtgacgtgatctcggctcactg

SEQ ID NO: 227307 - DNA, 582 bp, Homo sapiens
ttggggttgtccagtgtttcctcagaattagattcaggttatggcccttgggcaggagtacactctggaaatgatggtgagttctcaggtcactcatatcaggtggcccatgctgttgattcatgccatttctggcaatgttaactttgatcattggttaaggtggtatatgccacatatctctaccataatattagtttttatcctttctaacaagaagtgccttaaggggatatactttgagaccatgtaaatattattttattcctcaaactttgatccactatgttagaaccaattattactatgatggttagcaaatggtatttttctaattccatcattcattctatatttatctgttagtattctactaactataaggaaaagctttcccttcttctccattcaytcattcatttattctttcttcattcatttatatcagtgtagactcatggactcccaccttattagataagttataaccttttattatacataatttacattaaacccaaatataaatctgaatagctttaagtcaaatagattcttttgacatttattgaccaagaaaag

SEQ ID NO: 227308 - DNA, 605 bp, Homo sapiens
  misc_feature (1)...(605): n = A,T,C or G
acaaatggaaggtgaagtctgagatgtagacactaccaggacagcagccataatatgtggaagacccaggaccagaagagcctgtgtgtgtgtgtgggggtgggggggggggggtgtataacagcagaaatgnatgctattcattttatttggataccagggattcatgctaggggctttggaataaagcagatacacatctttcttctaagtatagaagaaaggtccaagtagnaggctgagacaagcgggtctaactctccctaaagatatttttcaagaaaacttttctcctctatattaacacgatgcaggatttatttctgttagtgtactagataatataatatacatatgcatgtgtgtgtgtgtgtgtgtgtgtgygcatatgtgtgcctgtatttcagagcatataacccaggctcccaggttcccagaagtctcctagaccccatagataatgcattttagtgccagccatcatcacgaatactcagtgatggaatgaaaattcctatccagtttatttgaccacaggtagacgatggaggataaagtatcatcagacgatagaattagtaagggaaagaagtcaggtaatgggt

SEQ ID NO: 227309 - DNA, 554 bp, Homo sapiens
ggatggtgaggggtgtgagggagggattacaaagggggcaaaaggaaatttcttggaacaagggatatgttcacttttattattatagtgatggtctaatacatatgccaaaactcttcaaaaactgtatactttaaaaatgttcagtttactatacattaattatgccttgacaaacctgtaaacagtaacagaatcataaaaaggtaaatggcaaacaataagaagtacttgtaataagaatgacatgtaaatggtaatttacctaatgtaaaaagyggcctcacaaattcataagaatacaaaaccatctcaaaaaagttaaaagtgtaaacacaccattcactattgaagaatatacaaatctttaataattatattactgaaataaatattatttaaaccaatgattttcctgtcagttctcatttataaaaatggcattttttcaattttaataataaatgctgatgatgcagtgagatcagtattcatactcctgcaaatgtaatatgattcaaaaagctactcagggaagccatctgccaatatca

SEQ ID NO: 227310 - DNA, 582 bp, Homo sapiens
gccacatcatttgtctttctctggctgactttccttgaaggtggtcaggaatattgacttgccttaatctcttacttcacaatggggcttgaatttcactttctcagatatgtttgaggttagtatttgaaccaatttgatttatgaatattttactcaaatagacgtcttggtctttgaaatatcttcctattgccttttaaaaacatcttggctggacacagtggcctgcacctgtagtcccagcactttggtaacctgaggcagacrgattgcctgagctcaggagttcaagaccagcctgagcaacatggccaaaccctgtctttaccagaaatacacacacacacacacacacacacacacacacacacacatgcacacacacacacatacaaataggcatggtggtgcatacctgtggtcccagctactcaggaagctaaggtgggaggattgcttgagcttgggaggtggaggttgcagtgagccaagattgcaccactgcactccagcctgggtgacaaagtgagaacccgcctcagaaaaaaaatatatatatctttttagggggcaatgaaa

SEQ ID NO: 227311 - DNA, 546 bp, Homo sapiens
agctgggactataggtgcctctggctcacactgtaaaattctttatctcttagacctaccaggggcaaatcaccaygtaagtgattcatgtgtagaaacaacataatttacctccatacaagtcaatttttaaaaattaaatacaatcatcattctcaaacagattccaatgacaaatagctctagttttagctataaaagggactggattttgtccttctgtcttgccagacttggctctcagagaggtatttgaaaataccttggtctttgtatggagattctaaaagtccctaggtatgtggatttctaaaaagcttgcaggaaactcttgtgcttcctttaagaacctgagtgaaaagtgtgaagttttgggctccctctgataaccaagtccaatcttctctattgatattgttgttgttataggctcaatggtgttctctcaatatctatacattgaagccccagcccctgtactcacaatgtggctgtatttaaaatagggcctttaaaagatgaaattaaaatgggtcatatagatga

SEQ ID NO: 227312 - DNA, 546 bp, Homo sapiens
agctgggactataggtgcctctggctcacactgtaaaattctttatctcttagacctaccaggggcaaatcaccacgtaagtgattcatgtgtagaaacaacataatttacctccatacaagtcaatttttaaaaattaaatacaatcatcattctcaaacagattccaatgacaaatagctctagttttagctataaaagggactggattttgtccttctgtcttgccagacttggctctcagagaggtatttgaaaayaccttggtctttgtatggagattctaaaagtccctaggtatgtggatttctaaaaagcttgcaggaaactcttgtgcttcctttaagaacctgagtgaaaagtgtgaagttttgggctccctctgataaccaagtccaatcttctctattgatattgttgttgttataggctcaatggtgttctctcaatatctatacattgaagccccagcccctgtactcacaatgtggctgtatttaaaatagggcctttaaaagatgaaattaaaatgggtcatatagatga

SEQ ID NO: 227313 - DNA, 462 bp, Homo sapiens
ctaatatttgatctcctgctctgagatgtggagggcagagtcctttgccctgcagcagaattctctgctcaacctcattcccctggctgtctcctgagaacrgccctcctgcccttgcctctctcaagcctctgggcctgtccttccagtggtcatgtttctgacccccatgcctttgtgactcgcctccaaactgccctcaggtatcagctggctccatctccctgcagtgtctgcaacactcagatgatcccacgcataccagtgaaatgggttagtatcgctgattccttaatataaaaatgctaatgtggaaaccaaatgagaaagagatcaaatgcttaatgccaaaagggaattcatgaattcttgtctattttctcatttatattcttgagtcgttaccataaattacaaccactctctgccccaatccctcgcccacttggggcatttctccac

SEQ ID NO: 227314 - DNA, 462 bp, Homo sapiens
ctaatatttgatctcctgctctgagatgtggagggcagagtcctttgccctgcagcagaattctctgctcaacctcattcccctggctgtctcctgagaacggccctcctgcccttgcctctctcaagcctctgggcctgtccttccagtggtcatgtttctgacccccatgcctttgtgactcgcctccaaactgccctcaggtrtcagctggctccatctccctgcagtgtctgcaacactcagatgatcccacgcataccagtgaaatgggttagtatcgctgattccttaatataaaaatgctaatgtggaaaccaaatgagaaagagatcaaatgcttaatgccaaaagggaattcatgaattcttgtctattttctcatttatattcttgagtcgttaccataaattacaaccactctctgccccaatccctcgcccacttggggcatttctccac

SEQ ID NO: 227315 - DNA, 452 bp, Homo sapiens
tgatgttgcattctgtgctctgcctctgaattgagataggatcagtctcaaattcttgagayaaattcattaattcaccggctcattgattcatttgccagcctactacctgttagacactaggaatgccaatacaccctagaaagactcagtctgtgggggacagaccagcattccgcattcattgcagcatcaccaaatactgtgatgaaaggtttaaccagaatgtgcacaggtttcaaatagctctgaggccatcagtgaagggactgtgactaaaggcatattatatgaaatggcaggagtgcagtggagagtctaacagaatggacaagcaccactggcgaccaggctgaaattcagatcttgattccttcatgcaataaacgtttattgagctcgtgttgggcatgttagggaaatgcagtgacaaacaagatatacagtttgtg

SEQ ID NO: 227316 - DNA, 601 bp, Homo sapiens
cctgggaagcaattagcacagtgtctggtgctctggtgcttagtaactgtgcaataaatattgagcttttttttttttttagtggcattaatccattcatgaaagcagatccctcatgacctaaacacttccacaaaggccccactttccaacactgttgcattggagattaaattcccaacacaagaattttgggggactcattccraccatagcagctggtgatgatgtattgagagccaaataagggggaagcacagaggctgtggatctcagagaagagacagctgctggggaaaggggagaagagggtcatcagagcaatccaaaggagaatggggcttgacaaagaggtaggagggaagaagttggagaagacaaaggaggcacagaagctcaaccaggcagagagaaaaggcccagagtgtgggtagggtccagtgtgcttaggtaaatgcaaggagttaaacatgattgaaatggaggggatgggtgtcgatgtgggaccggtggattgtcaaagacagaagagaagtgacccgactataaagtcttattattctgtgacatgctgctcattgtgctaccaatatccattctc

SEQ ID NO: 227317 - DNA, 517 bp, Homo sapiens
ctatgtttttgacttttaattccagactggcagtgtagaagaaagctggcttcactcccccagagaaaaccaaaatcagatatacagtgctcagatttttcacaagcaagaactcagaactcagagatgagggaaagaccattttctgttcccacaaaggagtgaaaaacccagagcagatggtaaagagaatcagaattccacatttgggatgaccctcacccacattctgcccagcaacaaatgcgtggaaaatcttcccccaattcatggtttctacattggaaaaagtgagatggagatgatcaaccagctttcctaccatcttgggtgccctggcaggagacccatcccttccttagcgcacagaaaacattgtgactacctgaaggagacatattcctgaaaacaggcagagacaaagaagggaggtaggaccaccatctccagccctggaaattctgctstcttacttggccaaaagaggtcccaaatcagagtggctgttgagctgcac

SEQ ID NO: 227318 - DNA, 460 bp, Homo sapiens
aatccctttgcgacctcccccattcaggaacaggcagctctctcattgtttattaaagccaaggcaaacccaggcttatgccaccacctagagccataaaggaggcagcaacctagcagtaaagwttctctaagcaaatatatccaataaaaaatgaaacaagcctgacagagaaaactacaataaattactgatccttcactgcaaagacatagacacatacccacaagaaataagagcaagcaggaagccacaacctccccaaaatgacaagcaaaaatccagtgactaatactaagacagcagtaatttgtgagctctctgaccaagctttcaaaatggcagttttaagaaaactcaatgatttctaaggtaacacagaaaatcaatcagaaatttatcagagaaacttaaaaaagagactgaaataacaaaataaaaattcaaacagaaattgtgg

SEQ ID NO: 227319 - DNA, 460 bp, Homo sapiens
aatccctttgcgacctcccccattcaggaacaggcagctctctcattgtttattaaagccaaggcaaacccaggcttatgccaccacctagagccataaaggaggcagcaacctagcagtaaagattctctaagcaaatatatccaataaaaaatgaaacaagcctgacagagaaaactacaataaattactgatccttcactgcaaagacatagacacatacccacaagaaataagagcaagcaggaagccacracctccccaaaatgacaagcaaaaatccagtgactaatactaagacagcagtaatttgtgagctctctgaccaagctttcaaaatggcagttttaagaaaactcaatgatttctaaggtaacacagaaaatcaatcagaaatttatcagagaaacttaaaaaagagactgaaataacaaaataaaaattcaaacagaaattgtgg

SEQ ID NO: 227320 - DNA, 642 bp, Homo sapiens
gtaccatcttggccttaccactggctattccctctgcctgaattatcctttcctcagagatctgcaagactcactcaagctttgacacaaaagtgacccaatcagtgagagctcctcctgtgacattcttyttttattttttaaaagagagagatggggtctcgattgatcacccaggctagagtgcagtagtgcaatcatagctcactgaggactcaatctcctgggcttaagcaatcctcccacctcagcctcctgagtagctgggactatggtcgtgtgctaccatgcctagctaattctttttacttactctattgcctagacttgtctcaaattctggcctcaagtgatcctttttcttggcctcccaaagtgctgggattgcaagtgtgagccaccatgcccagcctcttatttaaaattgtaacctccccccaccatactgcattcccaccccaaccccatgttactctcccctttaactgctctattgttttaaattactttttaccttctatcactccagataatttatttatttaagttatttgctcctgctagcaaagcaggcacatagtttggagatcatgtccatttctcactgacatccccagggtctacagaaatgcctgacatgta

SEQ ID NO: 227321 - DNA, 642 bp, Homo sapiens
gtaccatcttggccttaccactggctattccctctgcctgaattatcctttcctcagagatctgcaagactcactcaagctttgacacaaaagtgacccaatcagtgagagctcctcctgtgacattctttttttattttttaaaagagagagatggggtctcgattgatcacccaggctagagtgcagtagtgcaatcatagctcactgaggactcaatctcctgggcttaagcaatcctcccacctcagcctcctgagtagctgggactatggtcgtgtgctaccatgcctagctaattctttttacttactctattgcctagacttgtctcaaattctggcctcaagtgatcctttttcttggcctcccaaagtgctgggattgcaagtgtgagccaccatgcccagcctcttatttaaawttgtaacctccccccaccatactgcattcccaccccaaccccatgttactctcccctttaactgctctattgttttaaattactttttaccttctatcactccagataatttatttatttaagttatttgctcctgctagcaaagcaggcacatagtttggagatcatgtccatttctcactgacatccccagggtctacagaaatgcctgacatgta

SEQ ID NO: 227322 - DNA, 551 bp, Homo sapiens
acctgagaaagaagagtatgtaaccagcactacactatgctgtagagacttaacagtgacccagatgccaccccagactttgtgaagctcacagcccagctggtgagagagatgtggaagccaatagcactgcaaaatgaggcaggataaatgggcaggtaaagggccatgccctcagaggaggaatatctaactgggtcaggagtgttgaactatccttcttttagacatgaagaaattttggcccaaagaagctgaagccaaagttgctgtgaaaaacccatagcaaaaayaggaggagaatttgtgttttctatgtttttaaggaaatatacttacatggtttcaaaaatatctttcattgtccattggcacagcttctctctggctgagatggcttgggcagggcccaaagagctgcgtatcatgtcataattcacctggcaagagccaagggcaatatatctctcataaatagaaaagaggagactttgtagtcactgcacattgaccacttggggccatgaactcattctcaaatgaactacccg

SEQ ID NO: 227323 - DNA, 465 bp, Homo sapiens
tgcctcagcctcccgagtagctgggattacaggtgtttaccaccgcatgtggctaatttttgtatttttagtagagatgagattttcctatgttggccaggctggtcttgacatcctgacctcaggtgatctgcctgcctgggcctcccawagtgctgggattacatgtgtgagccaccacggacagccaaaaaaaaatttttaaatgatttatgaaaaggttttagtagttcgtgtgacaacattgaagggcctaacatacatataattggattctcagaaggaaaggaaggagagaatggggctaaactaatttgtttaaagatataatgcaattcttataaattttataaagatacatatttacacgttcaataatcttagcaaaccctacataggttaactgtgaacaaaactattcctgggcacatcataatccaaatgctaaaaaaacaaaatcttgaa

SEQ ID NO: 227324 - DNA, 465 bp, Homo sapiens
tgcctcagcctcccgagtagctgggattacaggtgtttaccaccgcatgtggctaatttttgtatttttagtagagatgagattttcctatgttggccaggctggtcttgacatcctgacctcaggtgatctgcctgcctgggcctcccaargtgctgggattacatgtgtgagccaccacggacagccaaaaaaaaatttttaaatgatttatgaaaaggttttagtagttcgtgtgacaacattgaagggcctaacatacatataattggattctcagaaggaaaggaaggagagaatggggctaaactaatttgtttaaagatataatgcaattcttataaattttataaagatacatatttacacgttcaataatcttagcaaaccctacataggttaactgtgaacaaaactattcctgggcacatcataatccaaatgctaaaaaaacaaaatcttgaa

SEQ ID NO: 227325 - DNA, 465 bp, Homo sapiens
tgcctcagcctcccgagtagctgggattacaggtgtttaccaccgcatgtggctaatttttgtatttttagtagagatgagattttcctatgttggccaggctggtcttgacatcctgacctcaggtgatctgcctgcctgggcctcccaaagtgctgggattacatgtgtgagccaccacggacagccaaaaaaaaatttttaaatgatttatgaaaaggttttagtagttcgtgtgacaacattgaagggcctaacatacatataattggattctcagaaggaaaggaaggagagaatggggctaaactaatttgtttaaagatataatgcaattcttataaattttataaagatacatatttacasgttcaataatcttagcaaaccctacataggttaactgtgaacaaaactattcctgggcacatcataatccaaatgctaaaaaaacaaaatcttgaa

SEQ ID NO: 227326 - DNA, 526 bp, Homo sapiens
gaaaaaataaaagaagtgattacaacatttaaaaataggtaaaaatgatgaaggaatttttgcacaaattttaaagttaaattatgctaatgcaaagtagtttaagatatcaacatattcaaaatgtctatttattgtattcagagaagtggacaaaacaagtagccataattattccaggagtgttttgcagcctgacttaattctaccatttagaaatcctgccaacctcttcagaaggggacttgggggaacgtctgtttacacactccagctgttttccagatcctgtgctttagcctttacacatgctattttatggacagtcctgcttgggcttattagctccatttcacagaaaagaaaattgaggctcagcgaggttaaataatagagctagtaagtggtactagggtgattgactgtcttggtttgactgggacacagggctttattttaaaacctggagarttctgggaagacaaggaggagttttatccacacttttctcctagggtccacagat

SEQ ID NO: 227327 - DNA, 530 bp, Homo sapiens
cattcccactccacctcccatgcttttttgttgaagccataccatttttctggcatgctctttctgcagcttcctcctcatctgtctgacaatcatctattyaattcatggaggtcaagcctcatcttggtcaatcactcttttcttttttgatctctcgacctgtactctgtataggcatctactattgcccttaaatgttggtgatcaggctcacccattatgaactctgttagccccagtgctttgcacagtgctcgcatttattcatcacggtgctgcttcttattcatctgtagagtaatcaaatatttactgagtgcctcctataggtcaagcagtgtgctagggttatacgtatgtggaccaaacaaacacatatcctgccctcttggagcttacagactaataatatgcagtccttctaggggagagactaaagggctgtgagccaggcagccttctcttagggaaggcctctgctaaattagattctcatggacactcacagggttgaagggaagtgcact

SEQ ID NO: 227328 - DNA, 327 bp, Homo sapiens
tgtactctgtataggcatctactattgcccttaaatgttggtgatcaggctcacccattatgaactctgttagccccagtgctttgcacagtgctcgcatttattcatcacggtgctgcttcttattcatctgtagagtaatcaaatatttactgagtgcctcctataggtcaagcagtgtgctagggttatacrtatgtggaccaaacaaacacatatcctgccctcttggagcttacagactaataatatgcagtccttctaggggagagactaaagggctgtgagccaggcagccttctcttagggaaggcctctgctaaatta

SEQ ID NO: 227329 - DNA, 530 bp, Homo sapiens
cattcccactccacctcccatgcttttttgttgaagccataccatttttctggcatgctctttctgcagcttcctcctcatctgtctgacaatcatctatttaattcatggaggtcaagcctcatcttggtcaatcactcttttcttttttgatctctcgacctgtactctgtataggcatctactattgcccttaaatgttggtgatcaggctcacccattatgaactctgttagccccagtgctttgcacagtgctcgcatttattcatcacggtgctgcttcttattcatctgtagagtaatcaaatatttactgagtgcctcctataggtcaagcagtgtgctagggttatacgtatgtggaccaaacaaacacatwtcctgccctcttggagcttacagactaataatatgcagtccttctaggggagagactaaagggctgtgagccaggcagccttctcttagggaaggcctctgctaaattagattctcatggacactcacagggttgaagggaagtgcact

SEQ ID NO: 227330 - DNA, 327 bp, Homo sapiens
tgtactctgtataggcatctactattgcccttaaatgttggtgatcaggctcacccattatgaactctgttagccccagtgctttgcacagtgctcgcatttattcatcacggtgctgcttcttattcatctgtagagtaatcaaatatttactgagtgcctcctataggtcaagcagtgtgctagggttatacgtatgtggaccaaacaaacacatatcctgccctcttggagcttacagactaataatatgcagtccttctaggggagagactaaagggctgtgagccaggcakccttctcttagggaaggcctctgctaaatta

SEQ ID NO: 227331 - DNA, 595 bp, Homo sapiens
agatctcatattccagtgaaattacagtctcttcacatgcaaaagaaaaaataaatccttatcacctaaagttactgagagcataaaatgaagcagaacttgtcaaatcattattaaaggaattggaacttagcagtcagtgcatgaggattcttcctgggtggctataaaggctaaacgaggccattggaagcgctgtctacaaaatacttagtatttgcctgatacacagtaaatatccsaaaatggcagccactagtactgccgtcctcatacaggctgcctccatactaaagcactgggcagagactatgaatgagcctttgggatttggtgctttccctctcctctctggttccctctcctgactcttatttcttccctgtgtacttccaggcttctagtcacacaggataacttggagttaactggaccaactttgctggctattctcctttggcctctaaaaaactgcccttctgtgtcccactctttgcccagaaaagttgttatctctggactgtatctatcaagtttcttcatctttagtttccatttgggctttgccatggctagccgaagaggaagacagaaa

SEQ ID NO: 227332 - DNA, 595 bp, Homo sapiens
agatctcatattccagtgaaattacagtctcttcacatgcaaaagaaaaaataaatccttatcacctaaagttactgagagcataaaatgaagcagaacttgtcaaatcattattaaaggaattggaacttagcagtcagtgcatgaggattcttcctgggtggctataaaggctaaacgaggccattggaagcgctgtctacaaaatacttagtatttgcctgatacacagtaaatatcccaaaatggcagccactagtactgccgtcctcatacaggctgcctccatactaaagcactgggcagagactatgaatgagcctttgggatttggtgctttccctctcctctctggttccctctcctgactcttatttcttccctgtgtacttccaggcttcyagtcacacaggataacttggagttaactggaccaactttgctggctattctcctttggcctctaaaaaactgcccttctgtgtcccactctttgcccagaaaagttgttatctctggactgtatctatcaagtttcttcatctttagtttccatttgggctttgccatggctagccgaagaggaagacagaaa

SEQ ID NO: 227333 - DNA, 586 bp, Homo sapiens
tccagtgaaattacagtctcttcacatgcaaaagaaaaaataaatccttatcacctaaagttactgagagcataaaatgaagcagaacttgtcaaatcattattaaaggaattggaacttagcagtcagtgcatgaggattcttcctgggtggctataaaggctaaacgaggccattggaagcgctgtctacaaaatacttagtatttgcctgatacacagtaaatatcccaaaatggcagccactagtactgccgtcctcatacaggctgcctccatactaaagcactgggcagagactatgaatgagcctttgggatttggtgctttccctctcctctctggttccctctcctgactcttatttcttccctgtgtacttccaggcttctagtcacacaggataayttggagttaactggaccaactttgctggctattctcctttggcctctaaaaaactgcccttctgtgtcccactctttgcccagaaaagttgttatctctggactgtatctatcaagtttcttcatctttagtttccatttgggctttgccatggctagccgaagaggaagacagaaaaa

SEQ ID NO: 227334 - DNA, 629 bp, Homo sapiens
actgagggtttccaaaagacctgtaataatttcctcagaaaggcatgggtgagtgccaaggccagatgacaacstttccatggaggctttgttctcaaacagaggatttcagtttcttgatgatatcaatcttttagagccattcatgacttatctgcaatggatgtatatgattctttgcttattataccaaagaagagaggaaaaagatatcatgtccaaaggagataaaatcccaaatgaagataaaccatctggcaaacagtaggcacacaataatgaatgaatgttttttacaaacagtaaaaaagaaaatcttatgcagatgtgttatctttattaaattcattgattaaactcttttagttaaaaaaagcacatagtactgaattaactttttatgaatactaattactcagggaggaaataagaagactatatgaactatgtcaggatcccatgcatggtttttgttaggcaaaatttgcaagtactagatctcccagactcccagcaccatttccaaggtgaaagaggtaggtcctacctccttattagtgatctcagatggggactattttacctgcaaggagacatctgacaatgcctgaagaggtttttggttgtca

SEQ ID NO: 227335 - DNA, 570 bp, Homo sapiens
gaatggactaacacaaagactgcgcttttaagcactaactatactatgctgtaaagataatgcattagagtagaatctrtagatggtagggaatccaggaaggctccctcgaggaggtaacatttaagttgattcatgaataatgtatagaagttaggcaagcaaggatggggaaagtgttttaaagaagcaatgggtagaaagtcaagaaaatgcgggaagcatttggggaggtaaaaaagtgcccagaattgctggagaataggatggtaaggttggagtggctgcacatggttggggaagcaaggagagagccaagagattaccatacctaaatgcctcacattatagtgccattatctccttaaatcctcatcccaatcctgcaaagtatgactgcattgttttgtatgaaaaagaaagacagcttagatagctcacctaacttgcccaagaattacatatttacaatggagctgagagtatggattccaaaatccatttcatgtcaatatgtccaattctgaacctcacaatatatggactttcttattttaggaggtcacaaac

SEQ ID NO: 227336 - DNA, 587 bp, Homo sapiens
tagttagcaatgaaaggtgcatattaaaagtttattgaatgaaaaaaaaaaaaagaattaatgacccatgagttgctggctgtcagaaaagaatcaggtatactttctgagaaggctcctcatgtggacacagggacattttcaacattgctgtggaaataaagtctataaatattcacagataggcaaattagatatsttttgaagaccagagtgaataccgattcaattctctcccctctttatgtagggcctgccaagcattgcatctagagtgctttatggatgggacctgaaagaatcaagtgactctttcccctgctggatggacctgggccagcaggtcactgccaaagctgcccttctcaccacattctcagtgcctgacccccagaggatgggacagcaagggctctgctttaacaacatttaagagtgtttcttctaaggctagctgtaatcatctaaaagtggaggtgacagtatgggcctggggtaggtttgttatagctttggggagtgatgtgtattgaaggacctggcttggggagaatactgtaggttcctccaggtgttgtgtcggacaa

SEQ ID NO: 227337 - DNA, 413 bp, Homo sapiens
ttcattgtacaactgtcatgttttctgatctaagaacaaccaaaatattctaaggccctcttttagggcaattataccaagatgcattacttttaattttatatctgcttatcatagtccttaatatcaatttttccttttatatctgccttattatttttctaagatgtcaacwtttcttctatggtaatctgttttttgtttctgctttaacactctcttcctatagttaatttccatttttctattgctattgtccagacaataagactaacgcatactagtcaatatattctagttcttccttgattttctacataatccctttgtggtaaatattcgaggcacaggcagccttttgagttacctgattaacctctggattttcaataattatctctaagaaaataatt

SEQ ID NO: 227338 - DNA, 550 bp, Homo sapiens
tcaaaataaataaaaataaagtgatcaatttttatgtacattttcacataatatacttaaaagtagtgttaagtggttaagttcttatcctaaaaataaagctatctcaggctagttggtcattagtctgttcttactgtccttaatttttttgtatttttattttattctctaaccacgcagttctcttgtgtggtaggtaaatgtttcatttaggcaaagtggggcttttagatagtttgaggaggccagatgcagtggctcatgcctgtaattccagcacttgctgaggctggtgggccacttaagcccagaccagcctgggcaacatggtgaaccccatctctactaaaaatacaaaaacttagccaggtgtggtggtgaaygcctgtagttccagctacttgggaggctgaggtgggagaataacttaagcctggaaggtgaaggctatggtaagctgtgattgcacaaccctgtctccaaaataaatagttgaagaaataatagttaatgtcaataataaaatatcttacacatcaaaaataca

SEQ ID NO: 227339 - DNA, 441 bp, Homo sapiens
ttgtaaagttgtttgcttctgttgctgtggaatggaaggaactactgaggtttaataaaacttaagagttgtattaacttaagttcatttttgtatcttggtttcccttattttgcttagctcattgttctcccttatccccaatatccacgaatagctcrtgaatttgttcactttttctaggttgggccatgattgtttcttgctctaagagtcatactaccccaccattccctcccagttcattctccacattgcagtcagaatcaccttttaagaaaagcacacttgcttgttctttttgtaaaaatcttttattgcccttaaaatgaagcacagacattacagtggccaactcctatgtctttctacttttccacccctccgctttgctctttcattgaagatgttctttgaggtaagagttctgacttatcttgg

SEQ ID NO: 227340 - DNA, 441 bp, Homo sapiens
tttgcttctgttgctgtggaatggaaggaactactgaggtttaataaaacttaagagttgtattaacttaagttcatttttgtatcttggtttcccttattttgcttagctcattgttctcccttatccccaatatccacgaatagctcgtgaatttgttcactttttctaggttgggccatgattgtttcttgctctaagagtcatactaccccaccattccctcccagttcattctccacattgcagtcagaatcaccttttaagaaaagcacacttgcttgttctttttgtaaaaatcttttattgcccttaaartgaagcacagacattacagtggccaactcctatgtctttctacttttccacccctccgctttgctctttcattgaagatgttctttgaggtaagagttctgacttatcttgggtacctcacac

SEQ ID NO: 227341 - DNA, 572 bp, Homo sapiens
agggacttgggccttcaacccacccagaggagttctgtccctgggcctcacagctttgccctgtctcctctctagcttgcagtcagcctagaaactacaatagaaaaataaatgatgtggatacaaaaataaaatgccttttcctcacctgagtgcaggagaaggggcggcatgtgctggggaatgccttcctcaccccattctcctctttgaggacaaacatttattaggcacctgcttcatgccaggctctattaagaagatgacatacatggtctcatttcctccttgccatagcccagccaggaaggaatattatcatctccattttacagatgggaaaactgaggctttgatgatgygaagataactggtgccttgagaggctgagccactggaccaaagtgtcagagctggagcaggtttgtccgactccaaagccctgcccaccacaccacactgcacacagtagaggctaaataaaggtctgctgggcaaatgctgcttaaggcgatttgagctctctgggcagcaatctgcccctaaagatttcccatcatgcctgaaatgcc

SEQ ID NO: 227342 - DNA, 572 bp, Homo sapiens
agggacttgggccttcaacccacccagaggagttctgtccctgggcctcacagctttgccctgtctcctctctagcttgcagtcagcctagaaactacaatagaaaaataaatgatgtggatacaaaaataaaatgccttttcctcacctgagtgcaggagaaggggcggcatgtgctggggaatgccttcctcaccccattctcctctttgaggacaaacatttattaggcacctgcttcatgccaggctctattaagaagatgacatacatggtctcatttcctccttgccatagcccagccaggaaggaatattatcatctccattttacagatgggaaaactgaggctttgatgatgtgaagataactggtgccttgagaggctgagccactggaccaaagtgtcagagctggagcaggtttgtccgactccaaagccctgcccaccacaccacactgcacacagtagaggctaaataaaggtctgctgggcaaatgctgcttaaggcratttgagctctctgggcagcaatctgcccctaaagatttcccatcatgcctgaaatgcc

SEQ ID NO: 227343 - DNA, 572 bp, Homo sapiens
agggacttgggccttcaacccacccagaggagttctgtccctgggcctcacagctttgccctgtctcctctctagcttgcagtcagcctagaaactacaatagaaaaataaatgatgtggatacaaaaataaaatgccttttcctcacctgagtgcaggagaaggggcggcatgtgctggggaatgccttcctcaccccattctcctctttgaggacaaacatttattaggcacctgcttcatgccaggctctattaagaagatgacatacatggtctcatttcctccttgccatagcccagccaggaaggaatattatcatctccattttacagatgggaaaactgaggctttgatgatgtgaagataactggtgccttgagaggctgagccactggaccaaagtgtcagagctggagcaggtttgtccgactccaaagccctgcccaccacaccacactgcacacagtagaggctaaataaaggtctgctgggcaaatgctgcttaaggcgatttgagctctctgggcagcartctgcccctaaagatttcccatcatgcctgaaatgcc

SEQ ID NO: 227344 - DNA, 453 bp, Homo sapiens
ctgcttctctcctgcattatttatataaaatggacatcaattggtgaatggagaaactgcagtccatccatgcagtggactccattgagcaataaaaaggaaagaaccattgatgtgtgcaaacacayagatgaacctcagatggatcatgagtgaaaaatatgcaactccaatggttccatactgtaggagtctatttgtatgactctctaaaaatgtcagaatctgtgattgccagggcctgggtccggggagggggtggggattgattgttaaaggacacaggggagctttttgggatattggcaatgttctatgtcatgattttgctggtggttacataactgtatatgtctgtcaaaactcatggaactatatgtgaaaagggtagattttgctgtacgtgggtcatacctcagtaaaaaacaacgcccccaacacaaggttctataa

SEQ ID NO: 227345 - DNA, 453 bp, Homo sapiens
ctgcttctctcctgcattatttatataaaatggacatcaattggtgaatggagaaactgcagtccatccatgcagtggactccattgagcaataaaaaggaaagaaccattgatgtgtgcaaacacacagatgaacctcagatggatcatgagtgaaaaatatgcaactccaatggttccatactgtaggagtctatttgtatgactctctaaaaatgtcagaatctgtgattgccagggcctgggtccggggagggggtggggattgattgttaaaggacacaggggagctttttgggatattggcaatgttctatgtcatgattttgctggtggttacataactgtatatgtctgtcaaaactcatggaactatatgtgaaaagggtagattttgctgtacgtgggtcatacctcartaaaaaacaacgcccccaacacaaggttctataa

SEQ ID NO: 227346 - DNA, 595 bp, Homo sapiens
atatttcttatttttttaaaatcggattaacttctaatcagagccctctcccgggagtgtggttaagccaagctctgtsaaagatgtctatcttttctttcattaaactttctgcctccaaagaaatagtctggcccagtagaaggaacataaaacttgggtcaagatgatctgagttcagatcctgtttctgcacttatccatcacgtgaccttgagtaattcatccccttgaatctcagtgtcttcatctgtagaatgggaccaatgattccttccccttagtggtggggttcagtaggatgattcagggatcccagggcagtgcctgtcatagggaaggggccaggaaatagctccccttttggcctcctgaagtgtcaaccaggtcacatcaccttgcaaaagtcgggagaacccccatgaactcatcattaactacaatcatcaccagctcatggtcattcttattggtcctctccctaccctcatgcccgcccccattatcttgaggcaaatcccagaatcaatatatttattttcttctgtgtatgtttgaaatttttacatagtaaaaaataacaaagtgaggatga

SEQ ID NO: 227347 - DNA, 595 bp, Homo sapiens
atatttcttatttttttaaaatcggattaacttctaatcagagccctctcccgggagtgtggttaagccaagctctgtgaaagatgtctatcttttctttcattaaactttctgcctccaaagaaatagtctggcccagtagaaggaacataaaacttgggtcaagatgatctgagttcagatcctgtttctgcacttatccatcacgtgaccttgagtaattcatccccttgaatctcagtgtcttcatctgtagaatgggaccaatgattccttccccttagtggtggggttcagtaggatgattcagggatcccagggcagtgcctgtcatagggaaggggccaggaaatagctccccttttggcctcctgaagtgtcaaccaggtcacatcaccttgcaaaagtcgggagaacccccatgaactcatcattaactacaatcatcaccagctcatggtcattcttattggtcctctccctaccctcatgcccgcccccattatcttgaggcaaatcccagaatcaatatatttattttcttctgtgtatgyttgaaatttttacatagtaaaaaataacaaagtgaggatga

SEQ ID NO: 227348 - DNA, 520 bp, Homo sapiens
catctaggttttctcctatgtcatctcctaggaattttatagctttgtgttttacttctaggcctataatccagtttagtttttgtgaatggcataaggtctgtgtctagattggtttttttgcatgtggatatccaattgttccatttattgaaaagactatttgttgaaaagactatctttacttcattttattgcctttgctcctttgcaaaagataattaattatatctatttctgggctctctgttctgttccattatctgtctattctttcaccagtacaacrctgtcttgattactgcagctttgtattaagtattggagtttggtagtgtcagtcttcctaatttgatttggagtgagttgaatctatagaccaacttgcaaagaactgacatcctaacagtgttgagtcttcctacccatgaacatggaatacctcttcattagtttgtctttgatttccttcatcagaattttgtagttttactcatatagagcttgtacatattttgtt

SEQ ID NO: 227349 - DNA, 440 bp, Homo sapiens
atggttcagcttcagatgtttcaggcccgtggttaagaaatactatataccacatttattagaactcaatttgatatccatttggatatacatatttatatactatgtatgtgtgtatattatacatgtatattttatataatacgtacaatatttaaagccataaaaatgtctttaaagatattctaagcttatatttttcagtaattcacataaaatatccttttttatactttaatgaatttgacatactcttaaatctgcacaagaacaatgtgacatctcataaataaacaaagctgtaagcwacagagattcagaaacttttattactcacaaagtgaatatttgaagtcaacaatcacaataaacatctttccttaaacaacgaaaacaagattataaataaaagccatcgttactgccatggttagttaaga

SEQ ID NO: 227350 - DNA, 633 bp, Homo sapiens
aacaggtgggtctgtaggcatgagcagccaatcggtgaccttggctttatggtgcagaggacagcaagaaagaggtcaaactctaagaaaagacagaggtaaacagtggcgggagatcatcacaggccaggagggatgtggctccaggtccccgtggaatgggctgagccacggacattaagggtagctgcttttcctctgacaggagggacagaggtgcacagaggtggaagttagtttggtgtatcccaatcagcttgaggaggttaccaagaccctgatattctatgagcaaactgctcttgatctttatgccaaagacattctggtcaaagagtttctataaaagcaaactgaatcttcattcacagcactaggacagtaaacatactaattaaataaaacactggcatgctggacatcagagctgttggaaaaaaatctcagaaacatagtttcttctgctgccaggcaggagattaattttgtttaacaaaaattaaacaargggaaattatccctaaatattcaccaaggatgaagagatattctggaacaatgtaacaaggaaatacctttcatgatgctgatttctgaaggaagactccctacagtctaagaagtgagagaaca

SEQ ID NO: 227351 - DNA, 595 bp, Homo sapiens
cgcttttgacaaggggcaaatggactactaaatcaaccatttcataaataaatcagcaaaatgcattatgtaacactcacattaatgacacacaccagattgccaagattcttcatcaaatcttttcaatctgggtccttatattgtgaaagggtcgattcttatggagagctcataacactaagcaagtctctccattgatgtttctgccatcaccaaatgttttccttctgatctgtctccaggcctgacatttttgcaaattaaactggattacattatccatgatggcgtaaattcaattatccaaataactaaccagccagctccatgactaaattatccacctgctgccttgaactttttgggattgataatgtgctggtttcatttctattttgaaaagtaaaagtggatctgaatttctcttggaaaagaacctaagaatggtgttyccttcttatgtatttatttaatttttttgtagagatggttcttgctatgttgcccaggctggcctcgaactcctggcctcaagtaatcctcgtgccttggctcccaaagtgctgggattacaggcgtgaaccattgtagt

SEQ ID NO: 227352 - DNA, 563 bp, Homo sapiens
gagcctggacacaggtgctccatacctcagaatggagcccagatctcctatttttcactccaaagttattttaactctggaccttgatattctccatgagtcaattctatcagccaggctgtttaaagataccccctaaaaaagtagcaccaaagatatgccatgttcatacgagaccctctacaagccaccactacagacccagaaggagaggcctggtgctcaggggccaagccatgcagcaagaaaatactgttgttttctggaagagscggtaaacattctgggagggagctgtaagggacaggtagctaaaaataatgacagagatgcacggtttcattacagtcccacagaccaccagcaagggaaggagagccatctggaattgactgaacataagcaaggtccagaagattttaattttaaaacaatttgattatttaaaaagtataagaagaacctggaggaaaacaaaatggttaagggtgcatgtgagagaaaattcttgtgtatgttcatcagtgaaaagagataatgagaaagagaaaagcacagaaata

SEQ ID NO: 227353 - DNA, 563 bp, Homo sapiens
gagcctggacacaggtgctccatacctcagaatggagcccagatctcctatttttcactccaaagttattttaactctggaccttgatattctccatgagtcaattctatcagccaggctgtttaaagataccccctaaaaaagtagcaccaaagatatgccatgttcatacgagaccctctacaagccaccactacagacccagaaggagaggcctggtgctcaggggccaagccatgcagcaagaaaatactgttgttttctggaagagcyggtaaacattctgggagggagctgtaagggacaggtagctaaaaataatgacagagatgcacggtttcattacagtcccacagaccaccagcaagggaaggagagccatctggaattgactgaacataagcaaggtccagaagattttaattttaaaacaatttgattatttaaaaagtataagaagaacctggaggaaaacaaaatggttaagggtgcatgtgagagaaaattcttgtgtatgttcatcagtgaaaagagataatgagaaagagaaaagcacagaaata

SEQ ID NO: 227354 - DNA, 621 bp, Homo sapiens
gatgattatagggtttggcctgccttactgagccaaagtgttaaaaagggggggaatttctgctccggtgcttacccaagtcaggygctaattcgggcagatccattacttttctcagcagctctaaaccatatgtgctgcaataatcacgctggataggtagaggcgatcagtcctcccacctaagcaaagaaaatgcatttttgcttctccaccccaaaacaacaacaacaacaaaaatgtatagagcatctgcagcaaaaatgagtaggctgttcaaaccaatgatgccgaagagatttaatttagacaggctaaactgtcctcgtctcagctagagagactagccaatgcctttgctactaatccaatcaagattaagtattaaattacttgttgctgccatcttaacccagagaagactgttttctgcttggctgattgttctgaaagaccacaacctcctgggaaggaaagcaggagggaatggccgaggggccaaagaaatcctccagattcctcacacccgtccttgtcctcacccctctctttcttgctcctgttagtcttatactggctgttttggggtggggtgctcctgggctatgcacatttttgcaa

SEQ ID NO: 227355 - DNA, 621 bp, Homo sapiens
gatgattatagggtttggcctgccttactgagccaaagtgttaaaaagggggggaatttctgctccggtgcttacccaagtcaggtgctaattcgggcagatccattacttttctcagcagctctaaaccatatgtgctgcaataatcacgctggataggtagaggcgatcagtcctcccacctaagcaaagaaaatgcatttttgcttctccaccccaaaacaacaacaacaacaaaaatgtatagagcatctgcagcaaaaatgagtaggctgttcaaaccaatgatgccgaagagatttaatttagacaggctaaactgtcctcgtctcagctagagagactagccaatgcctttgctactaatccaatcaagattaagtattaaattacttgttgctgccatcttaacccagagaagactgttttctgcttggctgattgttctgaaagaccacaacctcctgggaaggaaagcaggagggaatggccgaggggccaaagaaatcctccagattcctcacacccrtccttgtcctcacccctctctttcttgctcctgttagtcttatactggctgttttggggtggggtgctcctgggctatgcacatttttgcaa

SEQ ID NO: 227356 - DNA, 523 bp, Homo sapiens
ccaggacctcattttaagactgttgaagcataatcccagccagaggccaatgctcagagaagtacttgaacacccctggatcacagcaaattcatcaaaaccatyaaattcccaaaacaaagaatcaactagcaaacagtcttaggaatcgtgcagggggagaaatccttgaaccagggctgctgtataccctttcaggaacatgctactaaaatttattttaccattgactgctgccctcaatctagagcgctacaagaaatatttgttttactgagcacctggcaatgcctgaacctccctattcagaaagctccacatcaataaacatgacactttgaagtgaaagtagccacaagaattgtgctacttatactggttcgtaatctggaggcaaggttccgctgcagctgccccctcagcctgggccaggcatggtttcttcccaggagacaaatccagggtgtggctgtggggaaagtgaccactttgccctgactcgatcggttaaggagctgtgcaa

SEQ ID NO: 227357 - DNA, 523 bp, Homo sapiens
ccaggacctcattttaagactgttgaagcataatcccagccagaggccaatgctcagagaagtacttgaacacccctggatcacagcaaattcatcaaaaccattaaattcccaaaacaaagaatcaactagcaaacagtcttaggaatcgtgcagggggagaaatccttgaaccagggctgctgtataccctttcaggaacatgctactaaaatttattttaccattgactgctgccctcaatctagagcgctacaagaaatatttgttttactgagcacctggcaatgcctgaacctccctattcagaaagctccacatcaataaacatgacactttgaagtgaaagtagccacaagaattgtgctacttatactggttcgtaatctggaggcaagkttccgctgcagctgccccctcagcctgggccaggcatggtttcttcccaggagacaaatccagggtgtggctgtggggaaagtgaccactttgccctgactcgatcggttaaggagctgtgcaa

SEQ ID NO: 227358 - DNA, 523 bp, Homo sapiens
ccaggacctcattttaagactgttgaagcataatcccagccagaggccaatgctcagagaagtacttgaacacccctggatcacagcaaattcatcaaaaccattaaattcccaaaacaaagaatcaactagcaaacagtcttaggaatcgtgcagggggagaaatccttgaaccagggctgctgtataccctttcaggaacatgctactaaaatttattttaccattgactgctgccctcaatctagagcgctacaagaaatatttgttttactgagcacctggcaatgcctgaacctccctattcagaaagctccacatcaataaacatgacactttgaagtgaaagtagccacaagaattgtgctacttatactggttcgtaatctggaggcaaggttccgctgcagcygccccctcagcctgggccaggcatggtttcttcccaggagacaaatccagggtgtggctgtggggaaagtgaccactttgccctgactcgatcggttaaggagctgtgcaa

SEQ ID NO: 227359 - DNA, 616 bp, Homo sapiens
aacactcgttggtattaatgatctggatgtgaagtttagacaaacggtgcttcttaaggtgcttaacagttgagaaagactttatgaaatggacttgaaacatgctaatttcaaaggttgtggtcttagatcgatggaactacaccgggtactatgggcccagaataaagactagcatggaattcctatggataaaatctgaagggaaagattaggccttggtgtctgtgaagagaacacattgacctgaggatttgggttttagacacaactttgtttttctagaaaggcaaagcatgtgggattagcagtgaaaagctgtgggttcttttagaccttacgtagcctggaaacgtgtgaccttgggcaagcggggtagcagctctaccccacgttctaatkgggtcattggacaagctgattgggatgtgcacatctgacctgtctgcccagtgtcttctgtaaatgcaagttgttttaagaatggtctgattccaaactgataagattggccttaagaagcccctgcctgatcacgtgagcatcatggaacccaaagatgatttgctgcccaccaccccgtctcagaacagaagggtgggaagccagagccacc

SEQ ID NO: 227360 - DNA, 430 bp, Homo sapiens
ggaattctccaaatggcccctgctcctcctgaggcagctcttaaaaatcaaaaccattagctcacacaatgattaaaagatcaaagccagctgctctgcccagagatgaggctggggcagacrcaggttacgggcagcacctggcagccagcagcctgggagagccactgtgggcgggggccccacctgtcaccaggaagcttctgcttcaaggaacctgagggcagtgcatgggagagcccttcttggaaagacctgagttccccttccaggacagtgactcagtcctttgtcatctgggctttctttcctgttcagaggattctccaggtttgcccagggttccttggtcacagcacttgtaggggagggaagaatcagtttgtgcctcaccctgatggttacaacgctgaccggcttgccgtgtgca

SEQ ID NO: 227361 - DNA, 409 bp, Homo sapiens
gctcctcctgaggcagctcttaaaaatcaaaaccattagctcacacaatgattaaaagatcaaagccagctgctctgcccagagatgaggctggggcagacgcaggttacgggcagcacctggcagccagcagcctgggagagccactgtgggcrggggccccacctgtcaccaggaagcttctgcttcaaggaacctgagggcagtgcatgggagagcccttcttggaaagacctgagttccccttccaggacagtgactcagtcctttgtcatctgggctttctttcctgttcagaggattctccaggtttgcccagggttccttggtcacagcacttgtaggggagggaagaatcagtttgtgcctcaccctgatggttacaacgctgaccggcttgccgtgtgca

SEQ ID NO: 227362 - DNA, 581 bp, Homo sapiens
ccttttcttcacctggctgactcaccacaatctttcctccctccttccaacctccctccctcctaggtgccaggatcaaggctgacacgcctgacaagcctccaccctcaggtcgcatgcacacctgcaatgccccgtcggccttggtcttccccttccaggctcccacactaactcccacttggccccctgccctatggtctgagcctgtcaggctgggtgtgcctgactccgcgttgtattccgtccccagccagcacagacccaagggatttcagagatcaatgaacggcacatacctggcctctgtgtgcttctcttttcactggtaccctgttctagtttgcaaagggccactcaggttaggggcgggctgcctttttataccacccagagagaactgtgcagaaccccattcatttccgaagctttgggagttcctgagcaacacagagaaacacgttcttccccaccgcccccccaacccccaaccagtgtcccgagtcatcacacaggaggtggacctggaggaggatgcagcgcrgccgtgggtgagccctgcgtctgaaagtgcattcagg

SEQ ID NO: 227363 - DNA, 437 bp, Homo sapiens
ttatgccaatgcaattaaagtgacaacattgctctcccttctcccctgcccccagtcctagacgagccccggatggctgacagaatgctttatccagtcaacacaggatgaaagttttacttgagcttctaaagcaasagctttaaaacccctttaacccacaaagtcacctgggattcttttatcttcttctcctttgtaggcagccacgtgactggctatggagcactgactgagatgctgaggcaggaggctcaactgtgatttcaaatcaaccaacacttgctgcagccctctgtgtgccaggcaccagacaaggccctgtgactgagcaagatggaataggctcagcctgtttccacaacaatcttgcagcctgacagcagagacaacttggggcatgcacagaagagtgagaaacactgacgatgcagata

SEQ ID NO: 227364 - DNA, 491 bp, Homo sapiens
aaattaaacaacccaatcacttagatatttttaagtgctctcctggataacatttgagctaaagagcaaaaatcaaagcggcaaacagactagttaaaaacaatggaaaagagaamacatataagaaatctcatgggatgagacaaagctgattcataggcaaatttgtagccttaaatggcctttatggctaatcagaaaagaataaaaataggtaaaataaactttcatttaagtaatttggttttaataaaacatcaaaataaccaggggaagaaagcagtaaacagttaaaagcaaatattattgattagtaaccttaacagtcagaaagacagtaggattaataaataaattttagagttggttcatgaaacagctttgcttctacctttagaagaaacacaaacaggccagtcatggtggctcacatctgtaatcccagcactttgggaggacgaggcgggtggatcacttgaggccaggaattc

SEQ ID NO: 227365 - DNA, 596 bp, Homo sapiens
tttccccacccccggtaatgcccccaccctagaaagaaattgtgtcagagaacaaagaagggagaaaagggttgtattttccaatttagcacaaatctcttctccccagatgtagcagggtccaactcttgcctttgtgtttgttctctaaatgagaaagagcttttacctgcaatgattacttgccacaaggagatcataattaacagagaaaacacatatttccaaggagtcagaaaactgttttctaacaacaaatgaaaatataattaacgttccacagttcttttctctggagagattttttttcttactttctacagatttaaaggaaaaaaatatactaggagtatgttatgggttgttcccaaaaaagataggttgaagtcctaaccccagtaactgagaatgtaaccttatttgggaatagggccattgcagatataattagtcaagatgaggtcataccagagtaaggtaggctcttaatccaatatgaccagtgtccttataagaagagaagagacacagacacccaagaggaggatgccatgtsaccacagaggcagagactagagtgacacagctgcaagcca

SEQ ID NO: 227366 - DNA, 559 bp, Homo sapiens
ttgctgcataaaataaaagatcaccccaaaaattagtggcttaaatcaaccattttcatgtattctcagattgtgagggtgaggatactgaaaagagcacaaagggttagctagtcacaatgtctggggtttctgctaggaaaactagaatactgtaagtgacttgatggttgacagctggaattatctggaatgtctcctttcatgtagctgacagttaatgctgacccattagtagtaccctcagcgggtctgttggcagaaacacccacatgtggcttatccataaggctgcatgagcttcctcttaacaaggcagccccagggtgcttgaacttcctacagaggagcgccaaatccaaatgtgaaacctctctaacaggcagaagagtaggatttttatgctctatattcaaaaggcatacagaataacctccactacatcccattkgttataagtaagtcaaaagcctgtccaaattcaaggaaagaaaaattaaactcttcttctggatggaggcaatggatatgttctagaaaagaataggccaggagatct

SEQ ID NO: 227367 - DNA, 590 bp, Homo sapiens
aaaactaaaacatcttggtcttaaagaaatgtcttctagtatagacttcttctctattgagctgttgttttaagtcccaaggrcttggaaggtaaatttattctctttatcttgccagggttgggctatattaactgtaaaaaagaaaagaactaaaaaatattggtcttaaagaaatgtcttctagtataaactctttctctattaggctgtagttttaagtcctgtttaaatttaaatctctgttcatctccaaaataatattgactgcaagacaaaggatgactttggcattttcaaatatttttgagtgtgtaagtccttgcaggaagaagatagctgatagtcatctgtacttaagaggacctaaaggaggctcttaaaagaattccaaagcccaaaagtaaaaaatgatgacttcatcctggccatgccccttaggagcagcaatttatctgagaactttgaccaaaagtgagagactcctatgtaagcctagagcaagtgttaactaaacctataaagctaagtcagaatctgtgacagcaaaggaaaattctattacctatatgaccatacctttttttttc

SEQ ID NO: 227368 - DNA, 558 bp, Homo sapiens
tcggtctaacacatccccaatgcctttcttcaactaccccatcccaaacatcaacaagtcccgagctgtccatccaaaacacatctcaaagacatcagctccaccacatctcccgtgtaaacctctcattcacaccaccatcttctctcacttggaagaccataatgacagctgatctctttctcacttctcctgcagccccattaatcyatttaccacaggacagtccacagggtgaccgactcatcctggtttgccttaggctttctcagctttagcactgaaagtcccatgttcagggaactcctcatttttgagcaatcaagagcagttggtcacccccgactatggtgaactttttataagatagataagatcaggtcattgcagaaatcactagccccaattcctcatctctccctggatccatgccattttccaagtgactatgcagttcttcccactagaggccctgaccccttgtctttggattccaacaatgggatattagcagatgtgatgcaacaaggagcttgaaacatacttgcagttgggctt

SEQ ID NO: 227369 - DNA, 268 bp, Homo sapiens
gaattcaaggatgcaatctatgtaaagactttgcacaatgtctggcaacatttcaagtgactgataaatgtaaactactgtgtgttttataccttaaattatctgatttggccccaaatcatttgtaagctatttcagcagtctcatcatctttctttaaaaaatgcaactgttgtctgaacacctgttaggtgataagaaatatactgaatgctttgtatgtgtattacttctaatccacccamtaatcacataatttagaaattat

SEQ ID NO: 227370 - DNA, 419 bp, Homo sapiens
aaaaacaagttctgctaccattttaacttgtaatgggtcaatgtatttgttgggttatggctagctkctgaaaccagtttcaaatttccaaggcttaacacagtagaagcgcattttcaagcatgcaaccgatcaatgttggtgttcatggttcgcatgtggctcgcttgacttcaggaggtgtttcaaaattccaagttacttctagtttatggctccatcattcacttccccagagttctccatttctagcaagaaaatgagaaaaagagacagcagagcagacatatgggttccataaaacctctccttgcatgtgacttaggtcatatctgctcaagttttattggccagagctcatcactgggatgttcctgcatggaaggccaggaaacggagccctgctggccagatgccac

SEQ ID NO: 227371 - DNA, 623 bp, Homo sapiens
aatgtcaccaatatattttgtagacattttgaagacttaaacattggtgctcctggcaagtaatgtgaaaaagtggtcatatatttagctatcaagtttcatgtcttttgctaaaaatgtagaaccaagagagctctgagcataaatacaggcatgctcttggtgttgggtatttcataactattcttaggtgccaaatgtcttcatcttcatgcaatttatagtaatgtaagtaatgtgttggagactaacaaatcaaaatctcatttcggatgtgtgacactaatgttgtgttgacttattgtttcatgtgttagatttctgataaaattactaaaacaccttcttgaaaggagtaacaggaagaaacagttggggtgtcagatattcagctgtgtgtactttcttatggataggagtttactgattaattcttgattgcattaaatagcatattagagtacctcaatttaggagcatttagcaacttaaaattttttgatagcaaaggasttacaagtagcatgatacttgttaagagaaaacaaagaccaattttagttcttatttattataatgattttcattttactattaaagatgtttcttcaacagtaaccaga

SEQ ID NO: 227372 - DNA, 610 bp, Homo sapiens
tatctcttgattttgctctggaggtgagcgctggccacaaagtcctgcactctctttatttaacacactaggcccacaggattctgggtgcctccttcagtgaagaggcttcagcactctggccttctgttggaaatcctgtaagggtaaggaacaagagatggtaaaccgtttcaggagataaaacaccaaatggtgtgtctgatctcaggttccctctgttttaccaaaaaacgagtcaaccgggttatcccctgatccaagagacctgaagcatgagtctcagcagctcttaggtacactgagaaacctgcacaaaccagtggctcctcccagacactgagaaattaaacctcaggcttgcgtcaagccctcaacattttaggaaaatgaccracaagttttctcctctatttatatgtggaaatgttcatttcacttgcaaaagagaagaccaaaatgtcatttttatgattatgatgttataacagaaatgtaggagtgtgaaatttataatgttatagaccaatttagtatgaaatgcaaatatcacggcagagtgggctggctactcaaatctcagctgaaatgctctgaaagagtccccatg

SEQ ID NO: 227373 - DNA, 496 bp, Homo sapiens
gttttaatttcttgcttcctgttttttgtgtatctattgtatgtttttctgattttaagttactatgagacttgcaaataatatcttataacattattttaaactgattataacactgattgcataaataaactaataaacatgcaaagggaaaactaacaaaaactctgtattttaacttcatacccccactttatttatttatttatttatttatttatttatttatttatttatttatttttgagatagagtctygctctgtcacccagactggagtgcagtggcgtagtcttggctcactgcaacctctgcctcctgggttcaagcaattctcatgccacaccctcctaagtagctgggactacaggcatgcaccagccagtcaatttttgtatttttagtggagacagggtttcaccatgttgaccagtctggtctcaaactcttggcctcaagtgatccaccaataccctgctttttaactttgttgttg

SEQ ID NO: 227374 - DNA, 496 bp, Homo sapiens
gttttaatttcttgcttcctgttttttgtgtatctattgtatgtttttctgattttaagttactatgagacttgcaaataatatcttataacattattttaaactgattataacactgattgcataaataaactaataaacatgcaaagggaaaactaacaaaaactctgtattttaacttcatacccccactttatttatttatttatttatttatttatttatttatttatttatttatttttgagatagagtctcgctctgtcacccagactggagtgcagtggcgtagtcttggctcactgcaacctctgcctcctgggttcaagcaattctcatgccacaccctcctaagtagctgggactacaggcatgcaccagccagtcaatttttgtatttttagtggagacagggtttcaccatgttgaycagtctggtctcaaactcttggcctcaagtgatccaccaataccctgctttttaactttgttgttg

SEQ ID NO: 227375 - DNA, 435 bp, Homo sapiens
tagaattctaatagaccctgattaaacataaacaaatccttgctccctcacctacttgtgccactctctcagtgtgcttcctttaaaccatatctcaggggatatgcatttcccataccctagcaatgagccatctaaatacattttctattattcaagcataaaccatgcagaaagaacacagatacatctccaggctacgaggcccctggggaatttggagtaggttcagcttgccaatcaagaatcacgttccaggtggtgacccagtattagcatcatctcaggtggatgtctyttaaagactccctgccaaaaacacactagggaaaattaaagagcaattgttttggaatatttagtatgttctaaatgaatacctttttgatatatcttgagctatcaagtcaatgtctaacttctttatcagggaag

SEQ ID NO: 227376 - DNA, 597 bp, Homo sapiens
gggcagtgttatataaagaacaccgagtaatgtytgtgaaattagaatttcagcattaaacgattttgtaatcttgggcaatataaatggtaactactaatagttgacatttattaaatatttactttatcccaggcattagactgtttttatctacattattttattaaatcctcatttcatagatgagaagactaagactcagatgtattaagaaaccacccccaaggacacatatcaactaattgcagttttggggtatgaatgtagatctctctgactccagaatccatgcttgaaaaatatttattgagctataatatacagactatagcatgcataccaaatccacccacataaagtagacaattcagtggtttctggcatattcagatatgtgcaaccatcattacagttttagaacattctcatcacctcaaaaaagaaaccctgtaccttttatctaccacatctgtttcctcccagttcttaggtaaccagtaatctactttctgtctctatagcttttactattctggactttcatattaatggaatcatatagtatactatctattgtgattggtttctttcact

SEQ ID NO: 227377 - DNA, 566 bp, Homo sapiens
gaggccttgtaggatctctttccattcccctctttccctattcggatttttcttctccatggtagcccagttgctccrggctgcattttagtggaggtagaaactgctgcgagagcacagggccccaagcgggggacgaggacaagtgaggcctctaaaggaaagataggagatttgagcccctgggtttgaccgtccagaaggaagcagtaagatcaagtggaataactgactttggcaggtcctggaacaaaagacctttgaacgaaagaataaaggatgtatagggttgttgagcaccagtgtgctaggcactatactaggtatgtttaaacatctcatgtaactcttaacaacagctttgtgaaattatccccttctaaaatgagatttagaaagattaagcaatttgaccaaggttacaaagattaaactcatgaaatctgtttttcacagattttatttggaaagaaatgtcaaggagaggaagaagcaagaatgtactcttgcttaagtttaagagctactatggtttgaatgtgtctcccaaagttcatgtgttggaa

SEQ ID NO: 227378 - DNA, 486 bp, Homo sapiens
atacatagatatatgactgattattgcatatttactttatattttgtgaccttactaaactcactagttctgctatctttttatctgtgagactgtctacagagacaataatgttgcttgtgaataggggcactatttgttcctttgcaatcttgtatctcttatttctttatcttgttttattgcattggctaayttgagtattatgttgaaaaggagtggtgagagtgggcttccttgcattgttcctgatagtaggggaaagtgttcaatcttttaccactgaatatgatattagctgtaggacttctgtagatgccctttatcatgttgaggaagttctcatctatcctggttttctgagtgtttttgtcatgaacaatcttggattttgtcaaatgtattttctgcatctattgagttgatcatactgttttttcgtctttaacctattgatgttgcagattacattaactgattttcaaa

SEQ ID NO: 227379 - DNA, 486 bp, Homo sapiens
atacatagatatatgactgattattgcatatttactttatattttgtgaccttactaaactcactagttctgctatctttttatctgtgagactgtctacagagacaataatgttgcttgtgaataggggcactatttgttcctttgcaatcttgtatctcttatttctttatcttgttttattgcattggctaacttgagtattatgttgaaaaggagtggtgagagtgggcttccttgcattgttcctgatagtaggggaaagtgttcartcttttaccactgaatatgatattagctgtaggacttctgtagatgccctttatcatgttgaggaagttctcatctatcctggttttctgagtgtttttgtcatgaacaatcttggattttgtcaaatgtattttctgcatctattgagttgatcatactgttttttcgtctttaacctattgatgttgcagattacattaactgattttcaaa

SEQ ID NO: 227380 - DNA, 486 bp, Homo sapiens
atacatagatatatgactgattattgcatatttactttatattttgtgaccttactaaactcactagttctgctatctttttatctgtgagactgtctacagagacaataatgttgcttgtgaataggggcactatttgttcctttgcaatcttgtatctcttatttctttatcttgttttattgcattggctaacttgagtattatgttgaaaaggagtggtgagagtgggcttccttgcattgttcctgatagtaggggaaagtgttcaatcttttaccactgaatatgatattagctgtaggacttctgtagatgccctttatcatgttgaggaagttctcatctatcctggttttctgagtgtttttgtcatgaacaatcttggattttgtcaaatgtattttctgcatctattgagttgatcatactgttttttcrtctttaacctattgatgttgcagattacattaactgattttcaaa

SEQ ID NO: 227381 - DNA, 603 bp, Homo sapiens
ctcttgctagggctttgaggctcagggccacagggttcctccaggctgggkttgttcacattggcctctacctgaacacaaggcatgtgggcctctgtcatgtccccactgggctgtgagatcttggagaccgagtgggcagaaccctggggtacagctttggaattggattgcttttggttctgctgcactgccttcaagtcattggccagctgttctttaaggtgaaccccttctggattaggggcaggaagagtgtctggtgggatgggcagttcctggagcaatgtctccccttggtggtttagactttcaagagacttctgtgtggatatgttctctggtgctgcaacagtttgttccctggacttccttgccctaatgggaattccccattgtatctctaggaccttttttctcaggtggaagtttagtttggtcaagatatgtgtctggagtgagtgggggctagtaggatgcgtctggctttctagaggcagcgtctccattgttccttttactggcactgcaggctggaactcttttgcaacgtctgtacaactctcattgttgccttgagggcatggcccaagacttatacac

SEQ ID NO: 227382 - DNA, 603 bp, Homo sapiens
ctcttgctagggctttgaggctcagggccacagggttcctccaggctgggtttgttcacattggcctctacctgaacacaaggcatgtgggcctctgtcatgtccccactgggytgtgagatcttggagaccgagtgggcagaaccctggggtacagctttggaattggattgcttttggttctgctgcactgccttcaagtcattggccagctgttctttaaggtgaaccccttctggattaggggcaggaagagtgtctggtgggatgggcagttcctggagcaatgtctccccttggtggtttagactttcaagagacttctgtgtggatatgttctctggtgctgcaacagtttgttccctggacttccttgccctaatgggaattccccattgtatctctaggaccttttttctcaggtggaagtttagtttggtcaagatatgtgtctggagtgagtgggggctagtaggatgcgtctggctttctagaggcagcgtctccattgttccttttactggcactgcaggctggaactcttttgcaacgtctgtacaactctcattgttgccttgagggcatggcccaagacttatacac

SEQ ID NO: 227383 - DNA, 603 bp, Homo sapiens
ctcttgctagggctttgaggctcagggccacagggttcctccaggctgggtttgttcacattggcctctacctgaacacaaggcatgtgggcctctgtcatgtccccactgggctgtgagatcttggagaccgagtgggcagaaccctggggtacwgctttggaattggattgcttttggttctgctgcactgccttcaagtcattggccagctgttctttaaggtgaaccccttctggattaggggcaggaagagtgtctggtgggatgggcagttcctggagcaatgtctccccttggtggtttagactttcaagagacttctgtgtggatatgttctctggtgctgcaacagtttgttccctggacttccttgccctaatgggaattccccattgtatctctaggaccttttttctcaggtggaagtttagtttggtcaagatatgtgtctggagtgagtgggggctagtaggatgcgtctggctttctagaggcagcgtctccattgttccttttactggcactgcaggctggaactcttttgcaacgtctgtacaactctcattgttgccttgagggcatggcccaagacttatacac

SEQ ID NO: 227384 - DNA, 603 bp, Homo sapiens
ctcttgctagggctttgaggctcagggccacagggttcctccaggctgggtttgttcacattggcctctacctgaacacaaggcatgtgggcctctgtcatgtccccactgggctgtgagatcttggagaccgagtgggcagaaccctggggtacagctttggaattggattgcttttggttctgctgcactgccttcaagtcattggccagctgttctttaaggtgaaccccttctggattaggggcaggaagagtgtctggtgggatgggcagttcctggagcaatgtctccccttggtggtttagactttcaagagacttctgtgtggatatgttctctggtgctgcarcagtttgttccctggacttccttgccctaatgggaattccccattgtatctctaggaccttttttctcaggtggaagtttagtttggtcaagatatgtgtctggagtgagtgggggctagtaggatgcgtctggctttctagaggcagcgtctccattgttccttttactggcactgcaggctggaactcttttgcaacgtctgtacaactctcattgttgccttgagggcatggcccaagacttatacac

SEQ ID NO: 227385 - DNA, 547 bp, Homo sapiens
cagaaattctgcagtcccaggacctgtgtacacaggcggggatcttgccctggtggatttgtccacatttggagtcgatgtggctctgcagtattgccttgacctgagttaacaagtgtggcctggggatggacactggggccgcaatgggtgacagcacatcgcaagccccgttggcctctagggctacaggctgggggatgctcacgttggctagggctgtgctgctgctggacacagtctgctgrtcagtggaggtaaggagcaactggatggactgctggatcttctgaggcaggccccagcgatggcgaatcaactgtttctggatgtggaattccagcagcttccgggcatgctccgggaagaagagtagttccctggtgagcactgagatggacttccctgtctgggaagctgtcgtggtctcaggagactgagctttgccacagggctcatgctgcatgaggcactgggtgtgctgagacctctggagggcagctggccagccccactgaagctggagttgcctctgtagcaggtgcca

SEQ ID NO: 227386 - DNA, 547 bp, Homo sapiens
cagaaattctgcagtcccaggacctgtgtacacaggcggggatcttgccctggtggatttgtccacatttggagtcgatgtggctctgcagtattgccttgacctgagttaacaagtgtggcctggggatggacactggggccgcaatgggtgacagcacatcgcaagccccgttggcctctagggctacaggctgggggatgctcacgttggctagggctgtgctgctgctggacacagtctgctgatcagtggaggtaaggagcaactggatggactgctggatcttctgaggcaggccccagcgatggcgaatcractgtttctggatgtggaattccagcagcttccgggcatgctccgggaagaagagtagttccctggtgagcactgagatggacttccctgtctgggaagctgtcgtggtctcaggagactgagctttgccacagggctcatgctgcatgaggcactgggtgtgctgagacctctggagggcagctggccagccccactgaagctggagttgcctctgtagcaggtgcca

SEQ ID NO: 227387 - DNA, 426 bp, Homo sapiens
ggtctcagttgccctttcagcttcacccttatagaaattcttactatttgtcagaataaaaataccaagctaagcagatccactaagtcataactcttgtctaagcctaatttgaaagtctcataaaagcatcctttgctatgggcagtaagtatattgaggcttcatccatctgttctcatagagagaatagaggaggatactgtttgtatgtaaggaaaaaattgtatcccaaagaaatgtgtttttcaatttgctcaccacaattaacrctcaaagtacaatagttttggtgtgctttgtagttaccaggcaggagctacatatttatatattaaagttagcaactgtcaaaactcttaggaaaattcaccaccatactctggtaattccttaaggcaggttgtcctttaaggataccttttt

SEQ ID NO: 227388 - DNA, 596 bp, Homo sapiens
tgaaataatatttagtaaagatttctgaaaaacttctctattgtgtgaagtgaaaaaaaaagtcaggatttgccaaattgcctcttatttattgaaatcttttttttctgatgctcattagaaatacatggttccagctactgccgagctgtaattaagaggaagcataaagtatagaacagggcaagataggataggtgtgtgtgtgtgtgggcagaggtgggtgtatgtagaaaaatgtgatttgaacagtaggtgtagaagatagaagaaatgaactatatccaggtgcatgtgtaatgcatctgttttgtttctaataataatgtattaaaagcttaaataaaggaaacatatattctcagaagaagaccattttaatgtacatctgarcttcatctgtggactaatcaatatgttattctgatataaaaggaaaatacgcttggtctgcaaggattccttagaaaacaaagccaaacaaaaatgaaagttcagatattttttcttatcatacgttgcttttttccatgagcagcagtaacctagacgtttttatctgaaacattagcctggcccagtaggtgtcagattag

SEQ ID NO: 227389 - DNA, 539 bp, Homo sapiens
tcattttcagtcaacaactatcatcacttatgctacaaatctgtgtgtctgtttctgggtattctccagaaactctaagccacagagttgactgtcttctgtgtgacatctccaccagcacttatcctctctatatctcaaagtcagcaggatcaaaattgaagcccttatcaatgaccagacttcctcctcttctaggatctgacctattggatagcagaacatktaccctaacgtccatctaaaaaatcaattttttctcatttatgcattaattctagtaatatttattgtgcaactacagtgtgctagacatggtctaggtgctgatgctattttagagaatatgtctgacaacattttttcccttattctaatgagggacagcaataaaatgaacaaatatgcaaataatatcatgtcaggtaataatagatgctataaataaaatgactagaataaaataaactcctttggtcttatagtcagtgacattttgtaacttgtttcttcttccagtatagtcttctgaaattaat

SEQ ID NO: 227390 - DNA, 414 bp, Homo sapiens
ttctaataaaagtaaaatgtgaagataaaatatggcgtaaggaaataaaggaaatarcaactcaaaattacttatgtcttagcttttcagaggcgtcatactttgcaggagtctaaagcaggtagactccttccttatcctttcttagaagtcattctggaccagatgcctgtttacagaagcatcactgtgaatgtggcagaaacaatcatatttcaggattatatgtcctcttttccatactgtgggatccttaaaagtaattcattgtcttctgcatttttatctttcacctgcatatggaaggctttcagtgaatattagctgtatgaatgaggacataacacattttagcaaaattacttctgacacagttcttccttgtatgacaaagttctttatctgcaagaattc

SEQ ID NO: 227391 - DNA, 414 bp, Homo sapiens
ttctaataaaagtaaaatgtgaagataaaatatggcgtaaggaaataaaggaaataacaactcaaaattacttatgtcttagcttttcagagrcgtcatactttgcaggagtctaaagcaggtagactccttccttatcctttcttagaagtcattctggaccagatgcctgtttacagaagcatcactgtgaatgtggcagaaacaatcatatttcaggattatatgtcctcttttccatactgtgggatccttaaaagtaattcattgtcttctgcatttttatctttcacctgcatatggaaggctttcagtgaatattagctgtatgaatgaggacataacacattttagcaaaattacttctgacacagttcttccttgtatgacaaagttctttatctgcaagaattc

SEQ ID NO: 227392 - DNA, 398 bp, Homo sapiens
ctgcatttttatctttcacctgcatatggaaggctttcagtgaatattagctgtatgaatgaggacataacacattttagcaaaattacttctgacacagttcttccttgtatgacaaagttctttatctgcaagaattcrtatttgggaactttgtgaacacatctgtccttagcttttccggtattctttgaggaagtgtgacaaaaacattataattgcaccaataatcttcaagtatcatttaaaaactctcgtggtcctctaacacaagaaaatgagatagatatattaatacttctgagtaagatttaggttaccagtgattgaagtgagtcagcccaggaacaagctggctggcagagaaggagctgtgtaagtgtggatgaatggttgta

SEQ ID NO: 227393 - DNA, 398 bp, Homo sapiens
ctgcatttttatctttcacctgcatatggaaggctttcagtgaatattagctgtatgaatgaggacataacacattttagcaaaattacttctgacacagttcttccttgtatgacaaagttctttatctgcaagaattcgtatttgggaactttgtgaacayatctgtccttagcttttccggtattctttgaggaagtgtgacaaaaacattataattgcaccaataatcttcaagtatcatttaaaaactctcgtggtcctctaacacaagaaaatgagatagatatattaatacttctgagtaagatttaggttaccagtgattgaagtgagtcagcccaggaacaagctggctggcagagaaggagctgtgtaagtgtggatgaatggttgta

SEQ ID NO: 227394 - DNA, 625 bp, Homo sapiens
taggttaccagtgattgaagtgagtcagcccaggaacaagctggctggcagagaaggagctgtgtaagtgtggatgaatggttgtaaatctctttttcctggtggaaactgaagatttcctaggtccttcaaaaattaaatctgctatcattttaagctgtctactttcctatatatcccctatgtgctattttaaactcatttccacctctttttctgcccagtgccctgacaataataatgaagcagtcgttcactgaaggtaccccatgtgcccagcactgttgtaaaagtacaaatactaactcatttaaccctcacaacgatcttgtgagagaggagtgtatgtgttctcacttcacttatgagtagactgaggcagagagaggctatgtaacttttccaggatggagtcaggattcaagcccacacagtatatactctagtgtactagaaaatgtggctcctgatctaatggtgacagactaacrtgtcaggggtccacattgctaatactgatcgagattcagcaatcaaaactataatcttaattaataaagctaataattataaactaaattcatataaaattagaaaagcacttcctgctttaaaccacaagcta

SEQ ID NO: 227395 - DNA, 579 bp, Homo sapiens
ttttgtggacaagtgagaagagagtttaccttttagcattacttctaaagaccaagacttgaaattttgcttctccagtgggaggatcttattcaagagggactacatgggagttgtccctctccagtgctgatcttggtgggctcrttactgttgacttattgaactcaatgctttccatcccaaacatcattttttgtttcatatttttatgtattgacttcataaatcatagaatgttttatgatttttagaaagtttggatttacaattcattaatctgcttttattttaaaatatgcataatgagctataagtatattcttaaatttctagatacaagcactagcgattacaataaagaaaaaatcaaggtattagctaaagaacaaaagagtttcaaggtcattgctttatgtctcttttacttgataagttttttactattctatttgcctgagggaaacattccaggaactgtacttcacatgccttagaagatcaatactgctgttggagagtaatagtaaacatagaatgagaaaaagaaatgtataggttgcaataatccagaaaaaa

SEQ ID NO: 227396 - DNA, 579 bp, Homo sapiens
ttttgtggacaagtgagaagagagtttaccttttagcattacttctaaagaccaagacttgaaattttgcttctccagtgggaggatcttattcaagagggactacatgggagttgtccctctccagtgctgatcttggtgggctcattactgttgacttattgaactcaatgctttccatcccaaacatcattttttgtttcatatttttatgtattgacttcataaatcatagaatgttttatgatttttagaaagtttggatttrcaattcattaatctgcttttattttaaaatatgcataatgagctataagtatattcttaaatttctagatacaagcactagcgattacaataaagaaaaaatcaaggtattagctaaagaacaaaagagtttcaaggtcattgctttatgtctcttttacttgataagttttttactattctatttgcctgagggaaacattccaggaactgtacttcacatgccttagaagatcaatactgctgttggagagtaatagtaaacatagaatgagaaaaagaaatgtataggttgcaataatccagaaaaaa

SEQ ID NO: 227397 - DNA, 579 bp, Homo sapiens
ttttgtggacaagtgagaagagagtttaccttttagcattacttctaaagaccaagacttgaaattttgcttctccagtgggaggatcttattcaagagggactacatgggagttgtccctctccagtgctgatcttggtgggctcattactgttgacttattgaactcaatgctttccatcccaaacatcattttttgtttcatatttttatgtattgacttcataaatcatagaatgttttatgatttttagaaagtttggatttacaattcattaatctgcttttattttaaaatatgcataatgagctataagtatattcttaaatttctagatacaagcactagcgattacartaaagaaaaaatcaaggtattagctaaagaacaaaagagtttcaaggtcattgctttatgtctcttttacttgataagttttttactattctatttgcctgagggaaacattccaggaactgtacttcacatgccttagaagatcaatactgctgttggagagtaatagtaaacatagaatgagaaaaagaaatgtataggttgcaataatccagaaaaaa

SEQ ID NO: 227398 - DNA, 579 bp, Homo sapiens
ttttgtggacaagtgagaagagagtttaccttttagcattacttctaaagaccaagacttgaaattttgcttctccagtgggaggatcttattcaagagggactacatgggagttgtccctctccagtgctgatcttggtgggctcattactgttgacttattgaactcaatgctttccatcccaaacatcattttttgtttcatatttttatgtattgacttcataaatcatagaatgttttatgatttttagaaagtttggatttacaattcattaatctgcttttattttaaaatatgcataatgagctataagtatattcttaaatttctagatacaagcactagcgattacaataaagaaaaaatcaaggtattagctaaagaacaaaagagtttcaaggtcattgctttatgtctcttttacttgataagtkttttactattctatttgcctgagggaaacattccaggaactgtacttcacatgccttagaagatcaatactgctgttggagagtaatagtaaacatagaatgagaaaaagaaatgtataggttgcaataatccagaaaaaa

SEQ ID NO: 227399 - DNA, 468 bp, Homo sapiens
aaagctttcatgggtgtttagaaaatctttattataatggagtggatgttaccgaattagccaagaaacacaaaccacagatcctcatgatggtaaggaagcctaatgggaaggaaagaaaaaaggacattttattttttgcatttaaaaattattcatgtgaagtctccatttcatctaatattttaagaatcagttcttactttaacagctgcccatgtaatatagtaatttagttttatttatttatttatttttttgagacagagtctctctcttgtctcccaggttggagtgcagcggcgcaatctcagcttactgcagcttacgcctcccaggttcaagcaattctcctgcctcagcctcctgagtagctggrattacaggcgcccgccaccatgcccagctaatttttgtacttttagtagagacggggtttcgccatgttggccaggctagtctcgaatt

SEQ ID NO: 227400 - DNA, 474 bp, Homo sapiens
gatgaattatttctgaaattctgccggaacaaacaagtgtccataaggcagaaaataagcatgatcactatcttatacacactaagaatatgtaaattaaagaggatgagaaacaaacaacaatcttaaagaaaatctatgaggttgtatgtaggacctagggtagtatgaaactttcttaacraagattggaaactcagaagctgtaaaatacaatatagacataattgactatataaaaacatcaatgttttcatgctaaaaatactatatgcaaacattgtatataactattagatctgaaaaccatttgaaaggctgtcaaatataactttccaacagctaaaaatatgaccaatacaaatatcaaataagcatgtgtcaaagatttagtcaattcgttaatgagggaaccagtaaaatagtaagctggttcaatagagattttgaggattgtgtagagaagaccaaatg

SEQ ID NO: 227401 - DNA, 567 bp, Homo sapiens
gcatgtgtcaaagatttagtcaattcgttaatgagggaaccagtaaaatagtaagctggttcaatagagattttgaggattgtgtagagaagaccaaatgttgctcaggagaaagactgagtatgaaaatgtcctgttatttgctgtatcctcagggctagcacagggcctggaaaatagctggcatagattaaactcctgttgaactaaaattatattgagactcctttactaatgctgagaagtagagaagtggagaatttctcacacacatacagaaagccacatggatrtctgcccaattataataatacttatgttgaaagagaagataaatgtcatagatttcagctttagcaggcagactaatcctggattgataaaaagccttgtacgtcttcgtaaaatctggctttaattagatagaagcaccacctgtaaggctgctcaatgtgctcttttgttttatttatagggaaatgtgtccttctcatgtccacagccacagactgtccctgtgacttttctgagctccaggagttatctggctctgccaggcaactctgg

SEQ ID NO: 227402 - DNA, 568 bp, Homo sapiens
tctatattaattttaaaatagtttttactggttctttgaagaatgccattggtgatttgataggaatagcatwgaatctataaattgctttgggcagtatggcccaatatggttaaaaaccatatttattattcctatccatgattatggaatgtttttccatttgtatgtcatctgtgatttctttgagcagtattttgtaattcttcttgtagagatcattcatctccctggttagctgtatttctaggtagtttattctttttgtggtcattgcgaataggattgcattcttgatttggctctcagcttgcatgttgttggtatataggaatgctactaatttttgtacattaattttgtatcctgaaactttgctgagattatcagatcgagaagcttttgggcagagacgatggggttttgtaggtacagaatcatatcatctgcaaacagagacagtttgacctctttttctcctgtttagatgccttttgtttctctctcttgcctgattgctctggcgaggacatccagtactatgttgggtaggaataatgagagacgg

SEQ ID NO: 227403 - DNA, 568 bp, Homo sapiens
tctatattaattttaaaatagtttttactggttctttgaagaatgccattggtgatttgataggaatagcattgaatctataaattgctttgggcagtatggcccaatatggttaaaaaccatatttattattcctatccatgattatggaatgtttttccatttgtatgtcatctgtgatttctttgagcagtrttttgtaattcttcttgtagagatcattcatctccctggttagctgtatttctaggtagtttattctttttgtggtcattgcgaataggattgcattcttgatttggctctcagcttgcatgttgttggtatataggaatgctactaatttttgtacattaattttgtatcctgaaactttgctgagattatcagatcgagaagcttttgggcagagacgatggggttttgtaggtacagaatcatatcatctgcaaacagagacagtttgacctctttttctcctgtttagatgccttttgtttctctctcttgcctgattgctctggcgaggacatccagtactatgttgggtaggaataatgagagacgg

SEQ ID NO: 227404 - DNA, 541 bp, Homo sapiens
cattgctggtttagaaaataaactgggcactatgaagagcaacgcaggcagcctgacattgctgagaggccccaactaccagccagtgatgaattgggacctcactcctacaactacaagaagttgaattctgctctaacctgtatgtgcttggacacacattctgccctagggccttcataaggagcccaagagcaccttgattttgtccttgtargactataagcagagtcatcagtccagccctcccacacttctaaagtgagagataataaagagaatgttttagtaatttgttacagtgatgattaaaagctgatacacattccaacctccatcagatccatttacagacattcccattcagttctaaacccttggacaatggccaaaaaaaaaaaaaaaaaaaaaaggtttcctcaaacacaccctgagaatatactgaaaaagattacatatatatatatacatatatcttaggtggtggcccacgcctgtaatcccagcaatctgggaggctgaggccggcggatcacctgag

SEQ ID NO: 227405 - DNA, 541 bp, Homo sapiens
cattgctggtttagaaaataaactgggcactatgaagagcaacgcaggcagcctgacattgctgagaggccccaactaccagccagtgatgaattgggacctcactcctacaactacaagaagttgaattctgctctaacctgtatgtgcttggacacacattctgccctagggccttcataaggagcccaagagcaccttgattttgtccttgtaagactataagcagagtcatcagtccagccctcccacacttctaaagtgagagataataaagagaatrttttagtaatttgttacagtgatgattaaaagctgatacacattccaacctccatcagatccatttacagacattcccattcagttctaaacccttggacaatggccaaaaaaaaaaaaaaaaaaaaaaggtttcctcaaacacaccctgagaatatactgaaaaagattacatatatatatatacatatatcttaggtggtggcccacgcctgtaatcccagcaatctgggaggctgaggccggcggatcacctgag

SEQ ID NO: 227406 - DNA, 541 bp, Homo sapiens
cattgctggtttagaaaataaactgggcactatgaagagcaacgcaggcagcctgacattgctgagaggccccaactaccagccagtgatgaattgggacctcactcctacaactacaagaagttgaattctgctctaacctgtatgtgcttggacacacattctgccctagggccttcataaggagcccaagagcaccttgattttgtccttgtaagactataagcagagtcatcagtccagccctcccacacttctaaagtgagagataataaagagaatgttttagtratttgttacagtgatgattaaaagctgatacacattccaacctccatcagatccatttacagacattcccattcagttctaaacccttggacaatggccaaaaaaaaaaaaaaaaaaaaaaggtttcctcaaacacaccctgagaatatactgaaaaagattacatatatatatatacatatatcttaggtggtggcccacgcctgtaatcccagcaatctgggaggctgaggccggcggatcacctgag

SEQ ID NO: 227407 - DNA, 541 bp, Homo sapiens
cattgctggtttagaaaataaactgggcactatgaagagcaacgcaggcagcctgacattgctgagaggccccaactaccagccagtgatgaattgggacctcactcctacaactacaagaagttgaattctgctctaacctgtatgtgcttggacacacattctgccctagggccttcataaggagcccaagagcaccttgattttgtccttgtaagactataagcagagtcatcagtccagccctcccacacttctaaagtgagagataataaagagaatgttttagtaatttgttacagtgatgattaaaagctgatacacattccaacctccatcagatccatttacagacattcccattcagttctaaacccttggacaatggccaaaaaaaaaaaaaaaaaaaaaagstttcctcaaacacaccctgagaatatactgaaaaagattacatatatatatatacatatatcttaggtggtggcccacgcctgtaatcccagcaatctgggaggctgaggccggcggatcacctgag

SEQ ID NO: 227408 - DNA, 548 bp, Homo sapiens
caggaggctgaggcaggagaatggcatgaacctgggaggcagagcttatacagtgagctgagactgcgccactgcactccagcctgggtgacagagtgagacgccgtctcaaaaaaaaaaaaaaggtaaaattcatccctaaaattggctgtcagcatggaaattataaaactcattttctaaactctaacagtccttcagagcaaactttccaagagcaactgtgaaaacagacaatgtcaatctgcaaagtttctgattgttttctttcctcatattccgaggtgtgcatatgtgcctcaaattgtattaaaacatttgctatagatgacasattttataacaaaaaacaaataagccaatatatccaagacctatcatttcaaaggtaaaatatttaggaagcactaaaagggataagaatgaaagtactattcatttttttaagtgatactaaataaagttgattatagaaaatgatttgtcaaagtataaatatagtatcacctttagggtttaaattctacaggtgagattattcaagagcc

SEQ ID NO: 227409 - DNA, 548 bp, Homo sapiens
caggaggctgaggcaggagaatggcatgaacctgggaggcagagcttatacagtgagctgagactgcgccactgcactccagcctgggtgacagagtgagacgccgtctcaaaaaaaaaaaaaaggtaaaattcatccctaaaattggctgtcagcatggaaattataaaactcattttctaaactctaacagtccttcagagcaaactttccaagagcaactgtgaaaacagacaatgtcaatctgcaaagtttctgattgttttctttcctcatattccgaggtgtgcatatgtgcctcaaattgtattaaaacatttgctatagatgacagattttataacaaaaaacaaataagccaatatatccaagacctatcatttcaaaggtaaaatatttaggaagcactaaaagggataagaatgaaagtactattcatttttttaagtgatactaaataaagttgattayagaaaatgatttgtcaaagtataaatatagtatcacctttagggtttaaattctacaggtgagattattcaagagcc

SEQ ID NO: 227410 - DNA, 491 bp, Homo sapiens
acttcattcctacagtataatatctaccaatgattgaaactagtcagctgcacrttttatttatttattaaaaaggatttggatttttatacaatatttaaaaaccacaaaatgaaaagggatcaatcaacgtatatcttggaggtccttccaagagtctcagtatctaacagccatggaggctgtgacctttttccttcttttctcagcctgcttgtcatttaagggtcaccagagatgactcatgctctagttcttaaaatcaaacttgttccaccaaatccaagatgctgaatttgtacaaatgtaaaaacatcctcttgccacctgtccaccaaaataccttctattcaagtgaacaacagctttaattgctgactcaactctcaaattctaaaaaggtctgtgcttcatcatcagggacaccaagaatttcacatatcacacattttctaactttgccatatttttcatggcaaaattgggaaata

SEQ ID NO: 227411 - DNA, 491 bp, Homo sapiens
acttcattcctacagtataatatctaccaatgattgaaactagtcagctgcacgttttatttatttattaaaaaggatttggatttttatacaatatttaaaaaccacaaaatgaaaagggatcaatcaacgtatatcttggaggtccttccaagagtctcagtatctaacagccatggaggctgtgacctttttccttcttttctcagcctgctkgtcatttaagggtcaccagagatgactcatgctctagttcttaaaatcaaacttgttccaccaaatccaagatgctgaatttgtacaaatgtaaaaacatcctcttgccacctgtccaccaaaataccttctattcaagtgaacaacagctttaattgctgactcaactctcaaattctaaaaaggtctgtgcttcatcatcagggacaccaagaatttcacatatcacacattttctaactttgccatatttttcatggcaaaattgggaaata

SEQ ID NO: 227412 - DNA, 513 bp, Homo sapiens
agagcttgaatcttctgaacatcaagtagataagaaacagctataaactccctttcagaaatttaaaataaagcrtatataattagctattttcctcctgtttcagaaaacatcactgtttttcagtgtcttctgtgttctggatccttttccctgccatccctctgggacgttgcccctcagctactctgtgagtttcttctgtctccaagctgttgatgggcatgggagttccaccagcatccctggcagtgaccaggctctagtcgctctagcttccacttcacactgtctcctgcccgatgtccctcttgctactgctgtcccactctctttttctaagcatcccgacttctacagaaagtattcatcatttgctctctccttttcattaactcatttcctctcctcagtcctctgcaatcaggcatctactcttatccattcatcaatttactgatgacctccgatctatcactaatttatagattattttgttttcattttcacaat

SEQ ID NO: 227413 - DNA, 513 bp, Homo sapiens
agagcttgaatcttctgaacatcaagtagataagaaacagctataaactccctttcagaaatttaaaataaagcgtatataattagctattttcctcctgtttcagaaaacatcactgtttttcagtgtcttctgtgttctggatccttttccctgccatccctctgggacgttgcccctcagctactctgtgagtttcttctgtctccaagctgttgatgggcatgggagttccaccagcatccctggcagtgaccaggctctagtcgctctagcttccacttcacactgtctcctgcccgatgtccctcttgctactgctgtcccactctctttttctaagcatcccgacttctacagaaagtattcatcatttgctctctccttttcattaactcatttcctctcctcagtcctctgcaatcaggcatctactcttatccattcatcaatttactgatgamctccgatctatcactaatttatagattattttgttttcattttcacaat

SEQ ID NO: 227414 - DNA, 580 bp, Homo sapiens
taaaatcactacttattattttttttacatttatttcagtttgtttttaattgaaaagccatacgattcacatagttcaaaccatatctacatccattttatatttttatcccattcccattacccagagggaaaaaatgctatgatttttcttatatgtccttctagaaatatttcatatttacatgagtatatatatatatacatatatatatatatatatacatatattcattgtgggaatttcaaatgggagaatatcttaccttattctttgattttagaaaaatatcttgaagttcattcacagcaagtatgtttacctcattatttctcaaggctgcatgctattccagagtataaatgtaccatgaccactgmaagagaactgtactaacatatttaccattatattcataaaatgttagttaatctcttcatgcacatatgcatatattacactatgactgtgggataaattcctagaagtagcattgctgcttaacgtaaactatacattgagagaaactgaaagcatcactctttttgcattacctccattcactacactgcaagttga

SEQ ID NO: 227415 - DNA, 566 bp, Homo sapiens
ttttcccctgtgttttctcttagtagtttcacagttatgggtcataagtttaactctttaatccattttgtgttsatttttgcatatagtgtgagataagggtctaatttcattctgttgtgcatgtatatcccacttacccaataccatttactgaagaaactaaactttcttcattgtgtattcttagcacctctgtcaaaaatcaacagacaataaatgcctggatttagttctgggctctctattgtgttccattggtctatgtatgtgtctgttttttatgtcagtaccatgctattttgattgctacagctttgtagtacattttgatgtcagatagtgtgatacctccagctttgttctttacgctcaagattgctttggttattggaggtcctttgtggttacacacaaattttaggatcattttctctatttatgtggaaaatgtcattagaattttcataggtaatgcactgaatctgtagatcaccttaggtattatgaatattttaatattaattcttccaatccatgaacatggggatatctttcgattcctg

SEQ ID NO: 227416 - DNA, 542 bp, Homo sapiens
ccactactgataagcaccaaggttgattccatgtctttgctattgtgaatactgccatgatgaacacacaagtgtatgtgtctttttggtagaatgattagatttcttttrgatatctacccagtaatgggattgctaggttgaatggtagttctcttttaagttctttgagaaatctccaaatttttttccacagttgctgaactaatttacattcccaccaacagtatgtaagtgttcccttttctccacagcctcaccagcatttgttgttttttgactttttagtaatagccattctgactggtatgagatggtatcttattgtgggtttaatttgcactgatctgatgataagtgatgtggaacactttctcatatgtttattggccatgtttacgccttcttttgagaaatgtttgttcatatattttgtacatttttaagtggggttgtttgctttttgcttgcctaattgcttaagttcctcataaattttgaatattaaacctttgttggatgcatagtttgcaaatattttc

SEQ ID NO: 227417 - DNA, 542 bp, Homo sapiens
ccactactgataagcaccaaggttgattccatgtctttgctattgtgaatactgccatgatgaacacacaagtgtatgtgtctttttggtagaatgattagatttcttttggatatctacccagtaatgggattgctaggttgaatggtagttctcttttaagttctttgagaaatctccaaatttttttccacagttgctgaactaatttacattcccaccaacagtatgtaagtgttcccttttctccacagcctcaccagcatttgttgttttttgactttttagtaatagccattctgactggtatgagatggtatcttattgtgggtttaatttgcactgatctgatgataagtgatgtggaacactttctcatatgtttattggccatgtttacrccttcttttgagaaatgtttgttcatatattttgtacatttttaagtggggttgtttgctttttgcttgcctaattgcttaagttcctcataaattttgaatattaaacctttgttggatgcatagtttgcaaatattttc

SEQ ID NO: 227418 - DNA, 551 bp, Homo sapiens
acttataaatcctttcccaaggccaatgtccagaacggtgttccataggttttcttctaggattcttacagtttgaggtcttacatttaaatatttgatccaccttgagttcagtttcatatatggtaaaatgtagggttctagcttcattcttctgcatatggctcaccagtgatcttaacactatttattgaatagatagtcctttccccattgcttatgtttgttgactttgtcaaagattagatggctgtaggtatgcagctttattyctgggttctctattctgttccattgttctatgtgtctgttttaataccagtaccagactgttgaggttactgtaaccttttagtttgaagttgggtaatgtgatacctctggctttgttctttttgctttggattgctttggctattttgaattatttttctattttcttttaagttcacttagctctttcggtggtattttcagatgtcaacagtggttcaaatagatgattctgcagacgaatgtcctatttcaccatcttgctggcatctgtacac

SEQ ID NO: 227419 - DNA, 551 bp, Homo sapiens
acttataaatcctttcccaaggccaatgtccagaacggtgttccataggttttcttctaggattcttacagtttgaggtcttacatttaaatatttgatccaccttgagttcagtttcatatatggtaaaatgtagggttctagcttcattcttctgcatatggctcaccagtgatcttaacactatttattgaatagatagtcctttccccattgcttatgtttgttgactttgtcaaagattagatggctgtaggtatgcagctttattcctgggttctctattctgttccattgttctatgtgyctgttttaataccagtaccagactgttgaggttactgtaaccttttagtttgaagttgggtaatgtgatacctctggctttgttctttttgctttggattgctttggctattttgaattatttttctattttcttttaagttcacttagctctttcggtggtattttcagatgtcaacagtggttcaaatagatgattctgcagacgaatgtcctatttcaccatcttgctggcatctgtacac

SEQ ID NO: 227420 - DNA, 540 bp, Homo sapiens
agacaatactgcttgatagaaaaagttttaaataatagaaaagtgctgcaacagagataagaagaaaaaatataacaacaaaggtcttatgggagcttattatctgccaagcgcagagttaagctcattaagtggataatcttatttttcctcmcacaattatgctcattttataaatgagaaagctagaactttgaggagttaaatcacccaactttatacatagtttataactgattcttgttctcaaaggcaactctgtgtgactgtgaagccccagcacaggctcccataaaaaaggcatttccatttactgtaatatttaaaaatccacaaaaactgatttttcaaaagcctacagttgaaagaaagttgctcaaatattacctaaaatagaataatcagtttaaaaaattgatcgcaatgaaagaggaaaaaaaagcagctcacaggaattttctacagaggcacacaaagatacactctctaaacaagaaaaccattatctagtgaatgttcatcagaaactagaatattcac

SEQ ID NO: 227421 - DNA, 570 bp, Homo sapiens
tggatcagccccattattcttcatatcatcacaagtgctttctaagatgttgtcaccagattagggcacaaagtggggaagagagctggaagggcttctccttaaagagtatggttattgtacttcacttccatgcttaatcatttgataacactcacccacagttgctattttggatactctataaaattcccaggcagttacccatttaatctaacataaatatgtgttaaaatcttttctgctatttctcaaggtcacgtgtttgyccatggaacttagagtactggcatctcactcagtcaccgcaacaatggcttaaatccttcttgacaggtggtacctctgtgttcctagtggcatcataccacagaaggcttctccctcacactaatgggactgaatcaataacatcagactaaaaacattaaccttaggagtcttattattctgaaaaatataataaaaccttcagaataaaggttttattattaaaactcagacccaattaaaattttacaaatgagaaagctagaactttgataagttagattacccaactttacatag

SEQ ID NO: 227422 - DNA, 645 bp, Homo sapiens
cagccagagactgtttctttaccttcttggaaactgtaacccttacaggaattgtgcaagaattaaatgtgggagtgctggaaacccagagcacacagccttatgcacaaagagctcttcataaatggtagatggcattagcttcaagtttagaaacaatgttttctttttgcttcctagccaggaaaagcccttttgcttcaagcgactaaagaatgttctctaacttcctgagtgttgttgtgtgtgtacttgcctctgctaatgtttagtttgccttacaaggacaatctgcctgacttcgtgttggataaagggaagctgtacacgaagatggagagatacagaaggaaacaagccatgatttcagtaacccagtggccatgacagccagaggctgaatgaaggccgaccraaactagatatccgctgaccacctctggacccacaggtgcagctgtttgggctgacaccacacctggcagcagggctgacgtgtcctgcagacctgctcttcctctgactcactgtgtcgctgcccatcactggctcacggcttggtagctacccagccacaccctcagcctctcttttccctactgtcaaccaactgtgtgtctggcatgtaacacacactcagactga

SEQ ID NO: 227423 - DNA, 645 bp, Homo sapiens
cagccagagactgtttctttaccttcttggaaactgtaacccttacaggaattgtgcaagaattaaatgtgggagtgctggaaacccagagcacacagccttatgcacaaagagctcttcataaatggtagatggcattagcttcaagtttagaaacaatgttttctttttgcttcctagccaggaaaagcccttttgcttcaagcgactaaagaatgttctctaacttcctgagtgttgttgtgtgtgtacttgcctctgctaatgtttagtttgccttacaaggacaatctgcctgacttcgtgttggataaagggaagctgtacacgaagatggagagatacagaaggaaacaagccatgatttcagtaacccagtggccatgacagccagaggctgaatgaaggccgaccgaaactagatatccgctgaccacctctggacccacaggtgcagctgtttgggctgacaccacacctggcagcagggctgacgtgtcctgcagacctgctcttcctctgactcactgtgtcgctgcccatcactggctcacrgcttggtagctacccagccacaccctcagcctctcttttccctactgtcaaccaactgtgtgtctggcatgtaacacacactcagactga

SEQ ID NO: 227424 - DNA, 573 bp, Homo sapiens
tgaaacacattttgttaactgaaagtataatacataatgaagcttgttctgttactcagaaaatattcatgtattcctgttgtaagtaacagggattctctcttttgaacagagcttttactactctgaagattccataaatctgggagttacatctagttttcttgggtatttctcaacacaaamtcagtctagcccttgaagcgtcaatgtgaagcatgtaattagtaagaatgtggattgatatattaatccattcagataatcaaatgtcagtgattgatatgacagctatacaatctcttatctaaagccttggtatcagatttgctttagattcagattcatttcatatattagaaaggtcatactgtgtatacaccaaatatgagtgactaggtggtaatcacatatgttactatttttgcaataaaacatacgaatattcacattaagcagagtaattaaaaaatgcaaatagccccaaagtcagtacattcagattttgctgctaaataaatttgggtctgcttagggttcaccattttaataattttgtttttagaattaaaa

SEQ ID NO: 227425 - DNA, 573 bp, Homo sapiens
tgaaacacattttgttaactgaaagtataatacataatgaagcttgttctgttactcagaaaatattcatgtattcctgttgtaagtaacagggattctctcttttgaacagagcttttactactctgaagattccataaatctgggagttacatctagttttcttgggtatttctcaacacaaactcagtctagcccttgaagcgtcaatgtgaagcatgtaattagtaagaatgtggattgatatattaatccattcagataatcaaatgtcagtgattgatatgacagctatacaatctcttatctaaagccttggtatcagatttgctttagattcagattcatttcatatattagaaaggtcatactgtgtatacaccaaatatgagtgactaggtggtaatcacatatgttactatttttgcaataaaacatacgaatattcacattaagcagagtaaytaaaaaatgcaaatagccccaaagtcagtacattcagattttgctgctaaataaatttgggtctgcttagggttcaccattttaataattttgtttttagaattaaaa

SEQ ID NO: 227426 - DNA, 569 bp, Homo sapiens
cctgatattctagaaggcaggtgtcccactgactgcagaaaatgtttgtttaatgcaggtgrccactagagcattcctgtcaacttttggaactagtgttatttcatagcccttgtgcaagatttgccctttgccaacataagagactaaattccagtagtaggaagtacagcattaagcactgataaaacaaagacggttaatatattgaccttgcactcaaagtgcttacagtctcataggagaaatggatgtaaaagaagagttaaaacatagagtgctttgtgaggcaatcccacttacatgtggaattctaaaaagttgatttcacaaaagtacagaggagagtgatggttaagaggaactggggtgtggaggagatattggtaaaaaaatacaaaaaggtatggagtagcaaatggtcaaggtgagtcctaagcaggttctggtgcactctgctctctctggcagtactgcagggaaactggggcaagcctcacacagcgctcatccaccttggacaaggaaaaggagactgttgggtattgaaaaaaatgcatgcagagcag

SEQ ID NO: 227427 - DNA, 505 bp, Homo sapiens
tcctgccagatgggaacatgatgtcatattttccgtcagttttcaaacaaaacggtgataatctaatattttctggaataaccatagaataatgttttccaatgtgaacttggtraattttatgaatgaaagagaagcagatattggatccacacagccatcgttgaaggtggcacacctaacatcaaaaacttctgtgcgggaccgggcacgttggttcacgcctgtaatcccagcactttgggaggctgaggcggttggatcaccttgagcccaggagttggagaccagcctgggcaacatcaaaaccctgtctctattaaaaaaaaaaaaagtttcatgccactgttacggactaggaatgtctaaaatccatcacaaagttagtattttgcttggaggggcaagtagaatgagcttttggaaagtttctttaacaattctttgatctagtaattcctgaaaacctttgaggctggtgaaaatactttttcatgtagggatg

SEQ ID NO: 227428 - DNA, 250 bp, Homo sapiens
gaattcctgggctcaagcagtccagccacctcagcgtcccaaaatgttgggattacaggcctgagccaccatacccagcccccrccctctttgttttttttttttaaatgcaacgctttacaaatgtaaaaccattcttagttctctggctatataaagcaggtcataatctagattttggctgccagacctaatctagatttttactaagcctacatgctaaatatgtctggcactttcccttaaaaag

SEQ ID NO: 227429 - DNA, 250 bp, Homo sapiens
gaattcctgggctcaagcagtccagccacctcagcgtcccaaaatgttgggattacaggcctgagccaccatacccagcccccaccctctttgttttttttttttaaatgcaacgctttacaaatgtaaaaccattcttagttctctggctatataaagcaggtcataayctagattttggctgccagacctaatctagatttttactaagcctacatgctaaatatgtctggcactttcccttaaaaag

SEQ ID NO: 227430 - DNA, 434 bp, Homo sapiens
tcctgatgcacctagctatttgttggaaagggactcgctgtgtaaactaaygcctcccacccattctgtattctgggtgaaatgattttggagccctgggaggcaaggcacctgatgataaggtaaagatgtgccttctgaaaccaatgggggcagtggtgagtggcaatctcaccttgcactggaatagatcaattgacaagaagtagatccatttttctggatcccaggaacaaatattttagtaaaatgtatcaatgctataattatagcttacaacatggaatagctcaattataagatataatctatacattttttaattaggaaaatgagctgtaataaagggcattcagtttgtaatgcttctacattacctgtgaaaaaggaaggaaaatatgacagggaaggtggacctgtttatagatttgtac

SEQ ID NO: 227431 - DNA, 436 bp, Homo sapiens
aaacatgcttttatctagtctcctgatgcacctagctatttgttggaaagggactcgctgtgtaaactaatgcctcccacccattctgtattctgggwgaaatgattttggagccctgggaggcaaggcacctgatgataaggtaaagatgtgccttctgaaaccaatgggggcagtggtgagtggcaatctcaccttgcactggaatagatcaattgacaagaagtagatccatttttctggatcccaggaacaaatattttagtaaaatgtatcaatgctataattatagcttacaacatggaatagctcaattataagatataatctatacattttttaattaggaaaatgagctgtaataaagggcattcagtttgtaatgcttctacattacctgtgaaaaaggaaggaaaatatgacagggaaggtggac

SEQ ID NO: 227432 - DNA, 566 bp, Homo sapiens
tttacaaattaagcttgcttaattaaaaaaaatcaagtttgccagttttggggattggttgggaattgcagtcaggagatccctgcctgttcagaaaaggcgaagcctgtcactgagctgttgcatcaaacgtcaccagcacctttactggggtcatgttagcagtggaagatctgtacaggtctgcaacaacctcagttcttgctacctcagaagaaggaattcaaccgaggagcttaaggyggaggaagagactgaggcagagactcggagcaggagtgaatgtttattaaaaagtttcagagcaggaaccaaagaaagtgaagtacatttggaagaggggcaagccggcagcctgagagattcaagtgcacggtttgacctttaacttggggttttatacattggcattccatatgcacagtggcctgtcagcacttgggaggggtcataggcataatgtgttcactggagttgtatgcatgttcctagaagaaggtcatgtaccagttaaactccaccattttgcctcttagtgcgcatgcttgaggccactcacccagctc

SEQ ID NO: 227433 - DNA, 406 bp, Homo sapiens
tagacagaaaatttctagcacactgccggataagccaygagcaagtcttattatctcatactaatattattctaggcaggtggcaccttttgagtctggttactctgtttgtagatcctaaccaaataggaggatgtgactgcctcatagtcacagaaaatactcaacctaggcctgattcattcagtattcttattcccaatgctggcaatattgttcattgatggatccgtgtgagagacacacaggaatatacaattgcatcttattttataggtagagatggctttttcttagaacatattatacatgattacaagtgtaaaaatatggtgaaataattttatttgcttttcaaatgatttttgttgctaaaaactaaaattaaaaatagagaacaagtatc

SEQ ID NO: 227434 - DNA, 406 bp, Homo sapiens
tagacagaaaatttctagcacactgccggataagccacgagcaagtcttattatctcatactaatattattctaggcaggtggcaccttttgagtctggttactctgtttgtagatcctaaccaaataggaggatgtgactgcctcatagtcacagaaaatactcaacctaggcctgattcattcagtattcttattcccaatgctggcaatattgttcattgatggatccgtgtgagagacacacaggaatatacaattgcatcttattttataggtagagatggctttttcttagaacrtattatacatgattacaagtgtaaaaatatggtgaaataattttatttgcttttcaaatgatttttgttgctaaaaactaaaattaaaaatagagaacaagtatc

SEQ ID NO: 227435 - DNA, 406 bp, Homo sapiens
tagacagaaaatttctagcacactgccggataagccacgagcaagtcttattatctcatactaatattattctaggcaggtggcaccttttgagtctggttactctgtttgtagatcctaaccaaataggaggatgtgactgcctcatagtcacagaaaatactcaacctaggcctgattcattcagtattcttattcccaatgctggcaatattgttcattgatggatccgtgtgagagacacacaggaatatacaattgcatcttattttataggtagagatggctttttcttagaacatattatacatgattacaagtgtaaaaatatggtgaaataattttrtttgcttttcaaatgatttttgttgctaaaaactaaaattaaaaatagagaacaagtatc

SEQ ID NO: 227436 - DNA, 595 bp, Homo sapiens
tttttttttttttgagatagagtctcactctgtcaccaaggctggagtgcagtggtgcaatcttggctcactgcaacctccacctccgaggttcatgtgattctcctgcctcagcctcctgagtagctgggactacaggggcacgccaccatgctagggtaatttttttttttttttttttttgaagtagagatgaggtttcaccatattggtcaggctggtctcaaattcctgacctcaggtgatccacctgcctcagcctcccaaagtgctgagattacaggcgtgagccaccgtgcctggcccygtagtactttgtagcgtgctttccagctaaactgaagcctcaggtgacataccatggctctcacagctaattaatgaaaaagctggaaccatcacccacatttcttaattcctacttcagttcatttaataatgctagaataaggcaaagtcacacttttctcattttgtgttgataaacattgtattctaatggttagtaaaatattaataatgcattcatgagcactttaaaataattaagtacagctgttcacataggcagttatcgatactaatttaaataaga

SEQ ID NO: 227437 - DNA, 601 bp, Homo sapiens
tcttcttgcttgcatggtttctaagaaaatttaagaagtaattcttatttttgctcctttatatgtaaggtatttttcctctctggcttctttcaagactttttttttcttatttttgattttctgaagttgaatatgaaatgcctaggtgtaatttttcttttcatgtatcctgtttggtgtactctgagctttcttgatctctggtttggtgtctgacrctagtttggaaggaattttcagtcattattgtttcaaatattgcttccatttttttctctctttcctgtccttttaaaattcccaatatatgtattaactccttttgtagttttgttacagttctttgatattctattctgtttttactgagtaatttttttccttgctctttagttttggaaatttctattatcatatcatcaaactcaaagattcttttttggctatgtccagtctattaatgagcccatcaaagcccttctttatgtctattacaatgtctttgatctccagcacttcttttttgatttttttctttgtatccccatctctctgtttacataattcatctgttcttgcatgttgtctgtttactaga

SEQ ID NO: 227438 - DNA, 416 bp, Homo sapiens
gtctttcaataagatggagcttttatacatgaacacaccacacacacacacaaattgcagaggaatgctgtaaaaaataaatgatttataatcttaaaaatacattatatatattaactagtttaattcttaccaagattgccagatagatataatttttctactttacaaagaaagatgatgatttctcccaaggtcacatgcctgctaagacagaaaagaatttgaaggactatggcttccaaaaactattctgtatactctcactctccacagagctgtaacytttgctgtttatgtctaaaatgaagacgtaatcctctgcagaattgttgaaggctgcatatttctataaaagctggcttatccttctagaaggttcatttttccaccttaataaaacaaagcaggaatag

SEQ ID NO: 227439 - DNA, 601 bp, Homo sapiens
tcttcttgcttgcatggtttctaagaaaatttaagaagtaattcttatttttgctcctttatatgtaaggtatttttcctctctggcttctttcaagactttttttttcttatttttgattttctgaagttgaatatgaaatgcctaggtgtaatttttcttttcatgtatcctgtttggtgtactctgagctttcttgatctctggtttggtgtctgacgctagtttggaaggaattttcagtcattattgtttcaaatattgcttccatttttttctctctttcctgtccttttaaaattcccaatatatrtattaactccttttgtagttttgttacagttctttgatattctattctgtttttactgagtaatttttttccttgctctttagttttggaaatttctattatcatatcatcaaactcaaagattcttttttggctatgtccagtctattaatgagcccatcaaagcccttctttatgtctattacaatgtctttgatctccagcacttcttttttgatttttttctttgtatccccatctctctgtttacataattcatctgttcttgcatgttgtctgtttactaga

SEQ ID NO: 227440 - DNA, 343 bp, Homo sapiens
tctatactactaatcagatcttctgctgtgaccaatctgttgttgaatatgccagtgagctattaattttagttaytgcgattttcagtttgggaatttctgttcatgtatcctagtgaaactccttatcttgctctctattttcctggaaatattaattacagttattttaaagatttttcgttaacttcaatatctggattatctcttgatcttttccattgtctggtttttgtttccgttttgatgtctgataattttggctgaattctggacatgttggacagaaatttgtagaggctagagaagacaaagtgatcccccagtgaatccccaccacagc

SEQ ID NO: 227441 - DNA, 343 bp, Homo sapiens
tctatactactaatcagatcttctgctgtgaccaatctgttgttgaatatgccagtgagctattaattttagttattgygattttcagtttgggaatttctgttcatgtatcctagtgaaactccttatcttgctctctattttcctggaaatattaattacagttattttaaagatttttcgttaacttcaatatctggattatctcttgatcttttccattgtctggtttttgtttccgttttgatgtctgataattttggctgaattctggacatgttggacagaaatttgtagaggctagagaagacaaagtgatcccccagtgaatccccaccacagc

SEQ ID NO: 227442 - DNA, 343 bp, Homo sapiens
tctatactactaatcagatcttctgctgtgaccaatctgttgttgaatatgccagtgagctattaattttagttattgcgattttcagtttgggaatttctgttcatgtatcctagtgaaactccttatcttgctstctattttcctggaaatattaattacagttattttaaagatttttcgttaacttcaatatctggattatctcttgatcttttccattgtctggtttttgtttccgttttgatgtctgataattttggctgaattctggacatgttggacagaaatttgtagaggctagagaagacaaagtgatcccccagtgaatccccaccacagc

SEQ ID NO: 227443 - DNA, 343 bp, Homo sapiens
tctatactactaatcagatcttctgctgtgaccaatctgttgttgaatatgccagtgagctattaattttagttattgcgattttcagtttgggaatttctgttcatgtatcctagtgaaactccttatcttgctcyctattttcctggaaatattaattacagttattttaaagatttttcgttaacttcaatatctggattatctcttgatcttttccattgtctggtttttgtttccgttttgatgtctgataattttggctgaattctggacatgttggacagaaatttgtagaggctagagaagacaaagtgatcccccagtgaatccccaccacagc

SEQ ID NO: 227444 - DNA, 580 bp, Homo sapiens
ctttctgacctcagcagcatcactcctgactacagaagatcactccctgccccacattctccccagtgtgaaagacacaaatgggaaaggatagccaagaacctttccaggttatgaaaaattgtagagggaaacccagcttattccatttaattagcgtgaacaggctagtggggtgaccacagctggtcatcatgagataagcagtggcagggaaattttttttggcaagtaaatgagcactggaccatcatacttggaggagcttaaaaaaaaaaaagaaagaaggtctacttgctttaaaattaatactgtgtaaggtcaatgactaagaattttctaatgtagacaaagcattttttccacatatgcgtatctaagacagcccctatcactttaccttttctatttaaaragcatgcattgcacattattaccacctgatggctgaataagaaaattgcagggtttcatttttcatttcaggtaaattgagtaagttcactttgaaagccttaagtatgaagaataaatagtgaaatgatagcaaatcctttcacttatctactagcgcctatta

SEQ ID NO: 227445 - DNA, 607 bp, Homo sapiens
gatgacaagggcatggctacattattataacagaagaaatgccgctcatgattttgcttcttaaagcagttagtaaaatgcagattattttctgaataratattatgccacagtgctacattctagaaccacagcctagactttgcgttcagcaactctaaccttgacgattctgcatggcactggctctgttcaacatataaggaaactgaggattcaggaacgtatatgatatgccttaggatatgacatgagcccggattagaagatcacttttaatatgtgagactttggtacatgtttccttataagaagactggaaaaaatagatgatttgatgatcaactcaaaatgaaagagaaagggctatccatgtgaaggagaactttgtaccttggaattatatttatacttgaaagtgttcagcataggtgttttgcattttgcctttaaagagaaaaataaagtgaacataaatatagataaaattgtgactatgacctaatgaatgctctgaggttagaggttgttacctgcaggaagcctgctcgttgcattaatgttgcaatggcatgctttgatttctgggccaggttgtgtgactgca

SEQ ID NO: 227446 - DNA, 593 bp, Homo sapiens
atgctttcaggtttagtttttaaagagtttaaaaatacgctcattaatttgaattgctactattgcaacatccattttttgaaaattatactgcctgagctattgaccagataaccatgagcaaaaacagtttcctgggatctgctgtacaggtcatgaatctcttttgctccctttattctataaggggaaagaggccttaggaactgttagatttttagaaagggtgattttttttttctttcagcaaaagcttttttttttttcctctgcccttctcctcaaatatcaatatccaaaaaagcattttcttattttagaagaaagagaaagacaaagcaatttttcccctaaaggtatgaaatgttaatgtggaaggagaatttttagtgaagaaatctgagtttcttcctttctgatgctggaggcagggttggattcatttagtatgtaatggcttagacaagagcgtgtttcaaatcctgagcctccagttatggctcaaccggggctcygcacagcagcagctgagaagttaatgttacccacagctcttctccagaaagcagatgagtaattccaccttcagaggg

SEQ ID NO: 227447 - DNA, 271 bp, Homo sapiens
cactctgggtttctgcccaacttctctccctgcagtgcccttcacagacctctcttcagtgcctcttcctcacttttcattcatctcctttaacatgtttttttcaagactggagccttaaaatattagaccttgtcaggacggcaaatgcaaaccagacaaaccactactgcactactgttcaaaatgtttgattatccttttaattaaccaggaattyctccctgcaaaatagctttaaggggcatctggaaacatccagctaggcttt

SEQ ID NO: 227448 - DNA, 605 bp, Homo sapiens
tagtgtaaaatttaagaggtacaaaatagtagatagtaacatagtataaatatctttttccctagctacccagttgagctccttggagttaaccactgttgtgacttacctatccttccagagttggtttattcttgtgcttgcttacacatacacacacattccacatatatgtatatgtgtatgtacctaaggatgtattttttaagtgcaattggcagcatatcatataccctactttgtactggcttttactttagtgtatatgtctaatcctttcttttgcctggatcaaatatttgtttttacagtgactttccatttgtggggtcacgtgaatgtttgttgcaggtttgttcagttatactgtakgcacctcagataagctgtaaaacaaccctatgggctaaggtatctgcaatattttattaacttcatttcaaaagtaaataataagctggcttctgtccactgagggtcagagtctgtatgattatccttccagcttcagcttctgacatgttgggcaagactaaacataaagccagttgagtaagctgcctataggaatttggcaaagaaacaagaaatgtctatcatttatt

SEQ ID NO: 227449 - DNA, 587 bp, Homo sapiens
attatacaataatcaattatccttttatttggcaaatacttactaaagattttccatatacaggctacctaatatgttttgagacatctacctttaaytgtaaatgaaataaagaagaaaattagaaataagaggaataagaaatcattctggacagtctgagtaaggagaacagtcataacataaatatttggaattgaggaattacacaagattctaaaaattttaaagtgcataattgaataattatattttatcccttcaatctgtatattttaatgatggcagtgagaaacaattctaatgctttagaaaatccaacttttaaaaaatgatttttaaaatttttccctctgatttatggttggctactttgatgaaatcttccattaaacagatacttgctaacatgacctcctccttggtttttctaattttcttaaatttagtaattttgtttcttggttgttgaaaagaaactattttgcatggcacattatgccaagaaaaattaactttattaaataaactgaagtaatacacagtattcctattccataagttttcatattacaaaaaagtttgtt

SEQ ID NO: 227450 - DNA, 587 bp, Homo sapiens
attatacaataatcaattatccttttatttggcaaatacttactaaagattttccatatacaggctacctaatatgttttgagacatctacctttaactgtaaatgaaataaagaagaaaattagaaataagaggaataagaaatcattctggacagtctgagtaaggagaacagtcataacataaatatttggaattraggaattacacaagattctaaaaattttaaagtgcataattgaataattatattttatcccttcaatctgtatattttaatgatggcagtgagaaacaattctaatgctttagaaaatccaacttttaaaaaatgatttttaaaatttttccctctgatttatggttggctactttgatgaaatcttccattaaacagatacttgctaacatgacctcctccttggtttttctaattttcttaaatttagtaattttgtttcttggttgttgaaaagaaactattttgcatggcacattatgccaagaaaaattaactttattaaataaactgaagtaatacacagtattcctattccataagttttcatattacaaaaaagtttgtt

SEQ ID NO: 227451 - DNA, 423 bp, Homo sapiens
ccatattatgagatgagaaatatgaaagcataaaatgccacataccacattgaaaccataatcattgtgctcttmctgtgtttagtgagtttaagtagtgggcaatttagattacaaaactttcctgattttgagaattacagtcatgttaattcatattccagttttcttgaggccattacctaatatgaagagatattattcacagtcaggatggaggggcggtgaaatactcagcacagagagctgtcggcagcactaagctttacaacagcagccgggcctaggaacttggagagtcttgtctggaggcggtgattaaaagcttgtaaaataagatctatggaggaaggctaaagaaatttggattgtttaccctggagaagagaagacttaagggtgatttaatgctgttattgaagc

SEQ ID NO: 227452 - DNA, 423 bp, Homo sapiens
ccatattatgagatgagaaatatgaaagcataaaatgccacataccacattgaaaccataatcattgtgctcttactgtgtttagtgagtttaagtagtgggcaatttagattacaaaactttcctgattttgagaattacagtcatgttaattcatattccagttttcttgaggccattacctaatatgaagagatattattcacagtcaggatggaggggcggtgaaatactcagcacagagagctgtcggcagcactaagctttacaacagcagccgggcctaggaacttggagagtcytgtctggaggcggtgattaaaagcttgtaaaataagatctatggaggaaggctaaagaaatttggattgtttaccctggagaagagaagacttaagggtgatttaatgctgttattgaagc

SEQ ID NO: 227453 - DNA, 620 bp, Homo sapiens
tgtagctgttggccagccacagcttctgcccaaggaaaccatacagccctgaacacgtggaagagcccagttatatgagcacaagaaggcttggtacaaatctagctgggcgggcctgctcctagggaagacactagaaggagacccagtctgaaaagcatgaactaggtggaccccacagtcatcagctggactaaaatccctgggctgtgggcaccataccaatttcacatctatggcaccactgccctgcccaggatcatgtgcctttgacccctgtatcatcagaccactcacagacatatcccacagcccactctgaccctgccaagctcagaggaccagcaggttcctggggagttamaggtttcctggcaatctaacctttggctcaggccacccctaaaggaggggagaatgcagcccaacaaggtcccccatgggactaaggaaatgcaggaacaatgccaacgattggaaaaggctccaccaaagccctggaatggacttggagggtgggtgggggcaggtatctctcaccctcccatctccccttccccagagcactgctacatatgcatcaagatataaaagaagtatgtaagagaccatctgctggc

SEQ ID NO: 227454 - DNA, 571 bp, Homo sapiens
atttagggaaaattgcttaatttagcaaatgttaaaaatattataatactaattctgattgaatttagcaagatcaatgaatttatgcctaagaggaaactaaaaaagaaatttactgagtgttcattatatgccagcaactttcatggactatctcattaaatcctcatgacagctcactgagataagttaaaaaagatctagttgttttctagatgaagacatgaggggttgagaagtcaagtaacttgtcaaaatcctcactaatacataggatctgaaactagatgtgctcgataacaaagctcacttcttcattgctactctattctgcctctgtttagtcaggatcaaattgaagttatcagagaaagctcttataacccaaatgattcactgttacagcccttatttggtgtgtgtttctttctggaagccaatcaaaatggaargttatattttgtggaaattaaactcatgaaagcctgagttataacttctactctgtagtctaagaagtgccaagaaggtatactcaaaagtcttgtagctccatttaaatcatgactga

SEQ ID NO: 227455 - DNA, 610 bp, Homo sapiens
gccccaagtatagacgatgccaagcaaacattttttgaatgattattttttcaggtaatcccaagctgcttggggatgtagtatcccagatgtatctacagatgaacaaaaatatcagaggaaatatcaaattacaattagaaactgacacagatcattcccaaagaatgtaatcaagagagaagttcatgagatttcctaaaattaaaagcttgtcttggacctttgtgatttccttgcagcctctctagcgttcactaattataccactcactcactcactcacaatacccrtgctgctctgttttcttattcatcattttaggcgcaaggactctcttgctactagatggaagggactgtgctttaataattataatgcccctttactttttaatagcacactgtgttcaccaattactcatgccacattgctctataagttcactgtgatggctatcctcattttcatgtgagaaaactaataatccaaaaaaattaagtgacatggacaaggatacacagctaaatgttaaaactggcatcaggacccaaatgtcactgactctaatgtcttagtgtcctagacactgtgtgatgatgttacagc

SEQ ID NO: 227456 - DNA, 530 bp, Homo sapiens
gttgcctgtcttcagttcttctttttgtccagctgggattctgaagtccctcaacaaaatcacccctttaggaacacttccaacctcatgtgcctgtaagacttgccagaaaaaaaataaatctggatgctttccaccatggtactcttcagacatgtaccaatggttgytttttattttttattttatttatttatttatttatttatttatttatttatttatttattttgagacagagtctcgctctgtctcccagactggagtgcagtggtgcgatctcggctcactgcaagctccagctcgtgggttaacgccattctcctgcctcagcctcccaagtagctgggactacaggcgtgcaccaccatgcccggctaatttttctgtgttttagtagagacggggtttcaccgtgttagccaggatggtctcaatctgtctcctgacctcgtgatccgcccacctcggcctcccaaagtgctgggattacaggtgtgagccactgtgcccagcccaatggttgcttt

SEQ ID NO: 227457 - DNA, 460 bp, Homo sapiens
aagagctctgtcatcttttacataatcaccaccaccttgtattttatagggcttttaactttgcaaagaacaacatgaacaagatattgggcatgaatatcctttgtaaactataacttgctatagtagagatggaaaataggtttaatcttttgtgcaaaatctgatctatctggaatcattgcatgggtcccagtgttgaaaagtttgagtccatgcctgtgctcagctagaaaaagagaagggaaagtatccagtgrtgtgggaggatgtaataagggtacatatgctaggtatctgccatccaactagtatgaaagtgtatggtgttatctcccccagttttttcatatttaattcacagaaaaaatatttttatgatttgagtcacaaattttgctacaaagccagcttccaaagtttgattatactgaccataaacatgacgcagaatactggt

SEQ ID NO: 227458 - DNA, 606 bp, Homo sapiens
ttatgttaccaaaaagatatgcaataacaaatgctgccttgccccagtgggcttacactgaacaattattttatttaccataaaaaatgcaaaagggggtggtggtgagaagggagtacagggagtgaaatgtggagcacaaagatctagaagaaggataaagtaagagagctggggttgggcaactgagggagggaaaggaatagaaaactggttcaaaaagggttggcaactaacagcagctgagagcactttgggattcaatatgggaaacaatacccagtacaataagaacattaagtagcactctgatgacctctcaaaaccataatgcagtgtgttgtaaagttctccaagaattaattctgccttgcccaatgatccctgtgttcaatcttcacctccctggtcattctgagcaagtaacaaaagaggcagttactttaactgaatataacattgyagctcagtcttaccctcaccttatactgaaaaggtctctgctatccccaaacccatcttctctctaacatccaggtttgtgtgccaaggaagtaaaagcacacaagtgaaaagccagtcaaggtctgtgttccttatgataat

SEQ ID NO: 227459 - DNA, 593 bp, Homo sapiens
gggagagggacttcatgcaagtcacgttttctttacttccaatacagcccaggttcacattgttatacaaagggtccttaggcaatgcagtaggacattggagttattcaaacaggggccatccagagaaggaatctgaaagacttgaactataccaaaaccattcaccccttasaagacaaagccttttccgagtctgagcaaaggtgaatatctgtggcgctgggatctcagtagcatcaactggctcctgagtttctcaggaggtttctccttagtccctgaatcagaggattagaacctttttaccaggtacttttcagacccacctgtctacatataatcatgtaacatttatctctgctttgataaaaatgttctttttccacatgtttaaatagatggtcatagataggacaaaggtttggaataacacgtacactgcttccagagcagccatatagtatacagatagagctgggaagacactgatccttctctggaattcaatttcctcatattttaagtagaggtcaaaatattgttgtgtgattaagacatattcaactaattcccagtacagcgtttgggat

SEQ ID NO: 227460 - DNA, 593 bp, Homo sapiens
gggagagggacttcatgcaagtcacgttttctttacttccaatacagcccaggttcacattgttatacaaagggtccttaggcaatgcagtaggacattggagttattcaaacaggggccatccagagaaggaatctgaaagacttgaactataccaaaaccattcaccccttagaagacaaagccttttccgagtctgagcaaaggtgaatatctgtggcgctgggatctcagtagcatcaactggctcctgagtttctcaggaggtttctccttagtccctgaatcagaggattagaacctttttaccaggtacttttcagacccacctgtctacatataatcatgtaacatttatctctgctttgataaaaatgttctttttccacatgtttaaatagatggtcatagataggacaaaggtttggaataacacgtacactgcttccagagcagccatatagtatacagatagagctgggaagacactgatccttctctggaattcaatttcctcatattttaagtagaggtcaaaatattgttgtgtgattaagwcatattcaactaattcccagtacagcgtttgggat

SEQ ID NO: 227461 - DNA, 538 bp, Homo sapiens
atcttaatgtatgaaggttctaagtaaatatttgatgaattgatggtagcagcgttaatttttaaatgttccaagctcctagtttttttttttgttttgtttttgcaaaagccttaaagtttggtactaaggaaatcaaagaatcaactcccaccatcatgcttcaggaaagggaaaaatgtctacctttgggtctaacctgcctcccaggtgagcctactggtactagaactgtaactgcaactatgatggcacagrgaaaatgcatgtatgtaatatgcttgtcggcttcagcaacaactcatgtatacatacacatttactatatgtaaacaggtcctgtataatacttaaaacacaagtgtttgatctataaatatttgattcttagtatttaaaatgcttctaatattttaaaagacaaaactccaccatgatatcacattgaacattaaaattattcccacagcaacacttatttcagagaaacaattgagaagtcagttatcttagtcaccactaaaggcacctggtgaga

SEQ ID NO: 227462 - DNA, 550 bp, Homo sapiens
gttaagataccacaaaaaaaaaaatatatatatatatagcaagagctttcttgagtaagcaaattttatacatataaaaataatttacatgcaaatgaccaagaggaaaggttaagtgactctggtgtaaataattagtttactgattctgccagagcatattaasaaaaattcactttggcaaaattatatggatttaaagaagtaacaagtgggtttctctaaagcacagtttggctttttactagaatatcaagtcacctttttgggtgaggagagtacaatgggagtgggcagctggtgcaaataaacatttaaaattacttaaaacttcaacaaatgggatccgtatttaaatgtgttttggtctgtcttccctttgttttttctaatccattccaacaatgcaaacctcagccactgtcaagggcaatctcagactggaggttgctgcctagggtgaggttctagcaagactgacaagcagagctcagggaaaagtctgcatgggaaaacagagccagacttagaaggcattgctgatgaattc

SEQ ID NO: 227463 - DNA, 421 bp, Homo sapiens
aataattagtttactgattctgccagagcatattaacaaaaattcactttggcaaaatwatatggatttaaagaagtaacaagtgggtttctctaaagcacagtttggctttttactagaatatcaagtcacctttttgggtgaggagagtacaatgggagtgggcagctggtgcaaataaacatttaaaattacttaaaacttcaacaaatgggatccgtatttaaatgtgttttggtctgtcttccctttgttttttctaatccattccaacaatgcaaacctcagccactgtcaagggcaatctcagactggaggttgctgcctagggtgaggttctagcaagactgacaagcagagctcagggaaaagtctgcatgggaaaacagagccagacttagaaggcattgctgatgaattc

SEQ ID NO: 227464 - DNA, 528 bp, Homo sapiens
agtcttaaggaattcaagacaagactagagtatgttaagataccacaaaaaaaaaaatatatatatatatagcaagagctttcttgagtaagcaaattttatacatataaaaataatttacatgcaaatgaccaagaggaaaggttaagtgactctggtgtaaataattagtttactgattctgccagagcatattaacaaaaattcactttggcaaaattatatggatttaaagaagtaacaagtgggtttctctaaagcacagtttggctttttactagaatatcaagtcacctttttgggtgaggagagtacaatgggartgggcagctggtgcaaataaacatttaaaattacttaaaacttcaacaaatgggatccgtatttaaatgtgttttggtctgtcttccctttgttttttctaatccattccaacaatgcaaacctcagccactgtcaagggcaatctcagactggaggttgctgcctagggtgaggttctagcaagactgacaagcagagctcagg

SEQ ID NO: 227465 - DNA, 557 bp, Homo sapiens
gaattcaagacaagactagagtatgttaagataccacaaaaaaaaaaatatatatatatatagcaagagctttcttgagtaagcaaattttatacatataaaaataatttacatgcaaatgaccaagaggaaaggttaagtgactctggtgtaaataattagtttactgattctgccagagcatattaacaaaaattcactttggcaaaattatatggatttaaagaagtaacaagtgggtttctctaaagcacagtttggctttttactagaatatcaagtcacctttttgggtgaggagagtacaatgggagtgggcagctggtgcaaataaacatttaaaattacttaaaacttcaacaaatgggatcygtatttaaatgtgttttggtctgtcttccctttgttttttctaatccattccaacaatgcaaacctcagccactgtcaagggcaatctcagactggaggttgctgcctagggtgaggttctagcaagactgacaagcagagctcagggaaaagtctgcatgggaaaacagagccagacttagaag

SEQ ID NO: 227466 - DNA, 569 bp, Homo sapiens
aagaagtaacaagtgggtttctctaaagcacagtttggctttttactagaatatcaagtcacctttttgggtgaggagagtacaatgggagtgggcagctggtgcaaataaacatttaaaattacttaaaacttcaacaaatgggatccgtatttaaatgtgttttggtctgtcttccctttgttttttctaatccattccaacaatgcaaacctcagccactgtcaagggcaatctcagactggaggttgctgcctagggtgaggttctagcaagactgacaagcagagctcagggaaaagtctgcatgggaaaacagagccagacttagaaggcattgctgatgaattccattttcttactacagaagagctagcaaaaactgcaatatgatgtgtaaagtcagtgtaatcttatggacattataccaagtcacaacatgaggcatgaratacctcagatgttgttccctctaaatctcatgttgaattgtgatacccccaatgttggtggtaggtctggaaggaggtgattggatcatgggggtggatttctcagaaatggtctag

SEQ ID NO: 227467 - DNA, 569 bp, Homo sapiens
aagaagtaacaagtgggtttctctaaagcacagtttggctttttactagaatatcaagtcacctttttgggtgaggagagtacaatgggagtgggcagctggtgcaaataaacatttaaaattacttaaaacttcaacaaatgggatccgtatttaaatgtgttttggtctgtcttccctttgttttttctaatccattccaacaatgcaaacctcagccactgtcaagggcaatctcagactggaggttgctgcctagggtgaggttctagcaagactgacaagcagagctcagggaaaagtctgcatgggaaaacagagccagacttagaaggcattgctgatgaattccattttcttactacagaagagctagcaaaaactgcaatatgatgtgtaaagtcagtgtaatcttatggacattataccaagtcacaacatgaggcatgaaatacctcagatgttgttccctctaaatctcatgttgaattgtgatayccccaatgttggtggtaggtctggaaggaggtgattggatcatgggggtggatttctcagaaatggtctag

SEQ ID NO: 227468 - DNA, 219 bp, Homo sapiens
tagtagaggtttgtatactaygcacctttcaccagaaaataaaaagggagaactttaagtatttgacatcatcaaaaattaggtgttatggtgctatgcttaagttttgatattatatattaattacatttcccttagtactacctcctctgaattcttgagcttgtcagtagttgaaaacatttgaacctaaaccatttttgcacattcacaactaaa

SEQ ID NO: 227469 - DNA, 312 bp, Homo sapiens
gcatgtatccatagcatctgtgtgtgtgtacattttatagattttgtctttatgtgaagaaatatactgagtatccaaataagcataatttctatacaagtgaggtatgtgggttaaaatctagygaacaaaatataactatacattcatgatttggaaaccttttaacatgattcttgaggaattactcaattgttaattgtttctaccttctctaccaaaatgactaatatttggactgaaaagaaaaaaaagaaaacctcagtaaggaaaagtggaatttctgtaggtggtaactctggaatatcccac

SEQ ID NO: 227470 - DNA, 312 bp, Homo sapiens
gcatgtatccatagcatctgtgtgtgtgtacattttatagattttgtctttatgtgaagaaatatactgagtatccaaataagcataatttctatacaagtgaggtatgtgggttaaaatctagcgaacaaaatataactatacattcatgatttggaaaccttttaacatgattcytgaggaattactcaattgttaattgtttctaccttctctaccaaaatgactaatatttggactgaaaagaaaaaaaagaaaacctcagtaaggaaaagtggaatttctgtaggtggtaactctggaatatcccac

SEQ ID NO: 227471 - DNA, 312 bp, Homo sapiens
gcatgtatccatagcatctgtgtgtgtgtacattttatagattttgtctttatgtgaagaaatatactgagtatccaaataagcataatttctatacaagtgaggtatgtgggttaaaatctagcgaacaaaatataactatacattcatgatttggaaaccttttaacatgattcttgaggaattactcaattgttaattgtttctrccttctctaccaaaatgactaatatttggactgaaaagaaaaaaaagaaaacctcagtaaggaaaagtggaatttctgtaggtggtaactctggaatatcccac

SEQ ID NO: 227472 - DNA, 195 bp, Homo sapiens
caggcccccatctgcagaggccaacagttcccagagtgaccttcctcagaaaacagggtcttggaggagacagtcagaggagggggcctcrtcctccccactgcacagccccttgtggggattggaagtgagggtctctgcccacaagttatcagtcaccctaagctgttttgtgggaggaagcatagggaatat

SEQ ID NO: 227473 - DNA, 195 bp, Homo sapiens
caggcccccatctgcagaggccaacagttcccagagtgaccttcctcagaaaacagggtcttggaggagacagtcagaggagggggcctcgtcctccccactgcacagccccttgtggggattggaagtgagggtctctgcccacaagttrtcagtcaccctaagctgttttgtgggaggaagcatagggaatat

SEQ ID NO: 227474 - DNA, 195 bp, Homo sapiens
caggcccccatctgcagaggccaacagttcccagagtgaccttcctcagaaaacagggtcttggaggagacagtcagaggagggggcctcgtcctccccactgcacagccccttgtggggattggaagtgagggtctctgcccacaagttakcagtcaccctaagctgttttgtgggaggaagcatagggaatat

SEQ ID NO: 227475 - DNA, 549 bp, Homo sapiens
accattccaagtgctatatttcttgctaataaaaccaaataacaatgttcagggtaaattttaatgaattaatgcttatratgcaaactatgctttcatctattttattcagaagcacacgattaattatacaacagatattttatatgaatgttcagagtaaagactatttttatttgcttgaatgacaacataacttattaaatgaataaatacacggattcgtcttctccatcaccatttcaggcatgtttttgtgacatctaccttcttcaccatgaactccttcctaaccaaccattatatctaaaataaattatcagcaaacataaataatgtgctattccagaactacctcacatgagctagatgatgggaggcataattcataataaacagaccctacctttaaattctataaagccacagcatttaaattctaactatgccacagagcagtaacctattctcctattaattatatcccataaaagcaatataccttcactaattaattatacttgaagtaacaactatggcttaattaaa

SEQ ID NO: 227476 - DNA, 573 bp, Homo sapiens
tggtttactaaaaccattccaagtgctatatttcttgctaataaaaccaaataacaatgttcagggtaaattttaatgaattaatgcttatgatgcaaactatgctttcatctattttattcagaagcacacgattaattatacaacagatattttatatgaatgttcagagtaaagactatttttatttgcttgaatgacaacataacttattaaatgaataaatacacggattcgtcttctccatcaccatttcaggcatgtttttgtgacatctaccttcttcaccatgaactccttcctaaccaaccattatatctaaaataaattatcagcaaacataaataatgtgctattccagaactacctcacatgagctagatgatgggaggcataattcataataaacagaccctacctttaaattctataaagccacagcatttaaattmtaactatgccacagagcagtaacctattctcctattaattatatcccataaaagcaatataccttcactaattaattatacttgaagtaacaactatggcttaattaaatgaaccattcct

SEQ ID NO: 227477 - DNA, 359 bp, Homo sapiens
tttatttgcttgaatgacaacataacttattaaatgaataaatacacggattcgtcttctccatcaccatttcaggcatgtttttgtgacatctaccttcttcaccatgaactccttcctaaccaaccattatatctaaaataaattatcagcaaacataaataatgtgctattccagaactacctcacatgagctagatgatgggaggcataattcataataaacagaccctacctttaaattctataaagccacagcatttaaattctaactatgccacagagcagtaacctattctcctattaattatatcccataaaagcaatatascttcactaattaattatacttgaagtaa

SEQ ID NO: 227478 - DNA, 569 bp, Homo sapiens
ctggggcctgactgtccacctggggactgggtgtccaccttgggtctgatgtctacctgaagttaggtatctacctaaggcttggtgtctacctgtggcctgatgtccacatgagtctggggttcggttggggcctgctgtacatctgggaccttggtgtctatctgaggcctgatgtctacctggtgactgccatcctcttgaggcctgctatccacctgggaatggtttatccatggaaatggttatgtccacctggggctggatgttgcccaggggctagatgtccacctgtggccccgtgtccacctagggcctgatgtccacctgggacatggtgttcacctgagacctgggtgtttacatagggcctgatgtccagctggtgcctaggtgcccascgggggccttctgttaacctggggactggtatccagctgggtcctaatgaccacctgggttgaattattcacctagagtttggtattcacttagggcttgagtgtcagccttggacctggtgtccacctgggccttgggtatcaaactaggggtttggtatccagttg

SEQ ID NO: 227479 - DNA, 470 bp, Homo sapiens
acgagattaatgtacacaaatcagtagctcttctatacatcaacagctaccaagctgagaatcacatcaggaactcaaccccttttacaatagctgcaaaaaacaaacaaaaaaacaaacaaaacttaggaatatacctagcaaagtaatcaaaagacctctgcaatgaaaattacaaaacactgctgaaagaaatcatagatggagccaagcacgttggcgcatgcctataatcccagctactcgggaaactgaggcaggagaatcrcttgaacccgggaggcagaagttgtagtgagccgagatcacaccattgcactcccacctcagcgacaagagcgaaactacctctgaaaaaaaaaaaaactcaatcaatcacacgaaagaaaagaaatcatagatgacacaaacaaatggaaacacatccccatgctcatggatgggtagaaccaattttgtgaaaattacca

SEQ ID NO: 227480 - DNA, 483 bp, Homo sapiens
gtgcttattcaaacttctcttctcttcttcagaggcaaacctgtataatttctttggtttgtttgttttaagacgtagtcttactctgttacccaggctagagtgcagtggtacaatgtgagstcactgcaacctccgcctcccgggttcaagcgattctccggcttcagcatcccaattaactcaggattaaacccttataatttctatcatgaatgattaattttgttcatcttcaaattccaataattagaattcctacagaatgtgtgtgtgagtgtgtatatggttattttctttagcataaataaatatttgagatttagccaaatatttgtgcgtatcatttgtttatttttcctcatatttctgagttgcctatgtatttgtcagagtttgcttattcattagtctgttagtgaatattcagattgctttcagaattagcttttacaaataaaggacttaggtacattctcaaac

SEQ ID NO: 227481 - DNA, 294 bp, Homo sapiens
tgcttattcaaacttctcttctcttcttcagaggcaaacctgtataatttctttggtttgtttgttttaagacgtagtcttactctgttacccaggctagagtgcagtggtacaatgtgaggtcactgcaacctccgcctcccgggttcaagcgattctccggcttcagcatcccaawtaactcaggattaaacccttataatttctatcatgaatgattaattttgttcatcttcaaattccaataattagaattcctacagaatgtgtgtgtgagtgtgtatatggttattt

SEQ ID NO: 227482 - DNA, 294 bp, Homo sapiens
tgcttattcaaacttctcttctcttcttcagaggcaaacctgtataatttctttggtttgtttgttttaagacgtagtcttactctgttacccaggctagagtgcagtggtacaatgtgaggtcactgcaacctccgcctcccgggttcaagcgattctccggcttcagcatcccaatwaactcaggattaaacccttataatttctatcatgaatgattaattttgttcatcttcaaattccaataattagaattcctacagaatgtgtgtgtgagtgtgtatatggttattt

SEQ ID NO: 227483 - DNA, 485 bp, Homo sapiens
atactattgtgcttattcaaacttctcttctcttcttcagaggcaaacctgtataatttctttggtttgtttgttttaagacgtagtcttactctgttacccaggctagagtgcagtggtacaatgtgaggtcactgcaacctccgcctcccgggttcaagcgattctccggcttcagcatcccaattaactcaggattaaacccttataatttctatcatgaatgattaattttgttcatcttcaaattccaataattagaattcctacagaatgtgtgtgtgagtgtgtatatggttattttctttagcataaatamatatttgagatttagccaaatatttgtgcgtatcatttgtttatttttcctcatatttctgagttgcctatgtatttgtcagagtttgcttattcattagtctgttagtgaatattcagattgctttcagaattagcttttacaaataaaggacttaggtacattc

SEQ ID NO: 227484 - DNA, 487 bp, Homo sapiens
cttattcaaacttctcttctcttcttcagaggcaaacctgtataatttctttggtttgtttgttttaagacgtagtcttactctgttacccaggctagagtgcagtggtacaatgtgaggtcactgcaacctccgcctcccgggttcaagcgattctccggcttcagcatcccaattaactcaggattaaacccttataatttctatcatgaatgattaattttgttcatcttcaaattccaataattagaattcctacagaatgtgtgtgtgagtgtgtatatggttattttctttagcataaataaatatttgagatttagccaaatatttgtgygtatcatttgtttatttttcctcatatttctgagttgcctatgtatttgtcagagtttgcttattcattagtctgttagtgaatattcagattgctttcagaattagcttttacaaataaaggacttaggtacattctcaaacaggtttt

SEQ ID NO: 227485 - DNA, 485 bp, Homo sapiens
atactattgtgcttattcaaacttctcttctcttcttcagaggcaaacctgtataatttctttggtttgtttgttttaagacgtagtcttactctgttacccaggctagagtgcagtggtacaatgtgaggtcactgcaacctccgcctcccgggttcaagcgattctccggcttcagcatcccaattaactcaggattaaacccttataatttctatcatgaatgattaattttgttcatcttcaaattccaataattagaattcctacagaatgtgtgtgtgagtgtgtatatggttattttctttagcataaataaatatttgagatttagccaaatatttgtgcgtatcatttgtttatttttcctcatatttctgagttgcctaygtatttgtcagagtttgcttattcattagtctgttagtgaatattcagattgctttcagaattagcttttacaaataaaggacttaggtacattc

SEQ ID NO: 227486 - DNA, 505 bp, Homo sapiens
atggaattcctgccagctttacctttaaagtgtagtaattccaaatgttgttgaaaattcaccttcccacccccaccacttggtaactatagcrctttccacacaaggccaagtgcacagatttcttggggaaataatgagaactattatacactcttatttcaaggacccttaaaattataggattgccatatttgatactaatttaagcttctgtcattgcccctttttcaatccagtctccacacagctaccacagtgtgcaagtagaagtctcagccatatcaccaaactcctgctttaatgtccctactccattgcttcttttctccttcagaagagtttaagcttaatgaagctgggcaactttacatatttttccatgagctggagatcacttggtgtaaggtaaaaatgaccagtaaatattttcaaataacagaatctacgaataatagtcttgtttctttgagagtacattgacttttaaaaatcaagaaaatag

SEQ ID NO: 227487 - DNA, 474 bp, Homo sapiens
gaattcctgccagctttacctttaaagtgtagtaattccaaatgttgttgaaaattcaccttcccacccccaccacttggtaactatagcgctttccacacaaggccaagtgcacagatttcttggggaaataatgagaactattatacactcttatttcaaggacccttaaaattataggattgccatatttgatactaatttaagcttctgtcattgcccytttttcaatccagtctccacacagctaccacagtgtgcaagtagaagtctcagccatatcaccaaactcctgctttaatgtccctactccattgcttcttttctccttcagaagagtttaagcttaatgaagctgggcaactttacatatttttccatgagctggagatcacttggtgtaaggtaaaaatgaccagtaaatattttcaaataacagaatctacgaataatagtcttgtttctttgagagta

SEQ ID NO: 227488 - DNA, 450 bp, Homo sapiens
aattcaccttcccacccccaccacttggtaactatagcgctttccacacaaggccaagtgcacagatttcttggggaaataatgagaactattatacactcttatttcaaggacccttaaaattataggattgccatatttgatactaatttaagcttctgtcattgcccctttttcaatccagtctccacacagctaccacagtgtgcaagtagaagtctcagccatatcaccaaactcctgctttaatgtccctactccattgcttcttttctccttcagaagagtttaagcttaatgaagctrggcaactttacatatttttccatgagctggagatcacttggtgtaaggtaaaaatgaccagtaaatattttcaaataacagaatctacgaataatagtcttgtttctttgagagtacattgacttttaaaaatcaagaaaatag

SEQ ID NO: 227489 - DNA, 551 bp, Homo sapiens
ggggaggaggcattcagggcaaaaacaccactccaaaagcataattctctgcatgcctggctgctgaaattacctgctttaagctgaaaccagttttatcaaatggytactgaaacaacctcttgaacactaagactagctttacccaccactgtccctcacctatcagagcctgccagctctcaaaaaccttactggtgccagtgaactttctcaaagagaaatacataccgtttttctctctgtctcccttttttataaaacctctaactttctctttatgttttggacatactaaagacacccattctgcatgtatgtgtgaaattgtaatacttgtatctcaaataaaacattttaatttcagatgtttgtctctatatttatttgactttgacaatctgatattatttagcattatttccagtctcccaaataatgtcaaaattttgttatgttagataggaatatcttgttattcaacttgaaggtaaactgcttgatcaatgcatgtaattccttgacagattgtcagcacctctaagacaaca

SEQ ID NO: 227490 - DNA, 551 bp, Homo sapiens
ggggaggaggcattcagggcaaaaacaccactccaaaagcataattctctgcatgcctggctgctgaaattacctgctttaagctgaaaccagttttatcaaatggttactgaaacaacctcttgaacactaagactagctttacccaccactgtccctcacctatcagagcctgccagctctcaaaaacyttactggtgccagtgaactttctcaaagagaaatacataccgtttttctctctgtctcccttttttataaaacctctaactttctctttatgttttggacatactaaagacacccattctgcatgtatgtgtgaaattgtaatacttgtatctcaaataaaacattttaatttcagatgtttgtctctatatttatttgactttgacaatctgatattatttagcattatttccagtctcccaaataatgtcaaaattttgttatgttagataggaatatcttgttattcaacttgaaggtaaactgcttgatcaatgcatgtaattccttgacagattgtcagcacctctaagacaaca

SEQ ID NO: 227491 - DNA, 551 bp, Homo sapiens
ggggaggaggcattcagggcaaaaacaccactccaaaagcataattctctgcatgcctggctgctgaaattacctgctttaagctgaaaccagttttatcaaatggttactgaaacaacctcttgaacactaagactagctttacccaccactgtccctcacctatcagagcctgccagctctcaaaaaccttactggtgccagtgaactttctcaaagagaaatacataccgtttttctctctgtctcccttttttataaaacctctaactttctctttatgttttgkacatactaaagacacccattctgcatgtatgtgtgaaattgtaatacttgtatctcaaataaaacattttaatttcagatgtttgtctctatatttatttgactttgacaatctgatattatttagcattatttccagtctcccaaataatgtcaaaattttgttatgttagataggaatatcttgttattcaacttgaaggtaaactgcttgatcaatgcatgtaattccttgacagattgtcagcacctctaagacaaca

SEQ ID NO: 227492 - DNA, 551 bp, Homo sapiens
ggggaggaggcattcagggcaaaaacaccactccaaaagcataattctctgcatgcctggctgctgaaattacctgctttaagctgaaaccagttttatcaaatggttactgaaacaacctcttgaacactaagactagctttacccaccactgtccctcacctatcagagcctgccagctctcaaaaaccttactggtgccagtgaactttctcaaagagaaatacataccgtttttctctctgtctcccttttttataaaacctctaactttctctttatgttttggacatactaaagacacccattctgcatgtatgtgtgaarttgtaatacttgtatctcaaataaaacattttaatttcagatgtttgtctctatatttatttgactttgacaatctgatattatttagcattatttccagtctcccaaataatgtcaaaattttgttatgttagataggaatatcttgttattcaacttgaaggtaaactgcttgatcaatgcatgtaattccttgacagattgtcagcacctctaagacaaca

SEQ ID NO: 227493 - DNA, 286 bp, Homo sapiens
tggcatctattggtacatgttggacattaactaaaaatgtatagttttagcaaccaacagattctattcttatacctgttggtcatgtccaggcagttatgtgtaaaataattacacaatgtttcaaaatttcaagatgtttgcctacctatatagtgtccttcactctcctcyccagctctccaaataatatccataattcaaagaccagttaaatcctacaggcatattcacagaataactgccctgaaaacattgcttaaattaatgaagaccatctatggac

SEQ ID NO: 227494 - DNA, 286 bp, Homo sapiens
tggcatctattggtacatgttggacattaactaaaaatgtatagttttagcaaccaacagattctattcttatacctgttggtcatgtccaggcagttatgtgtaaaataattacacaatgtttcaaaatttcaagatgtttgcctacctatatagtgtccttcactctcctccccagctytccaaataatatccataattcaaagaccagttaaatcctacaggcatattcacagaataactgccctgaaaacattgcttaaattaatgaagaccatctatggac

SEQ ID NO: 227495 - DNA, 562 bp, Homo sapiens
acacaaagaaatataactcactgttttagcctagcactagtgtttacagaccaagttacagaatattctgcaatawgaaacaatcctaaagtgtttttaaccttaaatcaaaattcaaattagaattagaaatgaaatgatgttctcatttcagcaatgaatacagaagtgaaatcacttgatttttctgaagactgtatttttcagtgttcatctagatttaacactttaaagaataccttttattccttaaataacattcagtttgtgaaagtaagcacacctttttcagctccgcttattctgcggaaggatccttccatatcaaggattaacacaatatgcatcgtgggttcacaaagttcagtttgcagctatccttagcaaatcatggaaccatctagactgattgatgtggagattgaaagtaattgatcctgccattgagaagctttttgaaacatgaaattaaacaagatgatattaagcattctgaagtccagcagagtggcacatcaaatgtgttactagctgttccttttcctttgtatttttataaaga

SEQ ID NO: 227496 - DNA, 562 bp, Homo sapiens
acacaaagaaatataactcactgttttagcctagcactagtgtttacagaccaagttacagaatattctgcaatatgaaacaatcctaaagtgtttttaaccttaaatcaaaattcaaattagaattagaaatgaaatgatgttctcatttcagcaatgaatacagaagtgaaatcacttgatttttctgaagactgtatttttcagtgttcatctrgatttaacactttaaagaataccttttattccttaaataacattcagtttgtgaaagtaagcacacctttttcagctccgcttattctgcggaaggatccttccatatcaaggattaacacaatatgcatcgtgggttcacaaagttcagtttgcagctatccttagcaaatcatggaaccatctagactgattgatgtggagattgaaagtaattgatcctgccattgagaagctttttgaaacatgaaattaaacaagatgatattaagcattctgaagtccagcagagtggcacatcaaatgtgttactagctgttccttttcctttgtatttttataaaga

SEQ ID NO: 227497 - DNA, 562 bp, Homo sapiens
acacaaagaaatataactcactgttttagcctagcactagtgtttacagaccaagttacagaatattctgcaatatgaaacaatcctaaagtgtttttaaccttaaatcaaaattcaaattagaattagaaatgaaatgatgttctcatttcagcaatgaatacagaagtgaaatcacttgatttttctgaagactgtatttttcagtgttcatctagatttaacactttaaagaataccttttattccttaaataacattcagtttgtgaaagtaagcacacctttttcagctccgcttattctgcrgaaggatccttccatatcaaggattaacacaatatgcatcgtgggttcacaaagttcagtttgcagctatccttagcaaatcatggaaccatctagactgattgatgtggagattgaaagtaattgatcctgccattgagaagctttttgaaacatgaaattaaacaagatgatattaagcattctgaagtccagcagagtggcacatcaaatgtgttactagctgttccttttcctttgtatttttataaaga

SEQ ID NO: 227498 - DNA, 562 bp, Homo sapiens
acacaaagaaatataactcactgttttagcctagcactagtgtttacagaccaagttacagaatattctgcaatatgaaacaatcctaaagtgtttttaaccttaaatcaaaattcaaattagaattagaaatgaaatgatgttctcatttcagcaatgaatacagaagtgaaatcacttgatttttctgaagactgtatttttcagtgttcatctagatttaacactttaaagaataccttttattccttaaataacattcagtttgtgaaagtaagcacacctttttcagctccgcttattctgcggaaggatccttccatatcaaggattaacacaatatgcatcgtgggttcacaaagttcagtttgcagctatccttagcaaatcatggaaccatctrgactgattgatgtggagattgaaagtaattgatcctgccattgagaagctttttgaaacatgaaattaaacaagatgatattaagcattctgaagtccagcagagtggcacatcaaatgtgttactagctgttccttttcctttgtatttttataaaga

SEQ ID NO: 227499 - DNA, 499 bp, Homo sapiens
agaatggaacagaaatagaagctaaaagatctagatattgatgtagtgatcaaaggcatacagctggtttactttgttataataatattttatgtggtacatgaagactttgatcccttgacaaatgtcatttgtaggtgagcaattattaataggattgtaagtcttaatatgcaaggatcaccattaataaaagtagaytattgtaaagtgaattagcaataattttacttatgaataaaaacttatactatttcaggtcattttcttattgtttcttgaaaaaagaagtcctttataagtccagttaaatattacctaatttttgcatcaaatttcatggtaaacaaggcttattttcttactttactgatgtctaaaagctaaatttcactggtgatatatcatttgtttaagactaggtaactgataacctaagctgagacccaaaatttgtatttttctttattacaagcacaatattttccatcatggtata

SEQ ID NO: 227500 - DNA, 499 bp, Homo sapiens
agaatggaacagaaatagaagctaaaagatctagatattgatgtagtgatcaaaggcatacagctggtttactttgttataataatattttatgtggtacatgaagactttgatcccttgacaaatgtcatttgtaggtgagcaattattaataggattgtaagtcttaatatgcaaggatcaccattaataaaagtagattattgtaaagtgaattagcaataattttacttatgaataaaaacttatactatttcaggtcattttcttattgtttcttgaaaaaakaagtcctttataagtccagttaaatattacctaatttttgcatcaaatttcatggtaaacaaggcttattttcttactttactgatgtctaaaagctaaatttcactggtgatatatcatttgtttaagactaggtaactgataacctaagctgagacccaaaatttgtatttttctttattacaagcacaatattttccatcatggtata

SEQ ID NO: 227501 - DNA, 324 bp, Homo sapiens
acccggcagcttcaggggctgcctgggggtgggtgttacctgctgtatatctgtgtgcgttatgggggtgtgtgtgcgcgtctgtgtgtctgtgtgtgtgcgcgcgcgcgcaagtgcgtgtctgtgtgcccactacygtctctctcttaagtctctctctctctctctctcccttctcgctctttccgtcgccctctctttctgtctctgtccgtctgtgtgtgcgtgcgccttgggacacatgttccctgtgcgccggaggctgggtttcttgcacgtcggcctttcttctggtcagcctctccccgcgtccctgcctgggtg

SEQ ID NO: 227502 - DNA, 324 bp, Homo sapiens
acccggcagcttcaggggctgcctgggggtgggtgttacctgctgtatatctgtgtgcgttatgggggtgtgtgtgcgcgtctgtgtgtctgtgtgtgtgcgcgcgcgcgcaagtgcgtgtctgtgtgcccactactgtctctctcttaagtctctctctctcyctctctcccttctcgctctttccgtcgccctctctttctgtctctgtccgtctgtgtgtgcgtgcgccttgggacacatgttccctgtgcgccggaggctgggtttcttgcacgtcggcctttcttctggtcagcctctccccgcgtccctgcctgggtg

SEQ ID NO: 227503 - DNA, 290 bp, Homo sapiens
acccataaaaaataagggaagtgtatttgcccgactggtcttgcatcttgcctgaccacaatgaatttgcatcagattttaaactcacagagttataaaatatcttaatgtgttaagagggaaycaaaagtgaatgtgattaacttgaaggaactagttggcagactttaacattaggctagcagaaactatttaataaataaaactgaaagcagaaaaatacttttcttaaataattattagtggcagattgatactgttaatattattgattcagtctgggaagtcct

SEQ ID NO: 227504 - DNA, 424 bp, Homo sapiens
ttaactacactagttccagctcctttgtcttgtcatatttcacaatttactactctgtgtctacttcagaacataagtgattatgtcatggagtcttccttccttaaagaatctctcatgccacataatrcatgtattaaataaatttgtatgcattttcctgttgatctgtcttatatcaatttaattctcaggcttagcagaggaaaaaaaaaaaactaagaagatggtaataaaattttgcttcccctaccatcccatctgttttttgcttattttccctcttgtttgccttcttttctatgaattaaatatattttacggtttcatcttatctccttttttacttgagaattaaaactctctatattgttaattttaatggttgcttttgagtttgtagtatacatgtttaactcatcac

SEQ ID NO: 227505 - DNA, 424 bp, Homo sapiens
ttaactacactagttccagctcctttgtcttgtcatatttcacaatttactactctgtgtctacttcagaacataagtgattatgtcatggagtcttccttccttaaagaatctctcatgccacataatgcatgtattaaataaatttgtatgcattttcctgttgatctgtcttatatcaatttaattctcaggcttagcagaggaaaaaaaaaaaactaagaagatggtaataaaattttgcttcccctaccatcccatctgttttttgcttattttccctcttgtttgccttmttttctatgaattaaatatattttacggtttcatcttatctccttttttacttgagaattaaaactctctatattgttaattttaatggttgcttttgagtttgtagtatacatgtttaactcatcac

SEQ ID NO: 227506 - DNA, 548 bp, Homo sapiens
taactatgtctattgttctcttcagaacatctgttgagtttttaatccaagagctattatcagtattttctaaaatgyaacctcttcttgcatgtttctgaagatatgaattacacttactgtaattacatttgtttcttgtcttaattctgattctctgaaattacttattctgtttgctaagttttgtatcttctttcttgtttttcttaaaagttgggtgacaatattttacatgggtagtttttctgttaatcatagcttatctccaatgattaggaaaataacaactatgaagtaggacaaagtaacctggtttcttgtgttttagcattgctgctccctgttccttcctggttttgttaattacctgagactctgccctgttgatgttagtcagattctaagactcaccttgccaagcaagcactgctttgttattccaaagtgaagttcattcttactttgtctggaaagcagtctctgcatcttttacctcattatttccctcctttcatattatgtttcttcctttaccaattttaatg

SEQ ID NO: 227507 - DNA, 545 bp, Homo sapiens
ctatgtctattgttctcttcagaacatctgttgagtttttaatccaagagctattatcagtattttctaaaatgcaacctcttcttgcatgtytctgaagatatgaattacacttactgtaattacatttgtttcttgtcttaattctgattctctgaaattacttattctgtttgctaagttttgtatcttctttcttgtttttcttaaaagttgggtgacaatattttacatgggtagtttttctgttaatcatagcttatctccaatgattaggaaaataacaactatgaagtaggacaaagtaacctggtttcttgtgttttagcattgctgctccctgttccttcctggttttgttaattacctgagactctgccctgttgatgttagtcagattctaagactcaccttgccaagcaagcactgctttgttattccaaagtgaagttcattcttactttgtctggaaagcagtctctgcatcttttacctcattatttccctcctttcatattatgtttcttcctttaccaattttaatg

SEQ ID NO: 227508 - DNA, 548 bp, Homo sapiens
taactatgtctattgttctcttcagaacatctgttgagtttttaatccaagagctattatcagtattttctaaaatgcaacctcttcttgcatgtttctgaagatatgaattacacttactgtaattacatttgtttcttktcttaattctgattctctgaaattacttattctgtttgctaagttttgtatcttctttcttgtttttcttaaaagttgggtgacaatattttacatgggtagtttttctgttaatcatagcttatctccaatgattaggaaaataacaactatgaagtaggacaaagtaacctggtttcttgtgttttagcattgctgctccctgttccttcctggttttgttaattacctgagactctgccctgttgatgttagtcagattctaagactcaccttgccaagcaagcactgctttgttattccaaagtgaagttcattcttactttgtctggaaagcagtctctgcatcttttacctcattatttccctcctttcatattatgtttcttcctttaccaattttaatg

SEQ ID NO: 227509 - DNA, 488 bp, Homo sapiens
cagtattttctaaaatgcaacctcttcttgcatgtttctgaagatatgaattacacttactgtaattacatttgtttcttgtcttaattctgattctctgaaattacttattctgtttgctaagttttgtatcttytttcttgtttttcttaaaagttgggtgacaatattttacatgggtagtttttctgttaatcatagcttatctccaatgattaggaaaataacaactatgaagtaggacaaagtaacctggtttcttgtgttttagcattgctgctccctgttccttcctggttttgttaattacctgagactctgccctgttgatgttagtcagattctaagactcaccttgccaagcaagcactgctttgttattccaaagtgaagttcattcttactttgtctggaaagcagtctctgcatcttttacctcattatttccctcctttcatattatgtttcttcctttaccaattttaatg

SEQ ID NO: 227510 - DNA, 488 bp, Homo sapiens
cagtattttctaaaatgcaacctcttcttgcatgtttctgaagatatgaattacacttactgtaattacatttgtttcttgtcttaattctgattctctgaaattacttattctgtttgctaagttttgtatcttctttyttgtttttcttaaaagttgggtgacaatattttacatgggtagtttttctgttaatcatagcttatctccaatgattaggaaaataacaactatgaagtaggacaaagtaacctggtttcttgtgttttagcattgctgctccctgttccttcctggttttgttaattacctgagactctgccctgttgatgttagtcagattctaagactcaccttgccaagcaagcactgctttgttattccaaagtgaagttcattcttactttgtctggaaagcagtctctgcatcttttacctcattatttccctcctttcatattatgtttcttcctttaccaattttaatg

SEQ ID NO: 227511 - DNA, 488 bp, Homo sapiens
cagtattttctaaaatgcaacctcttcttgcatgtttctgaagatatgaattacacttactgtaattacatttgtttcttgtcttaattctgattctctgaaattacttattctgtttgctaagttttgtatcttctttcttgtttttcttaaaagttrggtgacaatattttacatgggtagtttttctgttaatcatagcttatctccaatgattaggaaaataacaactatgaagtaggacaaagtaacctggtttcttgtgttttagcattgctgctccctgttccttcctggttttgttaattacctgagactctgccctgttgatgttagtcagattctaagactcaccttgccaagcaagcactgctttgttattccaaagtgaagttcattcttactttgtctggaaagcagtctctgcatcttttacctcattatttccctcctttcatattatgtttcttcctttaccaattttaatg

SEQ ID NO: 227512 - DNA, 425 bp, Homo sapiens
catggggtcaagaaatgaaaagcataaaaattgaaaagtgaaaagaaaaaatatttttattcacagaacttatgtatgtatattgtgtatgaagaaaatcctaatacatttatttaaaaagctgtgaataataagaatcaaattcaataatggtgcagaatrtgtagaatgcaaggtcaatacataaaatacaatatgtaaaattaatggaatttctaaatactagaaataaacaattgagaatacatttaaaagtaaaattttaatggtataaaaatagttaagaataatttaagtgaaacctttaaaaatctttcacactaaaactttttaaaatttcttgtagagaaacattacagaagacctaaataaatgtaaagaactaccatattcatagatttgaagatgcaacattgtttgatgtg

SEQ ID NO: 227513 - DNA, 384 bp, Homo sapiens
ttattatttatttagcaacctcatgagcttgggcttcaaaaatacctgatttacaaagcataatcctagtgctggagaacagatcagtggctgccaaaggttagggttggttggaagatgtgattagtgagggataacrtgaaaacatgtactttctttgtggtgatagagcagttctgcatccagattatggtgatggttacataaatccacacttcatagacctatacacacacatcacacatacactcacacacacctacacaagagtacatgtaaaatccttggaaatatgaatagggtctgaactggagttaatggtatggaaacaatgtcaatttcctgatttggcaaagtactaggttaagttagatataattactg

SEQ ID NO: 227514 - DNA, 384 bp, Homo sapiens
ttattatttatttagcaacctcatgagcttgggcttcaaaaatacctgatttacaaagcataatcctagtgctggagaacagatcagtggctgccaaaggttagggttggttggaagatgtgattagtgagggataacgtgaaaacatgtactttctttgtggtgatagagcagttctgcatccagattatggtgatggttacataaatccrcacttcatagacctatacacacacatcacacatacactcacacacacctacacaagagtacatgtaaaatccttggaaatatgaatagggtctgaactggagttaatggtatggaaacaatgtcaatttcctgatttggcaaagtactaggttaagttagatataattactg

SEQ ID NO: 227515 - DNA, 384 bp, Homo sapiens
ttattatttatttagcaacctcatgagcttgggcttcaaaaatacctgatttacaaagcataatcctagtgctggagaacagatcagtggctgccaaaggttagggttggttggaagatgtgattagtgagggataacgtgaaaacatgtactttctttgtggtgatagagcagttctgcatccagattatggtgatggttacataaatccacacttcatagayctatacacacacatcacacatacactcacacacacctacacaagagtacatgtaaaatccttggaaatatgaatagggtctgaactggagttaatggtatggaaacaatgtcaatttcctgatttggcaaagtactaggttaagttagatataattactg

SEQ ID NO: 227516 - DNA, 384 bp, Homo sapiens
ttattatttatttagcaacctcatgagcttgggcttcaaaaatacctgatttacaaagcataatcctagtgctggagaacagatcagtggctgccaaaggttagggttggttggaagatgtgattagtgagggataacgtgaaaacatgtactttctttgtggtgatagagcagttctgcatccagattatggtgatggttacataaatccacacttcatagacctatacacacacatcacacatacactcacacacacctacacaagagtacatgtaaaatccttrgaaatatgaatagggtctgaactggagttaatggtatggaaacaatgtcaatttcctgatttggcaaagtactaggttaagttagatataattactg

SEQ ID NO: 227517 - DNA, 452 bp, Homo sapiens
tgagggataacgtgaaaacatgtactttctttgtggtgatagagcagttctgcatccagattatggtgatggttacataaatccacacttcatagacctatacacacacatcacacatacactcacacacacctacacaagagtacatgtaaaatccttggaaatatgaayagggtctgaactggagttaatggtatggaaacaatgtcaatttcctgatttggcaaagtactaggttaagttagatataattactggggaaagttggctgaaaataagacggtcattctttttactattttttaacttcttgtgagtaaaattatttaaaaataattggtattaaagacaaaaaatctaaaatttctaaaatcaaagcccttatgaatttaaacatattatttgatttattttgtagaccttgatttcttcacctgtaaaaatggaatgat

SEQ ID NO: 227518 - DNA, 452 bp, Homo sapiens
tgagggataacgtgaaaacatgtactttctttgtggtgatagagcagttctgcatccagattatggtgatggttacataaatccacacttcatagacctatacacacacatcacacatacactcacacacacctacacaagagtacatgtaaaatccttggaaatatgaatagggtctgaactggagttaatggtatggaaacaatgtcaatttcctgatttggcaaagtactaggttaagttagatataattactggggaaagttggctgaaaataasacggtcattctttttactattttttaacttcttgtgagtaaaattatttaaaaataattggtattaaagacaaaaaatctaaaatttctaaaatcaaagcccttatgaatttaaacatattatttgatttattttgtagaccttgatttcttcacctgtaaaaatggaatgat

SEQ ID NO: 227519 - DNA, 452 bp, Homo sapiens
tgagggataacgtgaaaacatgtactttctttgtggtgatagagcagttctgcatccagattatggtgatggttacataaatccacacttcatagacctatacacacacatcacacatacactcacacacacctacacaagagtacatgtaaaatccttggaaatatgaatagggtctgaactggagttaatggtatggaaacaatgtcaatttcctgatttggcaaagtactaggttaagttagatataattactggggaaagttggctgaaaataagacggtcattctttttactattttttaacttcttgtgagtmaaattatttaaaaataattggtattaaagacaaaaaatctaaaatttctaaaatcaaagcccttatgaatttaaacatattatttgatttattttgtagaccttgatttcttcacctgtaaaaatggaatgat

SEQ ID NO: 227520 - DNA, 452 bp, Homo sapiens
tgagggataacgtgaaaacatgtactttctttgtggtgatagagcagttctgcatccagattatggtgatggttacataaatccacacttcatagacctatacacacacatcacacatacactcacacacacctacacaagagtacatgtaaaatccttggaaatatgaatagggtctgaactggagttaatggtatggaaacaatgtcaatttcctgatttggcaaagtactaggttaagttagatataattactggggaaagttggctgaaaataagacggtcattctttttactattttttaacttcttgtgagtaaaattatttaaaaataattggtattaaagacaaaaaatctaaaatttctaaaatcaaagcccttatgaatttraacatattatttgatttattttgtagaccttgatttcttcacctgtaaaaatggaatgat

SEQ ID NO: 227521 - DNA, 473 bp, Homo sapiens
gttaaatttcactaagtttatttgaccaagaaaaaggtttgagaactaggcaccatcccagaacgaagattgttcagagtgactccacatccagagtggtgagatgtatttatraccagaacatagaaaattatattcagagtttccctgattggtgcagttcaatatttgccttatttgggcataatttggcagcattcagtttgggattgactaagggtttggctcctatgattggttgagtctcagttgcttggttacaagtccatacatctacattagcttacaacttatttacacgttaagttagagtacagtcactatgtatggatgccactttgggccaaacctaattaggcaagtacaatgggcactttgagccaaacttaactcagtttaacaatgttctctagtatttgttttactttattgtatttgtttgattcaatatagcaaatgcttctttagactta

SEQ ID NO: 227522 - DNA, 473 bp, Homo sapiens
gttaaatttcactaagtttatttgaccaagaaaaaggtttgagaactaggcaccatcccagaacgaagattgttcagagtgactccacatccagagtggtgagatgtatttataaccagaacatagaaaattatattcagagtttccctgattggtgcagttcaatatttgccttatttgggcataatttgrcagcattcagtttgggattgactaagggtttggctcctatgattggttgagtctcagttgcttggttacaagtccatacatctacattagcttacaacttatttacacgttaagttagagtacagtcactatgtatggatgccactttgggccaaacctaattaggcaagtacaatgggcactttgagccaaacttaactcagtttaacaatgttctctagtatttgttttactttattgtatttgtttgattcaatatagcaaatgcttctttagactta

SEQ ID NO: 227523 - DNA, 473 bp, Homo sapiens
gttaaatttcactaagtttatttgaccaagaaaaaggtttgagaactaggcaccatcccagaacgaagattgttcagagtgactccacatccagagtggtgagatgtatttataaccagaacatagaaaattatattcagagtttccctgattggtgcagttcaatatttgccttatttgggcataatttggcagcattcagtttgggattgactaagggtttggctcctatgattggttgagtctcagttgcttggttacaagtccatacatctacattagcttacaacttatttacacgttaagttagagtacagtcactatgtatggatgccactttgggccaaacytaattaggcaagtacaatgggcactttgagccaaacttaactcagtttaacaatgttctctagtatttgttttactttattgtatttgtttgattcaatatagcaaatgcttctttagactta

SEQ ID NO: 227524 - DNA, 473 bp, Homo sapiens
gttaaatttcactaagtttatttgaccaagaaaaaggtttgagaactaggcaccatcccagaacgaagattgttcagagtgactccacatccagagtggtgagatgtatttataaccagaacatagaaaattatattcagagtttccctgattggtgcagttcaatatttgccttatttgggcataatttggcagcattcagtttgggattgactaagggtttggctcctatgattggttgagtctcagttgcttggttacaagtccatacatctacattagcttacaacttatttacacgttaagttagagtacagtcactatgtatggatgccactttgggccaaacctaattaggcaagtacaatgggcactttgagccaaacttaactcagtttaacaatgktctctagtatttgttttactttattgtatttgtttgattcaatatagcaaatgcttctttagactta

SEQ ID NO: 227525 - DNA, 589 bp, Homo sapiens
agtaccctttcatttccctgtaggtgaacactcctcyagccctgccttttgtcagtctggagcccttgttctaatctgtacacaccagaggactttacaaggctttccccagcctccagaattattcttctgatccaccctctactaaactcaccctttcctcagtgctaggacgttgaaaaaccgaaacaaggcaaagggccaattgtaataattcacactaaggcatgagtgactaggtttagtatattaacactacctaggatattctatttcttccaaaaggatcctgttaatccttgaaatttaacaactaatggtatagattctaagcactgtgagtacttgtcagtgggggaaagacatttttgggctgagagactttgccactgggaagagagagaggatgaggaggagaagggggatagggaggaaaaagagaaaaaagaaagaaagatgattagatgatagatggatggattgatggatggatggaaaaaaataacatgagagagtggtaaaaagcacagaatctggaaccagactgtatcttagctgggtcacttactatgtaacttagggaaagctt

SEQ ID NO: 227526 - DNA, 550 bp, Homo sapiens
tgatagtgataattgagtgaatccaaaactaaattctttcaaatttcagttttgaaatgtttcacctttaaaataccatggtgagtaaactcctgtggggaagctatgttaccacacatttgctgtgatgggaagtgaagttcaacagcattactgtgaaatcatttgcatatggaggtgactcaggagttctacttccctgagttgggaagctcctgcaagccagctrcctcatttccattggagacacggcctcagtgcaagtgaagcttggtggttgccttgttctaagtgcagaaggttcagacttttggtatagctgaactcaatcccaaaaccactgtatgcaaatgacaagatggattgggagtagaatgccaattaagtaatttacaatacaaaatggaattgtcaaacaaatcaggtcctcaaacctggttggtcatttgctttgctccaggaagaactcccccttggaaaaaccatcagtgccggaagatttcctattgtgttgatccatggcaaaggagactgcagatacacaagggat

SEQ ID NO: 227527 - DNA, 570 bp, Homo sapiens
aagcttggtggttgccttgttctaagtgcagaaggttcagacttttggtatagctgaactcaatcccaaaaccactgtatgcaaatgacaagatggattgggagtagaatgccaattaagtaatttacaatacaaaatggaattgtcaaacaaatcaggtcctcaaacctggttggtcatttgctttgctccaggaagaactcccccttggaaaaaccatcagtgccggaagatttcctattgtgttgatccatggcaaaggagactgcagatacacargggatattatggagcccagacgacctgaataaaacccttccctactacaaggacagctgtcccttccctacacactccctacaggctgatgagagaccttttttggaagcagaaacttatactttatgctgccttcttcctgactgccaggattatactcttcctttccatcccagatctagcaatgctgttgatgaggctaagtcatgatgatttctttaatatcttggaacacagtagatgcctgatatttgcggatggactggagaaaaactgaaagtataaaccaca

SEQ ID NO: 227528 - DNA, 621 bp, Homo sapiens
tgtgctgtgtggcaattaagaatgccaatttgtgtgatcacaggcaagttgcagtttgatgaaaggaaagcagaggtgaatatataaccagggtcatcctttctttctccctctctctctttctgtcatttatttgccaagctcttaactagaacttgctatgtgctaggtactggatatatcaaagcaaactcagcctggtctttgccttcaaagatttgcaggatagtgggaagaaaaacttgaatcagaggacatctgcagtgggaatcattcaagcagcagaaaacccaaaagttacttatactgtgaaatctgatcagagaatggactgtcctggttagtaaaatatcctggaggataaagattggccatgcattccacatatgaattaccactttcccaagaattaaaacatggtacgaaagaaaggaaygaacatttgctgagtgcctactgcctgccagatctaggcacttcacatgtaacacctcgtccagcctccaccacaatactgagaggtagagttcaacctcattttatagataaagaggctgaagctcataaagattaaaggacggactcacagtcaaaggactcctaatcctgagtcagcatttg

SEQ ID NO: 227529 - DNA, 553 bp, Homo sapiens
tgttcacctcatggtccttgatggggtcctcccttcccaaatctatgggctccataagggcawtatattgaaatctggagggacagagggagagttttcctttagaaactttcagaagtggactcctctaattcagactcagtatttcctattctgtgaaaagcactattcacctgccggggacatagcaatagagcagacagatttctgcttatgtggagcttaccttctagttggggaggtagatcattatactacaaaatatgtagtatagcatcagttagggatacattttatgaacaaaataaaatagtattagaagatggaggttgctggggagtcagactgggggtattttagatggggaggtttcaggacactctttccctatcaaagcatactcagttgtgtcacgctgaagtttatctttgcattgtcttgaaaaaaactaatggtttttcaaaacagccaacagggcaaatcaaagacgactgttgaacgcagtcaatagagtgatttttttttctgctctgctcacagaatgaaaggttca

SEQ ID NO: 227530 - DNA, 553 bp, Homo sapiens
tgttcacctcatggtccttgatggggtcctcccttcccaaatctatgggctccataagggcattatattgaaatctggagggacagaggragagttttcctttagaaactttcagaagtggactcctctaattcagactcagtatttcctattctgtgaaaagcactattcacctgccggggacatagcaatagagcagacagatttctgcttatgtggagcttaccttctagttggggaggtagatcattatactacaaaatatgtagtatagcatcagttagggatacattttatgaacaaaataaaatagtattagaagatggaggttgctggggagtcagactgggggtattttagatggggaggtttcaggacactctttccctatcaaagcatactcagttgtgtcacgctgaagtttatctttgcattgtcttgaaaaaaactaatggtttttcaaaacagccaacagggcaaatcaaagacgactgttgaacgcagtcaatagagtgatttttttttctgctctgctcacagaatgaaaggttca

SEQ ID NO: 227531 - DNA, 553 bp, Homo sapiens
tgttcacctcatggtccttgatggggtcctcccttcccaaatctatgggctccataagggcattatattgaaatctggagggacagagggagagttttcctttagaaactttcagaagtggactcctctaattcagactcagtatttcctatyctgtgaaaagcactattcacctgccggggacatagcaatagagcagacagatttctgcttatgtggagcttaccttctagttggggaggtagatcattatactacaaaatatgtagtatagcatcagttagggatacattttatgaacaaaataaaatagtattagaagatggaggttgctggggagtcagactgggggtattttagatggggaggtttcaggacactctttccctatcaaagcatactcagttgtgtcacgctgaagtttatctttgcattgtcttgaaaaaaactaatggtttttcaaaacagccaacagggcaaatcaaagacgactgttgaacgcagtcaatagagtgatttttttttctgctctgctcacagaatgaaaggttca

SEQ ID NO: 227532 - DNA, 553 bp, Homo sapiens
tgttcacctcatggtccttgatggggtcctcccttcccaaatctatgggctccataagggcattatattgaaatctggagggacagagggagagttttcctttagaaactttcagaagtggactcctctaattcagactcagtatttcctattctgtgaaaagcactattcacctgccggggacatagcaatagagcagacagatttctgcttatgtggagcttaccttctagttggggaggtagatcattatactacaaaatatgtagtatagcatcagttagggatacattttatgaacaaaataaaayagtattagaagatggaggttgctggggagtcagactgggggtattttagatggggaggtttcaggacactctttccctatcaaagcatactcagttgtgtcacgctgaagtttatctttgcattgtcttgaaaaaaactaatggtttttcaaaacagccaacagggcaaatcaaagacgactgttgaacgcagtcaatagagtgatttttttttctgctctgctcacagaatgaaaggttca

SEQ ID NO: 227533 - DNA, 469 bp, Homo sapiens
caaagcatagttgggccccacagagttggaaggtaattcaggctctggaaggctactcaggggaaaatgcaagattcgtgaacgtgtcattttgatgcccttccacatgaagttcaaacaagaaggccatggtcatgagaatcacacaaaagataagaagcttctctccaataccctctccaaatgggagagaagagtcagctagagtgaattggagattacatggtgataaagtaaacatggaaacttcccagagacatgtttgtcagaggatatttacaatagttacaaatgtgccctycatgcaagtataaactccccccaaaataaacagccaaactactccaaacatccttagtaaaccatacaccacacagggactgccttacctaagtaactggagaaggactcagttgcacatctgggtcaatatgaagaataacagaagcaaaagcttgcaggcattgat

SEQ ID NO: 227534 - DNA, 556 bp, Homo sapiens
actgttcatcagacaccagtattgctgccagtgtsagcaggcctatgagtcaaacccagtggcaagagacatccctttggtcatggtttcccaagtggaagaaaaagatctcaggagaacttttagcagccataaacaccaaacacatcaaaagccctcactgctgctgcaggcactcacataattgatcactgccctctaaactttaccaacgcttactgcagatgacatagctgtacagagactatgctgctgcaccctcaccagagtcagaattgctgcaccctacatagccagcacccttgcatgttcccataaaagaagatccttccccaccaaaaccatcccagaaatcagacagacagaggggattatttcactgccttgaaaactttgagtgtatagtcttggttgcaagcaaattcaagcattaacagaaggccacaagaaacatgaaaagcaagggaaacatatcatcacaaaaagaatacaataatttcccagtagctgaccccaaagaaacagaaatttctgaactgccaaagaattcaaaata

SEQ ID NO: 227535 - DNA, 616 bp, Homo sapiens
ttcccctggttaggtgttaggttgagatgtctatagagatttttctctcaaatgaaaattcttttttggtttgctgcttataaaactaattcctctttatgatggaaatacaaataatataaacatgaaaacaaaggagaaagtcaaagtatctcaccctttcatgattcattttttatccgtctaagagggcattttcactcttcacaatagcaaagacatggaatcaacttagatgtttatcaatggtgcactggataaagaaaatgtagtacaccatggamtactacgaaggcatcaaaaagaatgaaatcatgtcctttgcagcaacatggatgtaactggaggccatcatcctaagcaaattaacacagaaacagaaaaccaaatactgcatgttctcacttataagtgggagctaaacattaggtacacgtggacataaagatgggagcaatagacactgaagactactagagaaaggttgaaaaaccaactattgggtactacgctcactatctgggtgatgatatatcatttgtagcccaaacctcagcatcatgcaatatacccatgtaacaaacctggacatgcaccccacgaatgtcaaacaaaa

SEQ ID NO: 227536 - DNA, 436 bp, Homo sapiens
tattttgttctcatatatatgtactccygattatttttaaattgtggctactaacttttttagtctcattctgttgttatttctgctaactcttgctcattatgtctttttttcctttaacttaaaaaaataactttttttaagagacagggtctcactctgtcaacccagctgtagtgcaatggggtgtagcttactgtagcctcaaactcctgggctcaagtgatccttccatgtcagcctcctgcatagctgggactacaggtgtgtactactatgcccagctaattttttttttaattttgtgcagagataagatcttgctatgttgcccatgctggccccaaactcccgaactcaagtgatcctcttgcctaggcttcccagagtgctgggattataagcgtgagccactgcgccgagccttgtttgtatt

SEQ ID NO: 227537 - DNA, 437 bp, Homo sapiens
ttattttgttctcatatatatgtactcctgattatttttaaattgtggctactaacttttttagtctcattctgttgttatttctgctaactcttgctcattatgtctttttttcctttaacttaaaaaaataactttttttaagagacagggtctcactctgtcaacccagctgtagtgcaatggggtgtagcttactgtagcctcaaactcctgggctcaastgatccttccatgtcagcctcctgcatagctgggactacaggtgtgtactactatgcccagctaattttttttttaattttgtgcagagataagatcttgctatgttgcccatgctggccccaaactcccgaactcaagtgatcctcttgcctaggcttcccagagtgctgggattataagcgtgagccactgcgccgagccttgtttgtatt

SEQ ID NO: 227538 - DNA, 574 bp, Homo sapiens
gtagtgagattgaatcatacaatctcccaacaacaacaacaaaaagcccaggrtcagtttaattcacagctgaatttcaccaaacatacaaagaactggtaccagtcttcctgaaactcttccaaaaaatcaatgaggaaagaatcctccctaattcattctacaaagcaggtatcacctggatatcaaagctagataaggacacacaaaaaagaaaactacagaccaatatttgtggtgacaatagatgcaaaaattctccataaaatactagcaaactgaatccaacagcacatcaaaaagataatacaccatgatcaagtgggttttttttttgaggaatacaaggatagtgaaatatatacaaatcaataaatgtgattcaccacataaacagaatttaaaataaaaaccttataatcatctcaatagatatagaaaaagcaactgataaaattccatatcccttcatgataaaaatgctcaacaaactaggcctagaaggaatatacctaaatataataaaagccatatgtgacaaacccatagccagcataatactgaatgggggaaa

SEQ ID NO: 227539 - DNA, 574 bp, Homo sapiens
gtagtgagattgaatcatacaatctcccaacaacaacaacaaaaagcccaggatcagtttaattcacagctgaatttcaccaaacatacaaagaactggtaccagtcttcctgaaactcttccaaaaaatcaatgaggaaagaatcctccctaattcattctacaaagcaggtatcaccyggatatcaaagctagataaggacacacaaaaaagaaaactacagaccaatatttgtggtgacaatagatgcaaaaattctccataaaatactagcaaactgaatccaacagcacatcaaaaagataatacaccatgatcaagtgggttttttttttgaggaatacaaggatagtgaaatatatacaaatcaataaatgtgattcaccacataaacagaatttaaaataaaaaccttataatcatctcaatagatatagaaaaagcaactgataaaattccatatcccttcatgataaaaatgctcaacaaactaggcctagaaggaatatacctaaatataataaaagccatatgtgacaaacccatagccagcataatactgaatgggggaaa

SEQ ID NO: 227540 - DNA, 603 bp, Homo sapiens
atttatttttcttttctttttctcccagcacagttctggccacacagatgcatatctstaaattgatctaataaataaatactgacacatggaaggtttttatctgcgcagatcacacgaactacaagggatgggaaaaccaggcagagtgaaccaaaccactgtttcagacttcctccttctaggactctctgagtggccagaggagcagcctcttctgtttggcatcttccttggcatgtacctggtcaccatggtggggaacctgctcattatcctggccatcagctctgacccacacctccatactcccatgtacttctttctggccaacctgtcattaactgatgcctgtttcacttctgcctccatccccaaaatgctggccaacattcatacccagagtcagatcatctcgtattctgggtgtcttgcacagctatatttcctccttatgtttggtggccttgacaactgcctgctggctgtgatggcatatgaccgctatgtggccatctgccaaccactccattacagcacatctatgagtccccagctctgtgcactaatgctgggtgtgtgctgggtgctaaccaactgtcc

SEQ ID NO: 227541 - DNA, 603 bp, Homo sapiens
atttatttttcttttctttttctcccagcacagttctggccacacagatgcatatctgtaaattgatctaataaataaatactgacacatggaaggtttttatctgcgcagatcacacgaactacaagggatgggaaaaccaggcagagtgaaccaaaccactgtttcagacttcctccttytaggactctctgagtggccagaggagcagcctcttctgtttggcatcttccttggcatgtacctggtcaccatggtggggaacctgctcattatcctggccatcagctctgacccacacctccatactcccatgtacttctttctggccaacctgtcattaactgatgcctgtttcacttctgcctccatccccaaaatgctggccaacattcatacccagagtcagatcatctcgtattctgggtgtcttgcacagctatatttcctccttatgtttggtggccttgacaactgcctgctggctgtgatggcatatgaccgctatgtggccatctgccaaccactccattacagcacatctatgagtccccagctctgtgcactaatgctgggtgtgtgctgggtgctaaccaactgtcc

SEQ ID NO: 227542 - DNA, 603 bp, Homo sapiens
atttatttttcttttctttttctcccagcacagttctggccacacagatgcatatctgtaaattgatctaataaataaatactgacacatggaaggtttttatctgcgcagatcacacgaactacaagggatgggaaaaccaggcagagtgaaccaaaccactgtttcagacttcctccttctaggactctctgagyggccagaggagcagcctcttctgtttggcatcttccttggcatgtacctggtcaccatggtggggaacctgctcattatcctggccatcagctctgacccacacctccatactcccatgtacttctttctggccaacctgtcattaactgatgcctgtttcacttctgcctccatccccaaaatgctggccaacattcatacccagagtcagatcatctcgtattctgggtgtcttgcacagctatatttcctccttatgtttggtggccttgacaactgcctgctggctgtgatggcatatgaccgctatgtggccatctgccaaccactccattacagcacatctatgagtccccagctctgtgcactaatgctgggtgtgtgctgggtgctaaccaactgtcc

SEQ ID NO: 227543 - DNA, 603 bp, Homo sapiens
atttatttttcttttctttttctcccagcacagttctggccacacagatgcatatctgtaaattgatctaataaataaatactgacacatggaaggtttttatctgcgcagatcacacgaactacaagggatgggaaaaccaggcagagtgaaccaaaccactgtttcagacttcctccttctaggactctctgagtggccagaggagcagcctcttctgtttggcatcttccttggcatgtacctggtcaccatggtggggaacctgctcattatcctggccatcagctctgacccacacctccatactcccatgtacttctttctggccaacctgtcattaactgatgcctgtttcacttctgcctccatccccaaaatgctggccaacattcatacccagagtcagatcatctcstattctgggtgtcttgcacagctatatttcctccttatgtttggtggccttgacaactgcctgctggctgtgatggcatatgaccgctatgtggccatctgccaaccactccattacagcacatctatgagtccccagctctgtgcactaatgctgggtgtgtgctgggtgctaaccaactgtcc

SEQ ID NO: 227544 - DNA, 562 bp, Homo sapiens
ccactccattacagcacatctatgagtccccagctctgtgcactaatgctgggtgtgtgctgggtgctaaccaactgtcctgccctgatgcacacactgttgctgacccgcgtggctttctgtgcccagaaagccatccctcatttctattgtgatcctagtgctctcctgaagcttgcctgctcagatacccatgtaaacgagctgatgatcatcaccatgggcttgctgttcctcactgttcccctcctgctgatcgtcttctcctatgtccgcattttctgggctgtgtttgtcatctcatctcctggagggagatggaaggccttctctacctgtggttctcatctcacggtggttctgctcttctatgggtctcttatgggtgtgtatttacttcctccatcaacttactctacagagagggaaagtagggctgctgttctctatatggtgattattcccaygctaaacccattcatttatagcttgaggaacagagacatgaaggaggctttgggtaaactttttgtcagtggaaaaacattctttttatgattag

SEQ ID NO: 227545 - DNA, 544 bp, Homo sapiens
tgtggcctagggcctgctactagattgctaaatttggagaaattcaaacttagttttggtattttttagcaggtggaaggggcgatgatccatggagtgtcagtgatcagatgggacataaagtggtttgtgatttcgtttctttaaaaacttgtcttttgkggttatgaggaggttttttttttttttttaaagcacactaatttgctaataaagtacagagaaagaagttcaagagcttggcctgtttctttgaaagttagtgacagagtcaagattaaaagcacacccttgattatcatgacaacttttatttatatatgtcactgtaacacctgtttggcccactgagccgttctgccctcataatgcgcccatgaggctgcccagagcagggtcagccagtgaacctgtgagggtgagcaagtgaaataacaagaggaaatgtctaagaagggtcccagagggcaagagaaaagacaaatgttagtatcttaattcctccaaacctaagtagtttgtcttatggtagcagagacattat

SEQ ID NO: 227546 - DNA, 544 bp, Homo sapiens
tgtggcctagggcctgctactagattgctaaatttggagaaattcaaacttagttttggtattttttagcaggtggaaggggcgatgatccatggagtgtcagtgatcagatgggacataaagtggtttgtgatttcgtttctttaaaaacttgtcttttgtggttatgaggaggttttttttttttttttaaagcacactaatttgctaataaagtacagagaaagaagttcaagagcttggcctgtttctttgaaagttagtgacagagtcaagattaaaagcacacccttgattatcatgacaacttttatttatatatgtcactgtaacacctgtttggcccactgagccgttctgccctcataatgcscccatgaggctgcccagagcagggtcagccagtgaacctgtgagggtgagcaagtgaaataacaagaggaaatgtctaagaagggtcccagagggcaagagaaaagacaaatgttagtatcttaattcctccaaacctaagtagtttgtcttatggtagcagagacattat

SEQ ID NO: 227547 - DNA, 635 bp, Homo sapiens
tgttctctgtgtccctcagtctgtaccccagccagagggaatcagggttggggcatggagagagagcagttggagctgggctggctccagaggcctgtggtagatgtctgcagtggctgcccaggcagggattgaggagggtggggcaggcaggggtggtcacaggactgggccatgcttcctctggctctatttttaccctggaccttgcctgtctagcatagccaagctctgctgttgagggtggtgggctggggtgtccactacagccttccttctgctgcccacccctagcaaggagtcagtctggtaccctcggtcagcctggtagaggggatggcagccccagtgggtggcgtamgccttctgggggagggaggtctcactgactctgagtttcctgtcagcagctgggggccccttttggtccttcaactctgttctctcctgaacatgtcattttggcttctttgggatatgctcccattgcctctgcaaaattatcccttccatctggtgggtggcagaaggggagagaggaatgtctgagccttttccttggagccagagttcccagggagtgggagaggagacctgcaggcgttgtccctgcaactgctcactcctggttgatt

SEQ ID NO: 227548 - DNA, 564 bp, Homo sapiens
cctacaactccacattctttgggaatcctcattaaagcccaccagtaagaatgtagatgaaaaaattccctggaaaggggtttctaatggagttgcttgaatggtactgaaacatttattcagtgccttctatgtactttaaacaatggaaagctagacagaaatatgccttgccttcaaggaacttagaacctggtagtggtggggtgtggggatcaatggaatggtggtcaggcatggtggctcatgcctctaatctcagcattttgggaagctaaggtgggaggactgcttgagcctaagagtttgagaccagcctgggcagcacagtcagaccyggtatctacaaaaataaataaataaataaataaataaataaataagccaggtgtggtggcgcctccctgtagcctcagctactccagaggctgaggtgggagaatcacttgagcctgggaggttgaggctgcagtgagtcctgtttgtgccactgctctccagcctgggcaacagagcaagatcttgtctcaaaacaaacaaacaaaaacaaatagtcacagagac

SEQ ID NO: 227549 - DNA, 644 bp, Homo sapiens
acatacagagggaaggtgacaaaaattcacagggagaagatcaataagctgaggtgggaggcctcagaaaaaaatcaaccctgctgaaacctggatcatggacttccagcctccagaactgtgaggacatacattattttttaagccaggcagtcaggataattcttcatccagttgtcaatgcagtgtctaaaggaaggcaatgaacatatgcacacttcaggccagtgtccaaacccaggtaggtccagtgtgaccaagagtggacacctaggtgctgagaagtgctctaggtgatgtatagtgattacaagtgatttgtccagtcaaagcaggaactcagcaagtgtgaggctaaaaagaacttagcaggggtgagtagcccaaccaagtcaatggaggcattagggcagctctagtcccagcaggaatatgaagttctggacaagggcactgaagtagaatcttgttcaygccaacagaaccagtaggtggcaggtaagaaaagtcttcacagagctgtacacaatcacacaggatcaaattaggtgctccaccgaggcatgttgaatgattgagcatcagttagctgcagttactttatcagttaggtcttgctgagtaacaaagcatcccaaaacata

SEQ ID NO: 227550 - DNA, 368 bp, Homo sapiens
aggaaatggaagactttaacacctacagccacagcaaacattaaacacagcccaactcccagccaggttaacacaaaatctgacactaaaggcctatttgcctcagtttctattacctgatacatcacgtcatgctttcaacaaaaaattataaagcataataaaaatcaagaaaaaattatttaaatagacagcaatcatcagagcacagacatagcaaaattttggaattatcaaactaagaatgaaaaaagtaaacaacatgaaagaacagatgggtaatataagcagagagacgaatgctaagaaagtatcaaaagaaaacrctataaataaaaaaagccacattgtaacagaagtgaggaatg

SEQ ID NO: 227551 - DNA, 445 bp, Homo sapiens
ttagacctttgaaagtaaaagaatctagaactctatattcaatgaaattatccttcaaaaaatgaagaaatactttctcaaacaaacgaaatctgagagaatttatcaccagtatacctgcactgcaagaaatttttaaagaagaggttcttcaggaagaggaaaaataatgtaagtcagaaaatttaggtctacatagagatagaaagagcattaaagaaggaataaattaaggtaaagtaaaatattttatttttcttattgttaattgctttaatagataactattcaaagtaataacagtagctatgtattagatgattatagtacatgaataagtgaaatgaatgacagccctgtattgagggacaagagagggaagttgggaatactctgtgatatcatttggctctrtgtcccacccaaatctcatctcaaagtgtaa

SEQ ID NO: 227552 - DNA, 404 bp, Homo sapiens
gtagtcttgttctgtcacccaggctggagtgccgtggctcaatctyggctcactgcaacctgtgtctcccaggttcaagcaatgagaacagtaaagaagctacagttcacataaagtgcacaaatctttagtgcaatttgtttagttttgatcaatgttatcaccacccagctcaagttatagaaaattgccatcatctgagaaaggcctgttagagcccctgtccaggtgattcccaccctgtgtcctcttagttatcactattctgatgtctattcccacaggttacaattgcctgttcttaaagttcacatgaatgaatgtacatatgttttgtgtctggccttttttccgcagttacattcattatactcatgagatatatccatgtagtttcatagatc

SEQ ID NO: 227553 - DNA, 404 bp, Homo sapiens
gtagtcttgttctgtcacccaggctggagtgccgtggctcaatcttggctcactgcaacctgtgtctcccaggttcaagcaatgagaacagtaaagaagctacagttcacataaagtgcacaaatctttagtgcaatttgtttagttttgatcaatgttatcaccacccagctcaagttatagaaaattgccatcatctgagaaaggcctgttagagcccctgtccaggtgattcccaccctgtgtcctcttagttatcactattctgatgtctattcccacaggttacaattgcctgttcttaaagttcacatgaatgaatgtacatatgttttgtgtctggccttttttcygcagttacattcattatactcatgagatatatccatgtagtttcatagatc

SEQ ID NO: 227554 - DNA, 538 bp, Homo sapiens
aataatagattaaaaaaaagtctcctgaagtgaaccagctggcgtgtggtgtaggacacaggaccccacccaccttatgattctaagagccttgctcaaagccactgcagttgagttcgctaggtctctaccacctcctcagcatcaattgactctccataatactcytctggagagaaataagggtctttcaacctcccaggaagggatttgcttagcctcaaatatgcacattcaggaatagcttgtcgtaagaaagagaggatagtttgcagagaaataaccctcctaagtccacatcctattccttttaaataagagagtggtgacaagggaagagccctagaatgtcaaagccaacagggtgctcagataccacccaagtacagttccatctttggccataaggagacaatggtgtcaagaggctaaggccgtatgatctgtaggtgaaaaatctgggatgggaatcaagtcctcaaaccttttccactacatcacagagtttaggagcagttagagggaaggcttcaatctg

SEQ ID NO: 227555 - DNA, 489 bp, Homo sapiens
gtgtggtgtaggacacaggaccccacccaccttatgattctaagagccttgctcaaagccactgcagttgagttcgctaggtctctaccacctcctcagcatcaattgactctccataatactcttctggagagaaataagggtctttcaacctcccaggaagggatttgcttagcctcaaatatgcacattcaggaatagcttgtcgtaagaaagagaggatagtttgcagagaaataaccctcctaagtccacatcctattccttttaaataagagagtggtgacaagggaagagccctagaatgtcaaagccaacagggtgctcagataccacccaagtacagttccatctttggccataaggagacaatggtgtcaagaggytaaggccgtatgatctgtaggtgaaaaatctgggatgggaatcaagtcctcaaaccttttccactacatcacagagtttaggagcagttagagggaaggcttc

SEQ ID NO: 227556 - DNA, 398 bp, Homo sapiens
  misc_feature (1)...(398): n = A,T,C or G
ctctgtattaataaacaaacaaacaaacaaaagctgcccgtgaaagggaaaaggatcaataaatgggtattccaaaaagtcaaaagtcacacaaatatcaagccaaaataaactggtttcctgactggaaatcgamcccaggctatggcagcaaaacacagaactttaagcactgaactgcaaggtagagcagactttattgtgcatcctggaagggatccagagcaggcagtttgagcttatgaagaattttaactttgtttcgggtcaaattttgctctttaatttagttaagagaatnttttttccctacacaacacacataatattgtcaagagaattttaagggtagccatgacactattatgtgtgtttgttttaatttgatcttcctatga

SEQ ID NO: 227557 - DNA, 415 bp, Homo sapiens
tttgagtgttttatagaaatgtaaaacatggctgattactttttattttaaatccaacaaatctccatttctggtkagaaaatcttgccaaaaccaaccaaacaaatgcatagaagtatatgaagaagaaaatgaaagattccctgcctcccaatcccacttgcttggtgtcagccattatttatcacatggaggaagggggcaagacacccaagaagtcccaagtcctgttctcacaatcatctggcctccctgggcaaagggaaaagagggaaggcaaaaagaatataacactactgtttgcggaaatttccccttggtacaggaaactctggtaaactgagagagtatgttttccagagggaggcctcaggggctcttctctggccctaagcccaaactggattttgcctca

SEQ ID NO: 227558 - DNA, 415 bp, Homo sapiens
tttgagtgttttatagaaatgtaaaacatggctgattactttttattttaaatccaacaaatctccatttctggtgagaaaatcttgccaaaaccaaccaaacaaatgcatagaagtatatgaagaagraaatgaaagattccctgcctcccaatcccacttgcttggtgtcagccattatttatcacatggaggaagggggcaagacacccaagaagtcccaagtcctgttctcacaatcatctggcctccctgggcaaagggaaaagagggaaggcaaaaagaatataacactactgtttgcggaaatttccccttggtacaggaaactctggtaaactgagagagtatgttttccagagggaggcctcaggggctcttctctggccctaagcccaaactggattttgcctca

SEQ ID NO: 227559 - DNA, 415 bp, Homo sapiens
tttgagtgttttatagaaatgtaaaacatggctgattactttttattttaaatccaacaaatctccatttctggtgagaaaatcttgccaaaaccaaccaaacaaatgcatagaagtatatgaagaagaaaatgaaagattccctgcctcccaatcccacttgcttggtgtcagccattatttatcacatggaggaagggggmaagacacccaagaagtcccaagtcctgttctcacaatcatctggcctccctgggcaaagggaaaagagggaaggcaaaaagaatataacactactgtttgcggaaatttccccttggtacaggaaactctggtaaactgagagagtatgttttccagagggaggcctcaggggctcttctctggccctaagcccaaactggattttgcctca

SEQ ID NO: 227560 - DNA, 415 bp, Homo sapiens
tttgagtgttttatagaaatgtaaaacatggctgattactttttattttaaatccaacaaatctccatttctggtgagaaaatcttgccaaaaccaaccaaacaaatgcatagaagtatatgaagaagaaaatgaaagattccctgcctcccaatcccacttgcttggtgtcagccattatttatcacatggaggaagggggcaagrcacccaagaagtcccaagtcctgttctcacaatcatctggcctccctgggcaaagggaaaagagggaaggcaaaaagaatataacactactgtttgcggaaatttccccttggtacaggaaactctggtaaactgagagagtatgttttccagagggaggcctcaggggctcttctctggccctaagcccaaactggattttgcctca

SEQ ID NO: 227561 - DNA, 444 bp, Homo sapiens
gaattccatgctgcagtgagctgtgattgtgccactgtactccagcctgggtgaaagagtgagatcctgtgcagaaacaaaagaagaamaaaagagatgtgaaagcctatatattgaagactaccaagtactgcttagagcagttaaagacctttggaatagaaaatgtttcttcttgcatttcaagattgcttttgttttggggggacacactattttttaggaatatgaagttcttgttaggcattcctgtaaaaaaggccactttttgataggattgtattgaatctgtgggttgctttgagttgtatttttatcttaaccatgttacaacttccaacccatggacacaagatgtctgtccattgatttaggtcttcctgaatctcctcgagcaatgttctgtagttgtctgtgtacaagtactgcaccttcttgaacaaa

SEQ ID NO: 227562 - DNA, 444 bp, Homo sapiens
gaattccatgctgcagtgagctgtgattgtgccactgtactccagcctgggtgaaagagtgagatcctgtgcagaaacaaaagaagaacaaaagagatgtgaaagcctatatattgaagactaccaagtactgcttagagcagttaaagacctttggaatagaaaatgtttcttcttgcatttcaagattgcttttgttttggggggacacactattttttaggaatatgaagttcttsttaggcattcctgtaaaaaaggccactttttgataggattgtattgaatctgtgggttgctttgagttgtatttttatcttaaccatgttacaacttccaacccatggacacaagatgtctgtccattgatttaggtcttcctgaatctcctcgagcaatgttctgtagttgtctgtgtacaagtactgcaccttcttgaacaaa

SEQ ID NO: 227563 - DNA, 444 bp, Homo sapiens
gaattccatgctgcagtgagctgtgattgtgccactgtactccagcctgggtgaaagagtgagatcctgtgcagaaacaaaagaagaacaaaagagatgtgaaagcctatatattgaagactaccaagtactgcttagagcagttaaagacctttggaatagaaaatgtttcttcttgcatttcaagattgcttttgttttggggggacacactattttttaggaatatgaagttcttgttaggcattcctgtaaaaaaggccacttyttgataggattgtattgaatctgtgggttgctttgagttgtatttttatcttaaccatgttacaacttccaacccatggacacaagatgtctgtccattgatttaggtcttcctgaatctcctcgagcaatgttctgtagttgtctgtgtacaagtactgcaccttcttgaacaaa

SEQ ID NO: 227564 - DNA, 614 bp, Homo sapiens
agtgtctgtgtgtgaggggtttcctttgacacttgcttagtacataccacataaaaggtatctcaaacataaatagccctgggttttttgttttttctgcatatgcacaggactgcattaggaagtcatttatgaatagcagcagggtaaaaaatgccccagatagagaaaagaatgtagctagtttaatgtttttgctctcacatatgtactctcccaaaacccagccttgagattttgtatcagttcttttagtggtgttgggcaaggcacacccactcctccccaagcactgtattatctgaatctcgataatcgagggggaaaaagagaaaaggtgttcgtgtattaatattgtggaaatggggaaggattacatatagataggtaggtaggtagataaagatctccaaaatggtcaatctttgaattgccaaattccycaatgtaagcaaaaagatgtcaaatcagatggcgaagtctgaatactgaagctcttgcatatcattcttagcaagaagagtcagttaatatgctagttctctcttaccacacagttaaaacaagtttggatacaagacgtagtaaattataagcagaggacaggtgagcta

SEQ ID NO: 227565 - DNA, 614 bp, Homo sapiens
agtgtctgtgtgtgaggggtttcctttgacacttgcttagtacataccacataaaaggtatctcaaacataaatagccctgggttttttgttttttctgcatatgcacaggactgcattaggaagtcatttatgaatagcagcagggtaaaaaatgccccagatagagaaaagaatgtagctagtttaatgtttttgctctcacatatgtactctcccaaaacccagccttgagattttgtatcagttcttttagtggtgttgggcaaggcacacccactcctccccaagcactgtattatctgaatctcgataatcgagggggaaaaagagaaaaggtgttcgtgtattaatattgtggaaatggggaaggattacatatagataggtaggtaggtagataaagatctccaaaatggtcaatctttgaattgccaaattccccaatgtaagcaaaaagatgtcaaatcagatggcraagtctgaatactgaagctcttgcatatcattcttagcaagaagagtcagttaatatgctagttctctcttaccacacagttaaaacaagtttggatacaagacgtagtaaattataagcagaggacaggtgagcta

SEQ ID NO: 227566 - DNA, 588 bp, Homo sapiens
aagtgacttggagccacatgtgtgattaaccacacatcccatttgtctgtgcctgccaaaaagcctggagccaaatttcaaacacaatcataccaaccacataaacccaaatggctcgcaagctgcacccttctttttcccttggtcctcattctgtatttctgcttacactgttggtatgcctgttgctggaggctcatcccaaatcctcttttggaatgaggcagagaagctcatagggttatgagctttttgacgggtgaagttattaaacctggcccctttcccatggtaatggagcctcctgatccccactccacccctacagccaggcactggcacrcccattgctcctttaatgtcaaaacaaatgcataaatttaaatgtccatatcttttctacacatatgtaatggctaacttgggacttatcctcagcagcttttcataataagcaagcaattagataggtcagaaatagaaaagacacaccaccacataaaagcaggtcacaagtaaaaattagatgataggaaacaaaattgttgccattccagcaactaatgaaagtatgttactgtaaacaag

SEQ ID NO: 227567 - DNA, 510 bp, Homo sapiens
tccctggcagcagctacatggtatggagagcatccctgggtactgggagagagaacacaacaactgcaaggcattgaattcagtgctcttcttttttttttttttttgagtacttgatgatgatttattgaaaattataattgttgagacaaatattgaaaataattttataaggtaataaaagccaatttttaatttatatttaatcttctttaaatgaataaaaataggtttatttgttatttatttttattttattttaaattcargggtacatatgcaggatgagcaggtttgttacataggtaaacatgtgtcatggtagtttgctaaatagatcatttcaccacctaagtattaagcccagaatccatgagctattcttcctgatgctctccctcctccccccttcaccctctgacaggccccagtgtgtgttgctccctttgtgtccatgtattcccatcattcagctcctacttatcagtgagaacatgtgatatttggttt

SEQ ID NO: 227568 - DNA, 510 bp, Homo sapiens
tccctggcagcagctacatggtatggagagcatccctgggtactgggagagagaacacaacaactgcaaggcattgaattcagtgctcttcttttttttttttttttgagtacttgatgatgatttattgaaaattataattgttgagacaaatattgaaaataattttataaggtaataaaagccaatttttaatttatatttaatcttctttaaatgaataaaaataggtttatttgttatttatttttattttattttaaattcaggggtacatatgcaggatgagcaggtttgttacataggtaaacatgtgtcatggtagtttgctaaatagatcatttcaccacctaagtattaagcccagaatccatgagctattcttcctgatgctctccctcctccccscttcaccctctgacaggccccagtgtgtgttgctccctttgtgtccatgtattcccatcattcagctcctacttatcagtgagaacatgtgatatttggttt

SEQ ID NO: 227569 - DNA, 510 bp, Homo sapiens
tccctggcagcagctacatggtatggagagcatccctgggtactgggagagagaacacaacaactgcaaggcattgaattcagtgctcttcttttttttttttttttgagtacttgatgatgatttattgaaaattataattgttgagacaaatattgaaaataattttataaggtaataaaagccaatttttaatttatatttaatcttctttaaatgaataaaaataggtttatttgttatttatttttattttattttaaattcaggggtacatatgcaggatgagcaggtttgttacataggtaaacatgtgtcatggtagtttgctaaatagatcatttcaccacctaagtattaagcccagaatccatgagctattcttcctgatgctctccctcctccccccttcaccctctgacaggccccagtgtgtgttgytccctttgtgtccatgtattcccatcattcagctcctacttatcagtgagaacatgtgatatttggttt

SEQ ID NO: 227570 - DNA, 510 bp, Homo sapiens
tccctggcagcagctacatggtatggagagcatccctgggtactgggagagagaacacaacaactgcaaggcattgaattcagtgctcttcttttttttttttttttgagtacttgatgatgatttattgaaaattataattgttgagacaaatattgaaaataattttataaggtaataaaagccaatttttaatttatatttaatcttctttaaatgaataaaaataggtttatttgttatttatttttattttattttaaattcaggggtacatatgcaggatgagcaggtttgttacataggtaaacatgtgtcatggtagtttgctaaatagatcatttcaccacctaagtattaagcccagaatccatgagctattcttcctgatgctctccctcctccccccttcaccctctgacaggccccagtgtgtgttgctccctttgtgtccaygtattcccatcattcagctcctacttatcagtgagaacatgtgatatttggttt

SEQ ID NO: 227571 - DNA, 327 bp, Homo sapiens
ccacgggcaagactgagtaaaagggaatcccacatgacaattttcagatgatggaactgttctgtgttatacttcagttctggatatatgactctgagcattttcaaaaccagtaaaacaacacaacacaaataatacattttatgcaaattatgagaaaagtcaaacaagataccaattcaagtatggaatttaagcggtgacaagttaatctaaccctattacaaatataactacaacttcaatggaatctgaaaaaagtacagycttgtgctgcataacaatattctgatcaacaatggatgacatatacaatgtggtggtccc

SEQ ID NO: 227572 - DNA, 529 bp, Homo sapiens
aattctgagaccttattcaagcaatttgtcttctattagcttcattgtcctcatttgcaaattgagacaatacttacgtttagataagaaaaatagatagatttaaatagcactaaaagaggccaggcacggtggctcacacctgtaatcccagcactttgggaggttcaggggggtggatcacctgaggtcaggagttcgagaccaacctggccaacatggcgaaacctcatctytactaaaaatacaaaaattagccgggcatggtgttgggtgcctgtaatcccagctacatgggagactgaggcaggagaatcactggaacctgggaggcagaggttgcagtgagccaagaccgtgccattgcactccagcctgttaacaagagcaaaactcagtctcaaagaaaaaaaaaaaaaaaacatactaaaacaaatcattagcacagtgtcaagtatatagtgaactttcaataaaggtgatattagtattaatattatgtttacttcaaactgaaaagtaccaatgg

SEQ ID NO: 227573 - DNA, 628 bp, Homo sapiens
ttaatttacacatgcattgactcatttattcatcaaacatttattatggatctataagttaagcacagtgacaaaatctccaaggaggtcataattgggagatagaggaagagagaaagatattaaacatttaatcatcagggagtatgaacagtatttgattttttttaaagaacaggagaagcaagaatgattaacaattattcttaccctttaaattgcagaaaacatactgcttaagattctgttaagcccacaggaaataaccaggctggcatatttagattcattttcaaactttgacataaatgaaatgagatgtcccccccaaacacctgctggcctgccaaagtttgaaactctcataatttgagacattaaattattagacaacaaaagcagcaacattattgaaaatgagtgaatcccagttaaaatcacattaattcactagcaggattcatttacttagattaaattgttgatagatcagactcttcaaacatygattatgaaaaaggtgacctcggtgagcatttggactgtcagtagattcatcttaaacacttttctctaatgtcttaaaaagaagttctcaatagtttgctgcaatagaagcatgacaaag

SEQ ID NO: 227574 - DNA, 590 bp, Homo sapiens
caagcctttggctgcaaaatctgaaccaatactttactgaactctcagcttattgatgacatttcctatttcccttttaatgatacagaaatagcatagctatggaaatgatgggctttagagtaaggcaaacccaagttccattttgcctgtcttttcacccatggaagagataaatcaatgcctcctcaagtgttttggttattgtctgtcttctacaggagataaaacgccawgaaaatagtgttccagatcaactttctctgtatcctcagcatctcagacagccaacagaacatagtaattgctcaaaaaatacttgtgagtttattgcagatgttaatttgataaaatttgtatataaaattgtaatgggacctgaaaagtaaacttagctattgctactattactactattattattattactttaaaatatgagaagtttcaaaataagataaattagtcataacagatatgtagactctggttctcttcagaagaaaaataaagggagattaaattttatttaagaatgcatatttcatttcagcaaaatagattattccgattcagagcagaaatattta

SEQ ID NO: 227575 - DNA, 567 bp, Homo sapiens
taggggaaaagaagatagctgagttggtgatcaaaaagaactaaagagtctcaaaggcagttagctcctaacattgtccycaaggcatcagaggtggggcctgacctgttttccacacactccctcaggctgaccaaggtgttatttttaaccactttataaaatatacttcccttcatccctacgttaatcattccctatttcactagcatgcctttaagtagtagaaaaactatacagggtagtttgtctcatggcaccctgtagtgataataccagatatcacaatcaaggaaagttcatttatggagtgccagaatgtgcagagtagtagtgatacttgacccttctggtttaagttgtaattttccaaaaaacagcccaactcattaataattatatttatggcaatgctgataagcaatctgatgacaatatcaatgtctaaattacaaagttttaaaagcacatagctgaaagacatagatccagttaactacctaagaatattaacggaaaagccatataaaattaaaaaaaaaaaaacagaggaaagacataaactgt

SEQ ID NO: 227576 - DNA, 490 bp, Homo sapiens
gaaatgcctcttcagtgggttattagatagtttaccaactcagtttctggattttaaagcttcttggggaaatttcagatggagtaatgttgaggctcaggagacaccaaagtatgaacatacccccaaaatatgatgataggggaccagaatataccaccctaaaatatatttggcagttttgagctgcttattctggtaaatggcaggtaaaggagtatccctgaaaagctgtcctattataaaataaatttayatccataaaggaagagtatattcataaaagtacctgtattaaaaagaggactgctgaagataaaaaatccctcagatagtaaaagttaattgcaaacaagatataacctttattcaccaaacatttccttccctctctctcctatgacttatgtcaccaccaaccatccctcagaagtccaaagctcctattcccttctgttgctcaggatgctgtagaagcttcaatcatgtg

SEQ ID NO: 227577 - DNA, 532 bp, Homo sapiens
gccagatatcatgggctgtgttgaattgccacagtaagtatttcacatttagtgctgtagctgtgactgacatcactatgtgaataaatgtacaaagatctctttctccatgccccatctggcttttgcactagccagataagtaagttaaatggggatgyactgggaattgccacctatgcatatctcaagttgctggtggtagcattaatcactgtagtttcccccaggttgaagtattttttactttcttggtatggtgggcgtggaagtgagtgctggagggatctccatcaacaagagcttccactttgccctccttttcactacaaaagtcttaatttcatgggtcaaaggaccaatataatcattctgccagttattacatatctcttctttctctacacattctagagtcagggaaaaacacaggatgaatacctgatcctgtggacactgtgttagacagactaggatgtatgggctaggattccatacatcacctgatttcattagtacccaatttaactgg

SEQ ID NO: 227578 - DNA, 576 bp, Homo sapiens
atgggagtacaattcgaaataagatttgggtggggacacagaagcaaagcacatcacaggcatgagcctccatgcctagccctaaggtctttattaagaaaactttttcttctgatctatattcaaattaattaaatcattatgtatttattcactagtttatatctttgactctttttaatttgtgtggttttttgttttgttttgytttgtttgagacagggtgttgctctgtcacccaggctgtagtgcaataatgtgatcatgactcactgcagcctcagcctcctgggatcaagaggagctgagcctcctcagcctcctgaggagctgagactacaggtgctcactgccatgcttggctactgttttattttttttatttttattttttttttgtacagtgaaggcatcactacattgcccaggcttatgtccaactccttggctcaagcaatctgtctgcctctgcctcccaacgtgcttggattacagccatgagccaccgtacccagccctttttcattcttaagatgaggcttgactttttaattatagccattctgactggtatga

SEQ ID NO: 227579 - DNA, 576 bp, Homo sapiens
atgggagtacaattcgaaataagatttgggtggggacacagaagcaaagcacatcacaggcatgagcctccatgcctagccctaaggtctttattaagaaaactttttcttctgatctatattcaaattaattaaatcattatgtatttattcactagtttatatctttgactctttttaatttgtgtggttttttgttttgttttgctttgtttgagacagggtgttgctctgtcacccaggctgtagtgcaataatgtgatcatgactcactgcagcctcagcctcctgggatcaagaggagctgagcctcctcagcctcctgaggagctgagactacaggtgctcactgccatgcttggctactgttttattttttttatttttattttttttttgtacagtgaaggcatcactacattgcccaggcttatgtccaactccttggctcaagcaatctgtctgcctctgcctcccaaygtgcttggattacagccatgagccaccgtacccagccctttttcattcttaagatgaggcttgactttttaattatagccattctgactggtatga

SEQ ID NO: 227580 - DNA, 415 bp, Homo sapiens
attaatattttagcactatcatgaagcctgtcatagtcattagaccctaatcatatggtggaagttgagtagtagacaaattagatgtatagcgaaaaaaggcagataargaagattgaggatatttttaatgaacagtgaagcaaaacacacagattaaattaagagcctttccttttatatttaccccaaaactaaaattataaatttttattttgctatccaaaaaagcaattcataaagaatagctgacataataagaaaaaaaccccacaaaactgttaatgttaagtgatgtgatgaggcaagaagggagagtctcctgatgccccatgagatggtatgactattcagaatataaatagaactattaaaaaatacttttggttgtttaggaacatgaacgaattcaaag

SEQ ID NO: 227581 - DNA, 634 bp, Homo sapiens
tgaaaagttaggaaagtaggtgggtaagtggagatggaaaataggtaagtaattaggttaggcaaggtgagttggtttgaacaggtaagtaggaagataagtctgtagagatagctggattgagcctttggaccttcattcattctaccactctcaaaccccctaaccacagccatagttcatccatgttttagacaagatacaaagtggggagggccacagtgagacaggttaagatttgggaacctgagtacatggtaactactggaaggcagagttaagaacatcaactactgtgttgaaactgtccataaatgaaagcatgccaataatgtgctttacaacacagttttctcaataatacatccccataatccctaattctagaactctgtatggaaccctwgactttacatagtaattcttagccccaaggactctgtaatctagcttctagaaatgtccttgacaaccaaggtgctcaattgtttctatacagaacttagcagcaaccagaataagaagagagggggttgtggaagggaaggaggaaagaaaggggagaaagagagagatggagaaagagagagatggggagagagagacagaaagaaaatgagcaatcaacataact

SEQ ID NO: 227582 - DNA, 634 bp, Homo sapiens
tgaaaagttaggaaagtaggtgggtaagtggagatggaaaataggtaagtaattaggttaggcaaggtgagttggtttgaacaggtaagtaggaagataagtctgtagagatagctggattgagcctttggaccttcattcattctaccactctcaaaccccctaaccacagccatagttcatccatgttttagacaagatacaaagtggggagggccacagtgagacaggttaagatttgggaacctgagtacatggtaactactggaaggcagagttaagaacatcaactactgtgttgaaactgtccataaatgaaagcatgccaataatgtgctttacaacacagttttctcaataatacatccccataatccctaattctagaactctgtatggaaccctagactttacatagtaattcttagccccaaggactctgtaatctagcttctrgaaatgtccttgacaaccaaggtgctcaattgtttctatacagaacttagcagcaaccagaataagaagagagggggttgtggaagggaaggaggaaagaaaggggagaaagagagagatggagaaagagagagatggggagagagagacagaaagaaaatgagcaatcaacataact

SEQ ID NO: 227583 - DNA, 634 bp, Homo sapiens
tgaaaagttaggaaagtaggtgggtaagtggagatggaaaataggtaagtaattaggttaggcaaggtgagttggtttgaacaggtaagtaggaagataagtctgtagagatagctggattgagcctttggaccttcattcattctaccactctcaaaccccctaaccacagccatagttcatccatgttttagacaagatacaaagtggggagggccacagtgagacaggttaagatttgggaacctgagtacatggtaactactggaaggcagagttaagaacatcaactactgtgttgaaactgtccataaatgaaagcatgccaataatgtgctttacaacacagttttctcaataatacatccccataatccctaattctagaactctgtatggaaccctagactttacatagtaattcttagccccaaggactctgtaatctagcttctagaaatgtccttgwcaaccaaggtgctcaattgtttctatacagaacttagcagcaaccagaataagaagagagggggttgtggaagggaaggaggaaagaaaggggagaaagagagagatggagaaagagagagatggggagagagagacagaaagaaaatgagcaatcaacataact

SEQ ID NO: 227584 - DNA, 599 bp, Homo sapiens
aactataaaaggggcaataacattaatgcaattaacactacccaccctgccaccctcttgcccagaaaagaaaaaaaattactgtcaagaagaagcactgttaggtagaaggactactgggtagactataaccaagagtgtcttccaaagctatttattttggctraatcttttcatccttctaagactgtttctgaaagagacaccaatatgcaaattgtagtcatgtcatgaaccctcatactatctctctttaaagattaggtatgtgctcccatcctagttatccgattgaatcaatcagtgttaaaataagctatctgagtcagctttcctaaatgtgcttcactgaagattagtcctaaaataaagcctaagagaaagacattgttgctgtaaactatatcggggattctcttacacacagtgatatgttaaaggctctgaacaagttctgttgttaaaaatatttaatacgatgttttccaaatgacaaaacatagtttgtgtaatacatgttaccatttcctgtaattaatttggacaatattgattaaacgattttccttctctcataaacttggaaaaccaatcctgat

SEQ ID NO: 227585 - DNA, 589 bp, Homo sapiens
gatcaaaacctgagttttagcatgccccactagcgtggactaaagtgctctaaggtcttaaataggcctgaaaaacagtgcagaccacaaggccagaaattcctgggcaagttttggtgctgtgctgtactcagagccagttgacctggggtacataagacccagtgaaacaactactgaggtgactaaggaagagttrtaatagccctccctccaataccaggtaacatagctcacagctccaggagggagtccttctgcttgaggaaaggagaggaaggagtaaagaggacttattcctgcaacttggataccagctcagccacagtcaaagcaccaagcagggttctaaagttgccattccaggccacagctcctggacaacatttctggacccatcttggccaaaagagaacccactgccctgaagataaggacacagtcctgccagaatttactacccgctgactaaagagcccttaggcattaaataaatggcagtaatagacaagcagcagttgccacaggcctagggcaagtcccagcattgtgctggcgtcaggtgtgacctagcacattcccaggtgtg

SEQ ID NO: 227586 - DNA, 589 bp, Homo sapiens
gatcaaaacctgagttttagcatgccccactagcgtggactaaagtgctctaaggtcttaaataggcctgaaaaacagtgcagaccacaaggccagaaattcctgggcaagttttggtgctgtgctgtactcagagccagttgacctggggtacataagacccagtgaaacaactactgaggtgactaaggaagagttgtaatagccctcccyccaataccaggtaacatagctcacagctccaggagggagtccttctgcttgaggaaaggagaggaaggagtaaagaggacttattcctgcaacttggataccagctcagccacagtcaaagcaccaagcagggttctaaagttgccattccaggccacagctcctggacaacatttctggacccatcttggccaaaagagaacccactgccctgaagataaggacacagtcctgccagaatttactacccgctgactaaagagcccttaggcattaaataaatggcagtaatagacaagcagcagttgccacaggcctagggcaagtcccagcattgtgctggcgtcaggtgtgacctagcacattcccaggtgtg

SEQ ID NO: 227587 - DNA, 440 bp, Homo sapiens
ttattctagctttgctcattcagactgagatataatcacagcttcagtggagttgggggtgatcaaatttacttcaycatttaataaattgctctggatcattctctccttctaaatatataataaatagtattaaagttgcagaaaaatgtaaagatccctatggaaaagatagtgacttttatctcttttgtgctcttcacaatgcagatacttaacatctcatggatgattaatttatcaactgatggggtaagataaaaaacactattgagacatcttgtgtttcagtaagtgggagggtaggataatagatgtttagcaccctacaaccttgccagaatgaagacactgccaagcctacatagaaggagcaagagagatgcattggaataaccaggcttaaacagaacaaaatgggacacagtgggcaggaactg

SEQ ID NO: 227588 - DNA, 307 bp, Homo sapiens
taatctgacgtgatccagacttccagaggattgcaagaatagggcaaagaattattacatagacttcacttagattcctcaaatattttaccacatctacttcataackatgtatttatgcatgtgtacacatgtgtgtttataccattttatgtacatatacttttttcagaaccatttgaaagtaaattataaacatgaggccctctttccccaaataatttattgtgtatttcctaaaaacaagatgttcttatgtaaccacataaaaactgttaaaatcaggaaattaatattggtataatat

SEQ ID NO: 227589 - DNA, 597 bp, Homo sapiens
agtgctgggaggatgagggctttgcagaattattcagaataatgaaagaggagaaaaatgtcaagttggcatctgtcaaaccagaagatgtgacatcccaggggagactccaaaaggagccctgtattcagagccacatgtcccttaactggagcagtgatggcttaggaggtaccaacgactttgtcaagaaatcagaatccaaaaccacttcggacttcccagctattcccttgaattgcatcctgcagtgcacaatgagtacaaaaagtagggtgcagctattgaatcccttcagaataagtaatctgaatctcaaaattccagatrggaggtaattccaaggtcaccaaaaccacacaaatttctctctgataatctgtcctaattcaaaaaaactttacaaaataaaggcccacagccccttcctctgctaaaatttaataattctcagcacctagaaaactgttctcgtatttattcatttattcaaaattcttctcctgaaaaataattgtgttttcttttttaccctattctgcagaagacaaaggatagtcaacatcagctgtctaaaatcccttcatatatttgaaa

SEQ ID NO: 227590 - DNA, 591 bp, Homo sapiens
ggtaaaaaattaaactttacttaaaagatatagactggctgagtggagtttttaaaaagcgacctagctatattctgcttacaagacactcatctcacacgtaargacacatataaactgcaaggaaagggatgaaaaaaaaaattccaagcaataagaaaacaaaagtgagcaggagtagctgtacttatatatcaaatacaacagacttcatgacaggcaggaactgttttaggaactttccatacataattttaacttagtctttcaaacaaccatgaaaagtgggtgtttttatactcatagcaaagaatgggaaagtgagtttcaataaggttaggtaatttcctaaaggcatacacttaataatttatttatcttggatttaaatttctcccaagctcattttctctaaaccataccatactgcccacagatagaagaaaactggctggtcaaaacattaccatcagagatttataagatttggccatactgataccgtatttttcaaacatgccatttcatatatttgtgtctcggccttcttactcccctttatcttaaaagtttgcccatttttgaattttt

SEQ ID NO: 227591 - DNA, 584 bp, Homo sapiens
tgaaggaatctttatactgaaaactataaaacattgatgaaagaaattgaagaagacacaaataaatggaaagatatcccatgttcatagactgaaagaattgctattgttgaagtgttcatattacccaaagtgatacatagatttataatccctatcaaatttcaacggcatttttcacaacaatagaaaamaattttaattaaaaaagctataaaaattctaaaacccaaaccacacacaaaaaactaaatagctgaaacaattctgagatctcgagaaagaaaaacaatgtcggaggcatcacacttgctagaaacttttcaatgaaatcactttctcagtgaatttttacaaaaggtatggaggtaattaattttagtatggtgttcttcactcacatatttaacaaaagaaaaacatttttgtttgtttttccgatactggccagaaatttgtattacatggatagagtttacctagagaaatattgggcagccacttgagatctctgaaccagccagtgctatatgaaaagaaaataattatgtccttacttgcaaccaggttgcaacatgcaaccg

SEQ ID NO: 227592 - DNA, 404 bp, Homo sapiens
  misc_feature (1)...(404): n = A,T,C or G
gagatcttttagagtcacggccccgctctttgycctgttttgcggggcctcactctcccttctcttgtactctatntaaagagtaaacaaaataggaatttgcaccttggccctagggaggagcacaatagtcattgacaagtacccaaggagtcttcccatggcttgcaatgaacacaccatgtgccttcaacgatgacttacgcaatggtctctgaatcactcccataaagaaagtgcaaacatattttttcttttagactaagagtgccaccccgaaaatgcacacaggtacccaaacacagacagctgctttctaagagataaggactttgtattgaagcatcatggcagccccgtagcagcagcaatttcaaggggcttcaaatctttaaagactntca

SEQ ID NO: 227593 - DNA, 404 bp, Homo sapiens
  misc_feature (1)...(404): n = A,T,C or G
gagatcttttagagtcacggccccgctctttgtcctgttttgcggggcctcactctcccttctcttgtactctatntaaagagtaaacaaaataggaatttgcaccttggccctagggaggagcacaatagtcattgacaagtacccaaggagtcttcccatggcttgcaatgaacacaccatgtgccttcaacgatgacttacgcaatggtctctgaatcactcccataaagaaagtgcaaacatattttttcttttagactragagtgccaccccgaaaatgcacacaggtacccaaacacagacagctgctttctaagagataaggactttgtattgaagcatcatggcagccccgtagcagcagcaatttcaaggggcttcaaatctttaaagactntca

SEQ ID NO: 227594 - DNA, 499 bp, Homo sapiens
ttgcaacatgcaaccggggtgcgcacagttttccacagtcttatttgctggcaattctttgcccaggaaatccctcttcccatcacccccaaaactggtttctcctctgttatgcacagaaattgcttatattttcaaaattagatacactcaccaacccttggctcaggaaacaaatgccttttcagctatagagcccctccttcctcttccatgtcccagaagaaatgattaaaaaccaatatttgttgtctcctcttttctcagggcttttaccagagtacctgctaaggacatttgctgagtcagcacatggtaactgaggatgccctggtgccctcataagagactgaatttttcatgcatagctgygaagaaggtgaatgtgctaggcatacaaatagcccacatttggcatacctttgaatgaaggcacttagtacaaattcttatgtatactatatctataattaaaaccagcaatcccatcatctgggat

SEQ ID NO: 227595 - DNA, 643 bp, Homo sapiens
cagttgatggaagtttgacaggaatattacacaagcgatcattacgtgtgtaatgttctcattacatcccatcaaaasataaaggtcagtttgttccattgttagtgatgtcagctttgattacttagttactgcagtgtctaccgagtttttccactgataagttactatgcttcattttgtaatcaatatataaaatctaggaagataatttaagacaaggtaaatgtcctctttctcatcagactttcacctaatttttggtattcaatgataatttttacaatattgcgattgtcaaaattcttcattctggagaagggaaagttcttccttacaatagaatgccaaatagaaaattcacttttcaatgttaaagttggcaaacaacctgacatctgctttaccagctaactagggttttctggttggcctctattatctttctagaatcataattgggccttctcttgaggattctccaggatatagcaaattctttttgtatagcagagttgtactataatggggaatatcaacgtatctatctacctattttaatttaacaacatgtatgcagcatatactacatgccaggcactcttttaaatggtttacaaatttaagtcttttaagacttatt

SEQ ID NO: 227596 - DNA, 643 bp, Homo sapiens
cagttgatggaagtttgacaggaatattacacaagcgatcattacgtgtgtaatgttctcattacatcccatcaaaagataaaggtcagtttgttccattgttagtgatgtcagctttgattacttagttactgcagtgtctaccgagtttttccactgataagttactatgcttcattttgtaatcaatatataaaatctaggaagataatttaagacaaggtaaatgtcctctttctcatcagactttcacctaatttttggtattcaatgataattttkacaatattgcgattgtcaaaattcttcattctggagaagggaaagttcttccttacaatagaatgccaaatagaaaattcacttttcaatgttaaagttggcaaacaacctgacatctgctttaccagctaactagggttttctggttggcctctattatctttctagaatcataattgggccttctcttgaggattctccaggatatagcaaattctttttgtatagcagagttgtactataatggggaatatcaacgtatctatctacctattttaatttaacaacatgtatgcagcatatactacatgccaggcactcttttaaatggtttacaaatttaagtcttttaagacttatt

SEQ ID NO: 227597 - DNA, 643 bp, Homo sapiens
cagttgatggaagtttgacaggaatattacacaagcgatcattacgtgtgtaatgttctcattacatcccatcaaaagataaaggtcagtttgttccattgttagtgatgtcagctttgattacttagttactgcagtgtctaccgagtttttccactgataagttactatgcttcattttgtaatcaatatataaaatctaggaagataatttaagacaaggtaaatgtcctctttctcatcagactttcacctaatttttggtattcaatgataatttttacaatattgcgattgtcaaaattcttcattctggagaagggaaagttcttccttacaatagaatgccaaatagaaaattcacttttcaatgttaaagttggcaaacaacctgacatctgctttaccagctaactagggttttctggttggcctctattatctttctagaatcataattgggccttctcttgaggattctccaggatatagcaaattctttttgtatagcagagttgtactataatggggaatatcaacrtatctatctacctattttaatttaacaacatgtatgcagcatatactacatgccaggcactcttttaaatggtttacaaatttaagtcttttaagacttatt

SEQ ID NO: 227598 - DNA, 566 bp, Homo sapiens
tggcattcaagtttctccaagattagggttgccagataaaataaataatgcccatttaattctgaatttcagacagaaaacatttttagtatgttattaaatattgcatgagacaaatttataaaaaattcattatttgtctgaaattcagatttaactgggtgtcctgtatttttatttgctaaatctgttaaccctcttcgtgatcttctccagccagcctctccaccttttyttccacacatttgaagctctgtccacaaggaagggtccaattgccttgtctttgctcatgctgttccctctgcctgggtcaccattctcccactgtatcttcttggtaaactcttctttccctttaaacccctgtccagatgttacgttctcagggaaacctctagcagagcacattagccccagttcagggtgctcaccaaacctggttcttataggattttgccttataattctgtgttttagaactggtctctacaaaaacagacaagactgattgcctaaaaaggaaaggttataaggaattctctcattcttcctgccctctccct

SEQ ID NO: 227599 - DNA, 633 bp, Homo sapiens
tctctccccctccacattactcatcaattcacagtcccaaagcataggcctgcaaccattaaatgtggatattgcttcagtgttatgaatgctgtcaatgttggagaaagaatgcaactgttaatgtttgtgtaattccatcttgcacttgggcggttgcttggtacaataatatttctgacttctctttgatcctcctctctctacctagtctcatacttatggctttttctaaagargtaactagataaagaaaattgtattttaaagccaattcttccttccatccttccctgacctcctgagtttcatgttttgggagaaaagcattttttgagccatggtttaagattaaattatatgccctcaattcacctttataattcagaaaagcccaatacaaaaagatccccagaattcttctattctaagggggaaatttgactcttaagcttatttgtaagtttaggttacgaaaagccacttcaaagcattggaaatggcacgaactgacaaggttgaaacatatagttatatggttctgcttcattgccttatttctttcctcagagctattgtagacaaaaccaagcagaaggtatagtgtttctgatactctctgcttctggaccc

SEQ ID NO: 227600 - DNA, 506 bp, Homo sapiens
aataagacaacctattaatacaatgttaatactagtttcctgcccaaagtcactggaattttttcttatatacaaaagggcttattttatttctcagatatagcacctacttggtatgcttaaacaaataaaattctagttaattaacgtgtgattttctctctcttagctgaaatatttcagtagccattcattctatttattaagattgctatactttaaaaaatttagatatacaaatctgtgtatgcgtaagaagtaagaaatggggcccagcttttgtaaagtcaatgaatgactacagttgaaagaatacccatgtattttaacaactagtgctgtagccaaaacatgtctgcttacattctttatttctcataagtggaatttcttgtgaaaggttttgtttgttttgctatactcagagaaaaatgcactcatcggygagttggacagggaattttctgaaagaataaaaagcacatgttctgaccatcaccacctgt

SEQ ID NO: 227601 - DNA, 607 bp, Homo sapiens
tttatatataaatatatattatatataatttatataaacattttgaatttgtatgtgtgtgtgttctcagaatggcagaattgatatttcttctccaagctctattttcatcaaagaaaggaaggcaatgatttcttaaatttgaaaatggaatagagatagcaacaattttataaatatggatataagctggaaatagaatgacataaataaaatatgaaaattttacataagccttccagaggctatattagccgaacattgtctccatataagttattagttctctaaaaataattatcatataaattgattatttttttaattttaattcatataatagagcttactgtaggcttaagtgttatacaaattttcacaataatctatgaggtaagggcttttattatttcttgttccttcctcaaacattaatggtagtcactagagatgtccacaratattctgatgcttctccctctaggcacatggtaagctgggaacaaacaagttacctgtttggccacagaaatatgtggagaagtggtgtctgtcatttccttgaaaaaaactgacatatttctgtgtgattctcaacatccccttc

SEQ ID NO: 227602 - DNA, 435 bp, Homo sapiens
aaaaaaagattcacagaaataaatgaaaatggtagaaattttctatgaatttgtacggtactttctgccaaaaattcactgcattttttttaacattagtttatctacttttaaatatgccaaaaataactaacacattataaaatgtctccttttttgttttgtttgtttgtttcagacaatgtctcattctactgtccaaactggagtgcactagtatgatcctagttcactgcagcctcaaaactcctgacctcaagcgatactcctacctcagccttcaaaagcgctgggattacaggcaaaagctacctaacccggccaaaatcagtcttaaaaataaaggctattctcactgggtacggkggctcacacctgtaatcccagcactttgggaggtcgaggcagatggatcacctaaggtcaggagttcac

SEQ ID NO: 227603 - DNA, 495 bp, Homo sapiens
catgacttaacaacttaccttgtaagagaaaagctcaactcaaaggcagattgctagtccggactttattacaggcaggactgcgatgatgtttatagcactgaagtgagttccaggctaagtacagaaagtggcttctctgcttttcctcsccagcagaagtctatacaccttgcagacttgaatcactgaagatgtaagccagctgttactcttaatattgggagacccctgtagacagcatgaagactgtccgttatcagagtctttcgtgagcacgaaggagtcaagattaaagaatgtgtttgtttaccctggactgcattactatggaaaatgaaccaaggcctgggtttgggtatggaagtctgtcctgcctgtttctgtaatctggtgctctgcatccaggtcttggccctttatggacactactgtatgttactctgatgattctctgcttttctgtgagttcagacgtggcaccttatttcattt

SEQ ID NO: 227604 - DNA, 606 bp, Homo sapiens
acacagtaccatgcagggagaagaatctctcatggttgttccttttgaaacaaatacaaaagtggaaacagtcacactttctgctgctactcagaatgatgaaagaaataaaagagatggttcagaaactggattgagctcatgtccagttaaggtacatcccagtgcagtggaatcagcatcagaaaaaaatgttaatggcattgctgttcctgacgccsccatcatactgatctcttgacagacccacacaccagatacgtacaacctggtgtggagggcaggcaggaatggtgggctatccattaatgtgtattttatgaaatatcaaaagatgaacaatgggattggtttggtaggaattgggcatacggttcgagtcccaggtagtgaaaatgagctccatttagctgaactagggccgtctagtctttacaaagtcttgatagtagcaagaagtggagcaggtgaaggataaactgccatgcttaccttctgaaacagcaaagaaaaaagagcattgacaaaaaacacccaggcatcctgtccacccatgggcatccataagtatcctgttgtttcagaagctgcaaataattttggagt

SEQ ID NO: 227605 - DNA, 595 bp, Homo sapiens
aaggagcggcacatgattggccatctgctgccagaaacttcctatggcattaaaatgcagtgcttcagtgaaggagaagaaagtgagtttatcaatgtggtgatctgcgagagtaaagtaaaacgtgttcctggagcttctgagtatcctaaaggcttgagtatccctctgaattcttcaggaagtgaaggaaatgtgaggccagcaaccagccctgccagaagcagtgacatgttatatctgatccttggctgtatgctgggtgtcatggtccttatttttgtggctttttattgcaatgtgcctgtggaagaatcacccgcagaatatcatagagaaatatgacccactgggttatctctaccagggatcagatattaatgggcagatggtggaatacaccactctctcaggagcaaatgagataaatggaaatgttcatggaggcttcttgagccatggcagtctcagcagtgkctcttcccaccttcaccataaggtctccaatggagtcaatgcaactgtgaatgggagcttaaatggaggactttactctgggcacactaactctctaaccaggacatgtgaattttga

SEQ ID NO: 227606 - DNA, 587 bp, Homo sapiens
cttcctcttctccatctttcttcctgttctcttctggttccatggagacatgacagtttacccaaatagtctgtgatgaatctgttcctgcagcctggagcccttgcccctccccaaacccttcttgcagaccctttgytgatgaggactgcggatctgcttgtttcaacctggggtccgggcctcctgtcatggccatattcttacccttagcataggtcgattctttgtatgcagcataattttcaggtgacaaagtcttgagccagagatccaatttcaccttgtattgcttctgcagctcctcagcctggctcttaaaatgatccttctggctctgcgggatgcgttgccagcgtctgccaatctctaccatgcgctccctcactgacaaatgttgcagctctttacttgaccaggaatcttggtgaaacttgtggtatccattcatggggggtttctgaggctctccatgaaattttaccttcttgaaaaatcgatccgtttttggaagagacctcacttcttcaatatttttctgaaccttcttttgcactttgttttgagtcctcttggagacaccagat

SEQ ID NO: 227607 - DNA, 587 bp, Homo sapiens
cttcctcttctccatctttcttcctgttctcttctggttccatggagacatgacagtttacccaaatagtctgtgatgaatctgttcctgcagcctggagcccttgcccctccccaaacccttcttgcagaccctttgttgatgaggactgyggatctgcttgtttcaacctggggtccgggcctcctgtcatggccatattcttacccttagcataggtcgattctttgtatgcagcataattttcaggtgacaaagtcttgagccagagatccaatttcaccttgtattgcttctgcagctcctcagcctggctcttaaaatgatccttctggctctgcgggatgcgttgccagcgtctgccaatctctaccatgcgctccctcactgacaaatgttgcagctctttacttgaccaggaatcttggtgaaacttgtggtatccattcatggggggtttctgaggctctccatgaaattttaccttcttgaaaaatcgatccgtttttggaagagacctcacttcttcaatatttttctgaaccttcttttgcactttgttttgagtcctcttggagacaccagat

SEQ ID NO: 227608 - DNA, 587 bp, Homo sapiens
cttcctcttctccatctttcttcctgttctcttctggttccatggagacatgacagtttacccaaatagtctgtgatgaatctgttcctgcagcctggagcccttgcccctccccaaacccttcttgcagaccctttgttgatgaggactgcggatctgcttgtttcaacctggggtccgggcctcctgtcatggccatattcttacccttagcataggtcgattctttgtatgcagcataattttcaggtgacaaagtcttgagccagagatccaatttcaccttgtattgcttctgcagctcctcagcctggctcttaaaatgatccttctggctctgcgggatgcgytgccagcgtctgccaatctctaccatgcgctccctcactgacaaatgttgcagctctttacttgaccaggaatcttggtgaaacttgtggtatccattcatggggggtttctgaggctctccatgaaattttaccttcttgaaaaatcgatccgtttttggaagagacctcacttcttcaatatttttctgaaccttcttttgcactttgttttgagtcctcttggagacaccagat

SEQ ID NO: 227609 - DNA, 587 bp, Homo sapiens
cttcctcttctccatctttcttcctgttctcttctggttccatggagacatgacagtttacccaaatagtctgtgatgaatctgttcctgcagcctggagcccttgcccctccccaaacccttcttgcagaccctttgttgatgaggactgcggatctgcttgtttcaacctggggtccgggcctcctgtcatggccatattcttacccttagcataggtcgattctttgtatgcagcataattttcaggtgacaaagtcttgagccagagatccaatttcaccttgtattgcttctgcagctcctcagcctggctcttaaaatgatccttctggctctgcgggatgcgttgccagcgtctgccaatctctaccatgcgctccctcactgacaaatgttgcagctctttacttgaccaggaatcttggtgaaacttgtggtatccattcatggggggtttctgaggctctccatgaaattttaccttcttgaaaaatcgatccgtttttggaagagacctcacttcttcaatatttttctgaamcttcttttgcactttgttttgagtcctcttggagacaccagat

SEQ ID NO: 227610 - DNA, 627 bp, Homo sapiens
acattaaaaattcactagaagtgtaaacaataatagtcataatatcacgtaagtcacaaatgtctcaaaacatagattaaaatgttctgaaatattggaatataattaaagcccaaatttgagatagaagagaaaataaataatagcttatatatcaaatttattatgtgaaaaagacttttgggaagttgttccataataaatgaagatataaataacaataattaaaatttaccaaaaaaagcattaaaataactgtgaaaaacttaaaagaatgtaaaattgaaagttattaaatttttaatctcaaaaatcataaaaaagtcatttcatcaatgtcctatgaaaataaaataaacttagtaatgtaacaaataaaaagagtaattaagaaaaaagtaactttcacaaatgaaaktttaaaaaaaagaaaaaataatggattccatactttgtgtttaagatcagaacatagtctcaaatggttcagaaataaaaaaatcaaacttccaaatatattgtggtgattataaataataaaaataaataaatataagatgtattctaactcagaaaaaagggaagtcacatagaattgacattagaaaagaggtgtgaaatattcag

SEQ ID NO: 227611 - DNA, 364 bp, Homo sapiens
ctcagacattgctagcaacttctcagagaagcaataggytgtaccatttagcttatatctgtagatggatattctatctaggtttttatgtgtgttctaatgttcacacaatgataaaatcgcctagtaatgcatttctcagaatgtgtttttgttgccataggatgcatgactgttaaattcctattctggcccaaagattcagtgaaaacttctgtgtaaaataaatttttccgcctaaagtggtgaggtgtagaatttactgtattaatgggagagagctctcacacttacaagtgtattgtacgaaatcctgtctgtccattatgtgcaaattttgttcctgcatgggatcattaagtgg

SEQ ID NO: 227612 - DNA, 621 bp, Homo sapiens
ttttgaattgtgaactttgtaaatgtatttccttttcagaataaaaattaatagtccatatttccataaaacaacacaatataaaaccacgattgtagtgtccccacaaggaggtaracaaataactagaagagaacataataatagttatatataagaatctaatataccaatgaaaaaaataatgcacatacatggagaagtttcagttgaaaaatgttactgaaatttctctttaggttctctttaggttctctttagaaataaatctctttaggtcattttctcactttataaataaaaaataaattccacaaatatttaatagttgaatattaaaatttcaaaccacaaaaatattagaaagtaccattaaatgttggaaaatgtctccgaacatatttggtagatggtagatgtccagtaattaatgtatagacagtattgagtttataattctgtatcttgtagcatattaattttgatttgacaatttggagaagacttgttgtctactatgtttaaggcactgtgttttattcactaaaaaatataaatatatacaagactcagtctttccaccaaagagtttataaatcactcagaagaaaatacatataa

SEQ ID NO: 227613 - DNA, 582 bp, Homo sapiens
aggaattactttctaaagaaggtttcacttgatctggattttaaagatgaataagggccgggcatggaaaaatgagggcgaagagccttccaggcacagaggcaggcaagcatagagcaagtgtaaggcatgatgactattctggctgggatataaaatgactaagattccttgagaaagaaattgaaaaatagtgtaactcaagtgcacatggagcatttttcataataaatcaygtctgtaaaacgagcctggataaatttaaaaggttgaaattatacaatcattttattactcatatacttcttttactaatccaaccacaataaaaggaatttagcaatcaataacaaaagtaaatttaggaaattcacaaatatatggaaattaaacaactaactcctaaataaccaatgggtcaaagaagaacttgcaaatacaatttaaaaatgctttgagatgaatgaaaatgaagacacaacataccaatatttatgagatgcagcaaaaacagtgcttaaaggaaaatacatagctgtaaacacctatatagaaagaatctcaaatcattaagctaagctt

SEQ ID NO: 227614 - DNA, 570 bp, Homo sapiens
taaaatataagccatagactggcagaaattatatttgcaaaacgtatatgtgataaaggatttgtatcaaaaagaactcttacaactcagcaagtagacacactatccaatgaaatcattgtacaatgagcagatgattcactaaagaagatacttggatgraaactaacgatagtaaaagatgctcaaggccaggtgcggtggctcatgtctataattacagcactttgggaggccaagacgggaggataacttggggccagtggttcaagatcagcctgggcaacacagagagaccacatctcctcagacaattttaaaaattagctgggcagtgatgtgtgcctgtagtcccagctacttggaagactgaggtgggaggataccttgagcccaggagtttgaggttacagtgagctatgatcttgccattgcactccagcctggttgacagagggagatcctccctcaaaaaaaaaaaaaatgttcaacaccattaatcactagtaatatatatgcaaattaacccacaataagctattactatacactaaaaaatagaaaagctta

SEQ ID NO: 227615 - DNA, 614 bp, Homo sapiens
ctgataaaattacactcttgatgaaacatagtcagatggactgaggttgaacaaatgggaagaggaagggaagacattctgctgtacaaacatctgcaacaagattgacagaggtccccacaaagttcttataaggatgtgtggggcccaaatttaggactttaaaactaaaagagtaaataaawttcataaatctcacactttcacatattgacacatccttatacaaaactgaatcatgtattcacgagctgctctgttgcaactactaagaatcagtgggtgtagtaagataattttagaagagaattttcctgaatttgttactagaacctttccaaatagttttccttctcctctatgggacaagaaagagtgagactgggtctacagaggagtgaaacctgtcaccataaggtcaggagaggcagaatctgaatatttggaaccggaaaagtaatatagatcaaaaaggatatagactctagcgatacgattcccaagcagggtggtgttcagcaccctgacctccttcagtttttacctgagacaggttcacatctgctttacagctcatttccttcagtttctcatacatttctctcaggagtaca

SEQ ID NO: 227616 - DNA, 563 bp, Homo sapiens
caatataaatgaaaagttgcctacttctgaattacaatttctttgtctttcatatactacatgtacaatattcaaaatcctccccttccatcccagcccagcttctgccaagtcttaccagagcctgtcacaaatatagctgaataagacaaacgccaggccactcaatcaagaggcttgccgtaagaaaaagatgctggaaaagggtggttaaaaaaaamtgactaaaatggacaggactttccatctctattgctctgagtgtggtcactttctaagtgcagcccagatgtgcatggcaagaggtgcaattggaaagctggagatgcaatgagacaagccgaggagctcctccagacatgcatccagctgttgttttccttatgggtagaacatgaaccttcaattcttcaggaccctgtgcatgagaatgcatggttttttcccttcatatggcaggtgtttcataaaattggaaatgttctatttaagtcacagtgctttgtatcttacagaaaattcctctaatatatatatgtcatttattagtacttaaacatata

SEQ ID NO: 227617 - DNA, 533 bp, Homo sapiens
ctccaccaagctggacctgctgaaattctgatcattttcctggcttagttatgccctgatagtcctcccttgacagtaacatcagctttataagttcttaccagataccttttttttttttttaactttcttagaactatgattttacagaagcttagaagtttgaattcttcacttcagtggcaacagattatatgaccacatcacagagaccatgaggcatatagcttatctagtaagaggtactggaggctgagtgaacaaagagatcagtctaaaaactmacaaagaaacaccagaatgtttatccagttgctaaaaagacaatggatattcatacacataataaaatgctttctttgacctatccagctgtggtgggggagggaggggttggcggaaaaaagtgccttgtgggagattaagttacagaggaccatcagcgcaaatatttgtgatcctggtatgcctatgacactacattcttttagcttttcttctaattatatggtgctttctcaatttgctgataa

SEQ ID NO: 227618 - DNA, 386 bp, Homo sapiens
gaattctgaaatctaataatctcttttatgttctcttggaagcttgaaagcacaaagaacttatttaatcccacgacaatttatattttaaaacatattctcttttttatggaatgttgcttcagcaacagtgtttgatatatgtggagtagatgaattaatattttyataaagtttaaaaatgcatcttcataacactgtgcctgcatggatatatattactttgcatctatctgtctatctatcgaccatctatctatttatacatagatatatctgtgtatatatctatctacctatcattaatctatccctatctatttgtatgatatagctgagtaagccaacttaagaatatagttcaatatgcttgttgaaacactttt

SEQ ID NO: 227619 - DNA, 386 bp, Homo sapiens
gaattctgaaatctaataatctcttttatgttctcttggaagcttgaaagcacaaagaacttatttaatcccacgacaatttatattttaaaacatattctcttttttatggaatgttgcttcagcaacagtgtttgatatatgtggagtagatgaattaatatttttataragtttaaaaatgcatcttcataacactgtgcctgcatggatatatattactttgcatctatctgtctatctatcgaccatctatctatttatacatagatatatctgtgtatatatctatctacctatcattaatctatccctatctatttgtatgatatagctgagtaagccaacttaagaatatagttcaatatgcttgttgaaacactttt

SEQ ID NO: 227620 - DNA, 599 bp, Homo sapiens
gctcatagcacagaaagtcaatcaatgtgacagaaagatggtcagggaagaaggctttatttggatgccacagtcaaagagaacagattcggttcaaatttgtctcatcaactgactaaaatttggggtttacatgtaatagcaaagaagaaaygtaactctgtgtgagaaaacaggaattagggaggagtagggaagagaagttggtccgtaggaagcaggtgatcagttaggcagtcataacaggtgagggatctggcatctcattgtatagatgaagtggtctgttaagtttcacttccttgatactatctgagaggcctgatgattgatttccagagaaaggaactcggataacacaaatgtaagttgctcaagttttaagattgggaaggtcaatttctaccttcatttaacaaactgtacacactagttctgtggaacaattggcccagtttcaaattgacagactaatcttcctataacacaaatataagcattccagcatcttgtgtaaatttgtttaatagctcccattgtcattgacatgaagttcaagtgtcttaaggagcaccataacaccctttttgatccaactc

SEQ ID NO: 227621 - DNA, 575 bp, Homo sapiens
tttaaattttaacattgcatgagggacagacgatgttatccccatcttacaaattagaackccaaagataaaatggtttaaaaacttagtccaaggtgacacagctagcagaggtgatttgaattatttgaatggagatctatttgattgcaaggcctatgtcattaatcactgtgctgcactgacgattgtatgtccttctatatatatagggcatctctgtttaactgtttccattcccaactctatttttatagtaatacttttaaatgtttacatactggttttgcattatctactactcagatgcacacttcaatacatgtatttcaaaacaatacatgaatgggatacattctgagccttcgtttatcttagaatttacttttattcactcatacataaaaatgttagttttttttatcaacactatgatctcatgaattttaggtttgcaaaagaagatactgatattgtccactaaaagtaacagtaactaccacaacatactgtctactagtattacataacgagaatgttatttttgtatgaccactattcttcaatgcttgttt

SEQ ID NO: 227622 - DNA, 575 bp, Homo sapiens
tttaaattttaacattgcatgagggacagacgatgttatccccatcttacaaattagaacgccaaagataaaatggtttaaaaacttagtccaaggtgacacagctagcagaggtgatttgaattatttgaatggagatctatttgattgcaaggcctatgtcattaatcactgtgctgcactgacgattgtatgtccttctatatatatagggcatctctgtttaactgtttcmattcccaactctatttttatagtaatacttttaaatgtttacatactggttttgcattatctactactcagatgcacacttcaatacatgtatttcaaaacaatacatgaatgggatacattctgagccttcgtttatcttagaatttacttttattcactcatacataaaaatgttagttttttttatcaacactatgatctcatgaattttaggtttgcaaaagaagatactgatattgtccactaaaagtaacagtaactaccacaacatactgtctactagtattacataacgagaatgttatttttgtatgaccactattcttcaatgcttgttt

SEQ ID NO: 227623 - DNA, 570 bp, Homo sapiens
tcttggaaatttccttgctattaaacaagagggaaggtgatacattttggaactccaggtgaagatctcattacaaataawggctcaaaatgcttctttgtgctttctgatttggttaagacttatttagacctattccttcaacacattaaccaggtaattaatgactgtcagttttgaattgtaattagaaaaaaagaaaggttttctaataggtataggttgtgatataaactaccttgacattttgaccttatgtctcagcagatctaatactacttactagaaatgcccagaggcagataaagatgtatatggagactgcctcaagctttataggaatatcacagaaaagacttctcgaggtttacaaaaagactatgttgtcttcttttaccgaatattttacaatttaaaagtttcatccactttgttactaagccttcgtaggttaaaatcatgaccatggggacaccaggtgaaaatatttctagagatgcctgtcatgaatctagttcaccaaaccataatatcaggcatgaacaataattattcactgtagaatgttct

SEQ ID NO: 227624 - DNA, 565 bp, Homo sapiens
agattgtgccactgcattccagcctgggcaacaaagtgacactgtctgataaaacaaacaaacagacagaaagtttacatttaaatttgtttctatttataactcgttctctttattttaccaagttctaaatataatttctctaatttatttgggtagataagattaataattcaagacttgattctagaaaacataatcaaatttgttaagtaacctgaatgtggattttggtcactcaaatctcttttccttaatgtgtgtcataaatgcataacatgacattattactaacaactgtaaaatackccacacatcataaagttgaatgtacaattcattgaattagtaaaaaatccatgttaatttcataaatgttcctatagacaacacacatttcactatagatgtgcaagtacattatcttatattgtttgcttgctaactaattaaaattattttttctataatattatagaagaggtttatggcaataatcaaccggtctcctaaatctatggtttccttgttatatgttttgtggataaaattgattgaataaatg

SEQ ID NO: 227625 - DNA, 565 bp, Homo sapiens
agattgtgccactgcattccagcctgggcaacaaagtgacactgtctgataaaacaaacaaacagacagaaagtttacatttaaatttgtttctatttataactcgttctctttattttaccaagttctaaatataatttctctaatttatttgggtagataagattaataattcaagacttgattctagaaaacataatcaaatttgttaagtaacctgaatgtggattttggtcactcaaatctcttttccttaatgtgtgtcataaatgcataacatgacattattactaacaactgtaaaatactccacacatcataaagttgaatgtacaattcattgaattagtaaaaaatccatgttaatttcataaatgttcctatagacaacacacatttcactatagatstgcaagtacattatcttatattgtttgcttgctaactaattaaaattattttttctataatattatagaagaggtttatggcaataatcaaccggtctcctaaatctatggtttccttgttatatgttttgtggataaaattgattgaataaatg

SEQ ID NO: 227626 - DNA, 534 bp, Homo sapiens
ctccttaaaacaaaaaatcaaaatttcaaaccaacaaacaatatgctgtcagtttatttcatggttacatcttgaatttagctaaaaaacacaaggcaaaaattctctgatgctgtatgtcttcaatatttgcccacctaccccgaaactagacaggttttgcattcttatgcatttttctcagattttgtgcttagattactttttttcttgcttttcaaaagtgcctgaaacctatttccttatacctttgctgtaatgaggggaaaaaaattgtttgattagaaatatttaggggtgggcaaaaaaatttkcatttctgctgacagcttctatactaagtttggcccagtgggattagaagtctctgagatattaaacctcggaaagaagaatttgtaatggaaaggctgaaagaacttaattatagccagtagcaccactcaaatactttaagcatcctcaaatgtgctgtgttatcttaagagaaaaaaaaagatacagaaaagatggaggttatggatcagacatagg

SEQ ID NO: 227627 - DNA, 561 bp, Homo sapiens
ggtctacacagctcaaaattaattcagtgacataatattatgctaaagttatacttattttgaawgtctagaatttttggttgatggttataaaaataccaccaacttagatatttttgttttgctaagatagaatagaattactacaacagtccacacattctaaacatttaaacatcaatggtttctggaagatgctgttgtccttcatagtttggagaaagttcagatggctttggtgaaagccaaacttttcttccacccacaaaactgtcttttcagaagtcttgctggatgttttctttgtttgcctctccatattgctacttaatttgatggttttcattttctagttgaacaattgttcaatagtctgttcaatattgtaattcttactgatcagggatatccaatttgattcgatttctcttgatttagttccagctgtgagttgcatgtccttttgctgctagtttaaatcttgaatatgttttcttaacttctgaatcacttctttctgtgcatgttcaatcatatgaactagattttcattatatacct

SEQ ID NO: 227628 - DNA, 561 bp, Homo sapiens
ggtctacacagctcaaaattaattcagtgacataatattatgctaaagttatacttattttgaaagtctagaatttttkgttgatggttataaaaataccaccaacttagatatttttgttttgctaagatagaatagaattactacaacagtccacacattctaaacatttaaacatcaatggtttctggaagatgctgttgtccttcatagtttggagaaagttcagatggctttggtgaaagccaaacttttcttccacccacaaaactgtcttttcagaagtcttgctggatgttttctttgtttgcctctccatattgctacttaatttgatggttttcattttctagttgaacaattgttcaatagtctgttcaatattgtaattcttactgatcagggatatccaatttgattcgatttctcttgatttagttccagctgtgagttgcatgtccttttgctgctagtttaaatcttgaatatgttttcttaacttctgaatcacttctttctgtgcatgttcaatcatatgaactagattttcattatatacct

SEQ ID NO: 227629 - DNA, 561 bp, Homo sapiens
ggtctacacagctcaaaattaattcagtgacataatattatgctaaagttatacttattttgaaagtctagaatttttggttratggttataaaaataccaccaacttagatatttttgttttgctaagatagaatagaattactacaacagtccacacattctaaacatttaaacatcaatggtttctggaagatgctgttgtccttcatagtttggagaaagttcagatggctttggtgaaagccaaacttttcttccacccacaaaactgtcttttcagaagtcttgctggatgttttctttgtttgcctctccatattgctacttaatttgatggttttcattttctagttgaacaattgttcaatagtctgttcaatattgtaattcttactgatcagggatatccaatttgattcgatttctcttgatttagttccagctgtgagttgcatgtccttttgctgctagtttaaatcttgaatatgttttcttaacttctgaatcacttctttctgtgcatgttcaatcatatgaactagattttcattatatacct

SEQ ID NO: 227630 - DNA, 561 bp, Homo sapiens
ggtctacacagctcaaaattaattcagtgacataatattatgctaaagttatacttattttgaaagtctagaatttttggttgatggttataaaaataccaccaacttagatatttttgttttgctaagatagaatagaattactacaacagtccacacattctaaacatttaaacatcaatggtttctggaagatgctgttgtccttcatagtttggagaaagttcagatggctttggtgaaagccaaacttttcttccacccacaaaactgtcttttcagaagtcttgctggatgttttctttgtttgcctctccatattgctacttaatttgatggttttcattttctagttgaacaattgttcaatagtctgttcaatattgtaattcttactgatcagggatatccaatttgattcgatttctcttgatttagttccagctgtgagttgcatgtccttttgctgctagtttaaatcttgaatatgttttcttaacttctgaatcrcttctttctgtgcatgttcaatcatatgaactagattttcattatatacct

SEQ ID NO: 227631 - DNA, 508 bp, Homo sapiens
atcattatctaagagtacatgtaacaagggcagttttctaaaaaaatgtctttccttcaaaaacttgcctatttttcagctaagcggcctctgcttgactccttgacattgactgcaagagttggcctaatgacatgtttcgtttagttcctggaggagaacaaaagatctttctttgtgaaaatccaaaccatccaactttaggcctatccttagtattctccctgtgtgagagtctgggmagagggagggacttggctgatttcagggctctgagactctaataaatctcaaatctgggattaagtatagtattaagatgagtcacaagagtccagtgaacttattgtaaaataaactaattgtaagagtaaatctaaaacagtttagtgcagcctcataaaagcaaaaaaaaaaggacagttctataattaagaaaatctgtttgcaacacccaacaggagagaacaagtcttctgacagtagcatttttatctctctaaagaca

SEQ ID NO: 227632 - DNA, 508 bp, Homo sapiens
atcattatctaagagtacatgtaacaagggcagttttctaaaaaaatgtctttccttcaaaaacttgcctatttttcagctaagcggcctctgcttgactccttgacattgactgcaagagttggcctaatgacatgtttcgtttagttcctggaggagaacaaaagatctttctttgtgaaaatccaaaccatccaactttaggcctatccttagtattctccctgtgtgagagtctgggcagagggagggacttggctgatttcagggctctgagactctaataaatctcaaatctgggattaagtatagtattaagatgagtcacaagagtccagtgaacttattgtaaaataaactaattgtaagagtaaatctaaaacagtttagtgcagcctcataaaagcaaaaaaaaaaggacagttctataattaasaaaatctgtttgcaacacccaacaggagagaacaagtcttctgacagtagcatttttatctctctaaagaca

SEQ ID NO: 227633 - DNA, 488 bp, Homo sapiens
tgggttgacagaacatagaggagtttttgggcacagattgtccaatagaagtcataccrtaccctgaacaactcctgtgggttcacaaagtattcagatttacggagtactgaggttttatcattcagctttagtatgttaaaagcatgtatagtgtccaaactcatcaagcacatttgatctgggcaaaactccaagaattctatgagtttgaagctcagttcctctcagcatttgggtccataatcatgtttgtaagcagatggtaatccaagacattgtatgatagaaaaaccctacctcaatattttctctctaaatccaaatcacttccctaagatgtgtaatagtcaaataaaatggtaaactatattttgtggaataagctggcattcttattgttgtacttactgaccaacaaatggatttgaatttttgagaattctgtgtgcaaatgcaatttacaaatacctgaaaagcacaaacat

SEQ ID NO: 227634 - DNA, 492 bp, Homo sapiens
tttggtgcagtgagggggaaaaacaacgtggaaagaagaaaaccctgcaatagccattcaaaaccccacaatcagaccttgtttatgtgatatggactctgagctttctcttaaaaaatgcatgtgattaagaaaatactatgagaacttaataatagttccctgaaacctgtgatccacctcttatctttctaactcttggaaatgcagctaataagaatgtatgtttttacattcattctgattcataagaaycagtaatacactgattcttagcaacaaagtagttctttaattactacaaaactcaataattcattgcctattgttgtgcatggcacataacattcggtgacttgtattggcatattcgtttacatgtgtcactgctgtacctgtaatttagtttaatgccagatcaatgtgccaagtgtgtgtgtgtgtgcgcgcgtgtgtgtgtatgtgtgtgtaaaactcttcccaacagtagtt

SEQ ID NO: 227635 - DNA, 409 bp, Homo sapiens
tgtactgttttctttattttgtcttcagtgattcaaggtggtctttttttgtttccttctgtttaaaaatcaaatttcccatgccggaaactattattgttttatacttgggttaatagtcactctgacctttttmcaaaaagcaaaaaaaaaaaaaaaaaaaaaaaaaatcaattcaaacctacaaaccagtgtttttattttgaagaaaaacaaactttctttttttccatgaaagggaccaaaaaaaaaaaaaaaccacagcaaacaagtgttttatgattcacaattgcatgctcttcatagtcatggcagttattatccaattatgtatggtttctcctgtatcatcttgtctgtatatcttacgggtgtcattttgtttatttttgctttgattattttagaa

SEQ ID NO: 227636 - DNA, 413 bp, Homo sapiens
tccaaaaggagcaaactgtgtcccagaacaaagcttgagaatatttataggaaagcaaacatattaaacaaggtaaaatccataatgtctaccagcatcaayagtagaaagatctatggaaaacacctaaatatttagaaatcaaataacacatttgtaaatatgagctaatcatatttacagatacatcgaaaagggaaattagaaaatgttttgagttgaatgaaaacaccaacatggcacatcaaaattcacggatgacactaaagcagtatttggaaggaaattatagcactaaattcctacgttagaaaagaataaagatctcaacttaatgacccctgcttgccctttaattagaaaaacaggagcaaattatacctaaagtaagtaaaagaaaggaaatagtaaag

SEQ ID NO: 227637 - DNA, 413 bp, Homo sapiens
tccaaaaggagcaaactgtgtcccagaacaaagcttgagaatatttataggaaagcaaacatattaaacaaggtaaaatccataatgtctaccagcatcaatagtagaaagatctatggaaaacacctaaatatttagaaatcaaataacacatttgtaaatatgagctaatcatatttacrgatacatcgaaaagggaaattagaaaatgttttgagttgaatgaaaacaccaacatggcacatcaaaattcacggatgacactaaagcagtatttggaaggaaattatagcactaaattcctacgttagaaaagaataaagatctcaacttaatgacccctgcttgccctttaattagaaaaacaggagcaaattatacctaaagtaagtaaaagaaaggaaatagtaaag

SEQ ID NO: 227638 - DNA, 612 bp, Homo sapiens
gttgcctattaagaaaggaccaaaagaagtggtcttgttcagccatagcattgtactagaagaggcatcatttctatttttacaaatacaacctcaaagaggtaaaaaagattaacgtctgtcaagtcaacctcatccttctattccagcgtcagtaattaaatgccattcttgtgatagttatcattaatgggagagactgatttggcccatgaattttgaaaaataaatgcagtgaaagaaagttccaggaaagggctgttctgggctcagcagtagctcttctccactcaagacacagaatgtgaatatcaacagccagatggtcatccaggtagtaggctctgaaaggcatcagggaggaccctctggcaaaatctgtcttttatcccaactgtcactgtgtwtggaatttcataagcattcaatcttttgagttaagcagtgtcaattatttttcttcttttctctattcattcaagaattatttattaagcattaatgatgtatcaatgagtacgaggtactagaatgaaaaaaaactgttttagctattaagatgtccacagcctactgaaggagacagaaaacaagcagtgacacaatagctaa

SEQ ID NO: 227639 - DNA, 612 bp, Homo sapiens
gttgcctattaagaaaggaccaaaagaagtggtcttgttcagccatagcattgtactagaagaggcatcatttctatttttacaaatacaacctcaaagaggtaaaaaagattaacgtctgtcaagtcaacctcatccttctattccagcgtcagtaattaaatgccattcttgtgatagttatcattaatgggagagactgatttggcccatgaattttgaaaaataaatgcagtgaaagaaagttccaggaaagggctgttctgggctcagcagtagctcttctccactcaagacacagaatgtgaatatcaacagccagatggtcatccaggtagtaggctctgaaaggcatcagggaggaccctctggcaaaatctgtcttttatcccaactgtcactgtgtatggaatttcatamgcattcaatcttttgagttaagcagtgtcaattatttttcttcttttctctattcattcaagaattatttattaagcattaatgatgtatcaatgagtacgaggtactagaatgaaaaaaaactgttttagctattaagatgtccacagcctactgaaggagacagaaaacaagcagtgacacaatagctaa

SEQ ID NO: 227640 - DNA, 535 bp, Homo sapiens
agactgtgtcttaaaaaaaaaagattagccaggcatggtgatgcatgcctgtagtcccagctactcaagagactgaggtgggaggatcacttgaacccaaaagtttgaggttgcagtgagctatgatcatgccactgcactttagcctgagtgatagagcaagactctatctctaaaaaattaaaaagaaaaagaaaacaaatttcaccctytactgctcactgctcatcttcaccagtactcccaatcctcttagttctgctctactttaaaaaattgttttccatcacacttttcattttctaagagactgtttatgttagttacttatcatcatcaccatcatcatcattgtcattatcaccaatatcaccctcattactggtcttttaaaacttgaatgtaaactccaggatggcagggatctttccccactttccttgctgacatatcccaagagcctagaaaagttcctggcctagagtaggcactccataagtactggatgaattggataaaaggtagactacacagg

SEQ ID NO: 227641 - DNA, 578 bp, Homo sapiens
ttaggttgatacacagggacattttatcatttatttcargcattgacatacatttagtgtttttgatttgtgaagacgtaacaaaataatttctaaagacaagaatgtcagcacaataaataggtttgtttctaggatatatcagatgctcgctaaatgtgatcacttcctttcaaagtgaagcacagtaattgcctccaaggaatgataaagccaaatgtcattttttcttatgtcagtctgctgtagtatcacccagtctagtaacactttatctccaacgggagagaattttaaggtttgctgtgacagctaaacaaaaaatcaaaactactgtgagaactccaaagagccttcttcaacaaaactaatcaaaccacattgtgtgcttaattatttctattgtaccttcagactaaagaactataggagggttttgttttgttttccccaatttgcattaggattttgacgtatggtcttctgttgcttttaataaaatcatgctactccatttaagaaatatttgccatgaaataagtgtttcagcatgtttttgttttttcaaatctgaaagg

SEQ ID NO: 227642 - DNA, 578 bp, Homo sapiens
ttaggttgatacacagggacattttatcatttatttcaggcattgacatacatttagtgtttttgmtttgtgaagacgtaacaaaataatttctaaagacaagaatgtcagcacaataaataggtttgtttctaggatatatcagatgctcgctaaatgtgatcacttcctttcaaagtgaagcacagtaattgcctccaaggaatgataaagccaaatgtcattttttcttatgtcagtctgctgtagtatcacccagtctagtaacactttatctccaacgggagagaattttaaggtttgctgtgacagctaaacaaaaaatcaaaactactgtgagaactccaaagagccttcttcaacaaaactaatcaaaccacattgtgtgcttaattatttctattgtaccttcagactaaagaactataggagggttttgttttgttttccccaatttgcattaggattttgacgtatggtcttctgttgcttttaataaaatcatgctactccatttaagaaatatttgccatgaaataagtgtttcagcatgtttttgttttttcaaatctgaaagg

SEQ ID NO: 227643 - DNA, 597 bp, Homo sapiens
actgtggtaatctcatggattgttaactattcagactcttaaaagggaggcacatattagagacttgaactgaaacggatttaatttctagagtcctgaaaaaatcccacagagccccagctgtggctgtggatggaactgtacctctaatcaagtgaacagggccccctctggctaggactgagcagtgtataaactaagaaagactgtaatatccttagatttttaattcatggggtgagaaagataaggcaaattcgttgggagctttttgttttgttttatttatgggcttaaactaccaaggaatacaatcttgggccttctcattygtctctggaaatttcatcattacagaggataattattcaaatatatgctgtcttcatattgtgggtgttgcatctttgaagtatgtttaggcctctacaatcctctctgcatctctccaagttaagataattttgtggtaaatccatatttagtgtttgtgtaattatacattatataattaaaaccgtgcaaacattattcacagttgaacattctaatatactattgtgttttcttttttcttccatggagttagtaattgct

SEQ ID NO: 227644 - DNA, 597 bp, Homo sapiens
actgtggtaatctcatggattgttaactattcagactcttaaaagggaggcacatattagagacttgaactgaaacggatttaatttctagagtcctgaaaaaatcccacagagccccagctgtggctgtggatggaactgtacctctaatcaagtgaacagggccccctctggctaggactgagcagtgtataaactaagaaagactgtaatatccttagatttttaattcatggggtgagaaagataaggcaaattcgttgggagctttttgttttgttttatttatgggcttaaactaccaaggaatacaatcttgggccttctcatttgtctctggaaatttcatcattacagaggataattattcaaatatatgctgtcttcatattgtgggtgttgcatctttgaagtatgtttaggcctctacaatcctctctgcatctctccaagttaagataattttgtrgtaaatccatatttagtgtttgtgtaattatacattatataattaaaaccgtgcaaacattattcacagttgaacattctaatatactattgtgttttcttttttcttccatggagttagtaattgct

SEQ ID NO: 227645 - DNA, 613 bp, Homo sapiens
aacacattatgagaactataataatgatgtattcatatcttaattactcaagcatgtgttctttgtgaacagattcccaattttagccagtatcttcacttatctttaagtaacaagtgtagctgcctacattcacagcaaagcagatagagaagagaaggtcggggaaggaatcggagaagacaccgaaaagccttttgacattctgagagctaagttacctctagaaaggccacctccaaagacttcagtgttcagagcccaggatcacagtacatggctgttctttattgtcactaaatgaagtcaaaactgctccctttgttgagatgacttaattctgaaatccaggcccattcaagaatctgtaaaatgctttttttataaaatgygctttgaaagacttaaccgctgcaaactaataagcaattttgtttgaaaagttatgttctgaagcatcagtgtagcacactggatgaggggaaggctttggagtagtgtaccccaatggagaggagttatttattactgacattgtttggaagtgctggtacatgtccataatgaaaagtagactggctttcagttggtttaagttctctacagacattgc

SEQ ID NO: 227646 - DNA, 504 bp, Homo sapiens
aattatgttaaactgttatgacagataactytcatcagagtctcagagataaacaattattatcttttctttcataaacttgtcctttaattattttggccaaactctttccagagttttcctcttccaaaatctgctaacattggaactccatccacccttgccttttgcaatctaggaactaagtttaatttaataagcatatacttttcagtgatcatgatctcaggacattgataaaatataaattgtgtttgcttattttgacttttattctctccttttctttctagttcttttgttacaattactcattatctaccaatgctatataggcatctaagtccataaacactttctcaagtacatttacttcctccattcttattcttcataaagtctgtgttattgtaatagcattggtagaaaattattgtatagatttatctgcaggttaaactgttctcttccacaaccatattcaattaaacaaaaaagaattct

SEQ ID NO: 227647 - DNA, 473 bp, Homo sapiens
cacggtttgtagggcacgattccccagaccccttaggtaggaatttgggcaagacaaaaaatcagagcttagtcctcatgctgaaggtgagagatattattttggaatctatttgsattcatttttatttaacaagtaagcgctaccagttaggattatgttcggctgccagtaagagatattaaattcccctaatagtttaaacactcagaatatctgggggtgtgcatttcaggacaaatatggcatacttttctctaaaaagccctcacagacctagaatctcttgtaaacccaaaatatagcccatattcttatagtccaaagagtattccaccttccagttattaagaataaggaaaagaataaaggccaaaagtcacatatattcatgtatcttttttattaatttgttaaatgtcatcaaggctactttcacaatttgctcaacttgactaaaatttagacaagtt

SEQ ID NO: 227648 - DNA, 484 bp, Homo sapiens
taggatactgcctttctatttctttgttgctaacttctttttgaactccataactcaccctgggtgtttcttcttttctagtcccttctctaacaatgtccctaattacatatatactttcctctactgtggcaccaaagagttgtgtgcattgatcaacttacgttttgttccctctgtacaccataattccttgactgatgaaatatctggctaattatttgtcatatactaccagcaacactgattcttctccttctagtaccactataatcacaattactaataatattaataggtaaaatgggctaaaaaattaccatttgcattatttcaacctctgcgtacatttatacctcactaaaacactgtgtgtcaggtactgtaaatgtcctcatattktatataagtaaactaagatacagaaagttgaagtcactttcccatagtcacatagctataggtggcaggtccaaaagacaaa

SEQ ID NO: 227649 - DNA, 406 bp, Homo sapiens
gctgtgttggtgactttgatattcgggttttctcaaagaaagactcagtagtctttcagtagaaaacaatagcatgctgcctggcttatcttcagacagtcccctctaagcagatggtggcttatttcacacttctgtgaataaccatattgccaaaacgttccccagtgccagggtgtttgtcttgccagagtcttccagattagccacatgtcatgccagagccagccctctctaatttccctttggccctggtgctgagcctggattaccttcccagactctcygttctctcattgtcttttccattatgcagactcaatgtctctcaattgggataaactttgttcatcacagatgttctaataacattaaaacttaaagggaaaggatacgtattccgtta

SEQ ID NO: 227650 - DNA, 460 bp, Homo sapiens
ccacaattcaacagaaagttgctcactgctgtgttggtgactttgatattcgggttttctcaaagaaagactcagtagtctttcagtagaaaacaatagcatgctgcctggcttatcttcagacagtcccctctaagcagatggtggcttatttcacacttctgtgaataaccatattgccaaaacgttccccagtgccagggtgtttgtcttgccagagtcttccagattagccacatgtcatgccagagccagccctctctaatttccctttggccctggtgctgagcctggattaccttcccagactctctgttctctcattrtcttttccattatgcagactcaatgtctctcaattgggataaactttgttcatcacagatgttctaataacattaaaacttaaagggaaaggatacgtattccgttactatcaggggatcctttggctttgcac

SEQ ID NO: 227651 - DNA, 597 bp, Homo sapiens
actacatacaaatattttatattttgagtagcaaaaccctgaagactcctttaatgaatgtactctgaatgaatgaagaaaccgtacctttgcctttggcccacaattgcaggttcagatacaaaaacaaaaagggtggtaagaacccagaagaatgaatataaaataaaactgtgagaaaggattttctgacaaacacagcaaataaattcttagtttgttttcctgctccaatttttttcacccattcaatttttaactcatagactcctaaaacaaatgaagaaataaaaatacctatactttgctgaaaataaataaggttgttacagaagatctggaatttatatttcacagagaatattcatattacccacaatgtgatgtgaatttgcacactgtggttggggggtttgtgcattgccaagatgatgtgtaaaatgaggcgctggtcgaatgctagaaaaccaggatcaccttgaaacacaggctgcccagcacataaaaatttaatttttagttgtgtagttaataaacacaaaacatcacagatagaygcagacatacatagacacacacaccaacacaagtacacaa

SEQ ID NO: 227652 - DNA, 376 bp, Homo sapiens
tatctttttatttttcttttagctaattcaataggtaactcatgttttctgaatatattgagccattgattctgtgtttctatgtaccaccagtgattttcaccattctatactgaacctaaatagcttacaatagatattacgttccgttaattttgatatttttataatgggttatttttatcaatattatttatgtgttttttcctactttgaggtggaaccttcaataaagcctaatsacaactgctattactccacatattttctcatatattacataagtatacccaaaaatccaaccaaaataatcacattttattgatattactagttgtcttctttttaacacaaataaatgtgtcttttctctttt

SEQ ID NO: 227653 - DNA, 525 bp, Homo sapiens
attaccatgggacttgtgaatattttataacccattattttaaacttataacttaattcagattttataaactagcagtcaagcactaataaaaactatacacattaactctgtctcaccactttttaacattttgttgtttattcaccataaatacagtgttatgatattctgtgcacttattatcagtgagttttgaacattcaaataatttcttattgctttttttttttttttttagacagggtctttctctgttgcccagattggagtgcagaaacatgatcttggcccactacagcctcaatttcctgggctaaagagatcctcctacctcagcctcccaagtagctagaagtaagtttttatttgtttatagagagaggatctcamcctgttggctaggctggtctcaaactcctgggctcaaatgaaccccctgtcaaagtgctgggattacagacataagccaccacactcagacttattgttcattaaggtcctttttttggggattgaagaact

SEQ ID NO: 227654 - DNA, 555 bp, Homo sapiens
ggctcatcaggacagcataagcatatacctttcctacactgctgcaacagtgagaattagcaaacctttattcttcaacagctgatagggaaaaacaataactgttcacgtttctttcactacttacaaaggtraacatctttttattggtatattagtaagacgatcatatcatttattgtccaatctggagtattttaagagtagaagtgagtgctgactggagggtcagtgagggcttatggtcacgctatggctgaccacttgcatttcttagtttcagaattccttgtttgtagcgttttcttacttttctattgagttgtctgctcttttcttaatcacataaaggtcgcgttataataattaataataataataataatattaatcctttgtaatttgtgttaaatatatattccccgtaggtcacttattttctttttagttttgaaagcaatacaaaaacatagtctttaaagtttgcttcagatttcttaattcaactcttttgagacaattgtagattctcatgcaattacaggaaataatata

SEQ ID NO: 227655 - DNA, 563 bp, Homo sapiens
tgtagcacttttttatttaccatcacagtggagcaagggaatatcaagatgtacccaagtatatcatctgcaggccactcatctccctcctggctccactgggtaatgrgatccctactttccctgccgagatggtgactcctgttctgctggtacctagatacccggagtccaaaattcccagttagcagccatagctttatatttaatgggattcttatgtgtccagttttggagaccataacctctaaccctgaagaactcagatttgtgggagtgggaaggaaaaatttccgtcccccaacagtgggctattgggagtgatggtaaatgtcactattatgtttctacctctttgttcccagacccatgtattcttcccattgtggacatagcattacataaaaatctttgattcaatatgtatcctggaggatggagcctcatctttgtagattatcatcttggagctggctctataactctgcctgcaacagaccatccaaaagatctgtcaggctagcagcttctgagtggcattgtatacagtataaccagtgggt

SEQ ID NO: 227656 - DNA, 563 bp, Homo sapiens
tgtagcacttttttatttaccatcacagtggagcaagggaatatcaagatgtacccaagtatatcatctgcaggccactcatctccctcctggctccactgggtaatgggatccctactttccctgccgagatggtgactcytgttctgctggtacctagatacccggagtccaaaattcccagttagcagccatagctttatatttaatgggattcttatgtgtccagttttggagaccataacctctaaccctgaagaactcagatttgtgggagtgggaaggaaaaatttccgtcccccaacagtgggctattgggagtgatggtaaatgtcactattatgtttctacctctttgttcccagacccatgtattcttcccattgtggacatagcattacataaaaatctttgattcaatatgtatcctggaggatggagcctcatctttgtagattatcatcttggagctggctctataactctgcctgcaacagaccatccaaaagatctgtcaggctagcagcttctgagtggcattgtatacagtataaccagtgggt

SEQ ID NO: 227657 - DNA, 239 bp, Homo sapiens
tcatttgcacacatccagaagcatccttggccacagactcacactgaaatcagagcaagaaccagaactctggaggtttaacttttacacaacaaaaataaagctttacaacaaagtctaaatgtggccatcttgtgcaagtaaatgataaacattatcatttgctgtttcacmccagaacagaaaggaagactgacaaacgggaagctgcccatcaaaatgcagaaggaatggacttc

SEQ ID NO: 227658 - DNA, 343 bp, Homo sapiens
ctgttgacttggaaacccttcgggactttatgcataccagagacagactagaaaactcttggaatgagtaggttcttggtaatcacacagacctgggtttggatcctggctttttgtatcagccaagatgcttttgawgaaaatgaaagagaacctgactcatcccagcacagatgcttaggaaatttattatctcataacacgaagtccagaagttgggctagctgtgggttggtggggttggcagctaagtggtgtcatcaaggacgcttgccatctttcccccttgcctgtttgccatcctcggtgttattctcctcgggagcagaatgcattcacattg

SEQ ID NO: 227659 - DNA, 444 bp, Homo sapiens
cattttttgccagttttcttgcctttttttttgaggagagaattttttgattgtcaattattaattggtcaattattagtccatttggatgatctgttatcaatcagttttatgttcagaggatcactctggtcctagtatgtggaagacactggggtttgaggaaggctggagtgagaggattgagttgggagtttcatggtcaacaggcaacagatgatggaaacctgcactgaggcggtagcarcggagacaccacccagacagttcagatgtgccagatgattacagcttgccaggttctgtgttcagtgctttgcttcctcttttgtacatcatcgtacctattttaacaatgataaaagtattaataccttgcccaaggtcacacagctaaaatggggttagagcaggttttggaatctatatttgtgtgactttaaa

SEQ ID NO: 227660 - DNA, 444 bp, Homo sapiens
cattttttgccagttttcttgcctttttttttgaggagagaattttttgattgtcaattattaattggtcaattattagtccatttggatgatctgttatcaatcagttttatgttcagaggatcactctggtcctagtatgtggaagacactggggtttgaggaaggctggagtgagaggattgagttgggagtttcatggtcaacaggcaacagatgatggaaacctgcactgaggcggtagcagcrgagacaccacccagacagttcagatgtgccagatgattacagcttgccaggttctgtgttcagtgctttgcttcctcttttgtacatcatcgtacctattttaacaatgataaaagtattaataccttgcccaaggtcacacagctaaaatggggttagagcaggttttggaatctatatttgtgtgactttaaa

SEQ ID NO: 227661 - DNA, 565 bp, Homo sapiens
gatgagttttttgggagaattatcttcttttaaatcaattcctggaattctgcagtgcaaagggaaagtaaaatgaagcagtcatgaaatagaaaaagcttagcaggcagcatactttctttcctgtttcttgacgttctgagataagcacattgttatttatttcaagtcttggagcactttgagacaagcacatgtgcctgggcattcataacattaagccctgttaggaatcccacttacacccttggcttctgcgtactgtgagagctgggctggatgataattaagtcagctttcatttgtagagcccaggtcttcaaataatttccaagtaaactatcccagattaatacgtttcaggacataagtgtggttcgctagarctgtcaagctgtctggatgcccttctgttaactttttagaagagattccacgtgtgtcaagttacagtgtttgctgaaatttttctgttgtcttgaaagctatttgaaaatgaaatgttcattatagtactggtggtcaggtatgttccttagatatatatgaattaatgtcaccacac

SEQ ID NO: 227662 - DNA, 246 bp, Homo sapiens
agaaaggagaatatggttgatttatttcctgttcgcagagtccttgccgtgtgcacaagagtgggagctacatggccagcaggttagaaccccrcacgctgtgcgccctgggcatgagcgtcactgcagtcctgactgtctgactcggtgacggggcactgcaaataaaagaaagcacagggtacaggcaaaacaaatgggacaagtgtgggtggagcagacacacgaactgagcatttgcccttc

SEQ ID NO: 227663 - DNA, 202 bp, Homo sapiens
  misc_feature (1)...(202): n = A,T,C or G
gggaatgggaaacaggaatgggaatgcagcaccasagaagttgccagaactgggtttctggattctaatgagattcccctgaacaaatgaattaagatcatgatttcaggaatattcagccaaatctaagtatttggatgaaaaaatatattgttgctatagtacataattgtgcagtaagcacatcacctgnatgtgttct

SEQ ID NO: 227664 - DNA, 398 bp, Homo sapiens
tacagtgtggggagtgctctctgattccttcaggcccctagctgccgcacagcaggaatttttggcagtaatgactctttgcatctactttggttggcagttcttatgtgacagctggcatggccagcttcatttgtatgtgaccattgccttttagctgtctagttcaaccatgtactcaagtagggtggccaacaattcgagcttttccaggactgagggatttctaaggatgtggaactttcagagctaaaatcagcatagtggcagacaaagcaggatggccagctgacaaacaagaatcatttttaccttacctcttgacaagcaagaatcatttttyttttacagattttttacaattagtcattcagcctattatgtaaaatcctgatggt

SEQ ID NO: 227665 - DNA, 572 bp, Homo sapiens
tgtaccaccaccccttatctcatctatgcttctgctcacagcactgcactggagccaggggatggatacctggcacttgtatgtcctatgaagaaagagaggaggatacattgcttccctatgtatccttaagggatagaccagaggaaaagttaagtaatagataaacaatcaataatacctaattggtttcccaatcaattagcacttactgtgttggatttgttcactttcagccatagttacaccttgaatttctgtatttccaaagtgggctcttttttttctaaggaatttcctcaattttttcrtgtaagtaggcttctgaggagtctatttcactgatttttgtgatatatttaatcattccagggctacaaaatttaagctgaatttaaattattcataatataacaatctctcttcctctgtctctctttctttctatatctttcattacatatatgtaataaaatattttcattatatatctgtatatcttttatagaaatcttttcattatatatttcatatatattcatgtatctttcatacattatatatattcacat

SEQ ID NO: 227666 - DNA, 558 bp, Homo sapiens
aataacaatgctacaggtactttggaaacttagttaaatcctaaggctgactgcaggtgaaaataaacacctgatatggaaaatctgaaatctagggcgaagatccactatgatcattgtcatactaaaagggcatatctctgaggtgggaataacagtgcatggttcatagttttctgtccatactaggaaattgtcatatcaaagagatagtaaagatatattaatacattgccttctaaaaaaaatcaacagcgtacctaacatccagtcaatgaaaaaataatgccaaataattagtaaatttcccatacatccaataaacaatttaaatatgcaaacatatttaaccagaatataatatgaattaaacactgctagacacaaagaatgcatgactgcacaatgacagtcccttaagccagcccaaggtatcaygtcttgtcaaccctgccagactcacaaaccatccaacattcaaggcaatccttgacacctctaacatctactcaccaattcttttaacactgactttctactatgagtccagcactgaac

SEQ ID NO: 227667 - DNA, 550 bp, Homo sapiens
  misc_feature (1)...(550): n = A,T,C or G
tactagcaaagaagaaagatctaatcaatgttctaatctcctaccttaagaaactacaaagacaatagcaaattaaatacaaagtaaatagaagaatacaataaaaatgagaataatgaaattacagagaaaataaatgaaaacaaaagtgagttaattgaaaatattaatgttataagcctctagccagactcattgngaaaaagagaagaacaaacggtcaatatcagaaattcttcatagatgcaaaatcttcactaaaatcttatcaaattaacccagagatatataaagagtttatatctcatgattaagtgagatttatcctgaaatgcaagatgggttcaaatttaaaaatcaaccaatgtgtttcatcatacagacttttaatagacttaagagaagatcatgtattattgcaaaagatgaagaaccctttgataaattwatagccatttagtataaaagcaatttagaaattagatggtacttcctcacctaattaaattgcaacagctacagctacctttatatttaaaggtgaaagaat

SEQ ID NO: 227668 - DNA, 497 bp, Homo sapiens
tagttaccattcctctgaaacactagaggaagatggatttaaaaactttctaagagataagaaaatayaactagtcattggtccactgtgaaataagatgaaaatcagataattaatctagtgtccagaagaacctgccttatcttgggaagacagaaatgtatccaaaaatgtatcctcagggagggccaaccttcctcttaaaaaaacaaagaagtggcaattccacaagaacctaaaactccaaagaactatagaaacttcacgtcctcatgcataaaatctaaataagttgacatatttttctagagtcaatgaatatttaaatggatatatggtattagttataatcatatttttatgtcagacattattctttacatttgaactagcttctttatatctcattatttcagctccagagaaatagaaatctgtgtccacctaattgagacaagctggttctctacaggaaggtgcaaattagctcagaagtc

SEQ ID NO: 227669 - DNA, 564 bp, Homo sapiens
accccatcagccaaatcccatgcctggatgtccgtgtgacactgtcagcttcctcagctcctcaaatccattacaatgaaaaaaaggtcttgatgcttctgaccaagtatttcgtacttactttayagaggaacacttctgtaaacagacaatctactccatgaccaaatattgtcaaatggtcaaaggaattagtgaataagtggatgactaaataaaggcttttctgtgtgtagaaaatggaaagctgtagtagtagactatttagtactagactcttccatttagattaagcatctattaaaacaattctgaccaatcacagtttactgtggattgtttgcatctggtacataggaagagtttaatagaactggtctggttttcacactatgttcacaatcaccagcaactttctttttcctttttttttttgttctggccaaagacaattattcaaattggcagagctgcttttttgccatgtttaaaataataatatttaaaaaatatcccgatctggtttctttaacaaataaataacaaacagaaaaggcgaggaag

SEQ ID NO: 227670 - DNA, 564 bp, Homo sapiens
accccatcagccaaatcccatgcctggatgtccgtgtgacactgtcagcttcctcagctcctcaaatccattacaatgaaaaaaaggtcttgatgcttctgaccaagtatttcgtacttactttatagaggaacacttctgtaaacagacaatctactccatgaccaaatattgtcaaatggtcaaaggaattagtgaataagtggatgactaaataaagrcttttctgtgtgtagaaaatggaaagctgtagtagtagactatttagtactagactcttccatttagattaagcatctattaaaacaattctgaccaatcacagtttactgtggattgtttgcatctggtacataggaagagtttaatagaactggtctggttttcacactatgttcacaatcaccagcaactttctttttcctttttttttttgttctggccaaagacaattattcaaattggcagagctgcttttttgccatgtttaaaataataatatttaaaaaatatcccgatctggtttctttaacaaataaataacaaacagaaaaggcgaggaag

SEQ ID NO: 227671 - DNA, 564 bp, Homo sapiens
accccatcagccaaatcccatgcctggatgtccgtgtgacactgtcagcttcctcagctcctcaaatccattacaatgaaaaaaaggtcttgatgcttctgaccaagtatttcgtacttactttatagaggaacacttctgtaaacagacaatctactccatgaccaaatattgtcaaatggtcaaaggaattagtgaataagtggatgactaaataaaggcttttctgtgtgtagaaaatggaaagctgtagtagtagactatttagtactagactcttccatttagattaagcatctattaaaacaattctgaccaatcacagtttactgtggattgtttgcatctggyacataggaagagtttaatagaactggtctggttttcacactatgttcacaatcaccagcaactttctttttcctttttttttttgttctggccaaagacaattattcaaattggcagagctgcttttttgccatgtttaaaataataatatttaaaaaatatcccgatctggtttctttaacaaataaataacaaacagaaaaggcgaggaag

SEQ ID NO: 227672 - DNA, 592 bp, Homo sapiens
ctgatcctttattagttcacttaggataatggcctccagctgcatccacgttgctgcaaaggacatgatttcattctttttttgtggctgtgtagtattttatggtgtacatgtaccacattttgtttattcaatccagaattgatgggcatctaggttgattccatgactttgctatggtgaatagcacgttgatgaacatgtgagtgcatgtgtctttcggtataatgatctatattcctctagaatatacccagtaatggaattgctgggtrgaatggtagttctaagtttttgagaaatctccaaactaatttacatacctacaaaaagtatataaacacttccttttctcttcagcctcaccagcatcggtttttttttgttgttgttgtgtttgttttttctttaaacaatagaatagctatttggactagtgtgagatggtgtctcattgttgttttgatttgtatttctctgatagttagcgatgtggagcattttttttatgtttgttggccacctgtatctcttttcttgaaaagtgtctgagataatttctcttgctgtgcagaagctctttagtttaatt

SEQ ID NO: 227673 - DNA, 528 bp, Homo sapiens
atcaagctggtttttgtatatggtatgaggtatggattgtggttcgtttctttttgcatatgcattttacacttcttccacttttcctccattgaattactttggcatctttgttgactatcagttgaactaccaattctgaaccttctattctgttccagtaatctattaatctatgtctgtcctttatctaataccatactgtcttgatttctattcctttacagtaaatcttkaacccatgtatagtttccatcatttcacttctttgaaaatgatttagtttctcatccaaaaagggaaggagaattgttgtagaataaaagagatagatataagacacaaaatatgcacctctccactcccccattgaaaatataaatttgggaaaatgtctagcaaaaatattcattgtttgttcatttattcattcattctaataatgtctccttttgttatgatcacatgtcttttaaagtttctaattctggctttagcgtaaataggaaatatccataactcaatacg

SEQ ID NO: 227674 - DNA, 449 bp, Homo sapiens
attagagcacaaattctgctccagttacttggcagagtgtccagtattggtctaccacaataccaccacacatcctctcgaggatggctaagggyagactgatgggtaagctcttggaaggacttaagcttactgcatcctgttaaggcttccaggaatgccaagttttctccctgtcatgagagacatgaagtaaaattggcattgggagatggatgctgaatggccctcgggggcagacccaaagggtgtcgaacttcagggaacagcagagaaagagcttggcatgatttattgccccaggctgaggggttttggaagagagctaccatacagctcatgcccggtcagctggaagaccatctaagcggaacggggacaatctgggcttctggtcttactgtgcacacaagcgtaacattcacttttgtttgaagtgcggacggaat

SEQ ID NO: 227675 - DNA, 449 bp, Homo sapiens
attagagcacaaattctgctccagttacttggcagagtgtccagtattggtctaccacaataccaccacacatcctctcgaggatggctaagggtagactgatgggtaagctcttggaaggacttaagcttactgcatcctgttaaggcttccaggaatgccaagttttctccctgtcatgagagacatgaagtaaaattggcattgggagatggatgctgaatggccctcgggggcagacccamagggtgtcgaacttcagggaacagcagagaaagagcttggcatgatttattgccccaggctgaggggttttggaagagagctaccatacagctcatgcccggtcagctggaagaccatctaagcggaacggggacaatctgggcttctggtcttactgtgcacacaagcgtaacattcacttttgtttgaagtgcggacggaat

SEQ ID NO: 227676 - DNA, 457 bp, Homo sapiens
aaaaaaaaaaaaaatatatatatatatatatatagagagagagagagagagagagcttaccggggctcctcatgtacataycaggggcaatttgggcatcaaaataaataatcctcatagtttataacccatcgaatgaaatataaattaattagtccctactgatatataaataaaggaataaataaatgggggagaaaggacagctcttacagaaggcccactaataaatgtagaaaaaataatggaatgagaaaatcatcacttggcaaccatcttagtggtagctgctaaaagcaggatggagatctgatgaagaacagagtaagagtaaaacttcagaatatctaaaatacttatcaattctactaaagggaaaaatggtgaggttaaggtagagaaagctggcagatattgacatgaccaggtggatcaggattaacatcaccagtggtgg

SEQ ID NO: 227677 - DNA, 423 bp, Homo sapiens
ccaactatttttgctgccccctaaatataggaagacacctgttgggacatgtaatgttactgaatttgctcttctcaggatcaagcaaaaggatcaggaaaagggagatgttaactaatctctcccttttacatctgatgagtctctatgactgttaagtgtttttcatatcttgagattaaagaccctcagattttgtacttacgaactccatgctggagccataygaggggtgaaggcatgctttggctgcctgggggtggggagtactgggggcagcggacagctccacgtaagctgctggtggagctgcctccttcactgccatgcccacagtgccccggggtggtggctcaccttggctttgaggtaggctgaaccccgctcacagcggatgcccccggtacagtacatcagcactct

SEQ ID NO: 227678 - DNA, 544 bp, Homo sapiens
ccttaaggatctagctgttgcaagtagttaagatcctgaaagaataggtaaagtgcaggcagtgctgctaggtaatacacactaaaaagtaacaactctgaggtatggtgcccagcctccaagatgatccctgatgatcctgcctcctggtatttagacccttgcatagttctctcctasactgtactgaggttagtctacgtgaccaatagcatcaataaaaagtgatggtatggcaatctgagattaggtcataaaagattgtggtttctgtcttgaagtgtctctgtctctcacatatcacatgccatgtcatgagagcactcaggcagcctatgaagagacccccacagagaggaatggaggcctttgactaaaagccactgaaaaaacaagcctgccaccaaccacatgagtgaacctggaaacagatttactggccccagtcaagcaatgagatgactgcaagttcatgagagactctgagctagtaacaccaactatgctgctgtaagctgaatttggtacatagcaataatacaga

SEQ ID NO: 227679 - DNA, 529 bp, Homo sapiens
ggtaggtgggctgttctttctcttttgtcccttttattctccttttttatgttgttggaataaaaataagattgacttatctctagtagccattatgggccatgtgatgattttgaagatgaaatcctacatcaagatggcagaacagaaatacagaagaagcttaagtgcctactgaactttgtggagttttaataccattttggcctacttcttgcctgcctctatgtaattatttttggtgagagactaaactgttatgtgtttatttttaaaatttttwaaattttttatttttagacagaatcttgctctgtcactcaggtggagtgcagtggtaagaacatggctcactgtagcctcaacctcctgggttcaagtgatcttcccatctcagcctccttagtatctggaaccacagtcgtgtgccaccatgcctggctaattttatttttattttttgcagggttagggtcttgccatgttgctcaggctggtctcaacttcctgggctcaagaaatcctccca

SEQ ID NO: 227680 - DNA, 529 bp, Homo sapiens
ggtaggtgggctgttctttctcttttgtcccttttattctccttttttatgttgttggaataaaaataagattgacttatctctagtagccattatgggccatgtgatgattttgaagatgaaatcctacatcaagatggcagaacagaaatacagaagaagcttaagtgcctactgaactttgtggagttttaataccattttggcctacttcttgcctgcctctatgtaattatttttggtgagagactaaactgttatgtgtttatttttaaaattttttaaattttttatttttagacagaatcttgctctgtcactcaggtggagtgcagtggtaagaacatggctcactgtagcctcaacctcctgggttcaagtgatcttcccayctcagcctccttagtatctggaaccacagtcgtgtgccaccatgcctggctaattttatttttattttttgcagggttagggtcttgccatgttgctcaggctggtctcaacttcctgggctcaagaaatcctccca

SEQ ID NO: 227681 - DNA, 431 bp, Homo sapiens
gttttagttgtgatgaaatgcattttggcagtaccagaacatgrcttttctgtttgtaagtaattttaaaaggttatattcttccctgagtgcccatttgtgagtacctattattactattctactttatgtattagtatcttgggaagaatatgccccttactgtagaaccagggattacaatattattttttaagatttttaaaacaactactaaaaggatgctgtaattacaacacattaaaatgcttttactgttgtgcaaaaattataacaactgctttagcttttaccatagtaaacacagaaaaactgataaaatacatagagtgaaaaaacatgattttttagatgctaattatctgaagtaaaatctgatttggttctattttattcttaagtagtcatatatgtatatttcctttgaattc

SEQ ID NO: 227682 - DNA, 648 bp, Homo sapiens
ggtaacaccctcctctctgggtaccctccctccgtctcatgttattatgagagatttatgtgataaataatgtagccatccaactccttcaggattttctgcagggccagcccaggctgtctggttctccctgttccggggacatcaccttccaaaaaagtctccaagcctggggcsgtgagcgtgggcacaacccctagggtcactcacacttccctggccatcttttttattataaaagaaaaaaattatagtcttgccgttgacactgaaccctttgatggtaaagataggcatgttagaaaagttggtctcccagactagcaggcgcctcttgaaggaattatatttcaggaataagaagaaaaagattacagcttgtagtagtcagtggaagagcagagcaagttatcaagtgtgatataaagaattcaggacaactacattttaaaaaagactttcctgagaaatgatggataactttatataacttgaaattggaaaataatactcatagtttatcttcatgaaatgtattataaatttgctctgccctgttaaaaatattagttgtatggcctgggatatgatacaaactggagccaggccaggcatagtcactatgaatgctttttatttgtgtgggat

SEQ ID NO: 227683 - DNA, 594 bp, Homo sapiens
aaaaaaaaaaaagataaaaatacctgacaacctagatttttcatgccacacaccacayttacacacacacacacacacacacacacacccccatccaccccacacacaattaccttagatttgtataaaagaaataccagagtaaaatcttgggcagaaaaaaaattaaatctcagaagatccctatgcagaaagtattatagtacaaaaaggagtttaaaaatgtaaatcagtaggaattccttaaaccagtaaataatttaaatttgtagagctttaaatatatatgtaattaaagtacatacagttgcacaaaaggtaggagtagggtaaataaagttgaagtgttttaagttccttgcattttttggaaagtggtaaaagtactaattaaagtagaatcaaataagtcaaggatacatatatctgacatatgactcatatctagaatatataaagaaaactcaaaattcaatagtaaaaaaaatccaactagaaaatgggcagaaaaaaacagacagacatttcatgaaagaggatatatggctggcaaataagtacataaaagaaatttagcatcattagccattaaag

SEQ ID NO: 227684 - DNA, 505 bp, Homo sapiens
aattgttcctttctgtgcctgatactcctgtactgaggattcagttctaattataaacaaactcatctgtaatcacaaaattttttagatagagtccattcccttcaaattgcagccacgaattcctcttgtcaccttttcaccacactaccatttcctttccctttttgcccatctaaacaccatatggaaacttaaggatacctgagtgataacagtgggtcatggccaactggcatgacttaaagaagatccaacatgtcagaagaatggcaagttctgaggaattttctttctttttttctgggcaattcatgctaagcagtgacaataatgaatcagagaggcagaaaagagatgagctatsgatatggtaagaaggagttcagcactaatgctgaagcagaagcagcaatgataacagcaaacacacagcacctatcacatgctaggtactattcaaatcatgcttccaattaagtcctttaatacttacacaatccac

SEQ ID NO: 227685 - DNA, 301 bp, Homo sapiens
ggagtagtaacagtgccttgccaagccatattgaaatctgaaacaaaacgaacaacagcaatagtgatcctgtctttaagatgttgatgttttattcattgtggattttttacattttttttaaatattacattaaaatatgattcctcttgattactggggttgtttggtattccctcctttaattttgtgcccaggaagacgcctcattcatctcacttgcctctccctagttscagccccacagcttttaaatctctccatatgatctctttgtatggtcttctccatatggtggcct

SEQ ID NO: 227686 - DNA, 514 bp, Homo sapiens
tccacttatgagatatgtaatcttgagaaaattactgtatttctctggatctcagttatcttttcataaggccattatgagaaacaaatgagaaaagttatgggaaatgcctggcaactttcaatgctaaacaaatggtaattcttttcctcttactttcttaaggataaccgccacagtgaactttatcatttttaattgagacttgtcattttgtaagattacattgatgcaagtagagtgtcaggagtcaaacctagatggctattttatcattctccatattgtatgtagattaagcactatatgttgagagacacacattaactttgaatctaaaaattctccaaaagtattttaattcacttcaaaatctaaagtttcygaagttcaaaatgtacaattaaaaacttaattataagtttattttattgctctctaatcatttttatctgactctagttcctctatctcgactgtaatgtcagagaaagggagaaaacaatatgttttc

SEQ ID NO: 227687 - DNA, 510 bp, Homo sapiens
accttccctctaaacgtaggaaaggcgcatccttctctctgaagagacgggaacacagartctgaacaaacaggacctgctaagttccacccagtttattaccattagatcatacccgctttgctcagtcccgtttctccacttcttcatcaaacccagcattaagatacacaaatgtgaccaggcgcagtggctcacacctgtaatcccagcactttgggaggccgagccaggcagatcatgaggtcaggagatcgagaccatcctggctaacacggtgaaaccccgtctccattaaaaatacaaaaaattagctgggcgtggtggcagtcacctgtagtctcagctgctcaggaggctgaggcaggagaatggcatgaacttggaaggcagaggttgcagtgaggcgagatcgtgccactgcactccagcctgggtgacagagggagactccatctcaattaaaaaatcaatcaataaataaaaaacaaaacaaaacaacaaaaaaac

SEQ ID NO: 227688 - DNA, 622 bp, Homo sapiens
ttcacatgatctctctcatttgatttttaaaataaccttacagggtggatgtcattggcctcatttgtagaygagaaaaccaaatttcaaacaggttaagtgactttagagcccaagatcacatggtgagtaaatgggaaaataatgatttaaacacgggtctctctttaagtccaggattaattccactacacctcagatacctagagaaataagttataatactggattttaaattcactttgcaactataacacaaataaattacaatactggagaacatggctttggagtcagagtagcctagactcaaattctaactatcacttattaaccatgtgactgtagaaggtcccctggttcattgtctgtaaatagggataccacgaactcaagaatcactatgaagttcaaagacataaaatgcctaaaatagttcctgacatacaattgtcactttaaaaaataacagtggtattcactttaaatcatatgaattaaagtctttttttaattaaaatactacattttctaaagtcaaataagtagttacttcatatcattggtgaaaatggaacattataatcttgaagtataatctgaaacatgtctgtcctacaat

SEQ ID NO: 227689 - DNA, 539 bp, Homo sapiens
cattgtctacgatcccaaaggaaacaataatgcgagtacaacaaattcttcttgcaagagaaaatcctgcaaaactacttaacagaataacactggtcaatgctctaatcatacatttgttaaaccttatataatgttttcaaatatgcatgcaatccaggtgcagctttaactaaaaattcagtctaattttattttcagtttaggttcttggagcaaacatctttgcataaatatttgcctcrctactagcctctctccatataagaaaccatcatttctcttaaaaaaaaaaccacaagttgttttatttccacaataggtatctaaaagatacatttttaaaaaaagcagcttcttcaagaaacagaagatttgggtttctctaacaaagaaggtgacacaattaaagaaaggcaaagaaaagacaacattgtgcgtcacggtctaggcaaggtcctgtcagatcaggtagctacttttcacacttgatctggagaactctgagtagtaaactgacaagaaaagaatgtagaagg

SEQ ID NO: 227690 - DNA, 595 bp, Homo sapiens
aagcttgttaacaagaactacaggattgcttacagctgctatccattgggtaggttgcaccattgtttatgatgtttacagaaaaaagggaaatcagtacaaagaaatagtatggagtaattaatgtattgtagtgtagtaatttccactttctacctccatttaaataaaataaagctctgtaatgctagcgtaaatcagggggagccacaggggagcacagcgaggcaaagacattaaagccaaaccaaagcccttcttcacccaagctactattattattacttgtgcaaagcaaatattcagcctccaamcctaaatcatttcaattcctatttccaagtataatttaatctctttcagcgacacttgatgcttacttcatcacagcataatgacagattaaaaagttgttgaattaaatattaaagaggacttcaggcagttctgcatttttaaggaataacacagattggggatgaaatgagaagcccaaatgcatattttataccaaaaggaaagaatacatatatttttccttcaggccacctactttgtaataaaacacagggcaggttttatttagtgcataaaa

SEQ ID NO: 227691 - DNA, 588 bp, Homo sapiens
tataattatattgccagtgataatgatgtaaaattgaattaaattggtgatgagttattattgtttttaaattctgccagaagttcagtactttaacttagctgtcaatttaccaactaattcctatactcctatcctagagtcagcagccagtgacacagagagctgttaaaatctaccatcccaacacacagctttacaatcaatgtcatctaattgatacttccctatttttgtcaccttgccttgatgccagctgccaagctctgccatgtcactttccatttatggactcccaagtcccttgatctggctaattagggtttatgtgttaattggagtaaatacaaagatgagagtcacaggcacaaatttcaaagcacagccataaattgaaragctgataagcaaggaagagatgccttcatggaacaagtgtcaagtttattttatcactgggaaagatccagaatttcctgtcaaagtgaaacccttaagttttgaaaagacttaatgagaaaaacattaactaacacattgagaacattgctctatagcagtaaaatgcacaatacacctaaatgcagt

SEQ ID NO: 227692 - DNA, 582 bp, Homo sapiens
aagaggagctggaaatcatcttacacccaggccctattccctcaaataacaatgacttcatacactgatatgagaccctcattggaacttgaaagggatctttagtatcttgaactttatctacagtacaagtatttatttagaaactacttttaaaagtggtttcatgtgacccctagygaacactgaaatttttgacaagcgtcagtttttccttaagtttcactacaaaaactggttggtaaactactgcttttgcatgctataaagaaatgctcttcaaatgtcaatctattaacaataatatgaacatttatacaaaattgtattttagaggtaatgctaatacgatatatttatgttctaaagaggtacacttgtttgttaatttatttgtttccaatcctcagtccaaataccagtctatctgactaaaactaaatgtatttttgttagaagatgacaactaacttcagggtcagaaattattataaataaacatttttttaaaaaccccaaaatcagaaaccctgaaagcatgaatttaattcttgtgtttaatggataataaggaagcaaaga

SEQ ID NO: 227693 - DNA, 567 bp, Homo sapiens
tggccaccctgaagcaggacatatttttccagcatgagtgtagcccagtatgtttgattagaaaaaggcagctcccaccttcattgtcattgcaagcagtggacacaggcagcactttagaaggcacattagaggcaaaattcagcatccacagaaatcaagtgataaagatgaagcattttcagcatctcctttgagtaagttcctaagaaaagactacgtattgtctatgatgagtgatagactctgaagcaagaagtatgtgccttggtatccactgcctatgataagatggcatggagcatagcagagaactcctgggagaagagtcgcagtgggatcagagctgactcccacactgggtaagctccagctaccgaagggcagaggagagagattctaacatcagtgcctaataggtagtccttgtaattccttgactctatattcatgtagaaactctatcatcctccttaatatcatcctcrttattatcattatcattacagagtatggactcagtctcccaatcattatcaacaaatcctccagtcaccttcctaaagt

SEQ ID NO: 227694 - DNA, 596 bp, Homo sapiens
acatggcttctccatgtgcactgagactcatcacaacatggtggataaatttttagaacaagcatcctcactttgggaggctgaggtaggcatatcgcttgagctcaggagttcaagaccagcctgggcaacacggtgaaacaccgtctctattaaaaatacaaaaagtaagcctggtttggtggcacacacctgtggtcccagctactggggcagctgaggtgggaggatcgcttgagcccgggaggcagaggttgcagtgagccaagattgcaccactgcactccagcctgggtgacagagccagaccccatctcaaaaaaaaaaaagaacaagtgycctaaaagtgagaaaaataacaggtagaaaccatattgccttttgcagcctactcttggaattcatgcagcatcacttctaccacattctattgatcaaggcgtatacaaagttccaccaggtccaagggaaggaacataaaccatatttcttgatggaagagtgttaatatcacattgtaataagaacttgtaggacagcacacacattggtgtggccatatttggaaaatatctgccaccatcttcttcaacaaa

SEQ ID NO: 227695 - DNA, 633 bp, Homo sapiens
gacacagtctccatgggttttactggatgcataatactttatcaaagaaatatttatttaattaatctttttaaactatatatttaggttataactggttgttcacttctctcatggcaattctgtcatgagcaactttgaaagtaaagctttaattagaacattgagatacatccccagaaatggagtatgagtctattaggtatgaatatcacacaaattgccaaatcctttctgaaatgctgcaatcgcttcatctgcagtgcattttccttcactgtcctcagggccagcttcatagcagtgcaacctgggcagccccagagaaccctcactcagaagggccccatgtttggtttaatgctttgttggcaccatcttgaaattcttaatagtttgagctttgaatatgtgttttctaagcaaaatctgatggaacatgggaacatacaggttaccagaatagattcaggcaatctgtgtgccccctgttccctgctgccatattcacatggagtgccaaccacgcctcgtgagcacaaaattccagcagacccacagyatgtagaagttcagtgaggttcaaacaagtatgaggtaagagtgttatttctagaactaggtaagccaggg

SEQ ID NO: 227696 - DNA, 477 bp, Homo sapiens
gctaattatgaaacgagttttggagaaagtgctctcaagatgccgttggctctaattttaaccgggacagaagcaacagcaatgttgctaccgtctggacatgctccctagaccagagtctcggccccaccagccccttcctgcttgagccagtaaagacagtccagggtgccagatgtgctggaccacccctactagaatcagcaccataatctggcttccccacagggacacmccacccgtgatcatttattgagacagtgcctatctatttcattcatgttaaataaaattgtgaaatctctccttagaatttaagaagtaattttgctcatgcttgttactttcatcacttttaattactccttcctcttcttacatccctaccaacaccaccagccatcctgtccttaggaaagcaggcatgcctacggggcacttgccacggtgccataaccatctccatgacaaccagtg

SEQ ID NO: 227697 - DNA, 500 bp, Homo sapiens
ggggccaatatacaggtcaggccattgctttagagggtgcaagccccaagcctttgtggcttccacttggtgttgagcctgcaggtgtgcagactgcaagagttgaggtttgggatcctctgcctagatttcacaggatgtatggaaatgcctggatatccaggcagaagtctgcagcagaggtagagcccttatggagaacctctactaggacagtgtgaaggggaaatgtggggttggagcccccacacagagtctccacggggccactatctagtggagctgtgagaagaggtccacaatcctccagaccgcggaatggtagatccaccaacagcttgcaccrtgtgcctggaaaagctttaggcactcaatgccagcccatgaaaggagctgagggggctgtaccctgctgaaccacagatgtgaagcttcccaaggccatgggaccctgctgcttgcatcagcatgccctagatgtgagacatgagtcaaaggag

SEQ ID NO: 227698 - DNA, 573 bp, Homo sapiens
taccaatgtgggcacgtattcatggtgtacacttccccagaacttcagaataactgaagtgcttacccaacccctggttttacagatgaggaaatgtgacttcagagggtggaaggtcttgactagggtcattcagaccatggcaactgtgggccagaatttaaggctgcacttctagctcatattgtggtgtgtatggtgtggggkgtgtgtgtgtgtgagtgtcaaggtgaggctgaagccagaaaaggattccttagggggtgacacctaagctgggtgtcaaatggtgagcaggaattacaaaggtagggcagggtcggggtaggaaatttactgcaagagaatagcagtggcaaagagtgagaaggctagggtttgaaagaattccaagttcaatttggaaatgactagagattgggagggaggagggcaggagccagatcataaaccttcacatgtattctaaccacctctacctccttcatgcgagcttctggctcctgaagagtgtagacaaatccccaccagctgtctatcctcatgctgggaaactcactgccctgtcccttg

SEQ ID NO: 227699 - DNA, 566 bp, Homo sapiens
atgtcttttttaaatggcctttaactctggtagcagggtagaactctgattacaggtggttaagaatggattcagggaaactggttaggagagtattgcagcagtaccggcaggaaacaaaggtttattggactacatttgtggttggtggagatggggacaagacgatggaaaaaatgccattaggagatcaaattgacaggcctagctggtgggttgggtgaagggatagtgagaaagctggggatccagggaggatgcctagtttcctgcttgtgcatgtgggtggacagtgaggccccycaatgagaatcctagtcaagaatcaagttgttaggaggaagtagtgggctcagatggagacaggtagagtttaaggtgcttgggaggcatggaggacaagacactaggcaggaggttataaacacagctttgagctcccatcacatatccagggctaggcaacaagcctgttaatgcaggtgagctctcctagggagggactgaggacaccagagagaagtagttgatggtgtaagggtgacactggtctcacatcagatata

SEQ ID NO: 227700 - DNA, 474 bp, Homo sapiens
tttttaaatggcctttaactctggtagcagggtagaactctgattacaggtggttaagaatggattcagggaaactggttaggagagtattgcagcagtaccggcaggaaacaaaggtttattggactacatttgtggttggtggagatggggacaagacgatggaaaaaatgccattaggagatcaaattgacaggcctagctggtgggttgggtgaagggatagtgagaaagctggggatccagggaggatgcctagtttcctgcttgtgcatgtgggtggacagtgaggcccctcamtgagaatcctagtcaagaatcaagttgttaggaggaagtagtgggctcagatggagacaggtagagtttaaggtgcttgggaggcatggaggacaagacactaggcaggaggttataaacacagctttgagctcccatcacatatccagggctaggcaacaagcctgttaatgc

SEQ ID NO: 227701 - DNA, 461 bp, Homo sapiens
gaattctccatgcaaggccactaagaaaaaattacaataccagaggaaatgaacaaattggtgtagactaacaggtagattcttgagatcacttggcgacctaagtaaatactgttgattttcttatatctaccctaaggcaaggaattataggggaaaaacttagaatgagttgagagtaggggtatgaagaaaagttgcacttagagaaacaaagtaaacttgcatggtacaacaacaacaaccacaaaaacactatatatacacacacgcataaatatacacatacacatataaaatggaggaggaaaggcaaaatgtgataaatggttattaggagaaggaaaattttgtgtgtgtggacaagcgcgcgcgcrcacacacacacacacacacacacacacacacacacacacacacacacacactactcctatggcacggtccataaaaacagtttg

SEQ ID NO: 227702 - DNA, 586 bp, Homo sapiens
gaccctttcaggagtctgtgacaacgaaactgtttttacaataatactaagacttatttgcctttttcactgtcattctttcatgagtgtaagtggagttttccagaggctgcagagatgtgtgatatcacaacagatttaacccagatctgagaatccagctgacttctattaagcaacacattaaagagatttgcaaaaactacaaaacttttctcactgtttttttgatttggcagatataattattttcattaaaatgttatttatgttaacatccaataagtttattgttgttatttttaactgaataaatacaaaaattttaaagttatgtctttatttctaatatggtaagtattgatacaacccacataaacaaaagctctgtgggtgtcctaagtaatttttaacmctgtaaaagtattctgagaccaaaaagttcaagaaagactgctttaggagaatccacaatttattattatgcccaaatcaggtaattgctcctgcttcttaattgtttagtttttactttggttttattgttagtgtgctatcattctttgtttaaatagtaattgtgcag

SEQ ID NO: 227703 - DNA, 491 bp, Homo sapiens
gcactaatcccattcatgaaggctccacccttatgacccaatcaccccctaaagtttcacttcctaataccataacagttggagttaggatttcaatatatgagttttgggaggacatgaacattcagtccacaacattctgcccctagctcctcaaaattcatgtccttcttgtatgcaaaatgcattcatttcaatctaacaactccaaaagtctcaacattttttcagcagtaagtctaaattctcayctaaatatcatctaagctagatatgggtgagattcaaggtatgattcatcctgaaacaaaattccccagctgtgaaactgtgaaaacaaatgatatgcttccaaaatatgatggtggaacaggcatacgataaacatttccaatctaaaagggaaaattagtacagaaaaaatgggtgacaagtcccaagcaagcccaaaacctatcaaggcaaactccatgagatcttaaacttcaaga

SEQ ID NO: 227704 - DNA, 546 bp, Homo sapiens
tgttgcatcctgatgaattggctcctttagtgttatgaaatgatcctgtttatctctggttatattctttgctctctgcaaagaattgagaaatttccaaatctttatggtctggktatttctgcttaacaattccatcgtcaatctatttctctcttcttgcattttaccattagcagtcaggaggaaccacaccacctcaacactttgcttagaaattttctcagttacatatccaatgtcatcactcacaagttccacttttcacagaacattaggttttaacaaggattaccttttctccattgtccaataacctatccctcatttccatctgagacttcatcagtatcatctaaagtctattttgtctgactttaaacatacattctagctttattttgattaacattagcatgatttattgtttttgatactttaaaagtatttgtgtctttatatttagtgtgggtgactttaaaaagcatatagttgactatttttaaaaaatacaatttgataatctcttacttttaattggggagt

SEQ ID NO: 227705 - DNA, 284 bp, Homo sapiens
tgtatttagcagtccaagaataagctgacgtttactgtgaacacagaaagaattagggattcagtggtaataaatgacctaaatgtttaaaattggcctcaaatgaatccattttctacctcttgttgtttccactgtgctgaagcacaatgacgtagtgactttataattttagccaggagtggccaattatycagaacttgccagtcctattttgtaaacacagttggtagctgggtgaataatgcagggttgtagtgtcattttcaggcacggagatacag

SEQ ID NO: 227706 - DNA, 599 bp, Homo sapiens
ccaagcctagccctttatctctagctagtccatcccatactccagtaggcaatatccagaaagaaagagtttcagacacttttgtccccttcacagacaaaactcaggaccctcttgccttgctctcatgttgacttcactcccaatctgcttctatattcagtcactccctcttgctttggcctgtgccatcatcacggccacaacttctttgatccagagttttaactctcctcttgaggccccatgttgaatttgccctcaggctacatctacttctgrtcatgctgcttcctctgggcccaagtctctgaattctaccccaacgtgagggcccatgtttgctcacttcaaaagcagaatgcattggatatgaagttgaaagacactatcagcacactggacaaaagaattataaaacaacaagctaaatgttctcaagaataaatgtaacaccctgctccttgatttcctaaataaattgtttcaatctgggattcaagtagctgtgtcctgacagcaagtaatgtaatatatagactttagacttttactgaccaatgtcgacaagtccaatattaattaataatttaaaaagg

SEQ ID NO: 227707 - DNA, 506 bp, Homo sapiens
ttctatagtgttaccagccactgaataacatttatcacaagcatattaacttttaaaacaatagtatgtttctttgaaaagaatgaaacgtaaatgtatgtctattaatgcacttctccattgttttacaatcggatctaggagaatctgagctctatgaaggcagggtctgttttatttacttccatatcctcagcatctagcccattgtgttgcaatattaggggctcagtaaatgaatgaataagtgaagcaatcagtcaatatacaacagtcaagcaagtctcatgttgacaatggcagagatagtgagtattgatgttcaaktgtgtaacaaatgaaagctacctctaaaaacagtatcatcattaattcatttattaaaggacaatttattaatgtccaccacatttatttattcagtgatggcacagttcctgctttggttcattccaaaagtatttaaagaagctagtctttagggatatcaccctaaacagggcaac

SEQ ID NO: 227708 - DNA, 400 bp, Homo sapiens
ctgatttactagagccctcatggatttagttttgtctctgtctttygatccatcttccaactaagcaaaattaatttagacttgataataaattggttgcttttagtctcccttatcagatgaacaacaaatctgattattagttttgtcctcaactagaggaaaaatagatgcattatttccattccaaattttgtcatagtttcctccatcttctggtgtattgtgcatcattgctctattcaagtgaaatatcctattctcactgctcattctttctgattctgaattgaatgagttattaacattttttctcttacagcatttactgcaatgaaagttcttacatctctcatttttgatattttttccattttcttttaatgaataaatacgcaaa

SEQ ID NO: 227709 - DNA, 549 bp, Homo sapiens
gtagtgtatttaggaactgtgaattaaaggtcagcatctactaccagtaacaattctgtagaattaaatcctgcaattatccagggactgggtcattcctttcattccatagagttaaatgcttttcataaatattctactcgggctttccatattcaaaggaatgacatggtttgtgatatgagtcacgaaaatataaattgataccaatgtaagtacttggcataaattaaacttaattttcttaaaaaatactgatttgtgatttgatacccaggaatttagtacagtcaaggatttcyttttgttttatgagaagtactaatgaattacaacttgcatttggatatttgggtgtctaatagataaaaaatgttgtacagtggggtcagaagaactggatcttaatcctttctcttgtgcctataactctgtgacctggagcaaagcacatatctctgaatctcttgtccctcttccataatatgagaataatgatgatacaatcttacctatttcccgtgttcattgaacgaataaattgatatg

SEQ ID NO: 227710 - DNA, 549 bp, Homo sapiens
gtagtgtatttaggaactgtgaattaaaggtcagcatctactaccagtaacaattctgtagaattaaatcctgcaattatccagggactgggtcattcctttcattccatagagttaaatgcttttcataaatattctactcgggctttccatattcaaaggaatgacatggtttgtgatatgagtcacgaaaatataaattgataccaatgtaagtacttggcataaattaaacttaattttcttaaaaaatactgatttgtgatttgatacccaggaatttagtacagtcaaggatttctttttgttttatgagaagtactaatgaattacaacttgcatttggatatttgggtgtctaatagataaamaatgttgtacagtggggtcagaagaactggatcttaatcctttctcttgtgcctataactctgtgacctggagcaaagcacatatctctgaatctcttgtccctcttccataatatgagaataatgatgatacaatcttacctatttcccgtgttcattgaacgaataaattgatatg

SEQ ID NO: 227711 - DNA, 552 bp, Homo sapiens
aagttaagctgttttgaagtattaaaaattgcagactgatgtaacctggtggaaatgtagatttcacattcattaaacaatgacctattacccttctggcactatagtaagccccaacgagtaagtggtagtcattcaatgaagtacccactaygtgccagacatagtgtcagctccagtggggaatgagacaggtgtgtggattcatcctccttgcacttgcagaacttggagaaacagaaaaaatcatgtgagagcaatgggagtgagaaggagagagagagagagagagagacagacagagatagtacaagattactttcagctagggattcaggggaatgcagctttctggtaatgatagcatttacagtggagcttaaaaagaaatataaagtttagaaacagaacaaaggaaatcaaaagcatgaaggcaaacaatctaaatactatgtcaggaatagtgaataatttgggttgccaggaattaggaacatagagcccagggtagggtgtgtaatgagaggcaaacttgtaaacacaaatggaaat

SEQ ID NO: 227712 - DNA, 531 bp, Homo sapiens
gtcttttattaaatttccatcaggattactggttgatgttttctgtatgtttaccaaagggtcagctggacataatttttggtttgattacttcaaccagtcaatacactgagaagagcaarcccagctgaaacacagggaaaaactaatgcgtgttgaagcatataactaccattattgaaatattagggtagcttgtatctgattctaggtgctttcgtttaagagtttatttaatcttatagcactatgaggtcagtaataatataacccacatgtataatgagagactgaggctcggagaattaaagatactttcccaatttcatggtgccaagaaaatgcagagcttggacttgaacgcagagtatctgtctctaaagctgtgctatctaatatattagccactagcttcatatagtattaaaattcattaaaattaaaaaatcagttcttcagacacactaaccacatttcaagtgctcagtaggcacctgtggctagtggttaatctgctggacagcataggta

SEQ ID NO: 227713 - DNA, 531 bp, Homo sapiens
gtcttttattaaatttccatcaggattactggttgatgttttctgtatgtttaccaaagggtcagctggacataatttttggtttgattacttcaaccagtcaatacactgagaagagcaagcccagctgaaacacagggaaaaactaatgcgtgttgaagcatataactaccattattgaaatattagggtagcttgtatctgattytaggtgctttcgtttaagagtttatttaatcttatagcactatgaggtcagtaataatataacccacatgtataatgagagactgaggctcggagaattaaagatactttcccaatttcatggtgccaagaaaatgcagagcttggacttgaacgcagagtatctgtctctaaagctgtgctatctaatatattagccactagcttcatatagtattaaaattcattaaaattaaaaaatcagttcttcagacacactaaccacatttcaagtgctcagtaggcacctgtggctagtggttaatctgctggacagcataggta

SEQ ID NO: 227714 - DNA, 556 bp, Homo sapiens
tgattggaaaagtgaaaacaactgcttggtcatttcastagtgggaggtggagccagaggtagaacccacagatccttttattttacatctataatcatatttactgtttatttagagcctaccagatactgggacgagtccttcacatgcactgaatcatgagacctccttgactctgagatatagatatggttatctccatttgacaggttaggaaacagattcagagagcttaaaagggcctgcctattcaaggtcaagcagtagaattgaactagaaatccggtcttctggaaggcaagtgtttctttcatgctttcaggttgtgtcagtgtgtaaggtcttagaaggtatttttgacggtattattttcagatcctggaaggaaagtttggggacagtggaggtgctgaattgcctgttggtatcttgcactttttctgcccacctgagttctctcctcagtgtcctagaggcaggaagcctgcacactttattttccagaatcctttgtcagcaggctcctactgcagatgccacagatgacaggaattc

SEQ ID NO: 227715 - DNA, 556 bp, Homo sapiens
tgattggaaaagtgaaaacaactgcttggtcatttcactagtgggaggtggagccagaggtagaacccacagatccttttattttacatctataatcatatttactgtttatttagagcctaccagatactgggacgagtccttcacatgcactgaatcatgagacctccttgactctgagatatagatatggttatctccatttgacaggttaggaaacagattcagagagcttaaaagggcctgcctattcaaggtcaagcagtagaattgaactagaaatccggtcttctggaaggcaagtgtttctttcatgctttcaggttgtgtcagtgtgtaaggtcttagaaggtatttttgackgtattattttcagatcctggaaggaaagtttggggacagtggaggtgctgaattgcctgttggtatcttgcactttttctgcccacctgagttctctcctcagtgtcctagaggcaggaagcctgcacactttattttccagaatcctttgtcagcaggctcctactgcagatgccacagatgacaggaattc

SEQ ID NO: 227716 - DNA, 594 bp, Homo sapiens
taggccatgactaagttttttatttatttttatttttatttatttatttatttatttgtttatttatttttgcacaatactgttaagttttcctgaaacaaagaaggggaaaaatgtattgaccaaggacacgaattaggtcctggcagagaattcttatttttcatgcatagcatcagtgaatagtttgttccagcctattaattatttaaatagttattatctatgtttgtctttcttgcttgaaataaaaactgctgatctaagcttatctgcatcttaacatcttttagcaatacagagtgtgtacaaaacctttttttggcagagcagaaagaggaagatgaatcttactatragccaagaagctggcagcatgtccgtcatttttacatgaattctcctttaattatgacaacgaacttgtaaaaatagatgtcttacctttactttacaaatgaagagaccaaggtcactaagttattaagtggcaagactctggctataattccaatgtctgattctagaacctacaatgtaaaatataggccctctattctttccatgataccatcagaaaatgctttatatatc

SEQ ID NO: 227717 - DNA, 594 bp, Homo sapiens
taggccatgactaagttttttatttatttttatttttatttatttatttatttatttgtttatttatttttgcacaatactgttaagttttcctgaaacaaagaaggggaaaaatgtattgaccaaggacacgaattaggtcctggcagagaattcttatttttcatgcatagcatcagtgaatagtttgttccagcctattaattatttaaatagttattatctatgtttgtctttcttgcttgaaataaaaactgctgatctaagcttatctgcatcttaacatcttttagcaatacagagtgtgtacaaaacctttttttggcagagcagaaagaggaagatgaatcttactataagccaagaagctggcagcatgtccgtcatttttacatgaattctcctttaattatgacaacgaacttgtaaaaatagatgtcttacctttactttayaaatgaagagaccaaggtcactaagttattaagtggcaagactctggctataattccaatgtctgattctagaacctacaatgtaaaatataggccctctattctttccatgataccatcagaaaatgctttatatatc

SEQ ID NO: 227718 - DNA, 548 bp, Homo sapiens
gggtaaaccctaaatgcaatgacatatttttataaaagacagactgaaagagatttgagacaaactgtaaaggagaagagacacatatgtcaaacatatgtgcccaaaaagctatttcagaatgagacaatagaatggagatcgattaataaaagaaagataaaagagcactttatgtagctgaacaaaaccaaaacttttaagtagaaaagtgtccccaggatttttaaaaaccatactaaatttcaggacaatagttaaaagaaaatcctaaaaacttctagagtggaaacatatttctcctacaaaggtaaaaaatggatttttattagacttttctagattccagaagataatgaaaatatgccttaagccattcttaaggaaaataattttgaatcaagaattccacttcagctaaatttgtgcataagkggaaaagttaagtggataagttaatttctctctctcacatgcactctcaaaaatataattactcagggaaaccccttgaaatagcaactgaagatatgccagtaaaacagata

SEQ ID NO: 227719 - DNA, 574 bp, Homo sapiens
cagcagctcaacttgtgtgaattcaactcagaagtgttgctcctatactgrggcctgtataagaatatatttgttttattgaggttgagtttatctttagaggcagttttcctaaggtgctagttataattagaatatatttacctgccccattttaataggagtatcatgctcacactattgtttttattttcctttacaatattcctctcactgaacttttagggctacaaaagttggttttaggttaaaaatagtatagttgcccttgcttccactattccatgtggaaaacacagccaattgccttacaaaaaggaaaaaaataattttccgaatacattcttaagatagtgtgaaagccacactcgctgatgaagagcccctaaactgacaacagactaagatttcctgcacagatttcatggttcttattattttcctacaggcaggacagaaagaaagattgaagttccttctactgaatacattactgatgccagaggtgaagtgtggaaaatgaagaattagactcagggttggcaatctatagcttgttggccaaatccagtcc

SEQ ID NO: 227720 - DNA, 582 bp, Homo sapiens
agttctgtgtgtctgtagcgacagatatgggttcttagctttttgcagtggcacaacatcaagcaagagacataagcagcaatcaagtgtgaatggaactatccaagcataagaacttcaattttatggggaaggctaggggtgtttgtttgaaagttgagaaagtttgagacatgatcagatttgcattagagaatgatgactgtgacyacagtgtggaggatgacttggaggtgttgagactggaggcagggaacttattgtggaaatgtaggtgttaaatgatgagggtggtggcagtaggggtggacaagaggagatgtatctgaaagacaagtgaaataaagcctgctaatataagaagggccttccttcttctgtgtgctcctatatcaccctcttctttcctggcattcacttgtgtagctgccttttttgcattgtgagagtaaggcattcacagtggcatcaccagcatttagcacaggcctggtatggagtagggacccaataaatatttgttgaatgaatcattaaataaatgaatgagaaatccagccatgaggtgatgattcctgcatt

SEQ ID NO: 227721 - DNA, 551 bp, Homo sapiens
tgtaagctaactagtgggcaggtcatccattgactaggtgtgattgtgaaccagcttgggtgctacctggtttatgtgcaacattttaattggcccaacaaccctrtgaagtgcttaccatagttatccctactttactgatattgcaatgaaaactcggaaatgttaaggcacttgtccaagttctaaaccattatactacatattagcctctctggatctcagtatcctcctatgtaaaataaaaggattcatttaaattagcttctcaacttcagcactattaatattaggggctagataagtctttggtgtcgggagctgccctgtgcattagaggatagttagcagcattcttggtttgtgatactaacagcacctcccttcacccacctgggacaaataaaaatgtcactaatctttgccaaatgtcccttgggagacaaaattacttctggtttgagaacccttggcctaaaaaaatttccatgatactttctagattgaactgtctactgttcaatgtgtgcctgcttggtttccttctctca

SEQ ID NO: 227722 - DNA, 572 bp, Homo sapiens
ggtgaagaagcttatataccgtcttgaggttacagaaaaaatgggggcttggattctggcaaaacatgttatgggagaggagagaagaggaaatctgttgaggggcaataaatgattactagggagcattcaatgggcttgaagaacataaaatggtcttggacaaagtctgctgggcctgcagagcagacaatagattgtgacaaaagtctgtccaggtttgttgacagaatttaattttctttcctgtggtatgggttcagttaatgaaaactcatgggaggtaatktcttctttggcaggtctgaactttaggaagataagggaacttcagggaacaacttcagcctgtgctttaggagagatggtagtgaaaggtggggagagtcaagtagaccttgaagctccttttttggttcagcatgtacaaagtgtcatattttggggtattggtttctgagccccaacagtcttctcctcagggagaggatgggaaaaaagccattatattttctacctcagaaaactctcctaccaattctcttctatcaccttttggaatttctagtttt

SEQ ID NO: 227723 - DNA, 529 bp, Homo sapiens
gtatgtatataaataatatgaaggagaataaagtgtcctgtttagtcctattcctacttccaatacatttccctatcttcctttctcaaaaagcatctcctttaaataacccattagaatatacactctgcaaacttcctcattgtaatcatctttcaacctctttatcactcctcattcattggagatgtagcactawcttcctttttacagctagttctgttattaatttggcaactttatcatttatgtagcttgtctatcaaatactctggcttctccaatggatgaattgttcctgttgctaacgaaagacaacatctttagttgccactggatcattttccctctcatctactcgggaaatgactcttaaaattgttgcatgtcttcagtattccacatgtgcccaattaccactggattattccaatcagctgttatatttctcaccttaattacataagcagtaatattaaaataaatatttcccatcctaagataaaatccctgccttgactcacatttt

SEQ ID NO: 227724 - DNA, 612 bp, Homo sapiens
tcatgattaattaatggctttaaaaaagcttacggcaccttttttggctatcccttttttgggggtggtgggggaggcgtatccttaatcttctgaaagaaaggagagtatacgtcttcaggatggacctagatatggcgtggaacctgaaacctgcatctcatgttttctctttccttgattaatagttggtttaggttggttcacagtaaaaaactcatcagtcaagctgggtacctcttaggaagtactggctccctgcattgaggttgactgctgggagcatctcaccaaacaccataggtcatgcatgtagacaatagctctcaggtctaatttcctatcatcttactgaaaacagagctcttgtagaagacatctgcgaaactctgactagtaccttcttggagctaccactagcatctgtacatccctctcctatagaagctatcgttgaacagcaataatttattgctgtgtctccttcacttggctgtgagctccttgaggatccagactgctgatagcataggtggcccagaatcacctgyaggcggagctcagagccataatgctagaagctgaagttttccttgggagaaagcaagcatg

SEQ ID NO: 227725 - DNA, 507 bp, Homo sapiens
atactggcaaggttgagaaccactgatcttgagaagtaaagaaataaaaatatggcatcatgaggattaaatgatcaatttaaagacaagtgcatttgttagctgatgacagttttctagtgtattacttaaattaacccataatgctgcttcattatgccaaagccattcagaattttaaaggcagagatttggcatttttgctaattagaaagtggttaagggggacaaataattttgatctacatttcctcaaatgttcactcaaggcaagggtaatgtcgttgggaagttagacaaatgtctaaaattaggaaaataaatgcagcacagaactttctattgagttttgctttagttaaaaaacccagcttcacgtrgttaaaaaaatatttgctgagcaaatgaatgaatgaatgacctctttgtaattagattccaattaaacaaaaataaaggaggcatatctgctaccccttgacttgactaaaattaattaaacattaa

SEQ ID NO: 227726 - DNA, 568 bp, Homo sapiens
ttagtttagctaatgagtgaagaagcatttggcacattatcgggcaccaaaaggcagttcctttctgaatgatctctctccctcaagctcgtgctgtgcgtgtgtgtgtttgtactacrtgtgagtttgaaaccattgggtaaaaaattctcatgcgtgattcatctaaaaacataagaccctcatcagacgcttcttcgggctatttttcattctctgcctccacttaacaacacacgcgcctcttcttcttttcagtattcttcccttgccctcactggccctacccctaacccacacccaccaccttctctgctcttctacatatttgcctcacaaaatgctacctccttcaggtcagccaatccaattcccccagtagggaactctttgtcttcaaaacatctttgtgacctccaaagcacaaaagcctgaggggccccctggcatcatggtacccatattgggccttgtggagagctgaaacactgtttcgtatacacttactgtcaaaactcctggtatgatttttgtttctctaaaaccactttattgtatgtgtatgtcc

SEQ ID NO: 227727 - DNA, 568 bp, Homo sapiens
ttagtttagctaatgagtgaagaagcatttggcacattatcgggcaccaaaaggcagttcctttctgaatgatctctctccctcaagctcgtgctgtgcgtgtgtgtgtttgtactacgtgtgagtttgaaaccattgggtaaaaaattctcatgcgtgattcatctaaaaacataagaccctcatcagackcttcttcgggctatttttcattctctgcctccacttaacaacacacgcgcctcttcttcttttcagtattcttcccttgccctcactggccctacccctaacccacacccaccaccttctctgctcttctacatatttgcctcacaaaatgctacctccttcaggtcagccaatccaattcccccagtagggaactctttgtcttcaaaacatctttgtgacctccaaagcacaaaagcctgaggggccccctggcatcatggtacccatattgggccttgtggagagctgaaacactgtttcgtatacacttactgtcaaaactcctggtatgatttttgtttctctaaaaccactttattgtatgtgtatgtcc

SEQ ID NO: 227728 - DNA, 582 bp, Homo sapiens
acattggaaaatttcacatccaattgtttcccttctcctgaggtgacacattccctgggacttgaggctcccctgaatttgaggcaagttacaaaagggccaaaaaaaaccataaggaaatcctgtagatcccatgcatctatctatccatctagtcaccccagcaggaagttgctattctgaatgtcaagaactaagatgaggtggttgctagaggacaggtcattgttgtcttcaggaccgactacttctttcctctggatctttctctctcaaattgtggagttgaggtgactgattctgtgtccttagcaggcagtcatctcttataagccagattctctaattwcatgctaccaaatgtttatttcccctttgtttccctccagccttcatgaaaactcatctcagtgctccagtcttagatgtcacccaggagattaagggaaggggcatttgtacaacagcactgacccaaacctctcctggcggtggccatagcccgaggagggttttatcgccctcaggttttgtttagaagtgacagcccttccttctggattcttctcttcttccttgtct

SEQ ID NO: 227729 - DNA, 552 bp, Homo sapiens
aaatttcacatccaattgtttcccttctcctgaggtgacacattccctgggacttgaggctcccctgaatttgaggcaagttacaaaagggccaaaaaaaaccataaggaaatcctgtagatcccatgcatctatctatccatctagtcaccccagcaggaagttgctattctgaatgtcaagaactaagatgaggtggttgctagaggacaggtcattgttgtcttcaggaccgactacttctttcctctggatctttctctctcaaattgtggagttgaggtgactgattctgtgtccttagcaggcagtcatctcttataagccagattctctaattacatgctaccaaatgtttatttcccctttgtttccctccagccttcatgaaaactcatctcagtgctccagtcttagatgtcacccaggagattaagggaaggggcatttgtacaacagcamtgacccaaacctctcctggcggtggccatagcccgaggagggttttatcgccctcaggttttgtttagaagtgacagcccttccttctgg

SEQ ID NO: 227730 - DNA, 586 bp, Homo sapiens
ccagactgcctgggccaccgtctttctgcaccatgagatagggacatttgtttatcacttccagttccatttgcccagtacctgagctgtcaatatttcagtcttttatgctcccagtagaggccaatgccttggcacactcacccccattcaccacattcccaattctctctcactcgttcttttccctgagccatttcctgtctcttatgcctctattgtccttcatcctcagataatacagatctccacagtctcattctgtccaaaaccctggccgaatcatattccactacattaaacctctgcctatcttccctaagtcagaaaacataactagagatgccagttcctgctggtggctgtcaggctggcagcaagttctggccagaggcaagcarctgctgggccaggaggtagggactggcttgtctaagaaccgttctctgttcacaaagcaacactgtaagagcttctatttcttttttcatcagaatgactttattttctgatttaaataaaaaagacaagaagaaatgaaaaacaaagagggtgtggagaaagaaattctcttaaaaagtgaagg

SEQ ID NO: 227731 - DNA, 484 bp, Homo sapiens
gccattatttcttcatgcctccttatgagttccatgtacaaacttgggaagagttagtatgaaatatgcagcagaaatttgggctgtgaagttggcacgcttgatctgcacagacttcatttggccttattggttccaacttattttagccagttttgttatyttacaagcagagggagtttcagggtttcaccaagttgtttctgtttttttgtaatctaccatcctgcaagcgcaggaatttctactacacattggttgctttatctcttgggagtacgatttcaatttcacctttattagctcactaaatgggagatattgtcaccattagcaaataaggaaaccaaagcatagagagataaatgagttgtctaaaggcacgcaagagttagtgacggagccacattttcactccgggccagtggtcctccctttcccacagagctgggtgcatgtacaagaaatccatgaactccaaagt

SEQ ID NO: 227732 - DNA, 485 bp, Homo sapiens
gccattatttcttcatgcctccttatgagttccatgtacaaacttgggaagagttagtatgaaatatgcagcagaaatttgggctgtgaagttggcacgcttgatctgcacagacttcatttggccttattggttccaacttattttagccagttttgttattttacaagcagagggagtttcagrgtttcaccaagttgtttctgtttttttgtaatctaccatcctgcaagcgcaggaatttctactacacattggttgctttatctcttgggagtacgatttcaatttcacctttattagctcactaaatgggagatattgtcaccattagcaaataaggaaaccaaagcatagagagataaatgagttgtctaaaggcacgcaagagttagtgacggagccacattttcactccgggccagtggtcctccctttcccacagagctgggtgcatgtacaagaaatccatgaactccaaagta

SEQ ID NO: 227733 - DNA, 400 bp, Homo sapiens
taaacatctgccattatttcttcatgcctccttatgagttccatgtacaaacttgggaagagttagtatgaaatatgcagcagaaatttgggctgtgaagttggcacgcttgatctgcacagacttcatttggccttattggttccaacttattttagccagttttgttattttacaagcagagggagtttcagggtttcaccaagttgtttctgtytttttgtaatctaccatcctgcaagcgcaggaatttctactacacattggttgctttatctcttgggagtacgatttcaatttcacctttattagctcactaaatgggagatattgtcaccattagcaaataaggaaaccaaagcatagagagataaatgagttgtctaaaggcacgcaagag

SEQ ID NO: 227734 - DNA, 484 bp, Homo sapiens
gccattatttcttcatgcctccttatgagttccatgtacaaacttgggaagagttagtatgaaatatgcagcagaaatttgggctgtgaagttggcacgcttgatctgcacagacttcatttggccttattggttccaacttattttagccagttttgttattttacaagcagagggagtttcagggtttcaccaagttgtttctgtttttttgtaatctaccatcctgcaagcgcaggaatttctactacacattggttgctttatctcttgsgagtacgatttcaatttcacctttattagctcactaaatgggagatattgtcaccattagcaaataaggaaaccaaagcatagagagataaatgagttgtctaaaggcacgcaagagttagtgacggagccacattttcactccgggccagtggtcctccctttcccacagagctgggtgcatgtacaagaaatccatgaactccaaagt

SEQ ID NO: 227735 - DNA, 489 bp, Homo sapiens
aacatctgccattatttcttcatgcctccttatgagttccatgtacaaacttgggaagagttagtatgaaatatgcagcagaaatttgggctgtgaagttggcacgcttgatctgcacagacttcatttggccttattggttccaacttattttagccagttttgttattttacaagcagagggagtttcagggtttcaccaagttgtttctgtttttttgtaatctaccatcctgcaagcgcaggaatttctactacacattggttgctttatctcttgggagtacgatttcaatttcacctttattagctcactaaatgggagatattgtcaccattagcaaataaggaaaccaaagcatagagagataaatgagttgtctaaaggcacgcaagagttagtgacggagccacattttmactccgggccagtggtcctccctttcccacagagctgggtgcatgtacaagaaatccatgaactccaaa

SEQ ID NO: 227736 - DNA, 595 bp, Homo sapiens
ccatgaacaaagtggtcatcatggcagggatggaggttatgcatgagctcagcaacatggacttccattcaccaaggctgagctggctatggccactgctgagtgcccaatttkccagcagctgaggccaacactgagccctcgatatggcaccattcctcagggtgatcagccagctacctggtggcaggttgattatagtggacctcttccatcatggaaagggcagaggtttgtcctcactggaatagacacttactccagatatgggtttgcctactctgcatgcaatgcttctgccaagactatcatccatggactcatggaatgtcttatccactggcatggtactccacacagcattgcctctgactaagacactcacttaacagctaaagaagtgtggcagtgggctcatgctcatggagttcactggtcttatcatgttccccatcaccctgaagcagctgattgatagaacggtggaatggccttttgaagtcacaattacaatgccaactaggtgacaacactttgcagggatggggcaaagttcttaagaaggccatgtatgctctgaatcagtgtccaatat

SEQ ID NO: 227737 - DNA, 595 bp, Homo sapiens
ccatgaacaaagtggtcatcatggcagggatggaggttatgcatgagctcagcaacatggacttccattcaccaaggctgagctggctatggccactgctgagtgcccaattttccagcagctgaggccaacactgagccctcgatatggcaccattcctcagggtgatcagccagctacctggtggcaggttgattatagtggacctcttccatcatggaaagggcagaggtttgtcctcactggaatagacacwtactccagatatgggtttgcctactctgcatgcaatgcttctgccaagactatcatccatggactcatggaatgtcttatccactggcatggtactccacacagcattgcctctgactaagacactcacttaacagctaaagaagtgtggcagtgggctcatgctcatggagttcactggtcttatcatgttccccatcaccctgaagcagctgattgatagaacggtggaatggccttttgaagtcacaattacaatgccaactaggtgacaacactttgcagggatggggcaaagttcttaagaaggccatgtatgctctgaatcagtgtccaatat

SEQ ID NO: 227738 - DNA, 546 bp, Homo sapiens
tggccgactagaagcagtgacaatcagaggctcccatcaaaaagaaccataataagcatgtgacttctgcactggcaaccaaggtattcaggttctctcatcagaactgactaggcagctggcatgatacatggtgaggaagaaagagcagtggggtacagcagcccacctgagaggcacatggggcaggggagtccccaaccccctatccawaggaggcagtgagtaagcgtgctacccagctggggaacacatgctttttccacagaactgtgcaacccacggattgaaagatcccacttgtgaaccctcaccacccgggcctagggaccaaaccctggagctgcacagattctcaacagcctctcagctagaatctacttaaatctgctgtaatcctggggtggggggaggggcaaccagcaccacagctgtggcttcctgctgtctaagccatttgagctccttgaaggaggagcagcagccagcactgggtctcataactgcctaacacactaagctccctgggcaggagaagggcggcat

SEQ ID NO: 227739 - DNA, 291 bp, Homo sapiens
ccataagagcacgaatcccaagtggctcatccagagaaaggagccaagagtttatagtactttttgggttgttttatttattttcccccccacaagatataaatcaatctatttagatagggatggtygagagaacacattttattgctgtggataatttccccagggagaggatcatttttgtttcactcctaactttatcttttggttttgtgaaaccccagaagtttatgaaaagttgtccagatgaggacacagaaattagcaaactattcccatctttaattcaca

SEQ ID NO: 227740 - DNA, 335 bp, Homo sapiens
ttattcctgctctttaaaaacaaaaacaaaaacaaaagaaacaaaaaaacaagtctaccaatctgaaacaacaacaacaacaacaacaattgagttaatatgaacacatatttttgatgccagcatactacaggcaaacacctcttaaatcaatctaggagtggtcaggaatacagagccactttaaatattacataaataaaggagttgatatrcatttaatgcttgatttacatgaatatataaagagctgggtgagagaagatcaagaagggaaatatttcctgaggacctcattgtgaaacactgaagcaggtttccacaggttattggaa

SEQ ID NO: 227741 - DNA, 520 bp, Homo sapiens
ctctatatgcagtctgagggcttatagaatgcctgattcatgaacatggtatcaaaagcaatgttgattcagaccaggaggcacatactatgcaaagaattggaacaataagcttaggatcatggatctcactggctttacattatgctttatcactgagaaacaaccagacygttagaagtgttgaaggcatatgtaagtttttggggaacaccttgtggagttataccaggaaagacaacatacattgaatcatttgccaatatatggtggcatgttccaataagtagattaaatgatccatggaaatgagggattcaaacagtaaaacacatctggccatcgtacccactgaatcatttgtgcaattattgtttctctttcttgcagctttaagttttgccagggatggtatcctagttcccagagggaaaacattttgttctaggggatactaatgatgatgttgaactagaagcttcacctaacgcatgtctaactgcccctgccagttggagtg

SEQ ID NO: 227742 - DNA, 442 bp, Homo sapiens
cttagattctgcctgatttagcttgtattttacaattagtaaagaaatgttttactaagtggtgtcccatttgttggtatgggattcagayacactagtggggcacaatcacatttgaaaaccacaaataaaacagactatatagggcacatcttctgtgtttcataatatttgctaaaacttacctgtcttctgggcccttgttcacttgctccatcccagtgcccataggaaccaattctatataactgtctcacttcccagggacttcctagggctgtctcacatggctcagtgacagtcactgctcttcacaaagtggcagccagctcagtaacatatcaccatacatttgcttctcattcctcccagccgcatatcactgtgccatcactctcagaacccaaagattacacccaattaaatattgccacttaaggtt

SEQ ID NO: 227743 - DNA, 585 bp, Homo sapiens
tttggtagaaaaaataatgtattatctcattaacttttaggttttaattacatgttaaaataatgatattttagatagaytgtattaaataaggtatattactttttttttttttttaactgagactaagtcactctgtcgcccagactggagtgcagtggtgtgatcttggctcactgcaaactccgcctctcacgttcaagtgattctcccaccccagcctcctgagtagctgagagactacaggcatgcaccaccactcctggctaatttttgtatttttagtagagacagggtttcgccatgtcacccagactggtctcaaactcctgacttcaggtggtctgccaccctcagcctcccaaaatgctgggatcacaggtgtaagccaccgcaccaagccctactaaattagttttaactgtttcattttacttttttaaaatgtgcattttagaaaattcaaaattatatatgtagctcacattatatttctattaggcagtgctgttctgatgtgctaaagggacaattagaatgcacatttaaaatccaggttcattttcattttaaatcaatggaaga

SEQ ID NO: 227744 - DNA, 445 bp, Homo sapiens
tataatttcattgctgtttataatgattctttctaccaatttatgttctggaagaaagtaaaattatatcccagaagcaaagatgaaaactagcaccaacaccatcatttcaaagtgtcttcattcaaaaattcactgtgtttttaagatcttggtttctaaactctgtccttgtgtataatagtggaggcaactctaaatggttatttaacttgaaaagacatttgcaaaaccaaccccaagaatgaatagagttcactttcttgaaaagctgaatcatgaaattagctgtgacaaagtacaygcaagcctgaagcatgtgatttttttacatttttcttcacatgccatatagcttctaaaatcaaatgatcctataacttcaaaggaagctgaaatcttaaaaattagtagtacaagatgtaaaagatgaaggaaaacatca

SEQ ID NO: 227745 - DNA, 550 bp, Homo sapiens
catctcttataagagaggatcaatattcgattttataaaaccaaaaatgactaaaacatgtcctgtgtcttcaaagtgtcgaaatcagctgataaaagttaaataagtaaaagcatttcatatccactctgtttttatttttcaagaataaaatatataatcgttaactacagactcttatactcatttttcctgtctaactgtaattatgtatcctctgaccaacatctccaaacctcccaaccctgcaaccaactagcttctggtaaccactattytactgtccagtcttataagaattatatgaggtaatgcatttgttacttagctagatttaacaatttcacaatgtatatataacttaaaaatcatgttgtctattataaatatatacaaggttatcaatcaatttttaaaaattaattaaataagcaaagtatgatctaatcagtagacttggccttaatggacagagtacaaaataaaaggcttcgctgagcatataaaagtcaggaaaggttttgatgaattaaagtaggcaatgttggag

SEQ ID NO: 227746 - DNA, 548 bp, Homo sapiens
agaaaagggaacaaagatgagtaagaaaagcataagggtggaaatttttattcacaaaagcaaagcagtatcaaaaattttgccttgcacattataaacgtgtaagactcttctgtcttataattatatttatgcaatttttctctattgtcataatttttttgttgaatttattttccacacaggtctatagaatttatagctcaactgtgacttccactgttgattttctactagtagttcagttacttgtaccttgaaaataaaatttgatagcaaatttgtgtaaactagtgattagtgagcataatgtattttgactgtrcattttgtaataatataggcaaaatacactattttttacattttatatggattaagaataattttatgcttctcaattgattagtaaaatataaccttactttctgtaagaataagaaaatatcttgactaagcctacagatttatttgtaaaagtaagtaaaagggaaggttttaagtatcataatgattatgtatttaatttgtaaatatctatttaattt

SEQ ID NO: 227747 - DNA, 389 bp, Homo sapiens
taacatcatactcagtgaggacaaattggaagattttcactatgatgtgaaataagacaaggatgcccactctcaccccttctattctacaaagtactggacctcctagccagagcaattgggcaggagaaakaaataaaagacatctaaactggaaaggaagaagataaattgtccttgtttacacatgacatgagcttatctatacaaaaccctaaggatatcattaaaaacattcagaactaataaaacatatttaatacagtaacaggatacaaagttaccatacagaaactagcaatacttccatacactaacatcaaactatcctgaaaagaaataaagaaacaatctcatttacaatagctacaaaatgatagaattattta

SEQ ID NO: 227748 - DNA, 389 bp, Homo sapiens
taacatcatactcagtgaggacaaattggaagattttcactatgatgtgaaataagacaaggatgcccactctcaccccttctattctacaaagtactggacctcctagccagagcaattgggcaggagaaagaaataaaagacatctaaactggaaagraagaagataaattgtccttgtttacacatgacatgagcttatctatacaaaaccctaaggatatcattaaaaacattcagaactaataaaacatatttaatacagtaacaggatacaaagttaccatacagaaactagcaatacttccatacactaacatcaaactatcctgaaaagaaataaagaaacaatctcatttacaatagctacaaaatgatagaattattta

SEQ ID NO: 227749 - DNA, 389 bp, Homo sapiens
taacatcatactcagtgaggacaaattggaagattttcactatgatgtgaaataagacaaggatgcccactctcaccccttctattctacaaagtactggacctcctagccagagcaattgggcaggagaaagaaataaaagacatctaaactggaaaggaagaagataaattgtccttgtttacacatgacatgagcttatctatacaaaaccctaaggatatcattaaaaacattcagaactaataaaacatayttaatacagtaacaggatacaaagttaccatacagaaactagcaatacttccatacactaacatcaaactatcctgaaaagaaataaagaaacaatctcatttacaatagctacaaaatgatagaattattta

SEQ ID NO: 227750 - DNA, 534 bp, Homo sapiens
tttttttcaactggaaatcagaaaggggaaaagaatagtaaagaggatattgggtttgctatacaaaataatcctattgagccatcagccctgattactgggtgtgaaaactacaaaccctatcttgtgctcatacctagtggaatccttgggagaactaggtggccagacatggagcttcaggcagtggagtaaattcttaaggactgcactttgcttggtaaagtagatggacattcacttctcaaccctactcttttgcttctcattgctccttgaaagacccaacatgctattggtcattaaatatcccataattagcacaaatgtttgtactaacatttgtataatactaccacttaataggtgccagacayaccaagtaatttccgtgtaattatctcatttaattttcataactattctatgacatggagacttttattatgccctatttcacaggtgaggaaactgagtcacccagcagttaaataattagcccaagatcacacacagcagcagacagctgagcca

SEQ ID NO: 227751 - DNA, 525 bp, Homo sapiens
ctgcaaaactggatgactttcctcacctgtaaggtgagaaagaaatggttctttgcctctcagagttgtgaggagtaaagacactaatataggtcaagcactgagcacacagaaggtaccaaggaaaggatagagtcacggtggcacaccccaaatccttggggccagatgtgtttcagaattcagactttgtccaattttagaaaggttatacagcacagataccgtatattatgtaatattcccagtggggcctgaggaaacactcttatttctgtaatcaaacatattaktatttctttagtcaaatgtacgtgtgcccacacttggcatgataaataaatactataaatagcttcaaatcagtttgagtcatgtgttgtcacctaataagtgtgcgccaaagttatgaaaaacacttccgttttcagaacttaatagattttggaattgcaactaagggatttctattattttgtttctgtaactcaagtagtaagattttctcctttcccccctctagta

SEQ ID NO: 227752 - DNA, 411 bp, Homo sapiens
atcattcaagaatgagtgtgaaatcaagacatttcagcaatgcaattctaaggaagtttaccatctggagacccattgaaaatccacagaggtgtgggacacaagaaacaatcgtgagcaggcaagtgggaaatttagttaatttacttttcaaaagcytacattatataaaaagtaaaataaaatctctacataataaaaaaaacaacttaaaaatggagagaagtccaacaagggtctcactctgttgcccaggctggagtacagtggtgtgatcttggctcactacaacctctgcctcccaggttcaagcaattcccctgcctcagcctctcgagtcgctgggattacaggtgtgcactatcatgcctggctaaattttgtatttttagtaaagacagggtttcacca

SEQ ID NO: 227753 - DNA, 497 bp, Homo sapiens
cctgggttacaccaacattcacagaagttgatctaaagtcatctgtcctaacctcttcattttacagataaagaaactaggagccaagcaggtcacagttctttgtttctttccttaccaaacagtggaactgcctctgtcctgctgttgccaaaagggaagtaggggagattggtgaacagaagagaagaaagagagagaagtcatcyctttttatttctttcactggcaaatttgatttctcagccactttggcaagcaattctagtcctttctgtgtctttttaaagttatgtggcttggggtagatggcctcatatctgaaccttaggtttctcctctataaaattggtttaataagaacaatactgcaagatttaggggcagttgcaattcgattacagaagtgtaattccacctacatgtgtgtgctgaagtgaaaaagcccattccttcgtcccaccagacggaatcctttaatttcaactcaatttcat

SEQ ID NO: 227754 - DNA, 497 bp, Homo sapiens
cctgggttacaccaacattcacagaagttgatctaaagtcatctgtcctaacctcttcattttacagataaagaaactaggagccaagcaggtcacagttctttgtttctttccttaccaaacagtggaactgcctctgtcctgctgttgccaaaagggaagtaggggagattggtgaacagaagagaagaaagagagagaagtcatccctttttatttctttcactggcaaatttgatttctcagccactttggcaagcaattctagtcctttctgtgtctttttaaagttatgtggcttggrgtagatggcctcatatctgaaccttaggtttctcctctataaaattggtttaataagaacaatactgcaagatttaggggcagttgcaattcgattacagaagtgtaattccacctacatgtgtgtgctgaagtgaaaaagcccattccttcgtcccaccagacggaatcctttaatttcaactcaatttcat

SEQ ID NO: 227755 - DNA, 497 bp, Homo sapiens
cctgggttacaccaacattcacagaagttgatctaaagtcatctgtcctaacctcttcattttacagataaagaaactaggagccaagcaggtcacagttctttgtttctttccttaccaaacagtggaactgcctctgtcctgctgttgccaaaagggaagtaggggagattggtgaacagaagagaagaaagagagagaagtcatccctttttatttctttcactggcaaatttgatttctcagccactttggcaagcaattctagtcctttctgtgtctttttaaagttatgtggcttggggtagatggcctcatatctgaaccttaggtttctcctctataaaattggkttaataagaacaatactgcaagatttaggggcagttgcaattcgattacagaagtgtaattccacctacatgtgtgtgctgaagtgaaaaagcccattccttcgtcccaccagacggaatcctttaatttcaactcaatttcat

SEQ ID NO: 227756 - DNA, 456 bp, Homo sapiens
cccacttcattcctagaaatctacttctatggcacctgttctttgtcttaattcatctcactttccctccccactcccacatgctttcggactgcatgctgagagtgcagaaccagcctcattccttctcatgggctgtagaccaaatggggcttgaccagagcagagtgacagagtggaccaagaaacaaaagaaatcgagccttcctcaggtctgctcacgtgggtcccataaattccatccataactccaagtccttaaacaagccatgtttccccaggaaattcaggcacctgttttcctttgtttcatttcctggcttatgactgttctgcctggacaaggctgttccwtctttcgctctccagcaatagcatcatcctgagcactctgtgggtcttccttcaccttccacaaagcaactctttcttggattgatggagtccgcttctggg

SEQ ID NO: 227757 - DNA, 432 bp, Homo sapiens
tggggaggagctgccaattggaatagaattcacctcgctgattctgcttgaattaaccattaaagatgcaggttgrcaaaagaaatatatatttttaggtcattaagaaatgcctcattaattcaggggtgccccagcactgtgcttaacatttgtagcgggttgacccagactttctgaggcgtgcatagcccaccaagttttgctttgggatggggagataactggccagtcagctgtggcgccagtgccaccaacaatgttctcacctagtgaaggcatggttgaggaagaacagggaggctccctgggagggagtgtaggtagggaccatggtgaagcagtccaagctgaaagccagcacctgtcccaccctcctttgttctgctctctgcctggctgcttttgtaacacagtcccagagcctggtgt

SEQ ID NO: 227758 - DNA, 465 bp, Homo sapiens
aggacattaaagtggggaggagctgccaattggaatagaattcacctcgctgattctgcttgaattaaccattaaagatgcaggttgacaaaagaaatatatatttttaggtcattaagaaatgcctcattaattcaggggtgccccagcactgtgcttaacatttgtagcgggttgacccagactttctgaggcgtgcatagcccaccaagttttgctttgggatggggagataactggccagtcagctgtggcgccagtgccaccaacaatgttctcacctagtgaaggcatggttgaggaagaacagggaggctccctgggagggagtgtaggtagggaccrtggtgaagcagtccaagctgaaagccagcacctgtcccaccctcctttgttctgctctctgcctggctgcttttgtaacacagtcccagagcctggtgttgagggcctctgctcaattga

SEQ ID NO: 227759 - DNA, 615 bp, Homo sapiens
agatctttttactgtcttcatagttttgattttctcagaatgttatatagtcaaaatgatacagtatgtagcctttttatattggctttattcacttactaatatgcgtttaagtttcttccaagtcatttcatggcttgatagctcatttctttttagagctgaataatatcccactgcttggatgtaccacagtttacttatttattcatctactaaagaacatattgattgttttcaagttatagctattatgaataaagctgctataaatatccctgtacacgcttttgtgtcataagttttaaatttatttgagttaataccaaagagcatggtcgcttgtttacatggcaaaagcacatttagttttgtaagaaactaccagtcttacaaactggtagtcaaaacagtggctgtactgttttgcatttcagycagcaaggaacgagagttccttttgctccacgtcctcaccagcatttgatgtgttcagtgttttgcattttagcattcaaataggtgtatagtggtgtctcagtgttgttttaatttgcaatatcctaataaaatatgatgttgagcatgttcatacacacttatttactgtctgca

SEQ ID NO: 227760 - DNA, 596 bp, Homo sapiens
ccatgccccacattcaacactggaagttacacttcaacatcagatttgaaggagacaaatatccaaactatatcaactatacttgtatcagtttatgcttcataatctttttcattgttctgtttcactaatcttttgtcaaaagtacagtgtcataattactgtaatttaatagtaagaattaaagttgagtgtgagcaatcctctgaccttaatattgtgttaactattctgtcttttgccttcacatataaactttagaatcagtttgttgatatgcacagaataacttgctggaattgtgattgggattgcattgaatttataggccaatttgagaagaactattatctttacaatgttaagttttcctatccataagcctgaaatatctctccatttatttagacctttgatttctttcttcagaattttatactttttctcataaagcttttatacatattttattaaatttatgcctaggtatttctttactttgaggtgggaattaatataaatggtattgagttttcaattttaaattccaattkttcattgcttgaatatataaagcaattgaaagagggggcttc

SEQ ID NO: 227761 - DNA, 572 bp, Homo sapiens
ggttcttccttcactttaatttacgtgtgcatctttattttatccaaaaccatctttcttcagcctcaacaatgtgatcagcactgtgtgaggcactgacgagaactagagaaggaaatacattcagttcctgtcattttgaaggtcccagcctgatgtgataaacaaaaatgcagagcacaacctggtaagtgttataatagaggagggtacattatattatgaaagcagaaacacaagagtaactgtcaaatgtctgtttttggaactggaaaataattgtgaattatgctaatagtgaaatctaggtccctgctattatagctgccttccctttcaaatgcctttactttaatggctttrtgaaataaaggctgtgactattgtagacaagctctgaaaagcaaacattgattttgaaaaaggaaatgcatcgcagggacatcagctatgccagtgcattcaaactgattttagcaaatattgagaccttatctgacaccacaatgatctaaacaagattataataaaattacctgtaattagagagtaaaatttcccacagaaagctt

SEQ ID NO: 227762 - DNA, 572 bp, Homo sapiens
ggttcttccttcactttaatttacgtgtgcatctttattttatccaaaaccatctttcttcagcctcaacaatgtgatcagcactgtgtgaggcactgacgagaactagagaaggaaatacattcagttcctgtcattttgaaggtcccagcctgatgtgataaacaaaaatgcagagcacaacctggtaagtgttataatagaggagggtacattatattatgaaagcagaaacacaagagtaactgtcaaatgtctgtttttggaactggaaaataattgtgaattatgctaatagtgaaatctaggtccctgctattatagctgccttccctttcaaatgcctttactttaatggctttgtgaaataaaggctgtgactattgtagacaagctctgaaaagcaaacattgattttgaaaaaggaaatgcatcgcagggacatcagctatgccagtgcattcaaactgattttagcaaatattgaraccttatctgacaccacaatgatctaaacaagattataataaaattacctgtaattagagagtaaaatttcccacagaaagctt

SEQ ID NO: 227763 - DNA, 390 bp, Homo sapiens
gcttttaattttagaggctcatagttgaaagggacctgcttgtctcagatgagactttggactatggactttgagttaatgctgaaatgaatttagacttgggagacttttgagaaaggaggattttattttgcaatgtgagaaggacatgagattttggagggatcaggaataaaatgacatggtttgaatttgtgtccccactcaaatctcatgtcttaattgtaatccccagtgtcagagaagggacctggttggaggtgattggatcatggggacagattcsccccttgctgttctcatgacagtgagtgaattctcctgaggactcattgtttaaaactgtatgacacctccccttttaccactgtcttcctctgtcttcagtca

SEQ ID NO: 227764 - DNA, 559 bp, Homo sapiens
gatgcctatctcacaccatctacaactattaattataggtaagtcataaaccaaagcataaaaccaattataatgcctctggaaaaaaaatatgagcatattttcaaggtttggggtaggcaaaatyttctttggacatacataagaatatttagtaaattaaacttcatcacctaaaaatttctgctcaccgaaataaacacacaaaaacaaatactagatgtagctattcgtttccagaagacaatattgttttcctacttataaaataaatgtttcaactgaatagtgatgagaacagttttattgattttgatttttttagttcaggtaaatttcattcagtattttttccgtgtggtctttacactaactacataacctaatgacccagttccttagttctaggactttactacttaaacagtcttgaatgattcaccctggaaatctgcacattaactagaatcccaggtgattcctattacacattagtttcaatccctttagatagctaccatgctatggacggcagctgatttacatgtcataatccttt

SEQ ID NO: 227765 - DNA, 559 bp, Homo sapiens
gatgcctatctcacaccatctacaactattaattataggtaagtcataaaccaaagcataaaaccaattataatgcctctggaaaaaaaatatgagcatattttcaaggtttggggtaggcaaaatcttctttggacatacataagaatatttagtaaattaaacttcatcacctaaaaatttctgctcaccgaaataaacacacaaaaacaaatactagatgtagctattcgtttccagaagacaatattgttttcctacttataaaataaatgtttcaactgaatagtgatgagaacagttttattgattttgatttttttagttcaggtaaatttmattcagtattttttccgtgtggtctttacactaactacataacctaatgacccagttccttagttctaggactttactacttaaacagtcttgaatgattcaccctggaaatctgcacattaactagaatcccaggtgattcctattacacattagtttcaatccctttagatagctaccatgctatggacggcagctgatttacatgtcataatccttt

SEQ ID NO: 227766 - DNA, 632 bp, Homo sapiens
gttctggaggctgggaagttcaagaccaaggtgccagcaaattcagtacctgatgaagtttcctttccaccatagaagatggtgtcttctctgtgtcctcaaatgatggaaggarcaaaacaagctctcttttctcaagtctcttttatatgggcactagtcccattcataagagcagatcccctcatgacctaatcactttctaaatgtctcaactcttaatactatcacattgggtattaggttccaacacaggaatttgggggaataccaccattcagaccatagcacatacaaaatggcatatatgatttacatacatattttatataagacaacatttcatatacctatcacccagcttacatcataaaatattactagcacttgggaaatctactttatgcccttttttggctcacgtgttttgatgctctgttttcaggcacatacacattaaggattatttcttcttaaagaattgacccctttataattatgtaatgccacactttatccccaataactttccttgctttgaattctcctctatctgaaattgatatagtgattcctgctttcttctgattggtgttagcgtggtatatctttcttatcatttacttttaata

SEQ ID NO: 227767 - DNA, 488 bp, Homo sapiens
aggactatagatgtatgccaccacacctggctaattaaaaaaaaaawttttttttttggagacagggtctcattttgtcacccaggctggagtgtagtggcaccatcagaaatcactgcagcctcgacctcccgggctcaagcaattctcctgcctcagcctcccaagtacctgggactacaggcatgcactaccacacccagctaatttttgtaatttttaggagatggggttttgctatgttgcccaggccggtcttgaactcctgggggtcaagcgatcggcctgccttagcctctcaaagtgttgggattataggcatgagccactgcacccagcctaaagttttttttttttttgtagagatggagtctccctttgttgctcaggctagtctcaaactcctgagctcaagcaatcctcacactttggcctcccaaagtgctatttcataagcatgagccacggctcctggcctcttctgggac

SEQ ID NO: 227768 - DNA, 523 bp, Homo sapiens
acatcctagcccccgcaggcagcccgagccgaatgcctgctcccaaccccggccaaaaaaaaaaaamaaaaccaaccccaaacaaaaaccctgtgcccagaattgcattcggctgggagaggtggggatccagcagcaagtccgcaccgagccggctgcgcgcagcgcgggagcccccgggctggggccggcagcggggggcggtgtgtgttcgggggggtgtccaacattcccagaactcaagtattctcccggcgctgagccgggcgggggcagtggcggccgcggcccaagttcggggcaacactgccccctaggggccgccgccggaggtttgcagctggggcggcgaggggtctggaggtttgggtctagccctgggaccagggacttgactttggccctcagtgtttcaccggccagcggagccggggagttacctgggcagggctaccgtgaccccctggcagaccagtgacaggctagaggagagccttcaagtgccaatttagggagctgggga

SEQ ID NO: 227769 - DNA, 576 bp, Homo sapiens
gtgatggtggctgggtttccttttttgagcaccaaccacagaccacatgacacttatgtgggttatcttgtttaaacttctctataatcctgtgagatagattccacatatccccatttttgtacctgaggctcagggaagtgaagtgacttgcccaagctcacacagtccgtctcaggggaatggaccttcacaaatccatcctccagttcccaggccttcagcctgagacagggccagtcytaggttttctagggcgatcctggttgaccagaccactcccactctcttcccctcctttgctgccttgcccttcatctatactggggttgtctaatcttttggcttccctgggccacactggaagaataataattgtcttgggccacacataaaatacattaacactaatgacagctgatgagctacaaaaataaataaatatatacatacataaatacataaatgcaaaaataaatctcataatgtttttaaaaagtttacaaatttatgttgggctgtattcaaagctgccctggaccacatgtggtccatgggccacgggttggacaagct

SEQ ID NO: 227770 - DNA, 406 bp, Homo sapiens
aggggagagcacaggcgcagactacaccctgaaattcaactcagtgatgacagagaccctgctcctcaaattgggtgggcttccatatgtctcataagcccatgtttacactttttgaggaaatgacttaggttaccatgaaaattaaatgggcaaatgtatgygtgaatgcttttaagctgtaaagcaaaatacacatgccagtggctattatacagtctgtaccgtatcatctcaggcttgcctgtaaattaaaacatctgtattactagtagcttctacagcctcatcaccaagttctctaagggtgtggaccatttatgtccccagtgcacttagcatagcacttggcaaacagcagatgaggaatgcttggtgaacagagctgaacttggtcacagctgac

SEQ ID NO: 227771 - DNA, 408 bp, Homo sapiens
tataatgtgattcttcaaggggagagcacaggcgcagactacaccctgaaattcaactcagtgatgacagagaccctgctcctcaaattgggtgggcttccatatgtctcataagcccatgtttacactttttgaggaaatgacttaggttaccatgaaaattaaatgggcaaatgtatgtgtgaatgcttttaagctrtaaagcaaaatacacatgccagtggctattatacagtctgtaccgtatcatctcaggcttgcctgtaaattaaaacatctgtattactagtagcttctacagcctcatcaccaagttctctaagggtgtggaccatttatgtccccagtgcacttagcatagcacttggcaaacagcagatgaggaatgcttggtgaacagagctgaac

SEQ ID NO: 227772 - DNA, 609 bp, Homo sapiens
  misc_feature (1)...(609): n = A,T,C or G
gaaagttaggtagcttgagagaaagccacatagggcagtgtctctgtagaaatatttaatgccanaggctgaaacacaacaggctgcacacttccaattttgcaagtccagcacagtgttacaccgaaggaagagtgcacctaatgcatagcctgacctgggaagtggccttcaaaatgttttttgtaataaggcatcctattataacccagcgcaccattcmctgagacaggcggtggtattccggatcacaaccctgaaagtccgagtcttttcgccaggtgctttcaagccaggcaccttactgcccccgctctccctcttaagcactctctcttccaaagagcattctgtttgcttttcccaaagcactccctgccctctgctatggccacttagtgaggcaccacccacacacacagagctgctaaaggactgcataaagccagagcagcttccagcacagggcacgcctaataggagggtctgatctgttaattatctgtcagtttgtcacggctgggctgaggaggggagaatgatgaaaaggggggtgtttagggggaggccctctactcggtggtgtgctactcttcctgaaattctgaa

SEQ ID NO: 227773 - DNA, 560 bp, Homo sapiens
agcttattaattactgagagaagagtgttgaagtctctaacaataattgtggatttctgtagttcttcttttagttctaccagtttttgcatgctgtgttttgaagttctgttgttatgtgcatacatttagaaaaattatgtccttatgataaattgactctgttataactataacctattcttccattttcctggttaaaattctggttctgaagtctgtatgtctgtactaatgtagtaatttaaactttcttttcactagtgtttgtataggatgtctttcaccctttaacttttgacctacaaaagtttctatatacrggataggtttcttatagatagcatataattgggtcttgcttttttatacattctcacgagttcttcctgttgactaaaaagtttgactcatttaaatttaatgtaattatcagtatagttgggttaaatctaccactttgctattttctatttgtcatatctgttctttgttcttatttctttctttttctgtcttcttttgggttaattaaattttaaaaatagtttcgttctatg

SEQ ID NO: 227774 - DNA, 560 bp, Homo sapiens
agcttattaattactgagagaagagtgttgaagtctctaacaataattgtggatttctgtagttcttcttttagttctaccagtttttgcatgctgtgttttgaagttctgttgttatgtgcatacatttagaaaaattatgtccttatgataaattgactctgttataactataacctattcttccattttcctggttaaaattctggttctgaagtctgtatgtctgtactaatgtagtaatttaaactttcttttcactagtgtttgtataggatgtctttcaccctttaacttttgacctacaaaagtttctatatacaggataggtttcttatagatagcatataattgggtcttgcttttttatacattctcacgagttcttcctgttgactaaaaagtttgactcatttaaatttaatgtaattatcagtatagttgggttaaatctaccactttgctattttctatttgtcatatctgttctttgttcttatttctttctttttctgtcttcttttgggttaattaaattttraaaatagtttcgttctatg

SEQ ID NO: 227775 - DNA, 443 bp, Homo sapiens
atgctagggcagaataacaaatggctttatccttgccaaccaccagtcaggacctgagcaattcggagtgtgcagttttccacatcacttgatcatctagaataaagcctgcttacgctgagtgtgcccatgagagtattagaaaactagaagccctcttacaaaaaggaagtactgccctgttccagcaatgaacttttgggaacctgagtggactttgcccagccctacagtatcacctgtgagatttcacatggctgtgctgctgctgttcaaaccccatcaaagctgcagcaaatacaaaggcagcacrgtaacaatcagtaaggaagaatctatcatatgacaaagaagctggtataagggtacaaagtaaaaccacctggctactaacctagcacttttttaaaaaaatgtagaatacctcaatgtatctgcaatag

SEQ ID NO: 227776 - DNA, 443 bp, Homo sapiens
atgctagggcagaataacaaatggctttatccttgccaaccaccagtcaggacctgagcaattcggagtgtgcagttttccacatcacttgatcatctagaataaagcctgcttacgctgagtgtgcccatgagagtattagaaaactagaagccctcttacaaaaaggaagtactgccctgttccagcaatgaacttttgggaacctgagtggactttgcccagccctacagtatcacctgtgagatttcacatggctgtgctgctgctgttcaaaccccatcaaagctgcagcaaatacaaaggcagcacggtaacaatcagtaaggaagaatctatcatatgacaaagaagctggtataagggtacaaagtaaaaccacctggctactaacctagcactttttwaaaaaaatgtagaatacctcaatgtatctgcaatag

SEQ ID NO: 227777 - DNA, 535 bp, Homo sapiens
tccatcttttttatgttattaaataattaacagggcgaattctcgtacatagtaactaccttctgagatacgcaactctagcccatttacagataagaaaaatgaggtttagagagtaacattactagccaaaggtcacacaactaggaccaggtctggtcagatgaagacctggattttcagccaccctgcccagtgtgttgcctgctgcaccccaggggctcccctgatgtcacgtggatggaaaggattgtgttgcagacaactgactggtgtgtggacagcactcaggctattctgcagttggttactctgcagcacaggttggtgccactacaacctcaaggcctgctatcccagctgggcactcagcgctgcccagtaatcctgcaatggtctctagctagttcctgatccagttatcccctcgggggtgycaccccagtcattctcagatgtgcctttgcttatgtcattatggtgaaaatgcaagcctccaggcaacttctcagctctctcctccgcctcctgtaca

SEQ ID NO: 227778 - DNA, 566 bp, Homo sapiens
atatatatatatatatttttttttttcaggtcaamgattaggtgcattagctagaccccatctcttatttatttatttagacagagtcttgctctcttgcccaggctggagtgcagtggtgtgatctcggctcattgcaacatatacctcctgggttcaagcgattcttctgcctcagcctcccgagtagccagaaccacaggtgcacaccaccatgcccagctaatttttttgtatttttagtaaagacggggtttcaccatattggcaagcctggtctcgaactcctgaccttgtgatcctcctgccttggcctcccaaagtgctgggattacaggcatgagccaccacgcttggcctggaccctgtctctttcttttaaagacttagaatgattctattagttcaaatggatttccatttgtgtggaaacatgctaatcacttaggtctatttcttgtctcaccttcctgaagaaaaacaatgttaagatttcgtcggttcatgatcacacccaggaaagtatgaatttagatggcaagaattctggggcaggagatgaagta

SEQ ID NO: 227779 - DNA, 565 bp, Homo sapiens
ccctagagtggcaggccatctaggccattgtgagggttttggttacccaggcttagaatgcagggctggtcttgcctgtgcttttccattcattcagtgtgcagagctgaccctcaacctccctagatcccatttcctactcttcattttatccaatctcccctgcaccccctaacattggtaagttactctctctaaaacacaacagtgatcatatcctactttgtcacaacttatccccagcaccttttgtataaggtttaaagcctctgatgagtcatttagggcccccttgcacaatcacccttccctctttgcccatggctgcacctccctccagycagattggagtttttgcagttccctctgcgagccttgtaacctctcttgtttcctgcacctgaagtatactgggtcactactcagttcagggaataaacacggtatcttctgtgaagatgtccctcaaccaggttcaccccctaggggtagtcacttctttgagctctcatagcattttgcatttgtttttagcacatttgccatttttgacttgcatgatagt

SEQ ID NO: 227780 - DNA, 565 bp, Homo sapiens
ccctagagtggcaggccatctaggccattgtgagggttttggttacccaggcttagaatgcagggctggtcttgcctgtgcttttccattcattcagtgtgcagagctgaccctcaacctccctagatcccatttcctactcttcattttatccaatctcccctgcaccccctaacattggtaagttactctctctaaaacacaacagtgatcatatcctactttgtcacaacttatccccagcaccttttgtataaggtttaaagcctctgatgagtcatttagggcccccttgcacaatcacccttccctctttgcccatggctgcacctccctccagtcagattggagtttttgcagttccctctgcgagccttgtaacctctcttgtttcctgcacctgaagtatactgggtcactactcagttcagggaataaacacggtatcttctgtgaagatgtccctcaaccaggktcaccccctaggggtagtcacttctttgagctctcatagcattttgcatttgtttttagcacatttgccatttttgacttgcatgatagt

SEQ ID NO: 227781 - DNA, 554 bp, Homo sapiens
ctcatttctttcaaaagcaaaaacataaagtagacaagatttgtgacttcttttcatttcttttttttcttcacgcccctcccaaatattccaaccactccaaatgtaattactatcaacagcagagccaggaaagttaattcaagggaargaatttgaaaagtcctaaaagtttccacttttcttccagttatacatcacagtgttgctattggtcactgtgatatttaataagagaaagtgaatttccaggtcaagttctaaagcacaagaagtaaaccaaatgcttcttggggccaagcaagaacttacacgagggaagttcctaaagacagaacaacacccatcttaaggtgtagccagtgctcagctctggtacattcatagttccccagagaaataaaatcctctctggccaagactttcaaattttcaaagatacaaccctggatttactgtgaatctcctagttttaaatgtggccaactaattaaaatgaaaaaaaaaaaaagtaaacagagctcatgccaaacaatgtctgttggccttaacca

SEQ ID NO: 227782 - DNA, 554 bp, Homo sapiens
ctcatttctttcaaaagcaaaaacataaagtagacaagatttgtgacttcttttcatttcttttttttcttcacgcccctcccaaatattccaaccactccaaatgtaattactatcaacagcagagccaggaaagttaattcaagggaaagaatttgaaaagtcctaaaagtttccacttttcttccagttatacatcacagtgttgctattggtcactgtgatatttaataagagaaagtgaatttccaggtcaagttctaaagcacaagaagtaaamcaaatgcttcttggggccaagcaagaacttacacgagggaagttcctaaagacagaacaacacccatcttaaggtgtagccagtgctcagctctggtacattcatagttccccagagaaataaaatcctctctggccaagactttcaaattttcaaagatacaaccctggatttactgtgaatctcctagttttaaatgtggccaactaattaaaatgaaaaaaaaaaaaagtaaacagagctcatgccaaacaatgtctgttggccttaacca

SEQ ID NO: 227783 - DNA, 558 bp, Homo sapiens
gataggacaactgacagcttccatcattagggaaacttttagaagggccactcttcatatttctggtatatgaatgtattttagatgaggtatgaaattcattgcaaatagggggtagaaatcttgaagacacacccctgaagtaagaaaggaaagrtatacaaaaatgacacacaaaagtgacaaaaaatacgtaatggattggcaaaacaaagtatatgaaaagaagaaacagaccacttacaaaagggcaaatataagaaagcagacattacatggcccattccccaccctcatcccacctacctgaaaaactcagcccttgttattggaaacataagatacggctataatgtggatactttggtacctcatccctgattaagttcagtatcaaagtgttttgttttgcacatactattccttcccttggcatttgccagtaaactttaacagtcacttcatgataattttatagtttccatagtgtatcctcaataatttagatttttaaaaaggaatatttttatggatctatttctttatatatttctccca

SEQ ID NO: 227784 - DNA, 695 bp, Homo sapiens
caccatgcaatatttatccttctgcgcttggcttatttcacttagcataatgtgagtctcttttcttcatataggtttttattccatttaaagttcaatttggtatttaagattaaaaaaaaaaaaccacctaactttctattttctaaaaagtcaataaattttaccagcatcacaaattgaacagggaatcctttctctaattatgtgaaatgccatattcatcattaatgaaatatgtacatattatgtattggaatttgtttctggactttatattctgttccattactgagtctatttttgaaatagcatcacaattttaattactctgtcttattaataaacatgtaagtatctaatggtagagtgttctttattgtttttcccaacaattcctcagctattctttaagctttattctctctaatgtactttagaatcatttttgaagtgaaaaaataaatcagtggtttttaatatattcacagaattgtgcaaccattgctcttatctaatttctaatgttttcaccacccccacaaaaccccattcctattagaagttacatcccattccctcctccccagcctctggcacccactaacctgctttgmctattctgaacatgttatataaatgaaatcatacaatatgtggccttgaatctgactgctttcaatcagcatgttttc

SEQ ID NO: 227785 - DNA, 382 bp, Homo sapiens
cccctcttcctctctcttcttcttttgctttttcccactttccccctcatcccttacttttccatgtcctactccttttcttctttcttcccctatttctccctctcctcctcctctctgtctctctgtttcmttcctctcttcttccaactttgagaagtagtatggattttggagtcagaatctattgttgaaaacccaggtacaaatcaaatgaaagaaaaataatcagatctagaaaccagagccaaaatttatatgaataagtttatgtctcacaactctcaaaggaatcaacttcagcaaaacttcaatcttctttcctttcctgtaactgtaactaccaacagtcttttttagaatgattttaaccttgagtatg

SEQ ID NO: 227786 - DNA, 477 bp, Homo sapiens
tcaccaacacggtcaaatagggactcgctccgccgcaatgcctctggacctcttcatctctcaggctgggaaaataaagcagacaagctctgaaaaacgcccgggactaactgttaagaggccctgcatcctcagttgaacattccttcaggaatgcccggggaccttgctgggggggttcaggaaggtgtctgactctctgggagtgtgtcttgaggtttcgcctaaaacttaaaataagaaaatcggaggcctgagagaactttgcaaacaaatgtccagcatcttctctgacgcttagaaagtccgttacccgcgcggaggcgaacttctccactcactggraggccaccaaccctagctaacgccacgcccaggccgccaactggctgacccggaagtgctcggcggcggccgcggcggcggggacgcggcctagccgaagcacccgcgcgcgcgcgcgcgcgctcgttctcc

SEQ ID NO: 227787 - DNA, 536 bp, Homo sapiens
tgtttcaatagttagtaaatatgtttctagagtttttccaattaaaaaaattgacctgcaccttgctttggattgtactaaaatctgatttcaacacaaacataatcttctgaattactttggttttttcagctgaagccttggggagcactgaagccaaggctgcascgtaccaaaaatttgaaacatgtgaatgagctgaatgtggaaggactaccggaaaacactcctttcagaatcccctcattgcatgaaatcccaaggctcgaaaacatctttcaagtgagcaattgaattaagtttgttattaagaggtaagatgataatctgcagaaacaaattcattgtcttccctaaggagagattaatttgaccaagatgggccttttgttcccctctcatcatgactcctttatattaaaattaacatttagattcatttattgaacaaacatttatttagtataagcatcagttgtgcaaaattggttctagcaagaaccctgtccttgggaggcttaatactcagaaaaatg

SEQ ID NO: 227788 - DNA, 413 bp, Homo sapiens
ggatacactttttttgtaaaatctgtgaaaggacatttgggagagcattgcgacctatggtgaaaaagtgaatatttccatataaaaactagaaagaagctatctgagaaactgctttgtgatgtttgcattcatctcacagagttaaacctatcgttttattcggcagtttggaaacactgtttatgtaaaatcctagaaaggacatttgggacagcatcaaggcccatggtgaaaaagcaaatatccccagatgaagagtagaaataagctatctgagaaactgttgtgggatgtgttcattcatctcatagagttgaacctttgttttcattcagcagtttggaaacactgtttttgctgtatctgygaagggatattagggagcgcattgaggccaatggtgaaaaagt

SEQ ID NO: 227789 - DNA, 566 bp, Homo sapiens
aatatcccaaaataaaaactagaaaaaagctatctgtgaaactgctttgtaatgtgtggattaacctcaagggttaagcctttcttttgattcagcaggttggaaacactctttttatagaacttgcaaagggacgtttgggagcctgttgaatcctatgtggaaaaagtgaatatccccagataaaagctagaaagaagctatctgtgaaactccttggtgatgtgtggactcatctcacagagttaaatgtttcttttgattcagcaggttggaaacactctttttgtaagrtctgcaaagggatgtttgggaggccattgatgtctatggggagagagtgaatttccccagatagaaactggaaagaagcctctgtgaaagtgcttgttgatgtgtgtattcatctcacagatttaaacatttcctttgattcagcaggttggaaactctctttttgtcaaatctgtgaagaaacttttgggatcccaatgaggtctacaagaaaaaacaaatatccacagatgaaaactagaaagaagctgtgaaactgcttggtgatgtgc

SEQ ID NO: 227790 - DNA, 566 bp, Homo sapiens
aatatcccaaaataaaaactagaaaaaagctatctgtgaaactgctttgtaatgtgtggattaacctcaagggttaagcctttcttttgattcagcaggttggaaacactctttttatagaacttgcaaagggacgtttgggagcctgttgaatcctatgtggaaaaagtgaatatccccagataaaagctagaaagaagctatctgtgaaactccttggtgatgtgtggactcatctcacagagttaaatgtttcttttgattcagcaggttggaaacactctttttgtaagatctgcaaagggatgtttgggaggccattgatgtctatggggagagagtgaatttccccagatagaaactggaaagaagcctctgtgaaagtgcttgttgatgtgtgtattcatctcacagatttaaacatttcctttgattcagcaggttggaaactctctttttgtcaaatctgtgaagaaacttttgggatcccaatgaggtctacaagaaaaaacaaatatcyacagatgaaaactagaaagaagctgtgaaactgcttggtgatgtgc

SEQ ID NO: 227791 - DNA, 554 bp, Homo sapiens
atgaaaaaatgttatatcaatacctatacaatgctacaaatcaagtgtttagaggaaaatttacatccataaacaaatttgtgaaaatgaatggctgaaaactaatatattgaggagtgtattgatctcaaaaactaaaggtattagaaaatattaaataacaaagaaaatagcaaaacatactaaattgtactcatgtaaccaaataccacctgtttcccacaaaactatggaaataagtataaaaataacaataaactataatacaaatgtaaaataagtatcaacaaagcccaaagttgttttttaaaaaaagaatgaaattaataaaccagtggcaaatatgataagaaagagaaaggcagaaattaatatcaggaaagaaaaaaagaaaaaagtatcaccattatacattttttaggtattaatcagaaagttgtaggatattatgaaaaattattttcaaatgaaatgaattttaaatgaaatgacagtctttytagaaaacaccacaaaatccattcaaaagaactacaatgaaaatagttttgtat

SEQ ID NO: 227792 - DNA, 631 bp, Homo sapiens
attttaaccattcttaaccattctcatgggagtgtagtagtatattgctgtggttttactttggattttcctaatgagacacatgcatttcatgcacttataacttacaacttcttttgaaaaatatctgctgagatctacctatttttttgaagcatttatcttcttatgattaagttgtaagagttctttatacattctagagggatataagcactttgtcagctctatgtgttattcataatatctcccaggttatgacttgtctcttcctaacagggtctttgaagatcayttaaaaatttttcataatattcaatttattatttttttctttagtggcttatggttttataccctatttatatcatctttgctgacaccaaagtcacatggattttctttgttttcttctaaaagtactatactttcatttttacttttagactcataattcactttgtgttctctttcatgtatgatgtgagggaaggaaagatgctttttttttgcttttccttgtggatttctaattttcacagcaccatttgtgaaaggtctttctgttcccagttgattgccttgacacctttgttttaaaaaaaattactcaaccaaataggtgcgggtt

SEQ ID NO: 227793 - DNA, 468 bp, Homo sapiens
aaagaatttagcaatatcttccctacttggatgtccatttataggctctctgcartaagaaaaatatggctcttttgcccaaccgtgcaggcagtcagagcttatggttgtcttcccttgtttcctaaaaatagctgttattttgttcttttacaaggtgcactgatttcatattgttcaatcacacgttttacaatcaatttgtacagttaacacaattatcacagtggtcctgatgtggcatacatactcagctaatgaacataacaggattaagacattagaataaagacaggcaaaagaaagtataaaagtattatttgggaactgataaatgtccatattaaaaatgagatcttcaaaatttatatcccacagcaacagcttcagctagtctttcctttctgggtccctgaattcctgcaacagataggattaactctgtcagatgaatctgcacatcacaaa

SEQ ID NO: 227794 - DNA, 468 bp, Homo sapiens
aaagaatttagcaatatcttccctacttggatgtccatttataggctctctgcagtaagaaaaatatggctcttttgcccaaccgtgcaggcagtcagagcttatggttgtcttcccttgtttcctaaaaatagctgttattttgttcttttacaaggtgcactgatttcatattgttcaatcacacgttttacaatcaatttgtacagttaacacaattatcacagtggtcctgatgtggcatacatactcagctaatgaacataacaggattaagacattagartaaagacaggcaaaagaaagtataaaagtattatttgggaactgataaatgtccatattaaaaatgagatcttcaaaatttatatcccacagcaacagcttcagctagtctttcctttctgggtccctgaattcctgcaacagataggattaactctgtcagatgaatctgcacatcacaaa

SEQ ID NO: 227795 - DNA, 467 bp, Homo sapiens
agtttgaaaacagtgtttttgtagaatctgtgaattgacatttgggagctcattgtgaccaatgacgtaaaagcaaatatttccagacgaatctagaaagaagctatcttagaaacagctttgtgatgtgtgcattcatctcatggaagtaaaattttgttttgattcagcactttggaaacactgmttttgtagaatctgtgaaagtacattatggagctcattgaggccttgatgaaaaagcaaatatcttcagataaaagcttgaaaaatggtatctgagaggctgctctgtgatgtatgcattcatctcacagagttaaacctttcttttgattcaacagtttggaaacactgttttggtagaatctgtgaaaggatattttggattgcattgaggcctagggtggaaaagtaaatatttccagaaaaaaagcttgaaagaagctatctgtgaaactgctttg

SEQ ID NO: 227796 - DNA, 495 bp, Homo sapiens
tagcagggctctgggcccagcacacgtaatcactttttcctcctgggtctctgagcctttgatgggaggcactgtcatgaagatttctgaaatgcccaggagatattttcctctttgtcctggctattaacattcaactccgtcatagcattatctagtatatctttaagtttttaggagatakattttatatacaaattaagtattgtacaagttcaattaaaatacgtgtatttaaaataacacatatttacatattttaattgaaatatcttggaactaacatcccactgacttctacattctaagactatgatattttactgagaaataaataatctaaaaacgttaatatctgagtttttttcaatctctgtaaatcatagcatgcatttaacaaaatctgggaagtgaaccttccccgcattttatcttctgaaaaaaatatatatttcatgttccatacagcagcataaaattaatcttgcacattat

SEQ ID NO: 227797 - DNA, 495 bp, Homo sapiens
tagcagggctctgggcccagcacacgtaatcactttttcctcctgggtctctgagcctttgatgggaggcactgtcatgaagatttctgaaatgcccaggagatattttcctctttgtcctggctattaacattcaactccgtcatagcattatctagtatatctttaagtttttaggagatatattttatatacaaattaagtattgtacaagttcaattaaaatacgtgtatttaaaataacacatatttacatattttaattgaaatatcttggaactaacatcccactgacttctacattctaagactatgatattwtactgagaaataaataatctaaaaacgttaatatctgagtttttttcaatctctgtaaatcatagcatgcatttaacaaaatctgggaagtgaaccttccccgcattttatcttctgaaaaaaatatatatttcatgttccatacagcagcataaaattaatcttgcacattat

SEQ ID NO: 227798 - DNA, 551 bp, Homo sapiens
aagagtaaagtatagaagttttatttaatttatttgaatttgtttttctcacttttagtcaaccactgccccagagagtctgtggaatggagttccttcaaagaaagttatgattttacaacagtgcaacaaagttcttatggacattcgttgaagtccttttttaaatgagttgttcattgataaaaatccaaataaagatgaaagaatrtcatttgaaatttaggaattcagaataaaagcaaacacaatttcacgtattgttgaagtgcaatatttaaagtatacatttcatcagttttgacatgtgtatgtacttgaaaattattgccataagcaagataagaaatatttccatcacctttagcaattttcttataccctttgtaatatgcttcgtccttcactctcattcatggaaaacattgacctacttttaatatttttgtgacttagaattatattaattgaagtagtaagtactttttgtttttatttttaactgactgttcctgctgcctactgattttgagatccatctatgttattat

SEQ ID NO: 227799 - DNA, 551 bp, Homo sapiens
aagagtaaagtatagaagttttatttaatttatttgaatttgtttttctcacttttagtcaaccactgccccagagagtctgtggaatggagttccttcaaagaaagttatgattttacaacagtgcaacaaagttcttatggacattcgttgaagtccttttttaaatgagttgttcattgataaaaatccaaataaagatgaaagaatgtcatttgaaatttaggaattcagaataaaagcaaacacaatttcacgtattgttgaagtgcaatatttaaagtatacatttcatcagttttgacatstgtatgtacttgaaaattattgccataagcaagataagaaatatttccatcacctttagcaattttcttataccctttgtaatatgcttcgtccttcactctcattcatggaaaacattgacctacttttaatatttttgtgacttagaattatattaattgaagtagtaagtactttttgtttttatttttaactgactgttcctgctgcctactgattttgagatccatctatgttattat

SEQ ID NO: 227800 - DNA, 551 bp, Homo sapiens
aagagtaaagtatagaagttttatttaatttatttgaatttgtttttctcacttttagtcaaccactgccccagagagtctgtggaatggagttccttcaaagaaagttatgattttacaacagtgcaacaaagttcttatggacattcgttgaagtccttttttaaatgagttgttcattgataaaaatccaaataaagatgaaagaatgtcatttgaaatttaggaattcagaataaaagcaaacacaatttcacgtattgttgaagtgcaatatttaaagtatacatttcatcagttttgacatgtgtatgtacttgaaaattattgccataagcaagataagaaatatttccatcacctttagcaattttcttataccctttgtaatatgcttcgtccttcactctcaytcatggaaaacattgacctacttttaatatttttgtgacttagaattatattaattgaagtagtaagtactttttgtttttatttttaactgactgttcctgctgcctactgattttgagatccatctatgttattat

SEQ ID NO: 227801 - DNA, 477 bp, Homo sapiens
gtgaacaatttattggaatgccacaaacatctgggaatttgggcagagcagcaaccaatgaaacttttagaatcttgtcttcttgtctttttttgccaatgagaagactcagcatctagtacctttgaccttgtctttacatcttagctggagctccatacccacaactaatagctgctaaatgtctcgaatcatgtctgaataagggaccaggtaactatgccatagtacacatagtcaatggactgggatgaaaccatcagaaaggatgtggtagatctgtttgctacttgyggaagtggggcaccaaggttatcagccacacagagtgggaaagggaagttccacaaacaaaaaccacagtgctccttctaaaagaaggggaaattattcttggttaggccaaaacaatagatattcatcatcataacagtttccatgggagggttcccttctggcatttcttgggaaaattgt

SEQ ID NO: 227802 - DNA, 611 bp, Homo sapiens
ctccctggggtctcttttatgagggaactcatctcagtcatgaagttcccaccctcatgacctcatcacctcccaaaggctccatctcctaataccatctcatggagattagagtctcarcatatgaatttggaggagacaaggacattcagtcaattgcaccatcttctgagtttttatagataattacattaaacaaattcagagagtaggtatgaagcccaatattgtatctctatcagtagtagttgcgatttttgagggtgctacattgtagtggctataaaatgggttcacatgtagctataagactttgggaaagtcatcaaacttctctgtgccttaatttactgaccttaaaaatgaacagtactatgcctgtgccttaaaatcattatgatgattcaatgaggttttgtatgaaaagcattttacaaaaattaagcacttgatatatatagcatactagtattttaaaaatatcatgtggattagtatgcagatacacaaattctttcatttctttttaaaaaaactcaaaaataccactaacaattctagaccaaagaggtctaaaaagctctctagggtcccttttataaagatactaa

SEQ ID NO: 227803 - DNA, 611 bp, Homo sapiens
ctccctggggtctcttttatgagggaactcatctcagtcatgaagttcccaccctcatgacctcatcacctcccaaaggctccatctcctaataccatctcatggagattagagtctcaacatatgaatttggaggagacaaggacattcagtcaattgcaccatcttctgagtttttatagataattacattaaacaaattcagagagtaggtatgaagcccaatattgtatctctatcagtagtagttgcgatttttgagggtgctacattgtagtggctataaaatgggttcacatgtagctataagactttgggaaagtcatcawacttctctgtgccttaatttactgaccttaaaaatgaacagtactatgcctgtgccttaaaatcattatgatgattcaatgaggttttgtatgaaaagcattttacaaaaattaagcacttgatatatatagcatactagtattttaaaaatatcatgtggattagtatgcagatacacaaattctttcatttctttttaaaaaaactcaaaaataccactaacaattctagaccaaagaggtctaaaaagctctctagggtcccttttataaagatactaa

SEQ ID NO: 227804 - DNA, 502 bp, Homo sapiens
cagtactttatttctttttgttgctgagtattattcaattttatgacttgtgatattatgaaatatatatttggtcttcaaccccctttcctggcatacaactcttaaaacacttagaaacttggaagtgatgtcttgtgtttgctaattattgactgaacttatggctagtggcctgtgggtaacttcagaatgggggttgggagaagaaaagaaaaaaagaaaaaaaaaatctttgagtcactggcggcagtttaaaaagcatgctgcccatgcactgaaacctttgtaagrcactgtaatacttggcttggatataatttcacatcatttaattgcatagcagttaattttacaccagttttgccaagggctaaaagagggattggttggaaataaattatagtttcttcccaattttggcatgattctcattaacatctgaaaagatcagagctgaaaacatctgaaaaaactctgttaattattttaaaataaacac

SEQ ID NO: 227805 - DNA, 502 bp, Homo sapiens
cagtactttatttctttttgttgctgagtattattcaattttatgacttgtgatattatgaaatatatatttggtcttcaaccccctttcctggcatacaactcttaaaacacttagaaacttggaagtgatgtcttgtgtttgctaattattgactgaacttatggctagtggcctgtgggtaacttcagaatgggggttgggagaagaaaagaaaaaaagaaaaaaaaaatctttgagtcactggcggcagtttaaaaagcatgctgcccatgcactgaaacctttgtaaggcactgtaatactkggcttggatataatttcacatcatttaattgcatagcagttaattttacaccagttttgccaagggctaaaagagggattggttggaaataaattatagtttcttcccaattttggcatgattctcattaacatctgaaaagatcagagctgaaaacatctgaaaaaactctgttaattattttaaaataaacac

SEQ ID NO: 227806 - DNA, 537 bp, Homo sapiens
tggggggtacttgggatttttgctttgctagtctctatataatgtatgtttgaaacttttcataatacaaactaaaaaaaattttagaatgattaataattgagcatgggcccatttaggccccattcccttgcacaaagtccctagagttagaattgtcaaggtctggcaacagatggtatgtggaaggcaaatgggagaaggtcgtgttcactccaaatgttggtgccctgctgattaagaggatgattattcctcatgaattgcaggttttggaagaaagctaagtagttcatttctattttccctgatagggtctcactctgttgcccaggctgaagtgctgtggtgcgatctcctcttactgcagscttgacctcacaggctcaagtgactctccccactcagccttccaaggaactgggatcacaggcatgcaccaccatacttggctaatttttgtattttttgtagagacagggtctcactatgttgccgaggctggtcttgaactgttggggctcaaatgatcctccc

SEQ ID NO: 227807 - DNA, 594 bp, Homo sapiens
aggcaatgtttacagcttccagacattgagatctgacattttaggggccattaktctgcctatcacacccactaaaatatttggaaattgtgtagcatcaggacagcaaatttctcttaagtgttgcagattttaaaagatatttgttctacatgtccaagtttttataactttgtgtccaaataaataaggatattttgaatagttcagttgtagtctgagactatttactatacatagtctacttgtacctagttatatatacaaactataaagtagtttgggttattggctcaagaacacatagctgctttcaacctggggatattgctgttcacttgctatcttggaaggcaagatttttctactggttctgtcccacaatttgaaggtatgtcccccacctccccaatctcttccatctctttttaaaattggctttactgaggtacaatttacaataaaattcatatagtttaaatgtaaagttcaattaattttgacaaacgtattcagccatgtcatcactaacccaatcaagatatagaaaatttccattaccccagaatgttcctgtgtgctccttcccagctt

SEQ ID NO: 227808 - DNA, 594 bp, Homo sapiens
aggcaatgtttacagcttccagacattgagatctgacattttaggggccattagtctgcctatcacacccactaaaatatttggaaattgtgtagcatcaggacagcaaatttctcttaagtgttgcagattttaaaagatatttgttctacatgtccaagtttttataactttgtgtccaaataaataaggatattttgaatagttcagttgtagtctgagactatttactatacatagtctacttgtacctagttatatatacaaactataaagtagtttgggttattggctcaagaacacatagctgctttcaacctggggatattgctgttcacttgctatcttggaaggcaagatttttctactggttctgtcccacaatttgaaggtatgtcccccacctccccaatctcttccatctctttttaaaattggctttactgaggtacaatttacaataaaattcatatagtttaaatgtaaagttcaattaattttgacaaacgtattcarccatgtcatcactaacccaatcaagatatagaaaatttccattaccccagaatgttcctgtgtgctccttcccagctt

SEQ ID NO: 227809 - DNA, 477 bp, Homo sapiens
ttacaaaaagtaagtaatgatatttggtcttgatctcagtgcagtgtattttccattataccctaatgactttttatacccccagctttctggaaaagttaaggagctcctattttaaacattgaaaatgaaactggcttttccagatacctaaaggttatttgtgtggcagttaggttttttgctattcacataccaatatctggctacacaactgcagtatcgttggtgtggcttcactggcatgctcacagaatagtcctgccctcttgcactgtggacacatcttccctatcttaccacctcattgataatgcccaaccttataaacataagcaggaaacattcccttcttgtttgagttgatcattaggcaaaggaccaacttgaagaggccattgcagwagtgaaatttccatactatacagttgtgagttgtttaaatattcagggggaaaatggtcaggggtggaaact

SEQ ID NO: 227810 - DNA, 624 bp, Homo sapiens
tattgtagtctatcttcaatacaaactctgttaaaagtcaaatttatatatatatatctggttgtggttttgaagttttctgttgtttcatttgtctgtgtgtctctgcctttgcagatatcagactactatactatagctttaaaataattcttgctacctagtaaggaaatctacctcccttgttcttcagggatgagtaggctattaatttttgcttttccatgtaaattttaggcccatattagcaagttctgtaaaaataaatgaagttggtattttgacttaaattaaatcaaatctacaggtcaatttatggagcactgcaatttttatgatttgcagacttctcatccatggacatggtatagactttaatgttactttaatattataattttgtccttaaaaagtctcacaaatgtttgtcacatttattcctaggtaatttagaattgccttaactgtaggtggcaggaatatagcaatataattgatttgtgtatactgatttttatrtcaagcaaacttactaaatttctttattaattctatctataaattactttgaaatttcaatgatgacattattagctaataataatggttttgtttattctcttc

SEQ ID NO: 227811 - DNA, 587 bp, Homo sapiens
tttaatataattttatataacatttatattcatttgaaatgagagggaattattttcactgtgtgcatttttttccatcccaacctagaaatctaaacctcttgtttgcagcagatataattttagttgtagctgatgtaattttatatttgtgtgattatttgattaacgtaaatatcctctactggactcaaaacttcattaagggcagagaccatgtctactttttgcccaccatgtgtcttcggcacagagcataattcycatgttttataggtattcaatagttgattaagtgaacaaatttttattttaattattacatatgtagcaatggctcttagtatcctggactattgctattccttgatcattcctcttacctcaccaatccaaacttccttctcttaagactcatgctgtttggatcaggtaattctcatcctctgcttgtcatcttcagattttactccatactggttacagttataggaatatcctctcattatctgaaccatccttgagtcatttaggatgactttggctgcagacaaaagtttaatttgccttaaaagataagggaggcc

SEQ ID NO: 227812 - DNA, 445 bp, Homo sapiens
aaattcacaaccaaagatccagaagcttaaacaaacaatgaacagagaactatgcaaggaagagggaaagatgatctttggataagagagagagagacctttactgataataaagtctacaaagaaaactgagtgcctaggggaataattgggctttaacaactgaaatacgaagtttgccgcaaaggaaactcaggacattttakgaccccatgctacgattagggggtcagagtaaccgatgacttgcagaggatttaggggagtgctggttataactgtgggatggctgtggagatgaaggattcaggaggaaaaaatggtaggaatgtataagaatttcaaagtggacagagaactgtatataggaatcaagaggtgtgcagattgaggaaagccaaaaatgtagaacatttgttatttttcctcatgtctttaattctca

SEQ ID NO: 227813 - DNA, 518 bp, Homo sapiens
cagtggattttatctgaaatagatggcctcagtccttcagtaagcaattattgagttcctacaaagttttgggtatgtgttaagtgctgtagaaaagaggtgaataatgaatggtccattatctgaagatctttaatttagtggttaataaagacacaatccctgcaccacagaaaggaggggtcataaaaaaaatgaggattttagaaacttgtagtgacttgcagaagtggtcatgatgaaggctaactgagggaatcaggaatggcctcaggtaggaaatttgactgaatataarccttaataatgggcaaatttgcaatgaataaaggggaaagaggttctacaaaatttatcaggacatgttccattgaaaaaacattcggaaaaattctatacaatatattttcctctcttggaatttcagattgcacatcggcagcatattataggtttcgagaagtcctgcaaccttcttagttttaatagagccccccctttttttttccaaattagca

SEQ ID NO: 227814 - DNA, 490 bp, Homo sapiens
taattccaaatgaaaaatccaagtctgaaaaagttcaaggtagtaatctgttaatgtggttattactgaaaaggctacattccttaggttggacttaccacactgttcctgcctgcagagcagaggagattgttatggctttatcaatgtctttggtaaacactcctgctgataagccatagaaagtattgtttgctcttttgatcacgtcatctaaagatttaaacttcatgatttgctgcactggtccaaaaatctataccacaagaaataaataagtaaaaataataggttaaaatgaaatattttaaatgatatcgtagattttttttcctacacgctatcctaaattgattaagattttkcttctcatctcaaacctatgtgtgagaatccaaataggtaactgcaaaaatggtaggtgaaaacagataatggtcaggtgttaaatttcctttggaagaagaaagggtacaaataattaaggcaa

SEQ ID NO: 227815 - DNA, 451 bp, Homo sapiens
cttaaaaaggaaggaaatgctggcgcatgctacaacatggatgaacctgaaggatttatgctaagtgaaataagccartcacaaaaggacaaatactgtgtgattccttatatgagtccctaaaataggcaatttcatagagacagaaatagatagaggttgccagaggtgaggggaagggaatggaagttactgtgtaataggtatgaagtttcagctttatgagatgaaacagttctgtggatggatggtggtgatggttgcacagccatgtgggtgtacttaataccattgaatggtacgcttgaaaatggctaaaacgggaaattttatgttatatgtattttatcaaaataaaaagacaagtgagtgaatgaaactctttctgcatatctctatattatagactaaagcagctcccattggcttgaattcctggcaaggaacacac

SEQ ID NO: 227816 - DNA, 427 bp, Homo sapiens
atgctggcgcatgctacaacatggatgaacctgaaggatttatgctaagtgaaataagccagtcacaaaaggacaaatactgtgtgattccttatatgagtccctaaaataggcaatttcmtagagacagaaatagatagaggttgccagaggtgaggggaagggaatggaagttactgtgtaataggtatgaagtttcagctttatgagatgaaacagttctgtggatggatggtggtgatggttgcacagccatgtgggtgtacttaataccattgaatggtacgcttgaaaatggctaaaacgggaaattttatgttatatgtattttatcaaaataaaaagacaagtgagtgaatgaaactctttctgcatatctctatattatagactaaagcagctcccattggcttgaattcctggcaag

SEQ ID NO: 227817 - DNA, 538 bp, Homo sapiens
gaattcaaatttaactgtgttcaatattttattggccaactctaccaacagtgaccaagtcttcatgactgtcttatgtgcaccaaactcacagggatctgatgtaaatacaccaatttattgatttacaattgcaggcaaggttaaaatatacatgttattcagtttctcctttctggaaaatgaaacartcagaagactggtgaacatggaatgaggacaaaaggacacaaggaagtttgaaaggaaatttcatctcaaggcatggtaaattctggagaatcatcctggcctccctacagagaatcctctttggtggcagaaagtgcaggtcccccctggagagggcaggtcagggaccaccgggtcctcgtgtgcagctccctgtggaaacacgtggttcttctagctcaaccatcatctgctggtggttgatttcccactgtactctcaggaggtgttctttcaaagctttggggctcctgacccagccttccaattacaatacaatatatttcacattgaggttacactttag

SEQ ID NO: 227818 - DNA, 531 bp, Homo sapiens
actcccttttcttccacttaatatgacacttttaactgctgttagggwatactaatcacccccacccccatcctcccgccccagccccccgccccgctcccttgccaagtataagaagctgtggagaacacaaaagttaagacatactccttgctcacaagtttacaatctagtacaggagataagctatgaacaaaacaaccttaacaaaaacagaataggaaaagaaacaagagcagaattccatacaacttagagatcccttccagccagtatggtttagaaaaaaaaaaaagcttctacaccgaggcactctcacactgagcgtagattatattcctagagaagtaatacagtttgactggaacataagggaagatgtacatagaagaaccatcaatgaaatggatgcagtggttgataggaactattataaaagtaagggccctatactccactacaaagagttgctatttagcctgttatctaccaacagtccaaactaccaaaagcttctcaacagcagtaacg

SEQ ID NO: 227819 - DNA, 369 bp, Homo sapiens
tatttttaaaaacctctgttattatttaaytctgtagtagacatttacaaaataatttttcttatgtgtatttacatggacattaaaaacatcttaagaaattaattttattgatgtttttaagttcaggaatgttctcacaacaaatcacacacacacaacacatgtagtctttagaaatagacatgaaaataagatcattagatgttcatgcctgcttaataggagtctccaaagcaatagaaatattaatatattggaactctgatggagggaatccctgagtgcagagaggaaactgataacactaaactttaatggcctcggaaattatgagacagaggactccagagtcttctataatacata

SEQ ID NO: 227820 - DNA, 531 bp, Homo sapiens
actcccttttcttccacttaatatgacacttttaactgctgttagggaatactaatcacccccacccccatcctcccgccccagccccccgccccgctcccttgccaagtataagaagctgtggagaacacaaaagttaagrcatactccttgctcacaagtttacaatctagtacaggagataagctatgaacaaaacaaccttaacaaaaacagaataggaaaagaaacaagagcagaattccatacaacttagagatcccttccagccagtatggtttagaaaaaaaaaaaagcttctacaccgaggcactctcacactgagcgtagattatattcctagagaagtaatacagtttgactggaacataagggaagatgtacatagaagaaccatcaatgaaatggatgcagtggttgataggaactattataaaagtaagggccctatactccactacaaagagttgctatttagcctgttatctaccaacagtccaaactaccaaaagcttctcaacagcagtaacg

SEQ ID NO: 227821 - DNA, 512 bp, Homo sapiens
cccaggctggagtgcagtggcgtgatctcggctcactgcaacttccacctcccaagttcaagcgattcttttgcctcagcctcctgagtagctgggattaccagtgcctgccaccatgcctggctaatgataggtgaatcttaattgtgaagatgagtacctttatsagtagagatggcttcatatcagaactttatcttacaagctactctttactcttcctctttctccccgctccatgccaacagagttaatgtaagcatagtagagtaatatttcatctttgtgtgtgtagttttcttttttttttgggcgggaggaggtgaactttttactgtctttccatctatttacatatgtgagtccagggaaaacaggcagcttaaattatgatataattttttacaaagggaaaacctgaattgaaattattgttttacttcttttctattcatttctttacagtgagtcaaaaattttttccccttaacttcacatagaaaatgaaactt

SEQ ID NO: 227822 - DNA, 512 bp, Homo sapiens
cccaggctggagtgcagtggcgtgatctcggctcactgcaacttccacctcccaagttcaagcgattcttttgcctcagcctcctgagtagctgggattaccagtgcctgccaccatgcctggctaatgataggtgaatcttaattgtgaagatgagtacctttatgagtagagatggcttcatatcagaactttatcttrcaagctactctttactcttcctctttctccccgctccatgccaacagagttaatgtaagcatagtagagtaatatttcatctttgtgtgtgtagttttcttttttttttgggcgggaggaggtgaactttttactgtctttccatctatttacatatgtgagtccagggaaaacaggcagcttaaattatgatataattttttacaaagggaaaacctgaattgaaattattgttttacttcttttctattcatttctttacagtgagtcaaaaattttttccccttaacttcacatagaaaatgaaactt

SEQ ID NO: 227823 - DNA, 427 bp, Homo sapiens
tttcctttgccattcagtttctcattagctaacatccagtttagtaattaatagcctgaggtactagatattaaatagtatatatttatatttggcaaatgtttattgtgcatcttctatgttataaaaactgctaggcttatttkcttactctttagagtataaggtcacatctctatgtacgttatttaggagtttctatgtggttataaatagcccagcacatacgagatgactttcaggagctaacatttagaccataactgagccaactttacattctcttacagctgaatattttactttcttcagtgtaattaaaaaaaaatttaagtatcacagttttacaaatgttaaagccaaagactggtgtcagatattatgtgttatatcagaaagcattgttgagaaaaattcccggggaagg

SEQ ID NO: 227824 - DNA, 427 bp, Homo sapiens
tttcctttgccattcagtttctcattagctaacatccagtttagtaattaatagcctgaggtactagatattaaatagtatatatttatatttggcaaatgtttattgtgcatcttctatgttataaaaactgctaggcttatttgcttactctttagagtataaggtcacatctctatgtacgttatttaggagtttctatgtggttataaatagcccagcacatacgagatgactttcaggagctaacatttagaccataactgagccaactttacattctcttacagctgaatattttactttcttcagtgtaattaaaaaaaaatttaagkatcacagttttacaaatgttaaagccaaagactggtgtcagatattatgtgttatatcagaaagcattgttgagaaaaattcccggggaagg

SEQ ID NO: 227825 - DNA, 606 bp, Homo sapiens
ccatgatagtaacacttcctgccgctaacacagatggaaacccaacttcaatcacatccatacttgactacccgtagcggaggaatgatgaggtggtagagggaaaaaaagaagaaaagagaagtagtccagaggaaggagataatgagaaacatgcatgatatttctgggaaagagatttaaaccaaagaaagacgcacatctgcttgatacacagaattgtcttttccaactgagawtgcagcccctcttttcaatcagttgaagagtcggatatcaccttgaagatgatctaaaccaggagttcttatcctgatatctggaggtagacttgtagggaaattacgaacttccggacattgaggagggcagtaaaagtactagctttctcagtctcttaaagccggctaatgactacaaagacattaccagacccagtcaaatccccaaattttaagttaaagatattaaatccagagagataaggaacttacccaaattcatactgctggtttatgtcacaggtaaaacagccacacaagtttcctgactctcgtatttggcccatttcatcttagcgcttgtctgcacacctgttagcagagg

SEQ ID NO: 227826 - DNA, 606 bp, Homo sapiens
ccatgatagtaacacttcctgccgctaacacagatggaaacccaacttcaatcacatccatacttgactacccgtagcggaggaatgatgaggtggtagagggaaaaaaagaagaaaagagaagtagtccagaggaaggagataatgagaaacatgcatgatatttctgggaaagagatttaaaccaaagaaagacgcacatctgcttgatacacagaattgtcttttccaactgagaatgcagcccctcttttcaatcagttgaagagtyggatatcaccttgaagatgatctaaaccaggagttcttatcctgatatctggaggtagacttgtagggaaattacgaacttccggacattgaggagggcagtaaaagtactagctttctcagtctcttaaagccggctaatgactacaaagacattaccagacccagtcaaatccccaaattttaagttaaagatattaaatccagagagataaggaacttacccaaattcatactgctggtttatgtcacaggtaaaacagccacacaagtttcctgactctcgtatttggcccatttcatcttagcgcttgtctgcacacctgttagcagagg

SEQ ID NO: 227827 - DNA, 578 bp, Homo sapiens
ccaggtagcttgctaaatatccagatttcttggccaacttcagtcctattgactcagaatctctggtgtgaggcccggaaatctgcatagttaacaagttctcctatgtgattctgattatgcaaaagtgtgagatgtactgatagaaatctttgtcttcagctctgacatttaaatttttatcttctttggtgcttttgaaaatatttttgttgttaacaatactctgttktcacctgacttccttgatgggcagtaataatttgaagtttgcccccttatttctgaaatcattttgcttagagccaattgttatctttgtgtatgtgtgtgtgacagagatttttattacatataatagaagatttcaaataacagcagagagttatttaaaaaagaaacagttaaatacatgtctaattagcaggcaagaaggcaaatttattctgttagaacttcttaaggaagagtcaataatgaaccaattataattccttctcctagctgtatacagccaagatgccttctaggtttgaaaccttgtcccacaatgctccggtggaatagagcagatattg

SEQ ID NO: 227828 - DNA, 543 bp, Homo sapiens
agctcactcaaagctagagtacaaaataggaacatccactgtctcacagcaatgaaactctcccgaaggaacatcctgacagcaaaacttcagaactgctatttgagtcaccctgagtgctctgacagtaaaccacttacaaacttgcaaagaactatgatcagattcctmctcccacaaagtgtccgtgaaaagaaacaaatttgaaccccaaaatacagataagttgagctaatagcaccagtgatagtatgcctagctattaaaacacagacacacacacacacacacacacgagctggcaacagtccagttacgtagaaatgcagtggaaaaagttagtgtttgccaactttaaggggggaactaaatgtgtaaaatggaaaatttccattttactttcctgagtagtacaaatagtggaatgcagcaaatttcacattatgttatcagtgtgtgatatactaagaaaacttaagctgatttttctactaatttgtcacaagtatgttcagcccaaactcttcggctcacatacatgtc

SEQ ID NO: 227829 - DNA, 543 bp, Homo sapiens
agctcactcaaagctagagtacaaaataggaacatccactgtctcacagcaatgaaactctcccgaaggaacatcctgacagcaaaacttcagaactgctatttgagtcaccctgagtgctctgacagtaaaccacttacaaacttgcaaagaactatgatcagattcctcctcccacaaagtgtccgtgaaaagaaacaaatttgaaccccaaaatacagataagttgagctaatagcaccagtgatagtatgcctagctattaaaayacagacacacacacacacacacacacgagctggcaacagtccagttacgtagaaatgcagtggaaaaagttagtgtttgccaactttaaggggggaactaaatgtgtaaaatggaaaatttccattttactttcctgagtagtacaaatagtggaatgcagcaaatttcacattatgttatcagtgtgtgatatactaagaaaacttaagctgatttttctactaatttgtcacaagtatgttcagcccaaactcttcggctcacatacatgtc

SEQ ID NO: 227830 - DNA, 543 bp, Homo sapiens
agctcactcaaagctagagtacaaaataggaacatccactgtctcacagcaatgaaactctcccgaaggaacatcctgacagcaaaacttcagaactgctatttgagtcaccctgagtgctctgacagtaaaccacttacaaacttgcaaagaactatgatcagattcctcctcccacaaagtgtccgtgaaaagaaacaaatttgaaccccaaaatacagataagttgagctaatagcaccagtgatagtatgcctagctattaaaacacagacacacacacacacacacacacgagctggcaacagtccagttacrtagaaatgcagtggaaaaagttagtgtttgccaactttaaggggggaactaaatgtgtaaaatggaaaatttccattttactttcctgagtagtacaaatagtggaatgcagcaaatttcacattatgttatcagtgtgtgatatactaagaaaacttaagctgatttttctactaatttgtcacaagtatgttcagcccaaactcttcggctcacatacatgtc

SEQ ID NO: 227831 - DNA, 399 bp, Homo sapiens
cgagctgatagaaaaaggcttgcccatcagcgatgtgttgtctatgggcaatactaaccatgaacaacaaatttcaacattgcatttacactttgccaaaaaggtaaaatcacaactaatcactgtcaaaaacttaactgacaggattccatcggaagagcacctttctagttaaaaatccaatcacattattctagtcagcattttctcctctgttctccatcgaactactctaccccaggctaccartaacaaaaacaaaagaaacaagaaaaagaaaaagcaaggaacatccagaggtataaattaggatattttggatctgacattgtggcatagctagagttttatactacattggttcctacaatgaaaatgttcattctgctaatatgagtc

SEQ ID NO: 227832 - DNA, 361 bp, Homo sapiens
acacattaaaacaatcattcatcatgaccaagtggaatttgtcctagagattcaagtgtggttaggtatgtgcagatcaatgggtttaatgttgtccaatgaacataatgtcctccagctccatccatgttcttgcaaatgacaggatctcattcttttttatggctargtagtactccattgtgtataagtgccatattttctttatccattcatctgttagacacctaagttgcttccaaatcttagctattgtgaatagtgctgcaataaacatgggagtgtaaatattttgttgacatactgatttcatttcctttggataaatacccagtagtgggattgctggatcatatggggg

SEQ ID NO: 227833 - DNA, 537 bp, Homo sapiens
ttgaatctgtagtttgctttcagtggtagtctcattttaacaatattaattcttccaagctgcgagtacgagatgtctttctacttgtttatatcctcttaaatttctttcattagtgttttgaaatttagcttctggagctctttaacttcctggtttagacatattactgggcgttttattacttttttatggctactgaaatcaggaagccttcttgattttttttccagctagtttttcatgtgcagagacaccactgatttttgtatgttaattttgtatcttgcaaagttactgaattcatttatcagttctaagggttattttggtagcatctttaggtttttctagatataagattatgtcacctgcaaacagagacaayttgacttcttcctttccaacctggacgccctgcacccaaatctttaggttttactataagtaaaattatgtcatctgcaaacagagacaatttgacttcctctttctaacttggatgccctgcacccaggtcttgggtctgcaaaacag

SEQ ID NO: 227834 - DNA, 647 bp, Homo sapiens
tgttggttttgtaattgaaattcccacacccattatacctgaatataactaggatttgcattacgaatattggcaccaactgtaagagtcatacctagtaagaaaagaagatatgtttttcaaaaatgtgtccttttgaaaacatggaaatctagatgacctagtgtttgatgataactttagataaaataccaaaagcatgattcatttaaaaaagtgatacattggattttattacaattaaaactcctgctttgcaaaagacactgtcatgagaatttgaaaagccacatactgggagaatatatttgcaaagacatctgacaaatggctgttatccaaaatatacaaataatacatacacatatacaatggagtacaattgacacattaaaaaaatgatatcctatcatttgcaataacatggatggaactggaagtcattgtgttaagtgaaataagccaggcatagaaagacaaacttcgcatgttctcacttgtrggagctaaaaattaaaacaattgaactcatggaaatagtgagtagaatgatagtaaccagagtctgagaagggtagtggaggaggaaagagggaaaggctaagggatacaaaaataccattatatagaaatgaataagatctagt

SEQ ID NO: 227835 - DNA, 595 bp, Homo sapiens
caaaaataccattatatagaaatgaataagatctagtttgatagcataacattgtgactatagtcaacamtaatttattgtacatttaaaaataactaaaagagtataattggattatttgtaacacgaaggataaaagcttcaggtgatgggtaccccatttaccctgatgaaattattactcattgtatgcctgtaccaaaatatctcatgtaccccttaaatatatacatctactatatacccacaaaaattaaaaattaacacacacacacacacacacacacatatatatgtatatatatatatattcaaagaatacttaaaactcagcaataagaaaacaaacaacccaattagaaattaggcaaaacctctgaatatactcctaatcaaactagatacaaagatggcaaataacatatgaaaatatgctcagcatcacacattattagggaattgcacattaaaacaataatgggataccactacatacatattagaaaggctaaaatccaaaaatttgaaaacacacacattattaagttgggagaagtgtcctttgaaattatcgattcctttctttcttctaaga

SEQ ID NO: 227836 - DNA, 595 bp, Homo sapiens
caaaaataccattatatagaaatgaataagatctagtttgatagcataacattgtgactatagtcaacactaatttattgtacatttaaaaataactaaaagagtataattggattatttgtaacacgaaggataaaagcttcaggtgatgggtaccccatttaccctgatgaaattattactcattgtatgcctgtaccaaaatatctcatgtaccccttaaatatatacatctactatatacccacaaaaattaaaaattaacacacacacacacacacacacacatatatatgtatatatatatatattcaaagaatacttaaaactcagcaataagaaaacaaacaacccaattagaaattaggcaaaacctctgaatatactcctaatcaaactagatacaaagatggcaaataacatatgaaaatatgctcagcatcacacattattagggaattgcacattaaaacaataatgggataccactacatacatattagaawggctaaaatccaaaaatttgaaaacacacacattattaagttgggagaagtgtcctttgaaattatcgattcctttctttcttctaaga

SEQ ID NO: 227837 - DNA, 608 bp, Homo sapiens
ttgtctccatgatgttatagtaacttttgctcagatcattttatcaacaaaatgattatttcttttctcagattcccatttctcatgttcaagtagacaagaagcctgcttttcagctaactgccacaagggagctagacttcccccacccttcaaataagaccataaaggtcttgaagcatactgagaagggtgtgaaagtgatttgagaaatggaggctacaggaagaaataggaggaagaaagaggaacactcatggaaagccttcgtatgttccccaaaccaaaagcccttggattcaagagggcaatgtctatttgccctcttgacataaagtagtaacctctagaagagttggagcttgrggtaagaactcacaaatgacaaagaaagactatctcctcctcccaaaggggtgctaactcagaaaaagcaagtggggccacagagtgaggccttatgcaggtggacagattgcttcaagggccactggaaaacttgtccctggggcataacaggaacaaaaacatatggtaagtcataagtagccgacagagccagagttccaattagtgtctgtcccagcaatgtgccagcagacagggga

SEQ ID NO: 227838 - DNA, 312 bp, Homo sapiens
gaaattttgttggatagagttgttggagagtcacaaactattgtaatatgtcagatttgtttacatamactacaagaactaatttttgtactcttcgaagaagtatcattccaataaacatatgtgacttaggaaatattataagttaaatcatttttggcatttttcattgaagttcatattccctaaagattttcagaagttcctatccaagtcaattcttatcaaataaaaaagaccatctttgttctaaattcataaatttataaatattgaatattattatgcaaagaattaactttcagagtggtc

SEQ ID NO: 227839 - DNA, 611 bp, Homo sapiens
ccaaaggtgtcttatttactttttcctttattgagagagagtcagtacagggtaggagtgtattcctacagcctggatttaaatcctgcctcttctgcttctgagcttcgagactgtgtatggaggacctaagcttcctgtgctgcagtttcctcaactatataatatgagactaattatagtacttatgggattgttttagaaactaaacgacttaatatagatgtagtgtttacaacagttcctggtacaatgtaagctctcaacaaagatgaagatcacaacaataatgaccactactattattagttcaactacccttggggttctcacttcacacccattcagtgatttggaatcagatacatgaagtcacttgttcatacttatcattttgctgtatwgaacaatccatattttaaaggaaatagatgtttttgggtattttctttccatttgcctctctggatctactgcctctcaattctgtgatccaaacgaatgatattctgtatcattgggcttcctcgtcctttcacttctggttgggttaagccaatgggacacattggcaggagataggagagaggcaggaaagtgaggtcagagta

SEQ ID NO: 227840 - DNA, 488 bp, Homo sapiens
taaaaccacttctagtatttgcaaagttgttaaaggcaatgactaaaacactttttcaaatattgacagttggaatgaaatgcagttctctaatatatgcaattaaaatttagactagtttttaaaattgcggtaaatatatgtaatataaaatttaccattttagccattattaagtgcacagctcacattgtcgtgcagccatctgcactatcygaccttagagctcttcatcttgtaaccttgagactccaaactcgttaaacaacttcccctttccctctcttcccagcccctggctaccaccaattctactttttgctctatgaatttgactactctagcttcctcatataggtggaatcatacaatatttgtccttttgtgactggcttagactaatttttgaagatactttgagacagttataaaatgcagtaaaaataccctaacaatgaatgaaatataaactaaaaaaagcacttgaa

SEQ ID NO: 227841 - DNA, 488 bp, Homo sapiens
taaaaccacttctagtatttgcaaagttgttaaaggcaatgactaaaacactttttcaaatattgacagttggaatgaaatgcagttctctaatatatgcaattaaaatttagactagtttttaaaattgcggtaaatatatgtaatataaaatttaccattttagccattattaagtgcacagctcacattgtcgtgcagccatctgcactatctgaccttagagctcttcatcttgtaaccttgagactccaaactcgttaaacaacttcccctttccctctcttcccagcccctggctaccaccaattctactttytgctctatgaatttgactactctagcttcctcatataggtggaatcatacaatatttgtccttttgtgactggcttagactaatttttgaagatactttgagacagttataaaatgcagtaaaaataccctaacaatgaatgaaatataaactaaaaaaagcacttgaa

SEQ ID NO: 227842 - DNA, 493 bp, Homo sapiens
gtttccttagacatcctgctactatcgtttactaccatcccaagagatccagggtrtttagcctcactgtggatatagctagattgagcaacttcgaacatctgaaaaatcatgtatgaacccacaaataaaaaatattctatccttgaatgcaaaaggaaacagttatcacgaagatcatacccttttctgcatgggagatgtggagccagattgacaataatggatataaaatgggctatgagttagagatccgctagaatatttcttgaagtgtgacatagtccgaagccatggagagcagggggcaccagacaatctcagaggtgtgtgccattctattaactacaattccattaataagcaggaaggcacacattgggaactaggtggattttcttcagtatgcttttgatgttgcccctaagcacagattcccatggaaactaaactagaagataagtcaaaggagattgaaaatattaaatatcag

SEQ ID NO: 227843 - DNA, 493 bp, Homo sapiens
gtttccttagacatcctgctactatcgtttactaccatcccaagagatccagggtatttagcctcactgtggatatagctagattgagcaacttcgaacatctgaaaaatcatstatgaacccacaaataaaaaatattctatccttgaatgcaaaaggaaacagttatcacgaagatcatacccttttctgcatgggagatgtggagccagattgacaataatggatataaaatgggctatgagttagagatccgctagaatatttcttgaagtgtgacatagtccgaagccatggagagcagggggcaccagacaatctcagaggtgtgtgccattctattaactacaattccattaataagcaggaaggcacacattgggaactaggtggattttcttcagtatgcttttgatgttgcccctaagcacagattcccatggaaactaaactagaagataagtcaaaggagattgaaaatattaaatatcag

SEQ ID NO: 227844 - DNA, 535 bp, Homo sapiens
tggttccttgtcactcaagtgagctgtgcagaacagcagcatcagcgacacttggcagactcttggrccccatccaaacctactgcatcataatctgcattttaaagacaccccctacccccgtgattttaggcacattgaagtttgagcagcatggctcttgtctgttgctgcagccatgatatgacatagatggtcccagagcctgtttacaaggggaaaagttggacagaaccagcaggaagacccagagcctgtggcccaactcagcgatatgataagtcaagaggaggaaagagccaagacttgttcccagcataaataaagaagacctacggaatctaacgccagaagatccaacgcctctgctgttatgcaaatgtaataaaaatgcattcagtccaacttggaatctatagaaagttaagtaaaagttgagtaatcaaggtcacaaaagtcatttaagggcagtcatttaagagagcttcactgaacaaatttcacaaataacaaatctttcagggatgaaaaacgc

SEQ ID NO: 227845 - DNA, 533 bp, Homo sapiens
ttgtggtgagctgagatcacaccactgcactccagcctgggcgacagagactcgttttcaaaaaaaaaaaaaaaaaaaaaggtcaggtgcggtggctcacacctgcgcacctgtaatcccagcactttgggaggccaaggcgggtggatcacaaggtcaagagactgagaccatcctggcaaacatggtgaaacccaatctctactaaaaatacaaaaattagctgggcatggtggtgcacgcccgtagtcccagctactcgggaggctgaggcaggagactcgcttgaacccaggaggcggaggttgcagtgagccgagattgtgccactgcactccagcctggtgacagagtgagactaaaaaaaaaaaaaaaaagtggggggagtgggggagaagcaaagagaagagtgaatggaacaaggtgggcaccagacagggaggatggggtgccagagggtgaggctcttcttgcgtgaggatctctcctccacagcatccgyccccccagctgatcacctttatggccaatcc

SEQ ID NO: 227846 - DNA, 435 bp, Homo sapiens
acttagcaatggattagatattggaggtagggaaggttgaagaatcaaagtcagatttgcagcgtggcaatagtactggtgaagccagaaaaaggagcccgtttggagagcgagttaaatacattttggacctcattggcttaggagttatgacacatccccattgaaaaagcagtcagaagctttggactggaaagtccttggacacatttgataattttgagtaaaaataaaaatagctaatatttatggtgtgctttcgatgtgataggcactgttcttattatttttatatatattaactcatttaatcttcataacagttctattaagtactattctctgttttacataaatttaggaaaactcaaggcayggtataaataaagtactataaaaagaggtacagacgtagtttaaggagacaaggacagg

SEQ ID NO: 227847 - DNA, 515 bp, Homo sapiens
  misc_feature (1)...(515): n = A,T,C or G
gaagagtgcccgaatcataagtgtgcatctagatgaactgtagcacaccaggctgccacgccctggaccaagcagtagccttgacctgtggcctctcccaggcactgctgccccaacccacaaaatagctactttcccagttcctgatgtagatttgttctgcctggttttgacttctataaaatacagcacattctatttagcctggcttctttggttcagtattacagaacacatccatgttcttgtctatggcagacattgatttatcgtcattgttgagttccattatatgactgtgtcaccatttttccattgatgagtaaaatgatttcctatttttggctgttatcccacrgccctgaacagtaggtctgcatatgggacttgcaggtatgcaggggcacacccacttctgctggaggatccctgggtggggtggagactccagggcacctgtgctctgctagagtgtggaggctagtgtgttgtgttctgggagcacannnnnnnnn

SEQ ID NO: 227848 - DNA, 622 bp, Homo sapiens
ttctgtacatgtatctcagaacttaaaatgtaataataacaataataaaaacctcaaaaaaaggaaatgcttcttcttagaacagattacataccctcattgctttttataatagcctgtaataacagaatatccacaaggtggcagtaatatatcagtttcatcctctgaaattaaaacttttgcctattcagtaatrcaatggatcttttgaactcactctaacacgtagaatacagcaatttgacttaataattagcctttaaatttatagtcttgtattatcactttagtagtttgaattattttgtattttaatatatttaaatgaattagtcctatagaaattgactaatttgacatgtgaaggtgtttttattctattttcagaagtttagctttaaaaaaatttctaaacttcgatatctggtgagtgtcaatgtttttatcttattaaaagctgacagaccacactatattcaactgtttttttttaacaaggatgcaaaatcagtttaaaggaaggatatctttttcaacaaatggtgctacagcaattggacattcacaggtacaaaaactaagactgacctaaatttatactttatataaaatttagctc

SEQ ID NO: 227849 - DNA, 622 bp, Homo sapiens
ttctgtacatgtatctcagaacttaaaatgtaataataacaataataaaaacctcaaaaaaaggaaatgcttcttcttagaacagattacataccctcattgctttttataatagcctgtaataacagaatatccacaaggtggcagtaatatatcagtttcatcctctgaaattaaaacttttgcctattcagtaatgcaatggatcttttgaactcactctaacacgtagaatacagcaatttgacttaataattagcctttaaatttatagtcttgtattatcactttagtagwttgaattattttgtattttaatatatttaaatgaattagtcctatagaaattgactaatttgacatgtgaaggtgtttttattctattttcagaagtttagctttaaaaaaatttctaaacttcgatatctggtgagtgtcaatgtttttatcttattaaaagctgacagaccacactatattcaactgtttttttttaacaaggatgcaaaatcagtttaaaggaaggatatctttttcaacaaatggtgctacagcaattggacattcacaggtacaaaaactaagactgacctaaatttatactttatataaaatttagctc

SEQ ID NO: 227850 - DNA, 622 bp, Homo sapiens
ttctgtacatgtatctcagaacttaaaatgtaataataacaataataaaaacctcaaaaaaaggaaatgcttcttcttagaacagattacataccctcattgctttttataatagcctgtaataacagaatatccacaaggtggcagtaatatatcagtttcatcctctgaaattaaaacttttgcctattcagtaatgcaatggatcttttgaactcactctaacacgtagaatacagcaatttgacttaataattagcctttaaatttatagtcttgtattatcactttagtagtttgaattattttgtattttaatatatttaaatraattagtcctatagaaattgactaatttgacatgtgaaggtgtttttattctattttcagaagtttagctttaaaaaaatttctaaacttcgatatctggtgagtgtcaatgtttttatcttattaaaagctgacagaccacactatattcaactgtttttttttaacaaggatgcaaaatcagtttaaaggaaggatatctttttcaacaaatggtgctacagcaattggacattcacaggtacaaaaactaagactgacctaaatttatactttatataaaatttagctc

SEQ ID NO: 227851 - DNA, 429 bp, Homo sapiens
ttgtgtccatttttatgtaagtaacactctgttttgattactgtagctttgttggacatttaaaagtcaggtagagtgattccttcagccttttatttttcattttttgtagtatttttgtagctattaaggccttttgtggggcaatatacattttagattttttaaaaacmtttctgtagagaatttaactggtattttaatagaagttttattatatctgtatatcagtttgtgtaatgctgatatttaacaatattaatcatgcctatttatgaattagaaatatctttttgtttgaatattatttattttctaactttttttagattctaatgtacagatctttcacctttttggttacattcatttctaagtatagttactgctgcaattattgtagatgggattggtttttggttttatttt

SEQ ID NO: 227852 - DNA, 429 bp, Homo sapiens
ttgtgtccatttttatgtaagtaacactctgttttgattactgtagctttgttggacatttaaaagtcaggtagagtgattccttcagccttttatttttcattttttgtagtatttttgtagctattaaggccttttgtggggcaatatacattttagattttttaaaaacatttctgtrgagaatttaactggtattttaatagaagttttattatatctgtatatcagtttgtgtaatgctgatatttaacaatattaatcatgcctatttatgaattagaaatatctttttgtttgaatattatttattttctaactttttttagattctaatgtacagatctttcacctttttggttacattcatttctaagtatagttactgctgcaattattgtagatgggattggtttttggttttatttt

SEQ ID NO: 227853 - DNA, 429 bp, Homo sapiens
ttgtgtccatttttatgtaagtaacactctgttttgattactgtagctttgttggacatttaaaagtcaggtagagtgattccttcagccttttatttttcattttttgtagtatttttgtagctattaaggccttttgtggggcaatatacattttagattttttaaaaacatttctgtagagaatttaactggtattttaatagaagttttattatatctgtatatcagtttgtgtaatgctgatatttaacaatattaatcatgccyatttatgaattagaaatatctttttgtttgaatattatttattttctaactttttttagattctaatgtacagatctttcacctttttggttacattcatttctaagtatagttactgctgcaattattgtagatgggattggtttttggttttatttt

SEQ ID NO: 227854 - DNA, 429 bp, Homo sapiens
ttgtgtccatttttatgtaagtaacactctgttttgattactgtagctttgttggacatttaaaagtcaggtagagtgattccttcagccttttatttttcattttttgtagtatttttgtagctattaaggccttttgtggggcaatatacattttagattttttaaaaacatttctgtagagaatttaactggtattttaatagaagttttattatatctgtatatcagtttgtgtaatgctgatatttaacaatattaatcatgcctatttatgaattagaaatatctttttgtttgaatattatttattttctaactttttttagattctaatgtacagatctttcacctttttggttacattcatttctaagtatagttaytgctgcaattattgtagatgggattggtttttggttttatttt

SEQ ID NO: 227855 - DNA, 422 bp, Homo sapiens
aatgcagcagcagtgttctggaatcctatgtgaggracaaacacttagaacccagcagcactgttctggaatcctatgtgagggacaaacactcggaaagccacagcagtgttctggaatcctatgtgagggtcaaacactcagaaacctgcagcagtgctctggatccctttgtgagggacaaacaaacagaacccagcaacagagttctggaatcctatgtgagggacaaacactcagaacccagcagcaacattctggaaacctttgtgagggacaaacattcagatcctcatagcagtgttctggaatcctatgtgagagacaaacactaagaaagctgcagcagtgttctagaatcctatgtgagggacaaacactcagagcccagcagcagtgttctggaatcctatgtgagggac

SEQ ID NO: 227856 - DNA, 422 bp, Homo sapiens
aatgcagcagcagtgttctggaatcctatgtgagggacaaacacttagaacccagcagcactgttctggaatcctatgtgagggacaaacactcggaaagccrcagcagtgttctggaatcctatgtgagggtcaaacactcagaaacctgcagcagtgctctggatccctttgtgagggacaaacaaacagaacccagcaacagagttctggaatcctatgtgagggacaaacactcagaacccagcagcaacattctggaaacctttgtgagggacaaacattcagatcctcatagcagtgttctggaatcctatgtgagagacaaacactaagaaagctgcagcagtgttctagaatcctatgtgagggacaaacactcagagcccagcagcagtgttctggaatcctatgtgagggac

SEQ ID NO: 227857 - DNA, 422 bp, Homo sapiens
aatgcagcagcagtgttctggaatcctatgtgagggacaaacacttagaacccagcagcactgttctggaatcctatgtgagggacaaacactcggaaagccacagcagtgttctggaatcctatgtgagggtcaaacactcagaaacctgcagcagtgctctggatccctttgtgagggacaaacaaacagaacccagcarcagagttctggaatcctatgtgagggacaaacactcagaacccagcagcaacattctggaaacctttgtgagggacaaacattcagatcctcatagcagtgttctggaatcctatgtgagagacaaacactaagaaagctgcagcagtgttctagaatcctatgtgagggacaaacactcagagcccagcagcagtgttctggaatcctatgtgagggac

SEQ ID NO: 227858 - DNA, 336 bp, Homo sapiens
taaacaatcttcaagactgaataaacataagaaaatttatactggagatacaacctacaaatgtgaagaaatagtcttcaaaccygactatacataagattattcatatgggagagaaaccctacaaatgtgatgaatgtgtcaaagcctttagaaaatcctcaaaactgaaagaacataaaagaattcatacttgagagaaaccctataaatgtgaagaatgtggcaaagctttttactattcctcaggccttactcaacataacatagttcatactggagacaaaccctacaaatgtaaagattgtggcaaaatttttaagtggtcttcgaacc

SEQ ID NO: 227859 - DNA, 336 bp, Homo sapiens
taaacaatcttcaagactgaataaacataagaaaatttatactggagatacaacctacaaatgtgaagaaatagtcttcaaacctgactatacataagattattcatatgggagagaaaccctacaaatgtgatgaatgtgtcaaagcctttagaaaatcctcaaaactgaaagaacataaaagaattcatacttgagagaaaccctataaatgtgaagaatgtgkcaaagctttttactattcctcaggccttactcaacataacatagttcatactggagacaaaccctacaaatgtaaagattgtggcaaaatttttaagtggtcttcgaacc

SEQ ID NO: 227860 - DNA, 336 bp, Homo sapiens
taaacaatcttcaagactgaataaacataagaaaatttatactggagatacaacctacaaatgtgaagaaatagtcttcaaacctgactatacataagattattcatatgggagagaaaccctacaaatgtgatgaatgtgtcaaagcctttagaaaatcctcaaaactgaaagaacataaaagaattcatacttgagagaaaccctataaatgtgaagaatgtggcaaagctttttactattcctcaggccttactcaayataacatagttcatactggagacaaaccctacaaatgtaaagattgtggcaaaatttttaagtggtcttcgaacc

SEQ ID NO: 227861 - DNA, 403 bp, Homo sapiens
tcaaggctgcagtgagccgagatcactgtgctatactcctgcctgggcaacagagcaagactctgtcccaaaacaaacaaacaaacaaaaaacaccacacacacacacaaaaccaaaaccaaaacaaaacaaaaagccamccttttacatgttcctttagaaatcgtatctgaatttctttgggcagtgactttcaaaaattttaaaacttcaactaataatcacaagttattttataacacaatgcaaggcacatatgtgtattattaaagcaaaagttttataaaataatgtttatccttataagtgatgcaatctgataatttccattctgttctatttattttaatactggtttctactctccaaatcgagttcatgactttttaacggatcatgacac

SEQ ID NO: 227862 - DNA, 403 bp, Homo sapiens
tcaaggctgcagtgagccgagatcactgtgctatactcctgcctgggcaacagagcaagactctgtcccaaaacaaacaaacaaacaaaaaacaccacacacacacacaaaaccaaaaccaaaacaaaacaaaaagccacccttttacatgttcctttaraaatcgtatctgaatttctttgggcagtgactttcaaaaattttaaaacttcaactaataatcacaagttattttataacacaatgcaaggcacatatgtgtattattaaagcaaaagttttataaaataatgtttatccttataagtgatgcaatctgataatttccattctgttctatttattttaatactggtttctactctccaaatcgagttcatgactttttaacggatcatgacac

SEQ ID NO: 227863 - DNA, 403 bp, Homo sapiens
tcaaggctgcagtgagccgagatcactgtgctatactcctgcctgggcaacagagcaagactctgtcccaaaacaaacaaacaaacaaaaaacaccacacacacacacaaaaccaaaaccaaaacaaaacaaaaagccacccttttacatgttcctttagaaatcgtatctgaatttctttgggcagtgastttcaaaaattttaaaacttcaactaataatcacaagttattttataacacaatgcaaggcacatatgtgtattattaaagcaaaagttttataaaataatgtttatccttataagtgatgcaatctgataatttccattctgttctatttattttaatactggtttctactctccaaatcgagttcatgactttttaacggatcatgacac

SEQ ID NO: 227864 - DNA, 625 bp, Homo sapiens
actactaatattttattcattaaaatataaaggtcaaagatttcaaaatgatctttaaatgattaataacatgttgatctttttcttctttctgtaaacctttttgagtcttaacaatactaaactatacaagcaatattaaatagtatataaacttggattaaaatattcaaatttactagaatgtggacattggaaagaatgaaaataaacagaagcataaagcagcagatataaaattaagaaagcaactaagagtgtttaaagtrcatattcatctgtagtctaatgtctaccataaacaatgactcttctcagtaaaacacaaattgttcatgaagggaaaaagcatgttgtattagagcatattcaacataatttttttagtactaacttgtgcctggagtattattggtttttctattatgaacttatgcacttgataatttttttcatcaaaattgtatgtacaactccattcaaaagcagtttttggtcgttttttttttttttattttgagacagagttttgctcttttcacccagctggagggcaatgatgcgaatttggctcacagcaacctagcaaattttgcctcccaggtccaggtgattctcttgcctc

SEQ ID NO: 227865 - DNA, 625 bp, Homo sapiens
actactaatattttattcattaaaatataaaggtcaaagatttcaaaatgatctttaaatgattaataacatgttgatctttttcttctttctgtaaacctttttgagtcttaacaatactaaactatacaagcaatattaaatagtatataaacttggattaaaatattcaaatttactagaatgtggacattggaaagaatgaaaataaacagaagcataaagcagcagatataaaattaagaaagcaactaagagtgtttaaagtgcatattcatctgtagtctaatgtctaccataaacaatgactcttctcagtaaaacacaaattgttcatgaagggaaaaagcatgttgtattagagmatattcaacataatttttttagtactaacttgtgcctggagtattattggtttttctattatgaacttatgcacttgataatttttttcatcaaaattgtatgtacaactccattcaaaagcagtttttggtcgttttttttttttttattttgagacagagttttgctcttttcacccagctggagggcaatgatgcgaatttggctcacagcaacctagcaaattttgcctcccaggtccaggtgattctcttgcctc

SEQ ID NO: 227866 - DNA, 625 bp, Homo sapiens
actactaatattttattcattaaaatataaaggtcaaagatttcaaaatgatctttaaatgattaataacatgttgatctttttcttctttctgtaaacctttttgagtcttaacaatactaaactatacaagcaatattaaatagtatataaacttggattaaaatattcaaatttactagaatgtggacattggaaagaatgaaaataaacagaagcataaagcagcagatataaaattaagaaagcaactaagagtgtttaaagtgcatattcatctgtagtctaatgtctaccataaacaatgactcttctcagtaaaacacaaattgttcatgaagggaaaaagcatgttgtattagagcatattcaacataatttttttagtactaacttgtgcctggagtattattggtttttcyattatgaacttatgcacttgataatttttttcatcaaaattgtatgtacaactccattcaaaagcagtttttggtcgttttttttttttttattttgagacagagttttgctcttttcacccagctggagggcaatgatgcgaatttggctcacagcaacctagcaaattttgcctcccaggtccaggtgattctcttgcctc

SEQ ID NO: 227867 - DNA, 556 bp, Homo sapiens
tctttctgtaaacctttttgagtcttaacaatactaaactatacaagcaatattaaatagtatataaacttggattaaaatattcaaatttactagaatgtggacattggaaagaatgaaaataaacagaagcataaagcagcagatataaaattaagaaagcaactaagagtgtttaaagtgcatattcatctgtagtctaatgtctaccataaacaatgactcttctcagtaaaacacaaattgttcatgaagggaaaaagcatgttgtattagagcatattcaacataatttttttagtactaacttgtgcctggagtattattggtttttctattatgaacttatgcacttgatawtttttttcatcaaaattgtatgtacaactccattcaaaagcagtttttggtcgttttttttttttttattttgagacagagttttgctcttttcacccagctggagggcaatgatgcgaatttggctcacagcaacctagcaaattttgcctcccaggtccaggtgattctcttgcctcagcctctcgagtggtta

SEQ ID NO: 227868 - DNA, 625 bp, Homo sapiens
actactaatattttattcattaaaatataaaggtcaaagatttcaaaatgatctttaaatgattaataacatgttgatctttttcttctttctgtaaacctttttgagtcttaacaatactaaactatacaagcaatattaaatagtatataaacttggattaaaatattcaaatttactagaatgtggacattggaaagaatgaaaataaacagaagcataaagcagcagatataaaattaagaaagcaactaagagtgtttaaagtgcatattcatctgtagtctaatgtctaccataaacaatgactcttctcagtaaaacacaaattgttcatgaagggaaaaagcatgttgtattagagcatattcaacataatttttttagtactaacttgtgcctggagtattattggtttttctattatgaacttatgcacttgataatttttttcatmaaaattgtatgtacaactccattcaaaagcagtttttggtcgttttttttttttttattttgagacagagttttgctcttttcacccagctggagggcaatgatgcgaatttggctcacagcaacctagcaaattttgcctcccaggtccaggtgattctcttgcctc

SEQ ID NO: 227869 - DNA, 404 bp, Homo sapiens
gtctaatgtctaccataaacaatgactcttctcagtaaaacacaaattgttcatgaagggaaaaagcatgttgtattagagcatattcaacataatttttttagtactaacttgtgcctggagtattattggtttttctattatgaacttatgcacttgataatttttttcatcaaaattgtatgtacaaytccattcaaaagcagtttttggtcgttttttttttttttattttgagacagagttttgctcttttcacccagctggagggcaatgatgcgaatttggctcacagcaacctagcaaattttgcctcccaggtccaggtgattctcttgcctcagcctctcgagtggttaggactacaagcatgcaccaccatgcctggctaattttgtgttttt

SEQ ID NO: 227870 - DNA, 404 bp, Homo sapiens
gtctaatgtctaccataaacaatgactcttctcagtaaaacacaaattgttcatgaagggaaaaagcatgttgtattagagcatattcaacataatttttttagtactaacttgtgcctggagtattattggtttttctattatgaacttatgcacttgataatttttttcatcaaaattgtatgtacaactccattcaaaagcagtttttggtcgttttttttttttttattttgagacagagttttgctcttttcacccagctggagggcaatgatgcgaatttgsctcacagcaacctagcaaattttgcctcccaggtccaggtgattctcttgcctcagcctctcgagtggttaggactacaagcatgcaccaccatgcctggctaattttgtgttttt

SEQ ID NO: 227871 - DNA, 404 bp, Homo sapiens
gtctaatgtctaccataaacaatgactcttctcagtaaaacacaaattgttcatgaagggaaaaagcatgttgtattagagcatattcaacataatttttttagtactaacttgtgcctggagtattattggtttttctattatgaacttatgcacttgataatttttttcatcaaaattgtatgtacaactccattcaaaagcagtttttggtcgttttttttttttttattttgagacagagttttgctcttttcacccagctggagggcaatgatgcgaatttggctcacagcaacctagcaamttttgcctcccaggtccaggtgattctcttgcctcagcctctcgagtggttaggactacaagcatgcaccaccatgcctggctaattttgtgttttt

SEQ ID NO: 227872 - DNA, 580 bp, Homo sapiens
gcatctgcctcagtttcccctatcctgcccccagttctgcatctggcctggtcctgccccatccctccgcacctcctgagacctggccaggccatcctttatgcttttctcttggatcctggaatcaccccatggtctcattcctgagccagaaaggcacctgcatagggccacagccaccaactcagaagtccctgggggctcagccgtgtgtccaccacttccactttaccccaaccagtcaattcgccttccacacctcactctcccctagcacttctctccttcccttaggccactcctctagtccaggcctcatccattcattcagcaggtatctactgagccccggtgtaccaggcactcttgttggtccytgatatgcttcagtgaacgaggcaggcaaacccctcagctctcatgagctggcatcccagtgaggaaaacagagaataaacaagaaactgaagacaagtatatggtatgtgttagaaggtgtaaatgctaatggggaaacagaatagagctgggtagggaagatcagcaccacactgacctcctgcttctaggctgacctctg

SEQ ID NO: 227873 - DNA, 557 bp, Homo sapiens
gtatgtgttctgtcacaatgcatattattttatatgcatctattttgaatcttcataaatgtaatccattctcatttttaacttttttcatcaacggcattttttttttttttagatggagtttcactcttgtcacccaggctggagtgcagtgacrcgttcttggttcactgcaacatctgcctcccgggttcaagcgattctcccacctcagcctccccagtagctgggattacaggcgcctatcgggggaacccacccccaatatttcaacgtaggttctttctattttccataagtgtcggctggctgagaaataaagagtaagagtacaaagagaggaattttatagctgggccgctgcgggtgacatcacacatcagtaggactgtgatgcccacctgagccttaaacaagcaagttttttattaagggttttaaaaggggagggggtgtaagaacagggagtagatcacatgcttcaaagggcaaaaagcagaacaaagatcacatgcttctgaggaaacaggacaaagggtaaaaggcagaacttctga

SEQ ID NO: 227874 - DNA, 425 bp, Homo sapiens
tgctgtgctgggagtttcacatttgttatctctgctaatcctcaaaacatccctgtgggtgggtaccacttttccctctggacagatggagaaactgaggttcacagaagtgaagrgacctgcccaaggtcacccagcctctcagtggtatttggacaatgaagctctttcaggctccagagacccatgtggtttctgaaactttccatgggcagggcaaaaacccaggcagccacagagtctgggggtggctaccaggccacagaagaaagctgtaggaggagatgtcttagatgagagaaaaatgcagaaagaggaagaaaaaaaaacccttgctgaatttctgtgggtttcagcatgtaataatccctgtgggttggagaggggaaaagatgaggaagtgagttccctagagcctgaaaatt

SEQ ID NO: 227875 - DNA, 437 bp, Homo sapiens
gctgtgctgggagtttcacatttgttatctctgctaatcctcaaaacatccctgtgggtgggtaccacttttccctctggacagatggagaaactgaggttcacagaagtgaagggacctgcccaaggtcacccagcctctcagtggtatttggacaatkaagctctttcaggctccagagacccatgtggtttctgaaactttccatgggcagggcaaaaacccaggcagccacagagtctgggggtggctaccaggccacagaagaaagctgtaggaggagatgtcttagatgagagaaaaatgcagaaagaggaagaaaaaaaaacccttgctgaatttctgtgggtttcagcatgtaataatccctgtgggttggagaggggaaaagatgaggaagtgagttccctagagcctgaaaattgtttcctgaattc

SEQ ID NO: 227876 - DNA, 388 bp, Homo sapiens
tgctaatcctcaaaacatccctgtgggtgggtaccacttttccctctggacagatggagaaactgaggttcacagaagtgaagggacctgcccaaggtcacccagcctctcagtggtatttggacaatgaagctctttcaggctccagagacccatgtggtttctgaaactttccatgggcagggcaaaaacccaggcagccacagagtctgggggtggctaccaggccacagaaraaagctgtaggaggagatgtcttagatgagagaaaaatgcagaaagaggaagaaaaaaaaacccttgctgaatttctgtgggtttcagcatgtaataatccctgtgggttggagaggggaaaagatgaggaagtgagttccctagagcctga

SEQ ID NO: 227877 - DNA, 425 bp, Homo sapiens
tgctgtgctgggagtttcacatttgttatctctgctaatcctcaaaacatccctgtgggtgggtaccacttttccctctggacagatggagaaactgaggttcacagaagtgaagggacctgcccaaggtcacccagcctctcagtggtatttggacaatgaagctctttcaggctccagagacccatgtggtttctgaaactttccatgggcagggcaaaaacccaggcagccacagagtctgggggtggctaccaggccacagaagaaagctgtaggaggagatgtcttagatgagagaaaaatgcagaaagaggaagraaaaaaaacccttgctgaatttctgtgggtttcagcatgtaataatccctgtgggttggagaggggaaaagatgaggaagtgagttccctagagcctgaaaatt

SEQ ID NO: 227878 - DNA, 490 bp, Homo sapiens
acaatggcaaaagattctaaatatattggcatttctctccctgcgcacactcatctgaaaagctagtcttggatatatgtgaagttttacctttgggtaccaaatctgtctgtctcagcaaatgatggcaagctgtgccttagaaaatttgtgagttctaactcaaagcgcatgggctataatagagaccacaaggaggaagcccagtcaaatctgcctaaagacactctggcaggtagtaagctacctgttgctgaaagtgtataaagagaggatggttaataacctcttcacaggaatgctgttttgtctctataggaagtctgaccagctgatgtgcaagytcttcactagcccccaaattctaagaaatacaatttctgtgtttattaataaacactgcagcacaaacttgactataatcaactttcttttcttaagtagaatttcctctagtaagggagtctataatcctaagccaagacaatgg

SEQ ID NO: 227879 - DNA, 563 bp, Homo sapiens
ccggtctgctagccgctataaaccagggtttctcaatctcagcactattgacatttttcagctggataattctttgttgagaagtgtggggggaactgccctgtgcattgtaggaggtacagcagcatccctgacctccattcactagttgtcaatagcatctccacccagcctagttgtgacagcccaaaatgtctccagtcatttccaaacaatgggggacaaaattgccccccgtcgagaacgagaaccactggcaccgaaaaagtggaacaaatcagactccctttctattaaaagcaagggaaaaaawtccagaaaaaaatagaatacagtaagtttccaactccttatgtagttttagaaatgaattaaaagttgagcagctagctttgatggttcaggtgagagccttccaataaagaggaaaacctagaagtgataataagtaccatctacttagtgctttctgtgtcctaggcatggtgctaagcgctttaactcattgacccctcaaaagaacactgaaggtaggcgtctgatctccctgtcataggtaagga

SEQ ID NO: 227880 - DNA, 569 bp, Homo sapiens
atgcagctgtctcactgattcatcctggcccctgcccactcctgtccatggggattatcaaactttcaccataatttccttatatagtatttccacaagggaaatccatcatctgtctcaaacgatgagtcatctatctatattcacccaagagcactccccatataccattcatctgcaagttgagcccaatgtgggcctgggcaggtgttccaaagcatttagaaagtctttgaagttctcctacagaggctgctttctgatacagtgtctgaaaaacttgcctggcatctcactagggggcttctttggtcctctgataccacagccacatcgatgagagcactgcacacatccaaaaccggagaaaagcaggagagagagagaagcaacattatactgctcacggaagctcagagggagtagagagcctggtgtgtgttcacctactcctctcggtcccctttttatgtcctttctaagtgaagaagcccaatccgtgtaaaggattttttttaagcaataaattcctttgattttggctggtyctacaccaatctaggcaagct

SEQ ID NO: 227881 - DNA, 508 bp, Homo sapiens
acccagatatttggtcaaacatgtctggatgttgccgtgaagctattttatagataagattgacattaaatcagtagatttttgagtaaagcagatgaccctmcataatgtgggtgatccaatcagttgaaggccttaagaaaaagattgccttctcttgaggaagtaggaattctgccagcaaatggcctccagactggaggtacaccatcaactcttctctgggtctctagtgggctggcccaccttgcagatttgggatttgccagccttcataatcatgcaagccagttattaaacagctcctccacccaaatctccctctctttctctctctctccctctctctctgaatattctctgaatattcaatgcattctgtttcattcatatatatatctcccattggttctgtttctctagagaaccctgactaataccacttgagccaacctcatgctgagccttaatggtatacagaggtaaatgttgaggagtcttctgtgct

SEQ ID NO: 227882 - DNA, 508 bp, Homo sapiens
acccagatatttggtcaaacatgtctggatgttgccgtgaagctattttatagataagattgacattaaatcagtagatttttgagtaaagcagatgaccctacataatgtgggtgatccaatcagttgaaggccttaagaaaaagattgccttctcttgaggaagtaggaattctgccagcaaatggcctccagactggaggtacaccatcaactcttctctgggtctctagtgggctggcccaccttgcagatttgggatttgccagccttcatmatcatgcaagccagttattaaacagctcctccacccaaatctccctctctttctctctctctccctctctctctgaatattctctgaatattcaatgcattctgtttcattcatatatatatctcccattggttctgtttctctagagaaccctgactaataccacttgagccaacctcatgctgagccttaatggtatacagaggtaaatgttgaggagtcttctgtgct

SEQ ID NO: 227883 - DNA, 430 bp, Homo sapiens
aacatgggtggaggtatccccctcttacttccaggcacaccaagaacagctgttcacttatctgtcaaatagtagggttccttggaagatttcatttgcaaaaggagttgtactgctaaaaacaaaagtttgcggactacagaggaagatatgagcatcttgcacacagrccacacctgtctcaaaggccctttttgctcttgtttgatctgaagatattccaggcaacacaggaataaaacctggcccccttatttttggaattttatgtagtttctagcaaccaccaagtttatctgttatataagagcaaggaaaacaattgttttgaattgagtgatttggattgcattatcaaaaggcagcatatgtagagtggggcatgggcttagggctcagcacagaaaccctatcaccaaaaagttggccc

SEQ ID NO: 227884 - DNA, 245 bp, Homo sapiens
ttttttataacagatggagcagctcatttttggtggaaaattgagaggaattgtttttccttcccaaattgaatgaaaagcattgaagtcaaaggtggctgtcctttcttggaaatgtccctgctttttgtatctgttgaggagagagtcctagatagtttcagcagaagctaactgcatcatttctaaaggttattatgtagagatctgcctatcagktgggtgttagttggtggctctgaggc

SEQ ID NO: 227885 - DNA, 465 bp, Homo sapiens
catatcacccacgacacttgccaaaaggaagggaaaaccaggccattgcaaagaaaaatgagaaacaagcacaactgaggacgggaggaaaaacacggtcccctccagtgaatgagagatcagagggcagaggggcccctgctgcagtctgtgtcctcactcccctttggcgactcgcctcgctctcckggcttctggtccaggaagcctcaccctccatcagaggccacggcccctggcctggtgcagaccacattctgccatgtaggtgcctgccaatggagatccattagagtttccttctgtgaaggccctggtggcctctgtcctcagaaacagcacctgtctagaacggtctctagacttttcttctctgcttggactcgaaagtccatttccaaggagctttttcctgagttcagacctactaaagtggttgcattttctaagagattcaaatgggac

SEQ ID NO: 227886 - DNA, 430 bp, Homo sapiens
agaattcattgagtaaaaatgattcaggatggtatttgtattagacaaaactccatgttgctagtacagaaaactcaactcaagctggcattaacaataacagacttagataatgtgcccactcaaaaaggaaaactggaaccagggtaacattatgtactgaccagctcaggcrtggatgatatacccatctgtgtaccacaaactgtgggaggggcaaaatggataacttgaactgcagtttgggcaattactgaagccaaggatggggacaattccaccaaaattgaatggctgtccctttacctggagagggagaaaatggcaaaacagaagcacaagaagatgagggaaaataaatcagagtcaaataattggaatccttacttcctctctcagtaaaagattgacacacaaataaaacttaaaa

SEQ ID NO: 227887 - DNA, 578 bp, Homo sapiens
gtactagcacacggacagatagatcaatgaaatataattgagagtgcaggaataaaccccaacatttttggtcatttaattttcaaaaaaattgcccaaaccattcatggaggaaaagaacagkcaattgttcttttctgacatttgttctgacaaatgatgtcagaacaactagatagtcacatataaaagaatgaagatggacccttgccatataccatagacaataactaactcgagatggatcaaggatattaaatgtaaaagctaaaactgtaaaactcttagaagaaaacagagggacaaaccttcatgaccttggatttagcagtggtttcttaaataacgatgccaaaagcatgagcaacaaaagaataaattagacttcaccaaaattaaaaatgtttgcatatgaaagttttacataccaagatagtgcaaagaaaacccacagaatgggacaaagtatctgtaaatcatgtatctgacaaggttctattacaaagaactccttttcccaaagaataaagacaaatggccaagaagcacatgaaaagctcaatgtcattagtaattag

SEQ ID NO: 227888 - DNA, 559 bp, Homo sapiens
atatgcacccaatacaggagcacccagatttgtaaagcaatttcttagagattttcaaagtaacttagactcccacacaataatagtgggagactttaatatcccactgacaatattagacagatcattgagaaagaaaattaacaaagacattcaggacttgaactcagttctggatcaagtggacctgtcagatatatatagaactctccacccaaaaacaacaaagtatactttcttctcattgccacacagcacttactctaaaattgatcatacccagaagtaaaacactcctyagcaagtgcaaaaaaagcgaaatcataataaacagtctctcagaccacagcacaatcaaattagaattcaaaattaagaaattcactcaaaaccatacaattacatagaaagtgaacaacctgctcctgaatgactcttaggtaaataatgaaattaaggcaaataccaggaagttcattgaaccaatgagaacaaaaatacaatgtaccagaatctctggggcacaactaaagcattgttaagagggaaatttatagca

SEQ ID NO: 227889 - DNA, 395 bp, Homo sapiens
gtgttcattgtttacgcaacatccattttgccctcttacttgctaattaaactccaaacatattcaggtagcaagcagacatcttatatttttgaagaagcttagctccttctctggccctacttgccactccatttcctctgccagtgatcagaagtgggaatgtaacccagacctggctaatgaaacataagagaaagtgtgctagggagttgagtggaagcagcttctggaaactatttcctttctttaaaaaaaggaaaaaaaaaaaagatcctcaaaagaaaaaaaactttttccctctgtcccyaaatgtaataatgtaattaggtgagatgtgatcctaggagctatgacagatctcttagcataatgaggtacaagtctaaggaaca

SEQ ID NO: 227890 - DNA, 614 bp, Homo sapiens
gactagacttatataagcaattcagaaggcccaagatcaagctaattagaattctagaaaactaataaaatgaagggaagaaaattattaaagaaagtaatagaagaaaattccctggagctgaaagagactgtaagatctaacagtgctgagatgcatagatttttttttaaagccacatttgagcacatctgtaagaaatttcaaaacagaaagagtagtaagaagatctaaaagtcatttagagaaggaagagtggttgaccttcaaataggattgccagatttagggaaaaaaaatacacaacacacatatttgaacttcagacaaataatgaataatttattggtatgagtatgcctgaaatattgcacattccagggtaaatacttacactaaaaattatttgtcaattatrttaaaattaaacttagctggcatcatatattttatttggcaactctatgttcaaaagactagaatcaggcttctatcacagatctcatcagaaacactagaaaacaatggcacagtgccaccaatattctgagatcaaatttttggaaactaaacttcatatccagtcaaattattatagaatatttacctcctat

SEQ ID NO: 227891 - DNA, 594 bp, Homo sapiens
gtggggggctccacctttgcaacaggcttctgcttgggtgcccaggaytgcccatacattctctgaaatccagatgcttggcagcctccactactcttgcactctgtgaacccacaggcttaacaccatgtggaagccaacagacttacaacttctgcccttcagagcagatgcctcagctgtacctgggtccctttgagccacagctagagctggagtgggatatggagaacagtgctctgaggctacacagggtagcagggccctgggcctggtcccctgaaaccagttttcctacactactgggtctgtgatgagaggggctgtctcttagatctctgaaatgccttccagaccttttccccatcatcttggctattagcacctggctcacttttagtcatgcaaatctctctagcaagtggttgtttcacaatctactttaattcttactctgaaaaagctttctttgccacatggctaggctgcaaattttcaacttttatgctgtgcttcacctttaaatataacttccaactttaagtcatttctcgcttccaaatcctggttaagctgttagaagcagccaggcca

SEQ ID NO: 227892 - DNA, 592 bp, Homo sapiens
gtatatcaatattaatctactgaaatttgatcagacaagaacgatttcatccactttgtgatggtgctgatatataaagaggctgtgaaactacccagaggcctgaatattctttgtttctaaaattccaacatgaagttaggtttacaggcacagagggagttctgasggttatgctttctaactctaaggcaaactcagaaaactcctctgcgagctgaagtctctatatgacctttccaacccttcctttggactccttttcttctctgaaaatctttttattgactgtggagtaagggtgtcaggaatcgaggaggggctctgtttgggtctaagggtattcaactgtgattttcttatgccaagagcatatgttaattccttaatcaccaatgcctgatctaattggtccagtctcatagtttagctgcataaacacagtttggctactaccacttttaagcagtaactcgccaatactggcaaagtgacactaccgtcaggagaaaagattgaccatacggcagcatcaatcagaagtagtatcatgagctctaaaccaaaccctcaatcaaacggggcaaccaaa

SEQ ID NO: 227893 - DNA, 505 bp, Homo sapiens
cctctttggggctctgcagttcctgggatctccaagcttttgggtgccattacattcgcctcatccagacactggtgccagttgtggaagccagttgtggtgtatctggtctagccacagacttgtacagagctggtgcctgtgtcagtgcctggacctgcctgccccgctgtgtgcttgctcactcacacacccctcaccacttcatgcctggcttgcacttggcaggagtggaatagagctggtagcatgagccaattgcagcctactgagccaagcaggtggaacgagcccagcaggtgcaarcaactcaagcagaggtgctgctggccacggggtttctagctggtgaagcaacatcctaaggattctggtacatttctatgaacttcattaaagtagtactacagtttgatgggactgcagttttaaaacaaattatggtcctggtgaagactaaatctggtttgttatcaatgtggcaaaaggcctaattacttaaatg

SEQ ID NO: 227894 - DNA, 589 bp, Homo sapiens
gacttataaacatgagcacttgtcaccatccacagatacaaaatgcatagttccttttttggctttaccattgacagttcttatataagttaattaacctctgtgacacatgacttgctacctttctgtttcacagtaagactttaaagattgggatgaacataagttattaaagcattgtttattaatgagctaacatccaaaaatggaagatagaatataaaataatgaattcctaagtgtgataatcaamtatattccattgttgataactttacaaagtagttgttgatggcagaattttttaagtttctggttacttgtttcttgttatttgttaaagcaattcctgacaaatatctgtattcctttattaacagatcacattggatactaaaaatattctgttgaatttgaatcactatagcaagaaaataagtttttacctaaaaagaactagcattgatttacacttacagttaagcatgtctattgatataaatttgcttggcagaaaacatatgttgtgtttaatccctatcttacatttggacatttgagtagctctaccttgaaccttatttgggtt

SEQ ID NO: 227895 - DNA, 590 bp, Homo sapiens
gatgttagcatttctttctgtaagaaaatcttttgttctaaaaagaaaacttggtagaaaatttctattcctactatgttactattgttttacatatatgcatatataattgttacataaataattgctttatgtatacatatacatatatgtgatctatgtataaaacaagaaaattatgtaacatataaagcctgtcaaatgtcctttacctgaaaatttgctatacctccagcacccaakgcagattttgatctacttttgactataatactttctcaaaaatgtcattgcaagatgtttaaattaaaattatcattattattattattagaaattggattatttatatcagagaaaattgtaacagtaatgttggttgaagaaattgcacattgatgggtaagtccttaaactcactatggaaacaaacagcctaatttaaagtcatttgtacttaaattcaaatttaaaggagaaagaaaagcagagtagggtactgaattatgtctctcctactttggtagaacaaaaaataatccaaatctgaataaagtaatctatatatttcctagtcaaagaccacccag

SEQ ID NO: 227896 - DNA, 590 bp, Homo sapiens
gatgttagcatttctttctgtaagaaaatcttttgttctaaaaagaaaacttggtagaaaatttctattcctactatgttactattgttttacatatatgcatatataattgttacataaataattgctttatgtatacatatacatatatgtgatctatgtataaaacaagaaaattatgtaacatataaagcctgtcaaatgtcctttacctgaaaatttgctatacctccagcacccaatgcagattttgatctacttttgactataatactttctcaaaaatgtcattgcaagatgtttaaattaaaattatcattattattattattagaaattggattatttatatcagagaaaattgtaacagtaatgttggttgaagaaattgcacattgatgggtaagtccttaaactcactatggaaacaaacagcctaatttaaagtcatttgtactyaaattcaaatttaaaggagaaagaaaagcagagtagggtactgaattatgtctctcctactttggtagaacaaaaaataatccaaatctgaataaagtaatctatatatttcctagtcaaagaccacccag

SEQ ID NO: 227897 - DNA, 495 bp, Homo sapiens
tgtgtgtgtgtgtgtgtgtgtgtgaatctttcataactgaagctgtattcagaagtcttatcatccttggctcataacaaagagtgagagaattaaaatctcatttgtagttttgagcatgtaaattcaatttgtcaactttaagtttcagtaaagcatggggtagccatgcaaatcattgtctaaagttttgagattaaggaggcactgttcatatgtcaaaacaatatgcataaactagaactataccggacaaatcaggttgtatgttgcttcatttattagagaactccttatcttttgtgagcttcttygagactggtgagattcctcagataaaaatctttataaatcttgcctagagagtctgattgactgttcttagggatttaggaacaaaaataaggctgacaggtctttaaattcacatgcagcattcctgttttgtaaattttagccacaacatagagtttgtatcatgacccaactccttca

SEQ ID NO: 227898 - DNA, 571 bp, Homo sapiens
ttcttttagtttttttctttctgccaatttggagtgtgagagtgtgtgtgtgtgtgtgtgtgtgtgtgtgtgtgtgaatctttcataactgaagctgtattcagaagtcttatcatccttggctcataacaaagagtgagagaattaaaatctcatttgtagttttgagcatgtaaattcaatttgtcaactttaagtttcagtaaagcatggggtagccatgcaaatcattgtctaaagttttgagattaaggaggcactgttcatatgtcaaaacaatatgcataaactagaactataccggacaaatcaggttgtatgttgcttcatttattagagaactccttatcttttgtgagcttctttragactggtgagattcctcagataaaaatctttataaatcttgcctagagagtctgattgactgttcttagggatttaggaacaaaaataaggctgacaggtctttaaattcacatgcagcattcctgttttgtaaattttagccacaacatagagtttgtatcatgacccaactccttcaattcagagaccatgtgatgaactt

SEQ ID NO: 227899 - DNA, 326 bp, Homo sapiens
gacttccttccacaaaaatatttggaggcttatgatacacagaggccaaagaaccaatgtggcacatgagctctccagtagagttagctcaataagatctgtctcctcagagatcagtggcttctcagacaagactacttgtttagctgtgactgagtcagttgagagaagacaccaataaatatagcccccgtctcaaaggccaggattatcagaattctgtactacacrctcttaaacaacaagtggatcaaaaaagaaatcataagggtaattatagaatatctcgaaacagatgaaaattacagcataacataccaaagctt

SEQ ID NO: 227900 - DNA, 508 bp, Homo sapiens
tacaaaaccaatcgatcaataaatgttagtgaatttgttaatcatcatgtacaaattgtcaagctaatctctcagcaagatagaatgccatttaagcaacayggacaaaagaaaacagaactgacatgacaaggcaatcaataaattagggatggtaggtgcttggtgaaagaaggtaagaaagaggcagtgtgaaagactgaacaagtttgaggacccaagttttgctttccaaactggaaaaacatcattagagaagaaggcagaggtgaaaaaacacaagggctttgtgatgggcaatgagggaggaaagctaaaaaagaacaaggaagtttgagggaaccagagtctccatgtgtgtaaacagcaaaagataagaaggaaaaaaactgaaactgaattggcatgtcctgaccaaccaaaagaattttttggcagataatatgataccattaaaaggttttcacagaaaatttaagacataatcagagctttgatttagtaagtt

SEQ ID NO: 227901 - DNA, 467 bp, Homo sapiens
aaatttaagacataatcagagctttgatttagtaagttcatcctactaatcgtgtataaagaggcgtgtaagaagtggagttggcaggggaaagaatggaaacagaaagcacatatagaaacccctgcagcatttcaggtctccaggaaccagggcttaaaccagagagagtttgtgtttgaagatactagaagttattgrttaatggcattatgagatggcacagtgaaaattgacattgaagatgacattgagattttaagtcttattgatttagaaaaaaaataagtcaaaagagaaaactgttatgaaaagcaatgtaaaatactgtttacagtcataagctctagagtagaaaagatctgagattgaattgcaactccaatgctgaccagcctcgtgatcttaaagaacttacataacatctctgtgcctccgtttttccacctatacaagagagctaataa

SEQ ID NO: 227902 - DNA, 570 bp, Homo sapiens
ttcctttgggcctgactgggtattcagtgaccatcaggtcatttcatttggtaagtgtaatgttgagtataagcatggcttgaagaattactggggagttggcagcaggctgaagtcagcagatttttgaaggaactggcataatatgcataccttgtttaaagtagagttataccctacagaagggtgagaaatgaaggaatgctattaacagagaataagctcatttatttaaggttagattgaattttccaaatctcttgaagaagtagggagatcagtgcagctgagttgactatatgaggatttattttaacagcatggtagtgaataaattagtcatttgtaagtgccatccttctataatattagcgtggtcagaaatctattctgttgcaatttctagttccacaaaaaaggatttatawggcaatgaaaccctgaaaacacagcctatctgtatctgatatgccactaggtagtttaaaaaaaaaaaaggaagaaagagctaaaacaaaacaagcacctatggctcaatgcccaatcattttatttccttggataaagctg

SEQ ID NO: 227903 - DNA, 459 bp, Homo sapiens
ccctataattagatgcagattatttctagttcatctgaagtaatcaccatcctgaatcttaagtctattaactcctttctttctttacaccatagttttattgcamatatttgtattactatggagtatatttttaaattataattatattaatttatataaaaattatactccgtgtattcttttggactttttttaacttctgttaatgttaacatttattcatataatgtgccttttacaggaatcacatactcatgtggttttggtccatttgctttgactgctttataatagttgtgagtgtgtgtgtttgtaaatttattcttcccctctgcatggttatctattcctatttgggtttactctaggtttttactactgcaaatagtattgctatggaaggatattcctgtgtttatatgaggtacaaatacaattttatctatttcagttaat

SEQ ID NO: 227904 - DNA, 459 bp, Homo sapiens
ccctataattagatgcagattatttctagttcatctgaagtaatcaccatcctgaatcttaagtctattaactcctttctttctttacaccatagttttattgcacatatttgtattactatggagtatatttttaaattataattatattaatttatataaaaattatactccgtgtattcttttggactttttttaacttctgttaatgttaacatttattcatataatgtgccttttacaggaatcacatactcatgtggttttggtccatttgctttgactgctttataatagttgtgagtgtgtgtgtttgtaaatttattcttcccctctrcatggttatctattcctatttgggtttactctaggtttttactactgcaaatagtattgctatggaaggatattcctgtgtttatatgaggtacaaatacaattttatctatttcagttaat

SEQ ID NO: 227905 - DNA, 459 bp, Homo sapiens
ccctataattagatgcagattatttctagttcatctgaagtaatcaccatcctgaatcttaagtctattaactcctttctttctttacaccatagttttattgcacatatttgtattactatggagtatatttttaaattataattatattaatttatataaaaattatactccgtgtattcttttggactttttttaacttctgttaatgttaacatttattcatataatgtgccttttacaggaatcacatactcatgtggttttggtccatttgctttgactgctttataatagttgtgagtgtgtgtgtttgtaaatttattcttcccctctgcatggttatctattcctatttgggtttactctaggtttttactactgcaaatagtattgctatggaaggatattcctgtrtttatatgaggtacaaatacaattttatctatttcagttaat

SEQ ID NO: 227906 - DNA, 459 bp, Homo sapiens
ccctataattagatgcagattatttctagttcatctgaagtaatcaccatcctgaatcttaagtctattaactcctttctttctttacaccatagttttattgcacatatttgtattactatggagtatatttttaaattataattatattaatttatataaaaattatactccgtgtattcttttggactttttttaacttctgttaatgttaacatttattcatataatgtgccttttacaggaatcacatactcatgtggttttggtccatttgctttgactgctttataatagttgtgagtgtgtgtgtttgtaaatttattcttcccctctgcatggttatctattcctatttgggtttactctaggtttttactactgcaaatagtattgctatggaaggatattcctgtgtttmtatgaggtacaaatacaattttatctatttcagttaat

SEQ ID NO: 227907 - DNA, 465 bp, Homo sapiens
tgaaaattagttcagccattgtggaaagcagtgggaaaatttcccgaaaaccttagagctaacatttgacccagaaatcccattacttggaatatatatacccaaagtgatctaaatcattcccaaattatcttataaagctaatattactctaacaataaaatctgacaaaagcagtacaaaaataaaattgatgaatcaatattgcccataaatgtggtagtaggctggaaaactggcccacagagatatccaggtaaaatttctgaaattcatggatgttagcgtatttagaaaaaaaaagccaggtgcagtggctcacgcctgtaattccaacactttgggaggctaagyaggcagatcacagggtcaggagatcgagaccatcctggctaacatggtgaaaccccgtctctactaaaaaaaagctggaaatggcagcattttgatgagtttttatttttt

SEQ ID NO: 227908 - DNA, 465 bp, Homo sapiens
tgaaaattagttcagccattgtggaaagcagtgggaaaatttcccgaaaaccttagagctaacatttgacccagaaatcccattacttggaatatatatacccaaagtgatctaaatcattcccaaattatcttataaagctaatattactctaacaataaaatctgacaaaagcagtacaaaaataaaattgatgaatcaatattgcccataaatgtggtagtaggctggaaaactggcccacagagatatccaggtaaaatttctgaaattcatggatgttagcgtatttagaaaaaaaaagccaggtgcagtggctcacgcctgtaattccaacactttgggaggctaagcrggcagatcacagggtcaggagatcgagaccatcctggctaacatggtgaaaccccgtctctactaaaaaaaagctggaaatggcagcattttgatgagtttttatttttt

SEQ ID NO: 227909 - DNA, 538 bp, Homo sapiens
tggtgtgctgatttcattctttatagtgtctttgtctgctttggtatcacagtaatactagcctcatagaataaacttggaagtgtcctctccccttctaattctttggaagattttcagagagatctggtgttctttttaagtgttaaggtagaattctccagagaagtcaactggactgtctccttattgrcaggtacttgattatcgattcaatctctttactagttatcggtttgttctgaatttttattccttatgacagcctggtaggttgtgtgtttctagaaattacctatttattctaggttatccaattttttggcatacaattgttcatagtgttcttttacactcatttttacttctctggcatttattacaatgtttcttattttacttctgattttaatcattcaaatgttctcttttattagtcagtctagttatcagtttgccaatactgttcatcttttcagaaaccacgtttttgtttcattgattttttaattgttttacttttttctgttaaattcat

SEQ ID NO: 227910 - DNA, 531 bp, Homo sapiens
gccgtatagaaacagctccagtctggagttcccagctagaccaatgcagaaggttcgygatttattcatttccaactgaggtacccaattcatcttattgagactggttagacagtgggtgcaacccatggagggcgagcagaagcagggtgaggtgttgcctcacccagaaagtgcaagggctctgaagagagccatgaatgtcccagcacagtgctcgagctctgctaagggacggactgcctcctcaagtgggtccccaatccccttgcctcctgactgggagacacctcccagcaggggtcaacagatacatcataaaggagagctccagctggcatctggcaggtgcccctcttggatgaagcttccagaggaaggagcaggcagcaatctttgctgttctgcagcctccactagtgatacccaggcaaacagggtctggagtggacctccagcaaactccagcatacctgtagaagagggacctgactgttagaaggaaaactaacaaatagaaagcaataacat

SEQ ID NO: 227911 - DNA, 509 bp, Homo sapiens
ttcttctttgcatagaatatttaaagttatttttcctatactctgtcttgaaagagtttttgtaccaggactggttgcagacaataatatattctgaaggaagggaatctggggtttgttatctagctccattagctttaaagtcagtaaggataagaaaagaacmagagaacaggtgctggtggttcatggaagacagaataagttcataacttatttggaataaaacatctttcagagtataagggctactgtttcctggagtgaagcctgcctaatacagcttcctacaggtgaagactgtgtcattgccatcttatacttacagctcctagcacaaagcctgacacataatcacattgtatgtaagtatatgaatccgaagtgagtaataccttctgtctgggtcacatagtatgtaagtacattgacctgaaattagtaatacattatgtctgggtaacttaagcatcaccatgaatgaatttatatttaacctggatattgaa

SEQ ID NO: 227912 - DNA, 512 bp, Homo sapiens
gtgtgcttggaaatatctgtggacaaaatggacaaagattcttgtctgtggagcaaacattctaatacagggagacagacaatacttaaaacacagtctagatgggcgcagtggctcactcttgtaattccagaacttaggaagactgaggaaggaagattgcttgaggccaggagtttgagaccagcctgggcaatgtcaaagaccctgtctttacaaaaaaatttaaaaagtagccagtcttggtggcatgcacttgtagtcttggctattttgggggctgaaatgggaggattgcttgagcccaggagcctgagattacagtgaactataatcacgtgactkcactccagcctgggtgacagtgtgatatcatgcctctaaaaaataaaaaaacaaaaatataataaaatgaattgctaatctcttaacaactggttgagattaagagttctataaaaagtgtcttagttcttagacctaggatatcccttcaaaattagaaatataac

SEQ ID NO: 227913 - DNA, 560 bp, Homo sapiens
cccacattcactgagccattattcgcaatagccaagatgggaaacatactaaatgtcttctgacagatgaataggtaaagaaaatgtagtatatacatataatagaatactattcagcctttaaagaaggcaatcctgtaatacgagatggtctggatgaaccttgaggactttatgctaagtgagatgatgctgaccatgctgcagaaagacaaatacgtgtactgcgtgattccacttttatgatgtatctaaaataaccaaattcacagaaccaaagagtgaaatggaggttttcaggcgttgaggaagggagaaatagggagatactttcaaaggggataaagttaccattaagcaatatgaataagctttaaacatcagttatataacattttacccatagttaaaaataatattttrtatacttataatttgttaaaagggtaaatctcatattgagtattcatactacaaaaaatattttttaagtggggggaaagaacaaaagtagttgaggaaagtagagtatttatatactctaaggagtgagaagaaaa

SEQ ID NO: 227914 - DNA, 551 bp, Homo sapiens
gtcacagtctgcttcacccacatgggatgggtctccttggttttcatggtctgttgttcataagctcctgagagtaggcaccttgtttgtcttgcatacacacaccccaggacctagaagaggctgacacatagtaggtcgttaagaagtattgaatgaatgggccaggcagtggctcatgcctataatcccagcacattgggaggatgaggcaggtggatcacttgaggtcaggagttcgagaccagcctggccaacatggtgaagccctgtctgtactaaaaatacaaaaagtagccgggcgtggtggtgtgtgcctgcaatcccagctagtcgggaggctgaggtgggagamtagcttgaacctgggtggcagaggttgcagtgagccaagatcatgccattgcactccagtctgggcagcagagtgagactccatctcaaaaaagaaaaaaaatatacactgaatgaatgattgggtgggctctgagctgagtattatggcggggggcttgcctgagctatactccccaaaagcaacccaagcagag

SEQ ID NO: 227915 - DNA, 509 bp, Homo sapiens
caaagagcctggcacacaaaatgtgttcaataggtacagaataaacacattaaaaaagtaaaagtactctgtgataagtgctatagtaagggtaggcaaaaggtgctatggagcccagagragaagaccagagggtaagaggaggggagggaaatgttgacagggtgctgggacaggctgcctggactgtcacaaaacctcccatggtcacaccagggcctgcaagcagaagtcttcctcttgattacatgatccatggatggtcagcatttttaaattccaaatatctaactgtatgctttctgtcattgataattatattctgatgttttctcacctgtctattttttctttcagctaatgcctgcacagatgaagttgacatctgatctttcatgtcctaatgagaaagaagatacgaaaacaaatgaaaaatatccttaaacaaaatcacagttaacatttcatacattagcaaaacacacaatttattattactttttaaaaag

SEQ ID NO: 227916 - DNA, 616 bp, Homo sapiens
cttgtgagctactcttctgaggctacccttttgaaggttgccaatgtctcacttcatataggtatattcttttctgaatgtccaataagcacagtcctagctgctggaaacagagcaatgaacacatgaaagtcccagccctgtgagataatttctagacaggagattggcaataaatacatatataatacaaggtcaggtggagataaagattatgaagaaaagtaaagcagagaaaagagagtgtggagaggagaaggcctgatcttttagatagagggaccacagcaggtggcatttgagcagagatgtgaatggagtaagaaagtgagccctgtaggactatgtggagttttggaaaacgaatgaatgagctctggtgtcttttttccctcagtactctctgtacacaatgatgactatatgtctyatgtttcccagaaaatcccgattttataaattttatttttctaaaatgatcctttgaagttataacaaaatgtgacttaatatgtatactcttgaaagattttccccgataaatataaattcatacatcagaaaaaacatcctttgtcatctttctcaatttgagttccctaaaataagtgttcaa

SEQ ID NO: 227917 - DNA, 545 bp, Homo sapiens
cccagtctgttgacttttgactttgagacatttttctctcatacaaaattttaatttttatggagtcaaatacaacctcggcgacgatctggttcccrcactgcctggcctgcatgagcacgatttccctcatggccaaggcgggattagagtggcaggagaaatgcgagaaggaggagcagatgcgcagctacccagcccacactccaccaccgctgaaatagacccgcgcccacctccctcagcctcgggttcggctcacagaataagcaacagctttacttccacacaggtgtacccacctgtgaatcccttggcgttgaacgtctgttggagagctcaggtgtccttgctgtggtcctttccacattggggaaagctggtcagctggagaacttcctccaacatctttagtaagactaaatccctagctgagcagaaactgaattttcctcccatgtgggaggggaagactcttgtatccatattcacagagtgtctttgcacctgtcctagattgatgacatatttttgtaattgatgag

SEQ ID NO: 227918 - DNA, 458 bp, Homo sapiens
actaaaaaggcaggcgagaaacctagaggctctggaggacaacttagaagataagaaaagcagtgattttgggcttgtccatcatgagaagacaggagcccattgtattgaatcaggacagagtaatctgctcccatacctaatacgaagttaatactcctacctgctacttcaagagtcacctgaggctcctccatctctcaatagctaatagtccaatgggagcagaggcaggaagtatcaggccctcccagttttgagtctgctgggctctgatgatggctcccttggaagcacagtgcatttccttcggcagtggccgaccttcctacagaagrcacattgatttatatccaaggcacagtggcccagagtcacagactgggacttttaccttctcacttcctctgtgagggccaggggttaaggggctgcctctgaagtggtggagagcacaa

SEQ ID NO: 227919 - DNA, 403 bp, Homo sapiens
gcaaatatcttgtttagccaaatccattcttctcaatattcccaggtccactaatcctgtgggcttggcctctaatctgagtatgataatagtggataatcattcttgcccaccagaatggcttcacgaatctaaaagacagcccacttgccaggtgtcagctgattgattctgtgtsgatttttttccttggagtgggggtcttgtcttggcgtgcgttcatggtgttgctgaaagatgttgctggaaaagagggtcctgatacagaccacaaagtaggattttcagatcttgtgcaggaaaaaatttgaggtgagtcagagagcacagtgaaagaagcaagtttattagaaattactccattacagagttggacatcctcagaaaacaagaggaggaatgc

SEQ ID NO: 227920 - DNA, 403 bp, Homo sapiens
gcaaatatcttgtttagccaaatccattcttctcaatattcccaggtccactaatcctgtgggcttggcctctaatctgagtatgataatagtggataatcattcttgcccaccagaatggcttcacgaatctaaaagacagcccacttgccaggtgtcagctgattgattctgtgtcgattkttttccttggagtgggggtcttgtcttggcgtgcgttcatggtgttgctgaaagatgttgctggaaaagagggtcctgatacagaccacaaagtaggattttcagatcttgtgcaggaaaaaatttgaggtgagtcagagagcacagtgaaagaagcaagtttattagaaattactccattacagagttggacatcctcagaaaacaagaggaggaatgc

SEQ ID NO: 227921 - DNA, 605 bp, Homo sapiens
ggtgagattacaggcatgagccaccgcacctggcaagactggataatttataaaggaaatgggtttaattgactcacagttccacatggccagggaggcctcaggaaacttacaataatggcagatggggaarcaggcacctcttacatgacagcaggcgagagagactgtatgtgaagcaaagggggaagagtcccttataaaaccatgatatctcatgagaaatcactcattatcagaagaacagcatggggaaaaccacccccatgatccaatcaccttctaccaagtctctccctcaacatctggggattacaattcaatatgagatttgggtggggacccaaatcctaaccatatcatgtagctattaattgttttcagatggataatttacaaatattttctctcattctgtggattttctcttcactttgtttcttctttccttcactttaaaaaggctttctgactttctgtaatcccatttgtccatgtttgtttgggttgtctgttcttctagggcattatttaaggaatttttgcccaaaccaatgctctaaagagtttccccaatgttttcttgtaaaagtttgatggtttga

SEQ ID NO: 227922 - DNA, 605 bp, Homo sapiens
ggtgagattacaggcatgagccaccgcacctggcaagactggataatttataaaggaaatgggtttaattgactcacagttccacatggccagggaggcctcaggaaacttacaataatggcagatggggaagcaggcacytcttacatgacagcaggcgagagagactgtatgtgaagcaaagggggaagagtcccttataaaaccatgatatctcatgagaaatcactcattatcagaagaacagcatggggaaaaccacccccatgatccaatcaccttctaccaagtctctccctcaacatctggggattacaattcaatatgagatttgggtggggacccaaatcctaaccatatcatgtagctattaattgttttcagatggataatttacaaatattttctctcattctgtggattttctcttcactttgtttcttctttccttcactttaaaaaggctttctgactttctgtaatcccatttgtccatgtttgtttgggttgtctgttcttctagggcattatttaaggaatttttgcccaaaccaatgctctaaagagtttccccaatgttttcttgtaaaagtttgatggtttga

SEQ ID NO: 227923 - DNA, 605 bp, Homo sapiens
ggtgagattacaggcatgagccaccgcacctggcaagactggataatttataaaggaaatgggtttaattgactcacagttccacatggccagggaggcctcaggaaacttacaataatggcagatggggaagcaggcacctcttacatgacagcaggcgagagagmctgtatgtgaagcaaagggggaagagtcccttataaaaccatgatatctcatgagaaatcactcattatcagaagaacagcatggggaaaaccacccccatgatccaatcaccttctaccaagtctctccctcaacatctggggattacaattcaatatgagatttgggtggggacccaaatcctaaccatatcatgtagctattaattgttttcagatggataatttacaaatattttctctcattctgtggattttctcttcactttgtttcttctttccttcactttaaaaaggctttctgactttctgtaatcccatttgtccatgtttgtttgggttgtctgttcttctagggcattatttaaggaatttttgcccaaaccaatgctctaaagagtttccccaatgttttcttgtaaaagtttgatggtttga

SEQ ID NO: 227924 - DNA, 605 bp, Homo sapiens
ggtgagattacaggcatgagccaccgcacctggcaagactggataatttataaaggaaatgggtttaattgactcacagttccacatggccagggaggcctcaggaaacttacaataatggcagatggggaagcaggcacctcttacatgacagcaggcgagagagamtgtatgtgaagcaaagggggaagagtcccttataaaaccatgatatctcatgagaaatcactcattatcagaagaacagcatggggaaaaccacccccatgatccaatcaccttctaccaagtctctccctcaacatctggggattacaattcaatatgagatttgggtggggacccaaatcctaaccatatcatgtagctattaattgttttcagatggataatttacaaatattttctctcattctgtggattttctcttcactttgtttcttctttccttcactttaaaaaggctttctgactttctgtaatcccatttgtccatgtttgtttgggttgtctgttcttctagggcattatttaaggaatttttgcccaaaccaatgctctaaagagtttccccaatgttttcttgtaaaagtttgatggtttga

SEQ ID NO: 227925 - DNA, 444 bp, Homo sapiens
tggtggatgagaatgtaggcttctcttctgccctcttattctgtctctgccttaaattttttagattcagggagtatatttgcaggtttattacctggatatattgtgtgatgctgagcaatgtgggatattattgatcccatcaccaaggtagtgagcatatattgtgggatatatttgatcccatcacctaggcagtaagcatagcactcatagtttctcacccyctgccctcctcctttcctccttcatctagtagttctcagtgtctattgttgtcatctttatattcatgagtaccccatgtttagatcctacttataggcaagaacatgtggtatttggttttctgttcctgtattaatttccctaggataatggcctccagacgtatgcatgttgctgcacaggacatgattgtattctttttaatgtgtgcatagt

SEQ ID NO: 227926 - DNA, 210 bp, Homo sapiens
cattcttactctgtgtgaattgtggtgatgagctagtcagctctcttaaaatcactaacaaaaagttttaaatttcctagttagtartaagtttttagcatgccacaagatactcttagaacaaggacttctggtccaggcattgtggattatgatgattagttctatggatttctataagctttgaaattaagaggtaaaaatctaaaa

SEQ ID NO: 227927 - DNA, 295 bp, Homo sapiens
taaaaaacaatagaatcataatttttgcagacacatggatggaactggaggccattgttgtaagtgaarcaagccagacacagagtaaacatcgtattttatcactcataagcgggtgctaaaagatgtgagggtattgatgtagagagtggaatgataatggagactcagcagggtgaggggatggaaggggtgaacagtgagaaattacttaatgggtacaatgtgcattattccagtgatggatacctaaaagccctgacttcaccactatgccatccatgcttacagcaaa

SEQ ID NO: 227928 - DNA, 430 bp, Homo sapiens
cctggccatgctgtcttctgcctgctgctttgcctcccctttcctcctggagaaggtagagatgctctgasatttggctcgtctggaacatgtgtccttctcctcatgtggaccatgttttcctgagtccactttaatctcgtttaagggtatagaactttacttaaagcttctggtcaggtctcactctctatgctgtcttcctgccacttctacaatgtacatactttactgatacattaattatgctatatcagccaagggttttacttctatatcattttatatcatcatctttttttcttagagcttagttcacttatttattaagtctttccacactataattgtatgtcatataattttatatttattttcattggtgtttatatatcttttctgtaaaaatggaggctttctaaatagatct

SEQ ID NO: 227929 - DNA, 430 bp, Homo sapiens
cctggccatgctgtcttctgcctgctgctttgcctcccctttcctcctggagaaggtagagatgctctgacatttggctcgtctggaacatrtgtccttctcctcatgtggaccatgttttcctgagtccactttaatctcgtttaagggtatagaactttacttaaagcttctggtcaggtctcactctctatgctgtcttcctgccacttctacaatgtacatactttactgatacattaattatgctatatcagccaagggttttacttctatatcattttatatcatcatctttttttcttagagcttagttcacttatttattaagtctttccacactataattgtatgtcatataattttatatttattttcattggtgtttatatatcttttctgtaaaaatggaggctttctaaatagatct

SEQ ID NO: 227930 - DNA, 430 bp, Homo sapiens
cctggccatgctgtcttctgcctgctgctttgcctcccctttcctcctggagaaggtagagatgctctgacatttggctcgtctggaacatgtgtccttctcctcatgtggaccatgttttcctgagtccactttaatctcgtttaagggtatagaactttacttaaagcttctggtcaggtctcactctctatgctgtcttcctgccacttctacaatgtacatamtttactgatacattaattatgctatatcagccaagggttttacttctatatcattttatatcatcatctttttttcttagagcttagttcacttatttattaagtctttccacactataattgtatgtcatataattttatatttattttcattggtgtttatatatcttttctgtaaaaatggaggctttctaaatagatct

SEQ ID NO: 227931 - DNA, 430 bp, Homo sapiens
cctggccatgctgtcttctgcctgctgctttgcctcccctttcctcctggagaaggtagagatgctctgacatttggctcgtctggaacatgtgtccttctcctcatgtggaccatgttttcctgagtccactttaatctcgtttaagggtatagaactttacttaaagcttctggtcaggtctcactctctatgctgtcttcctgccacttctacaatgtacatactttactgatacattaattatgctatatcagccaagggttttacttctatatcattttatatcatcatctttttttcttagagcttagttcacttatttattmagtctttccacactataattgtatgtcatataattttatatttattttcattggtgtttatatatcttttctgtaaaaatggaggctttctaaatagatct

SEQ ID NO: 227932 - DNA, 607 bp, Homo sapiens
aggtctcactctctatgctgtcttcctgccacttctacaatgtacatactttactgatacattaattatgctatatcagccaagggttttacttctatatcattttatatcatcatctttttttcttagagcttagttcacttatttattaagtctttccacactataattgtatgtcatataattttatatttattttcattggtgtttatatatcttttctgtaaaaatggaggctttctaaatagatcttcattaacgttgagagaacaaggttttaagtcttggtctcagccaaaaggagttccccgcattaccaggagggaaagaaacacttgcattgttgcattagatattcttacagagaaagagaaccrtgtgtaatggaaaattgctaactttgcctcaaggggactaggttgattcagtgagaaagtttctattggtttagaaagcatagttctgagtattctaggagaaggagaaaagttagagtagggcataagaagtaatgcccatatcaaaaagttagaaagatctcaaattaacaacctaacatcacaactgaaagaattagagaagcaagaagaactcaaccacaaagctt

SEQ ID NO: 227933 - DNA, 607 bp, Homo sapiens
aggtctcactctctatgctgtcttcctgccacttctacaatgtacatactttactgatacattaattatgctatatcagccaagggttttacttctatatcattttatatcatcatctttttttcttagagcttagttcacttatttattaagtctttccacactataattgtatgtcatataattttatatttattttcattggtgtttatatatcttttctgtaaaaatggaggctttctaaatagatcttcattaacgttgagagaacaaggttttaagtcttggtctcagccaaaaggagttccccgcattaccaggagggaaagaaacacttgcattgttgcattagatattcttacagagaaagagaaccatgtgtaatggaaaattgctaactttgcctcarggggactaggttgattcagtgagaaagtttctattggtttagaaagcatagttctgagtattctaggagaaggagaaaagttagagtagggcataagaagtaatgcccatatcaaaaagttagaaagatctcaaattaacaacctaacatcacaactgaaagaattagagaagcaagaagaactcaaccacaaagctt

SEQ ID NO: 227934 - DNA, 607 bp, Homo sapiens
aggtctcactctctatgctgtcttcctgccacttctacaatgtacatactttactgatacattaattatgctatatcagccaagggttttacttctatatcattttatatcatcatctttttttcttagagcttagttcacttatttattaagtctttccacactataattgtatgtcatataattttatatttattttcattggtgtttatatatcttttctgtaaaaatggaggctttctaaatagatcttcattaacgttgagagaacaaggttttaagtcttggtctcagccaaaaggagttccccgcattaccaggagggaaagaaacacttgcattgttgcattagatattcttacagagaaagagaaccatgtgtaatggaaaattgctaactttgcctcaaggggactaggttgattcagtgagaaagtttctattggtttagaaagcatagttctgagtwttctaggagaaggagaaaagttagagtagggcataagaagtaatgcccatatcaaaaagttagaaagatctcaaattaacaacctaacatcacaactgaaagaattagagaagcaagaagaactcaaccacaaagctt

SEQ ID NO: 227935 - DNA, 607 bp, Homo sapiens
aggtctcactctctatgctgtcttcctgccacttctacaatgtacatactttactgatacattaattatgctatatcagccaagggttttacttctatatcattttatatcatcatctttttttcttagagcttagttcacttatttattaagtctttccacactataattgtatgtcatataattttatatttattttcattggtgtttatatatcttttctgtaaaaatggaggctttctaaatagatcttcattaacgttgagagaacaaggttttaagtcttggtctcagccaaaaggagttccccgcattaccaggagggaaagaaacacttgcattgttgcattagatattcttacagagaaagagaaccatgtgtaatggaaaattgctaactttgcctcaaggggactaggttgattcagtgagaaagtttctattggtttagaaagcatagttctgagtattctaggagaaggagaaaagttagagtagggcataagaagtaatgcccatatcaaaaagttagaaagatctcaaattaacmacctaacatcacaactgaaagaattagagaagcaagaagaactcaaccacaaagctt

SEQ ID NO: 227936 - DNA, 523 bp, Homo sapiens
ttctttaccataaatatttaaattcgttaccactattgtctctttataagtaaaattactagttgctattataaatgattattcaatcacttttcatttttggggggttcagtacaaagttagtaacaaataaacaatattggccttggcaatgcaagaggagctcaagtcctccagggcacrtcaggaaaaggctaaatgacagctgtgctgtgagtggacagaatacagctctcatacagactattgagtatttgatgttcttcaacaatttcattaatcttcagtttttttcctctttgaagtgaaagtctgctatgactttcaagtttcttttgaaataattatagattcacaggaagttgcaaaaggtacagggatgtcttaagtactcttcactaattccagtggtgacatcttacatagctatagagcattatcaaaacctggaaactgacataggtacaattcagaaagcttactcagatagcaaccgttttgtatgcattcatttttgtatgtg

SEQ ID NO: 227937 - DNA, 582 bp, Homo sapiens
atctttacaattatatttcaataatttatataaatgtaattgtacaaaatcgtatttttaaatggaaaaaaacaagtcacaaatagttttgttagcactgtaaaatagtgttaacattcatttgttttatgttctatttgtctcaraaaaatgtgctttgttctttcccatactttctgatatcaggataggaaatcaataccaaacaaaaaatttccattcatttttttccacagcttggttttcactgttgttgcccaacatttattgttccatttactctttctctctgttttccatcacataaaagtaactttgtgttctttatctcttctaagaaaacttggtaatgagtctttaatgtgacgcctggaccacccttgttttgattttgtgttatgggtgttcttttgtttgatcattctcatggagagtccttgtgaagctgggcttttccagtggtttgtcaaaatggaaatagatatttaacaaaccaaacataaaatgaccttgctccaggaatgcatcatttctgagaaaacactacctcttccaactagagattgtgaatattactcatac

SEQ ID NO: 227938 - DNA, 582 bp, Homo sapiens
atctttacaattatatttcaataatttatataaatgtaattgtacaaaatcgtatttttaaatggaaaaaaacaagtcacaaatagttttgttagcactgtaaaatagtgttaacattcatttgttttatgttctatttgtctcagaaaaatgtgctttgttctttcccatactttctgatatcaggataggaaatcaataccaaacaaaamatttccattcatttttttccacagcttggttttcactgttgttgcccaacatttattgttccatttactctttctctctgttttccatcacataaaagtaactttgtgttctttatctcttctaagaaaacttggtaatgagtctttaatgtgacgcctggaccacccttgttttgattttgtgttatgggtgttcttttgtttgatcattctcatggagagtccttgtgaagctgggcttttccagtggtttgtcaaaatggaaatagatatttaacaaaccaaacataaaatgaccttgctccaggaatgcatcatttctgagaaaacactacctcttccaactagagattgtgaatattactcatac

SEQ ID NO: 227939 - DNA, 554 bp, Homo sapiens
ttctatttgtctcagaaaaatgtgctttgttctttcccatactttctgatatcaggataggaaatcaataccaaacaaaaaatttccattcatttttttccacagcttggttttcactgttgttgcccaacatttattgttccatttactctttctctctgttttccatcacataaaagtaactttgtgttctttatctcttctaagaaaacttggtaatgagtctttaatgtgacgcctggaccacccttgttttgattttgtgttatgggtgttcttttgtttgatcattctcatggagagtccttgtgaagctgggmttttccagtggtttgtcaaaatggaaatagatatttaacaaaccaaacataaaatgaccttgctccaggaatgcatcatttctgagaaaacactacctcttccaactagagattgtgaatattactcatactatcctttactccctttattaaaactgtatttttttttacacatttgtataactcgggtaatgaaatgtgaaactaagtgattgcctaccaattacaattggt

SEQ ID NO: 227940 - DNA, 554 bp, Homo sapiens
ttctatttgtctcagaaaaatgtgctttgttctttcccatactttctgatatcaggataggaaatcaataccaaacaaaaaatttccattcatttttttccacagcttggttttcactgttgttgcccaacatttattgttccatttactctttctctctgttttccatcacataaaagtaactttgtgttctttatctcttctaagaaaacttggtaatgagtctttaatgtgacgcctggaccacccttgttttgattttgtgttatgggtgttcttttgtttgatcattctcatggagagtccttgtgaagctgggcttttccagtggtttgtcaaaatggaaatagatatttaacaaaccaaacataaaatgaccttgctccaggaatgcatcatttctgagaaaacactacctcttccaactagagattgtgaatattactcataytatcctttactccctttattaaaactgtatttttttttacacatttgtataactcgggtaatgaaatgtgaaactaagtgattgcctaccaattacaattggt

SEQ ID NO: 227941 - DNA, 536 bp, Homo sapiens
tgaaggtttgaggtccaggaactaatgtttcacttattgttcatttgtggcctcctgatgtgtcatctctgcttttactccacatagtttctttgttccccttattttcattaarcattctttcctgtttacttaaacctctgcagagagggcagcctgaatgttgaaattccacctcatcttgcagttcagtcacctcacaccaatttacttccttgcctaggaagcctcctgaatgctggcatcaaggtttgaggtccaggaactaatgtttcacttattgttcatttgtagcctcctgatgtgtcatctctgcttttactccacatggtttctttgttccccttattttcattaaacattctttcctgtttacttaaacctctacagagagggcagcatctgcagcatctacaattgaaggaggtgatgaaccaggaaaacctaatgccttggatcttgtaggtcagaagtccacgcctggtccagtcctctctgcctggggtacagggataggaattttatgctcaaaacat

SEQ ID NO: 227942 - DNA, 536 bp, Homo sapiens
tgaaggtttgaggtccaggaactaatgtttcacttattgttcatttgtggcctcctgatgtgtcatctctgcttttactccacatagtttctttgttccccttattttcattaaacattctttcctgtttacttaaacctctgcagagagggcagyctgaatgttgaaattccacctcatcttgcagttcagtcacctcacaccaatttacttccttgcctaggaagcctcctgaatgctggcatcaaggtttgaggtccaggaactaatgtttcacttattgttcatttgtagcctcctgatgtgtcatctctgcttttactccacatggtttctttgttccccttattttcattaaacattctttcctgtttacttaaacctctacagagagggcagcatctgcagcatctacaattgaaggaggtgatgaaccaggaaaacctaatgccttggatcttgtaggtcagaagtccacgcctggtccagtcctctctgcctggggtacagggataggaattttatgctcaaaacat

SEQ ID NO: 227943 - DNA, 536 bp, Homo sapiens
tgaaggtttgaggtccaggaactaatgtttcacttattgttcatttgtggcctcctgatgtgtcatctctgcttttactccacatagtttctttgttccccttattttcattaaacattctttcctgtttacttaaacctctgcagagagggcagcctgaatgttgaaattccacctcatcttgcagttcagtcacctcacaccaatttacttccttgcctaggaagcctcctgaatgctggcatcaaggtttgaggtccaggaactaatgtttcacttattgttcatttgtrgcctcctgatgtgtcatctctgcttttactccacatggtttctttgttccccttattttcattaaacattctttcctgtttacttaaacctctacagagagggcagcatctgcagcatctacaattgaaggaggtgatgaaccaggaaaacctaatgccttggatcttgtaggtcagaagtccacgcctggtccagtcctctctgcctggggtacagggataggaattttatgctcaaaacat

SEQ ID NO: 227944 - DNA, 548 bp, Homo sapiens
gggtgtaaaaagggaagagcgatgcaaaatgatattggagaactagacagggtccagatgatgtaggggcttcataaaccaggcagagtctggatttcattgcaaatgagataggaggccataggggtattataaacggggaggagagtgtgacacattattattattattttaaaagatcattgctgtgtgaagaagtgactgaagggagacaagaataggaggagggagacaaacctgggaggctcttacaataggcaagggcgagagcaaacagtgattaggactggagtgttgataatggaaatggaaaggattagatagattgggatctgtttgggagacaggtttgataggacagactgaatgcrgagtgtgaaaataagaaaataatcaagaataagccttagtttttttgtctggatgttggatgttggtgctacctacagaaatgggaaacctgggggaggaacaggtatgtgatagagaatcaacttttattttggccaggttaaacctgcagtgtctccaagatgtccaaacagaag

SEQ ID NO: 227945 - DNA, 532 bp, Homo sapiens
taaatggttggggtagggtggaataataggccagatatattaaaaataatgttttatttcagggtaaatgccaaaatgcataccccaccaaaaaaaaaaaactatcaagagtaggatgtctcttctactatttatctgttcattcactttatagtacatcttacaatttgtaattatatatttgtttgctcatttgttcactgacagccttcactaatgtatgttaagwtccaagagacagggacaatgtctacttggttccctgctgtatccccagtgtgactagataaaagaataaattatgcaaaggataggagaagacaagcctaaaaaaacaagctgtgtagagacttgggatttctcatagactgcaagctcaacatcagtcaaccatgctgggactatcaaaggtaaactagatgtctagaacatgggatgggaccatcttgtctggttatattcatggaattatcctcccacttctgtgggttccaaaagacaagggttatgtgttaggggctgacttgtgccc

SEQ ID NO: 227946 - DNA, 532 bp, Homo sapiens
taaatggttggggtagggtggaataataggccagatatattaaaaataatgttttatttcagggtaaatgccaaaatgcataccccaccaaaaaaaaaaaactatcaagagtaggatgtctcttctactatttatctgttcattcactttatagtacatcttacaatttgtaattatatatttgtttgctcatttgttcactgacagccttcactaatgtatgttaagttccaagagacagggacaatgtctacttggttccctgctgtatccccagtgtgactagataaaagaataaattatgcaaaggataggagaagacaagcctaaaaaaacaagctgtgtagagacttgggatttctcatagactgcaagctcaacatcagtcaaccatgctgggactatcaaaggtaaactagatgtctagaacatgggatgggaccatcttgyctggttatattcatggaattatcctcccacttctgtgggttccaaaagacaagggttatgtgttaggggctgacttgtgccc

SEQ ID NO: 227947 - DNA, 596 bp, Homo sapiens
aattttctcgtaagtggttggtttttacttgatgcaacattgctaaacattttgatgagattttataggaattctcagtgctataaatcaaacattgcctatactttatttatgtccatatatatgatatatatgggcatatatattataagcaatcaacagacatttccaacagctgactttaattgcaatatgctacgtgtcagcagcatttggaaaaatgcattttatcaaagataacttgtttaaagacatcttgaaaatgacaaaaaccatccatcaaatttcaaaagttgtgaatgtgggtaatattaatgggaactagtgttgactcctcttttccattaatcattctgygatgcttttagataattatttgacatgaggagcgtgaaagagatttggaggacaggtaattgacaatggttatgaagagatcaaaaccaaacaaaaaatctatctatgtgtgagtgtttgcacacatatactccttggtagaactaggaaacaggttagttttacagaattcaaaattacttttattccactatttaaagtgtaatcatggcatgttgagcagaaggtagtttagattc

SEQ ID NO: 227948 - DNA, 522 bp, Homo sapiens
gggtggggaaacagccaaaccatatcattctgaccctggcccctcccaaatctcatgtccttctcacattgcagaacacaattatgccttcctaacagtccctgaaagtctgaactcattttagcattatcccaaaaattcaagtccaaagtctcatctgagacaaggcaagtccctcccatttatgagcctgtaaaataaaacacaagttagttactttcaagatacaatgagggtacaggcattgsgtaaatgttctcattccatggggggtaaattggccaaaacaaataggctgcaggccccatgcaagtccaaaacctgacagggcactcattaaatcttaaagatccaaaataatctcctttgaatccatgtctcacatccagggcacgctgatgcaagaagcagtctcccaaggcattgggcagctccacccctgtggctctgtaggttacagccccatggcagctttcatgggctggcattgaatgcctgcagcttttccaggcacatggtgca

SEQ ID NO: 227949 - DNA, 572 bp, Homo sapiens
cctggaactctccacttaattgatatataactgcttgcaaaaaagttatttgactctcttgtgtatttctcatgcagttttctcttcctggattgcccttgtcacctattttttctggggaaaagaattatctcatcaagaagacttgcacatatacacacgatcagtactaaagtctaatactgaagaataaactcagctctagggcccaacagtcttggtttattcayagtgatagtaagctgtgtggcactcctttaagttttctatactctctgcatctcaattttctattctgttaatatgaatgaaaagaacatcagcttcatgatataatatgcataaatgataattccttatatgttaattattgttattaaatgtgactccttcctcctttgtgtcccctccataccttctttcacagcatctgcaatatttccccacattatttactcagcctgcaagacagtagatgctccaaggacaggactcctaactctgtatctcatcagaaagacatgttcaattaacgtttgttaaagaatggagtacattagttaacagtgaaa

SEQ ID NO: 227950 - DNA, 597 bp, Homo sapiens
agtgtctcataattaagtagttcagcttttttaaatttccaaaaaaacattaacagaattccatctggaaacttaaaattatactmaaacatctctaaatttctcacagagaaaaataaacatcacaaaatgaaagcaggtcataaattattcaacacaatggaaagcatttatggtctaacaacaaagaaaaaggactgtgatttaacccctctgattacagattccaggcaactattacaatctctaaaggccaggaaatcctagggttccttgcaagtaatttataagtcattgtgtctatttcaaactgcagcacaaatgaagagaaaaaagaaccttcagtaaaatggcaataataaagtgacacactttccaattaattttaggtatccaagggtaccctgatcatgactaaacggtaaaatttcaaatgaatcaccacagcaaaatgcagaatgttaaattacatgaaatgctttacaatattaagtagttatttagctaactctagaatttctaaaagaacatccaaaaatgtattataaaaataattttctatttccaaacgttttatataatgttacacgtttatat

SEQ ID NO: 227951 - DNA, 597 bp, Homo sapiens
agtgtctcataattaagtagttcagcttttttaaatttccaaaaaaacattaacagaattccatctggaaacttaaaattatactcaaacatctctaaatttctcacagagaaaaataaacatcacaaaatgaaagcaggtcataaattattcaacacaatggaaagcatttatggtctaacaacaaagaaaaaggactgtgatttaacccctctgattacagattccaggcaactattacaatctctaaaggccaggaaatcctagggttccttgcaagtaatttataagtcattgtgtctatttcaaactgcagcacaaatgaagagaaaaaagaaccttcagtaaaatggcaataataaagtgacacactttccaattaattttaggtatccaagggtaccctgatcatgactaaacggtaaaatttcaaatgaatcaccacagcaaaatgcagaatgttaaattacatgaawtgctttacaatattaagtagttatttagctaactctagaatttctaaaagaacatccaaaaatgtattataaaaataattttctatttccaaacgttttatataatgttacacgtttatat

SEQ ID NO: 227952 - DNA, 555 bp, Homo sapiens
ttcctatactgaaccatcctttcatccctggaatcaaacaattagtcatgatttattgtttttttatgtgctgttggattcaatacactagtattttgttgaggatttttgcaccagtgttcatcagaaatattggtatgtagaggttgtattgtgggatcctgactttgtagaatgagttagggaagtttccctcctcaatttttggaacaatttcaggagaattggtacagttcctttttataagtttggtagaatttgactgtgaatctatcragtcctatgcttttttttgttgggaaatttttttattactaattcactttcactattcattgttggtatgttcaggatttcaatttatacctggttcaatcttgggaggttgtatgtttccagaaatttatctattctctctaggttttctagtttgtgagtgtgtagttcttcatagcagtatctgttttttgttttgttttgttttttcctgtgggcttaattgtaatgtctcctttttcacttctgattatttttatttggatctcctctcttctt

SEQ ID NO: 227953 - DNA, 555 bp, Homo sapiens
ttcctatactgaaccatcctttcatccctggaatcaaacaattagtcatgatttattgtttttttatgtgctgttggattcaatacactagtattttgttgaggatttttgcaccagtgttcatcagaaatattggtatgtagaggttgtattgtgggatcctgactttgtagaatgagttagggaagtttccctcctcaatttttggaacaatttcaggagaattggtacagttcctttttataagtttggtagaatttgactgtgaatctatcaagtcctatgcttttttttgttgggaaatttttttattactaattcrctttcactattcattgttggtatgttcaggatttcaatttatacctggttcaatcttgggaggttgtatgtttccagaaatttatctattctctctaggttttctagtttgtgagtgtgtagttcttcatagcagtatctgttttttgttttgttttgttttttcctgtgggcttaattgtaatgtctcctttttcacttctgattatttttatttggatctcctctcttctt

SEQ ID NO: 227954 - DNA, 585 bp, Homo sapiens
aagatttggaagcaatataaatgtccatcaacagatgcgtggataaagaaaatgtggtacgtatacacaatggaatactattcagccataataaagaatgagattctgccatttgcaacaacatggatggaaatgtaggttattaagtgtaaagtgaaataagccaggcacagaaagacaaacttcacatgttctcacttatttgtggagctaaaaattaaaacaattgaactcatggagatagagagtaagaggatgattaccagaggcttggaaaggtagttggagggattggggagttggggggaagtataatggttaatgtgtacaaaaaatagaaagaacraataagacctagtatttgctagcacaacagagtgactatagttaaaaataatttaattgtacattttaaaaactgaaagagtataattagattgtttgtaatacaaaggataaatgcttgacgtgatggataccccagttacactgaggtgattattacacattgcatacctgcattaaaatatctcatgtaacccataagtatatataactactatgtacccacaaaaattataaatt

SEQ ID NO: 227955 - DNA, 585 bp, Homo sapiens
aagatttggaagcaatataaatgtccatcaacagatgcgtggataaagaaaatgtggtacgtatacacaatggaatactattcagccataataaagaatgagattctgccatttgcaacaacatggatggaaatgtaggttattaagtgtaaagtgaaataagccaggcacagaaagacaaacttcacatgttctcacttatttgtggagctaaaaattaaaacaattgaactcatggagatagagagtaagaggatgattaccagaggcttggaaaggtagttggagggattggggagttggggggaagtataatggttaatgtgtacaaaaaatagaaagaacaaataagacctagtatttgctagcacaacagagtgactatagttaaaaataatttaattgtacattttaaaaactgaaagagtataattagattgtttgtaatacaaaggataaatgcttgacgtgatggataccccarttacactgaggtgattattacacattgcatacctgcattaaaatatctcatgtaacccataagtatatataactactatgtacccacaaaaattataaatt

SEQ ID NO: 227956 - DNA, 437 bp, Homo sapiens
ttctgtaggcatcacataaacttgctactatctatttttgatactcattttagtctttttggctaacttgctgattctgtaaattgagacttacagataatgatccctgaataaatgaaggggccactttacttttaataatgaaaaatcctgttacctgttttcagatagctataactgtcattagaagactcagataatgttggcaaatctattcagatcagtcaaaaaatagtatttcaggacaatgtacaaatagaagacattctcagtrcttattaaataaaggaagacttttggaaagtttttttttctttctttttgatttgaaaggacataaaaggaaggtcttattacattttttaaaaaaacattaagagcacacgaacatttcccctaaatggaatgatgaataattcaacaacaaaggagagaag

SEQ ID NO: 227957 - DNA, 437 bp, Homo sapiens
ttctgtaggcatcacataaacttgctactatctatttttgatactcattttagtctttttggctaacttgctgattctgtaaattgagacttacagataatgatccctgaataaatgaaggggccactttacttttaataatgaaaaatcctgttacctgttttcagatagctataactgtcattagaagactcagataatgttggcaaatctattcagatcagtcaaaaaatagtatttcaggacaatgtacaaatagaagacattctcagtgcttattaaataaaggaagacttttggaaagtttttttttctttctttttgatttgaaaggacataaaaggaaggwcttattacattttttaaaaaaacattaagagcacacgaacatttcccctaaatggaatgatgaataattcaacaacaaaggagagaag

SEQ ID NO: 227958 - DNA, 553 bp, Homo sapiens
taggtttccatagttttgggcagctctgcctctgtgactttgcagggtaccacctccctttcagctgccttcatgggctggcattgagtgtctgtggcttttccaggtgcacagtgcaaggtgtcagtggatataccattctggggtctggaggatggtggtcctcttctcacaactccattaggtggtaccccagtagggactctatgctggggcttctaccccacattttccttctgcactgccatagcagaggttctccatgaggactccgcctttgtaaaacacttctgcctgtacatctaggcatttccatataccctctaaaatctagatggaggttcccaaacctcagttcttgacttctatgcacctgcaggctcaacacaacctggaagctgccaaggctttgggcttgcaccctctgaagccatggcccgagctttagcttggccccttttagtcacagctggagcagctgggacacagggcaccaagtctctagctttgtgcacayagcacaaagtccctgggcctggcccatgaaaccatt

SEQ ID NO: 227959 - DNA, 556 bp, Homo sapiens
cccctttaagaagggcaggattttgacgggcagattagagagggagcggttgttgaagaaagcatttgaggcatcagaaagggcatggacaaagtgaattcagtgtagttaaaaatagcaggggctggtacgtctgagacgcaagtgtgagtgcaagtcctttcacttactaatgatcacatacatggtccttcatctccacatctgtaaaatgtgggttgarctagatcatcttcaatgttgccttaagttcttaaattctgtgatgtttaaaatacaggggtgagaagtcacaggaaataattgaagaacagcaaggagaacagtttatctgaacacttcattatacacaaataatgagaagtaaatttaggagaatttattagggccatggaatatgttgaatgctgggttacgtatttgagcaatatatggtagtccttggagattcagtgaagatattccacacaatccaaaatttgtttcagatcaatctggttacagtttgtaggttggaatgttgaaaaagcatgggatgttggctccttcccctaat

SEQ ID NO: 227960 - DNA, 566 bp, Homo sapiens
ccccttccattctataaatattaatatattatcgatgttttcaamaatgaagaaagatcttaatgatgaaagagatgtatatattatcaattcaccttcaagcaagtaacatatttaactattgtcaatattatataggtttatttttaaaattgatcatatttgcatctagataagggaaaaatgttcatctttatctctaatggaatgttggcattttcataactatgaaaaatatttaaatttatgactagatctttactcacaagttctcaatgtttaatgcttttatgtgaactcattttcctaaattcaacacaaaactttcataagaacaaataattttatgcaagcaatttattctgttttgctgaataatagatttcagtacttgcaacagagagaatctagaaatactgagggaagagtgaagaaagatcatctcagaaacttggaagttcacttgtagaattcaactccagagggcttggtaattactgtggggaattttcatcatttaacaagactgtgagcaacaacctcaaaaaatcattttttaaagagtt

SEQ ID NO: 227961 - DNA, 583 bp, Homo sapiens
acttgttattgatctgttcaggtttcagatttctttatggttcaatcttggtaggttgtatgttctaggaatttatccatttcttctagatttttccaatttattggcatatagctgctcatagtagccactaatgatcctttgaatttctgcagtatcarttgtaatgtctcctttttcgcctctgattttatttatttgggtcttctctcttttttttttcttaacctaactaaaggttaggcaatgtttttaacttttttaaaaaaaccactttttttcattcatcttttgtattgttttcttcctttcaatttcacttatttctattcactatcatttctttcttctgctaattttggttttggtttcctagttacttgagatgcattgttaggttgtttatttgaagtttttcttctttttgatgtaggtgcttatagttataaaattccctcttagtactgcttttgctgtatcctataggttttggtcttgtgttttcactaccatttgtttcaagaaaattgtaaaatttttcctcagttttttgtttggctcacagttcattcagaagcacatt

SEQ ID NO: 227962 - DNA, 583 bp, Homo sapiens
acttgttattgatctgttcaggtttcagatttctttatggttcaatcttggtaggttgtatgttctaggaatttatccatttcttctagatttttccaatttattggcatatagctgctcatagtagccactaatgatcctttgaatttctgcagtatcaattgtaatgtctcctttttcgcctctgattttatttatttgggtcttctctcttttttttttcttaacctaactaaaggttaggcaatgtttttaactttttwaaaaaaaccactttttttcattcatcttttgtattgttttcttcctttcaatttcacttatttctattcactatcatttctttcttctgctaattttggttttggtttcctagttacttgagatgcattgttaggttgtttatttgaagtttttcttctttttgatgtaggtgcttatagttataaaattccctcttagtactgcttttgctgtatcctataggttttggtcttgtgttttcactaccatttgtttcaagaaaattgtaaaatttttcctcagttttttgtttggctcacagttcattcagaagcacatt

SEQ ID NO: 227963 - DNA, 583 bp, Homo sapiens
acttgttattgatctgttcaggtttcagatttctttatggttcaatcttggtaggttgtatgttctaggaatttatccatttcttctagatttttccaatttattggcatatagctgctcatagtagccactaatgatcctttgaatttctgcagtatcaattgtaatgtctcctttttcgcctctgattttatttatttgggtcttctctcttttttttttcttaacctaactaaaggttaggcaatgtttttaacttttttaaaaaaaccactttttttcattcatcttttgtattgttttcttcctttcaatttcayttatttctattcactatcatttctttcttctgctaattttggttttggtttcctagttacttgagatgcattgttaggttgtttatttgaagtttttcttctttttgatgtaggtgcttatagttataaaattccctcttagtactgcttttgctgtatcctataggttttggtcttgtgttttcactaccatttgtttcaagaaaattgtaaaatttttcctcagttttttgtttggctcacagttcattcagaagcacatt

SEQ ID NO: 227964 - DNA, 583 bp, Homo sapiens
acttgttattgatctgttcaggtttcagatttctttatggttcaatcttggtaggttgtatgttctaggaatttatccatttcttctagatttttccaatttattggcatatagctgctcatagtagccactaatgatcctttgaatttctgcagtatcaattgtaatgtctcctttttcgcctctgattttatttatttgggtcttctctcttttttttttcttaacctaactaaaggttaggcaatgtttttaacttttttaaaaaaaccactttttttcattcatcttttgtattgttttcttcctttcaatttcacttatttctattcactatcatttctttcktctgctaattttggttttggtttcctagttacttgagatgcattgttaggttgtttatttgaagtttttcttctttttgatgtaggtgcttatagttataaaattccctcttagtactgcttttgctgtatcctataggttttggtcttgtgttttcactaccatttgtttcaagaaaattgtaaaatttttcctcagttttttgtttggctcacagttcattcagaagcacatt

SEQ ID NO: 227965 - DNA, 431 bp, Homo sapiens
tcattaacagaactaagaatacaaaccatctgatcatttcaatagatgttgagaaagcattcaataaaattcaatgttgctttgtgataaccctcaataaacttgatatagaggaaagatacacatacatatcaatatgataaatgtcatatatggcaaatccacagataaaatcatactgaatggagataaattaaaaggctttcctctaagatctgaaagaagacaaggatgctcactttcaccackgttattcaacaaaacactggaagtccttgccagaagaattacgaagaaataaaaggcatccaaattaaaaaggagtaagtaaaaatagccttgtttacagataacatgatcttagaactaaagactccaccaaaagaaaactagttgaattgataagcaaattcagtaaagtagcagaatac

SEQ ID NO: 227966 - DNA, 412 bp, Homo sapiens
tttgccaactatcaattcatcaaggaattaataaccagaatatatgagaaacacaactcaatggcaaaaaaaatgtaattagattcaaaaatgagcaaaatatctgaatacagcttgcttttccaagatggcagaagttttttagcgtctctcagacacttggaaatggcaagatagtacataaagatcaactctctgatctttaattcaatagggaaaacaggaactcactaaaattgtgaaggaaacctcagatcyctgggaagagaatgcaggcaaaccgtccccgtgacagcatcgaactggtgtgagtgaaggccccatatgtgagagaggcagagagcctccctctgtgaccgactcacctttccactggggatctgagcaacccaggctgaggaagagcactttg

SEQ ID NO: 227967 - DNA, 643 bp, Homo sapiens
taaacatattaccccattcatcatcatgctgaaagaggatatgacaaccatgtctccacacttgtaaatgagaaaatgaaggaatgacaaagggaattgactgacaaaggacacagtggagtgggtgacaaggcagggaaaagaacctgggtcttggaaatctttattatttcaaggatataagaagacccataaatcataaataataagataaaacctggctgctgattgcttagagtgtagttaagtcaaagatgggagcatgtgggctttcaaatatgtgtgataaacctcttgtgcctccagatgctggcaggatatcctcttgggtttcttctcctcttggcccccaccactgtacrtcacttctcatactatgataaattttctgatatctagttatttgctacaaattttcaactctaactttagggttttattatttttttgtcttctcgtatactccaaatcaaatcatatgcctatttactttcctttccaaagcctacttattggtgctgattaaattcctttcagtttcttttaaattaaaaaaaaaaaaaaagaaatgtcagctagtctggaagactgcattttctcaatatagacattggtgaaactgaattaaatgtaatatataatt

SEQ ID NO: 227968 - DNA, 625 bp, Homo sapiens
attcctccaaacattattcttatttgataaattttatttcataataattcatgaaaaatattaatagaacagagacagaatatcctgtagcattccattataggtattctgtaagattgaaactaagtaattratcaacaacctttgggtatttattattctttaacaaatcatggctctacatatcaatgcatcttttgaacccataatttgccatctacaatgatatcttagaagactttgtaaaatattagctgaagtcaaggcagcttgacttaccaatttaagataatgaaatgttcatcaaaatcttctctaaaatatactacatctgtttaatcttttttaaaatgacaggaactgaaaataagctataagtttaaattgagggtctaatttttaaaagtttccattgttgcctattatctattgcctattgctgtaccacaaatgaccccaaagttttagaggtttttaaactaattatttcattatatataccaactttggactctggaattagagcagaagtttgctggtggtccttctgttccatgtggcgtggagagagttcattccatgaaatttagcttgtctagaggtcattaaataataaggtcattaa

SEQ ID NO: 227969 - DNA, 611 bp, Homo sapiens
agccccacgtcattaacactgagattgagaatctctgctttagagctaagagagcctctttagaatgagcagagaaatgaaaaaaaaatgaaactaggtgtaaagatggaagttttcaggaaaatcgccctttaaactactacatttacaaagtgaaccattagggaggataggcagagacaatgaattgctgtcagatattaaatagccactagcaatggaaattcaaagtcarttggagaggatagccagatactaagtaaaatcaaatttgccttgaatataaaataatcacatactgtaagatagggaagtttatcatgacatcttgtcagggaaaaatacagtgctttgaaattttaatttgaagagagacctgtttttgtcatagagtttagaagcacagcccttttgccctcacaaaagcctaagtagaagcatgattttgtcttactatatatctttttctttaaaaaaattattatactttaagatctgggatacgtacgtagaacatgcaagtttgttacgtaggtatacacgtgtcgtagtggtttgctgcacccatcaacccgtcatttacattaggtatttctcctaatgctatccct

SEQ ID NO: 227970 - DNA, 611 bp, Homo sapiens
agccccacgtcattaacactgagattgagaatctctgctttagagctaagagagcctctttagaatgagcagagaaatgaaaaaaaaatgaaactaggtgtaaagatggaagttttcaggaaaatcgccctttaaactactacatttacaaagtgaaccattagggaggataggcagagacaatgaattgctgtcagatattaaatagccactagcaatggaaattcaaagtcaattggagaggatagccagatactaagtaaaatcaaatttgccttgaatataaaataatcacatactgtaagatagggaagtttatcatgacatcttgtcagggaaaaatacagtgctttgaaattttaatttgaagagagacctgtttttgtcatagagtttagaagcacagcccttttrccctcacaaaagcctaagtagaagcatgattttgtcttactatatatctttttctttaaaaaaattattatactttaagatctgggatacgtacgtagaacatgcaagtttgttacgtaggtatacacgtgtcgtagtggtttgctgcacccatcaacccgtcatttacattaggtatttctcctaatgctatccct

SEQ ID NO: 227971 - DNA, 611 bp, Homo sapiens
agccccacgtcattaacactgagattgagaatctctgctttagagctaagagagcctctttagaatgagcagagaaatgaaaaaaaaatgaaactaggtgtaaagatggaagttttcaggaaaatcgccctttaaactactacatttacaaagtgaaccattagggaggataggcagagacaatgaattgctgtcagatattaaatagccactagcaatggaaattcaaagtcaattggagaggatagccagatactaagtaaaatcaaatttgccttgaatataaaataatcacatactgtaagatagggaagtttatcatgacatcttgtcagggaaaaatacagtgctttgaaattttaatttgaagagagacctgtttttgtcatagagtttagaagcacagcccttttgccctcacaaaagcctaagtagaagcatgattttrtcttactatatatctttttctttaaaaaaattattatactttaagatctgggatacgtacgtagaacatgcaagtttgttacgtaggtatacacgtgtcgtagtggtttgctgcacccatcaacccgtcatttacattaggtatttctcctaatgctatccct

SEQ ID NO: 227972 - DNA, 488 bp, Homo sapiens
gttggcaatgtcctgagtgcaaagtgtgccagaactgcaagtaagttttcatttcaattcaaagctgtgtattgggtttaagagggaccctattrctaggcgctaaaagtttgtgtaatataatagaggttgttcatattttggctgtattcattcagagtgacttcatcatacttaaaaaaattactggatattaacgtttatattattttgaaagaagtctaaacaaaactgattttaatcatttaaattgctctgatcttctaaagagctaatttaaatttaccaacagtttaaaaaataagcgatattaacaatttaaaacaagcatgagaagaataaagtagcttgtcttcaggggcaccggggaggggatgtgataggatttaaacctctcactacagacgtagaagaattagagttgagtcaaaacgtcagtcatgtgtttgaatttccattccaggaaggacactttctactattatttt

SEQ ID NO: 227973 - DNA, 488 bp, Homo sapiens
gttggcaatgtcctgagtgcaaagtgtgccagaactgcaagtaagttttcatttcaattcaaagctgtgtattgggtttaagagggaccctattactaggcgctaaaagtttgtgtaatataataraggttgttcatattttggctgtattcattcagagtgacttcatcatacttaaaaaaattactggatattaacgtttatattattttgaaagaagtctaaacaaaactgattttaatcatttaaattgctctgatcttctaaagagctaatttaaatttaccaacagtttaaaaaataagcgatattaacaatttaaaacaagcatgagaagaataaagtagcttgtcttcaggggcaccggggaggggatgtgataggatttaaacctctcactacagacgtagaagaattagagttgagtcaaaacgtcagtcatgtgtttgaatttccattccaggaaggacactttctactattatttt

SEQ ID NO: 227974 - DNA, 458 bp, Homo sapiens
agtggtaaaaccagcattctaaccagctctgtcttgttccaaagcatgtctgtttttctggaactagatctcccttagacagtatcagtcagtgtaaaccagaaaagcagaaccagctacaaatgtatgctggccaaaccaaacacttctaggagccaaactgcaggccatccatttgcaacctggctttgagtaattgacattgttttcatacagtcagtgctgtgggaatgctatagtattatttgccaatttggggacttstcttttgcaaaaagaaagtcattattcagtatttacaatgttgctgtttaaaggacatttttctaatacccatgagagagcagacactattgtaagctatgtatgtaagttttctcatttaatccttctaacacctctatgaggtaagctgtactgttaggttcagcttactgataaagatacagaggagcaaa

SEQ ID NO: 227975 - DNA, 493 bp, Homo sapiens
ataaagatgtattttaccattataaaatatttttctatgtagcatcacattaagaagagtatttcacaatctaagattataaacacatcctgttgaggtggccacaatatttaaaagttattttttaatatatgcaatgtgttattttcatggtgctaagtagaaatcaattttaatttatattttccaagaagcttcaaatatattttatgaataatttaractatatgataaaagaaatatttctttactagattcaattagcccaaatttacatgtagcaaggcttattggaaatctgctttatgtgagttttaatttcttattctggatacacttgaaatctgtggttgtttcttaatgcccgagtatggtaaagtaaactgaacttaaataagcttaagagaagcatgataaaggttaatgtgtttggaattattgaaagtcatagaatcacattgtaaattttgtgggaaacatgcaaaatgaatgg

SEQ ID NO: 227976 - DNA, 518 bp, Homo sapiens
ttggggtacagacagatttgggtgacccagaccaaatctgatcttcyagaaccaacaaatcccacagagacaggacaaattggcctgtttggggccagcatcctgcgggatcccagacgcttatgttatgtgtattttaacacaattttaaaaattggaaaataaaacaaaacacctagagccatgatctctaaggccatgtgtgttctgcacctattacttctcactcactccattccagccccactggcctttttctggctcctcatacttgccaagcactccctgcctcagggcctttgcagtgtctgttgccctcacgtggaatgctcttcccacagatctgtctatgactctctctctgtcacttgctctgctctaatgtctctttttcagtgaggcctttcctgatcaccctacagaaaagcacccagcaatattctctattccttttccttgccttgtcttggtagcacttgctccttgctgacatatagaaagaatatgtgtttatgcaa

SEQ ID NO: 227977 - DNA, 518 bp, Homo sapiens
ttggggtacagacagatttgggtgacccagaccaaatctgatcttccagaaccaacaaatcccacagagacaggacaaattgrcctgtttggggccagcatcctgcgggatcccagacgcttatgttatgtgtattttaacacaattttaaaaattggaaaataaaacaaaacacctagagccatgatctctaaggccatgtgtgttctgcacctattacttctcactcactccattccagccccactggcctttttctggctcctcatacttgccaagcactccctgcctcagggcctttgcagtgtctgttgccctcacgtggaatgctcttcccacagatctgtctatgactctctctctgtcacttgctctgctctaatgtctctttttcagtgaggcctttcctgatcaccctacagaaaagcacccagcaatattctctattccttttccttgccttgtcttggtagcacttgctccttgctgacatatagaaagaatatgtgtttatgcaa

SEQ ID NO: 227978 - DNA, 591 bp, Homo sapiens
gaattcatcctttagagttaaaacataaaaatgttacaaatgggatatttgtttttctatattctttcctrtagatgaacttgaaggtaagaaaatgttgattttattcacttaataggacaatagtggttgaaacaatgcacaattttcctgttttacagcctatttgtttatgttaaatgtatagtaactaaatgtatctgtaagatatattactcaacatgtgcttaccaccacctatttgaggagggccagagtctatgacatggcacaaacccaccacccacagcccctaacgtggcccttcccttttagggccaatctccacgccaccctccacaaaagcacatgatatagaagtcacatcaccttttcgctttttataaaccgagttgaattttaaagatatatacctctgtagggagtggggacgcttagtttggggtaggagtatctaaaattaggagaattattcagacttgaagcctagaaagaaaatgtatgctgggtgtctgatcagtgtgtgggccttgcctgacctgaagaaatgagtccagtgggctctgagctgacttccagccccactcactg

SEQ ID NO: 227979 - DNA, 414 bp, Homo sapiens
ttggtttccttaccctaaaaatgagagacagtggagcccattttacaagagtttgtttcctaagggtcaaataaatgtatgtgtttaaagcttatagaagctttcgtgcttgtatgcttacaggtgcaacctcatctattaagctgaatttattttygtttaagaggaggctatttttatgccaatttggggacttttttttggatcgcttactgagactgaaacatcattcactcccttcccccagctttaatgaagtgtaattgataaatgaaaattttgtatattttagtgttctcatcattcacttttgttatctacttacatcagatagtacagatgggaggggaggtgcgatctgcttttgtcaatatgaatgaattctctttgacttctgagagggggcacaccatt

SEQ ID NO: 227980 - DNA, 414 bp, Homo sapiens
ttggtttccttaccctaaaaatgagagacagtggagcccattttacaagagtttgtttcctaagggtcaaataaatgtatgtgtttaaagcttatagaagctttcgtgcttgtatgcttacaggtgcaacctcatctattaagctgaatttattttcgtttaagaggaggctatttttatgccaatttggggacttttttttggatcgcttactgagactgaaacatcattcactcccttcccccagctttaatgaagtgtaattgataaatgaaaattttgtatattttagtgttctcatcattcacttttgttatctacttacatcagatagtacagatgggaggggaggtgcgatctgcttttgtcratatgaatgaattctctttgacttctgagagggggcacaccatt

SEQ ID NO: 227981 - DNA, 474 bp, Homo sapiens
cctcctggtggatgggggtgtccggagcaagggcggggtttgggaagcccgggctggctcctggatttgcccactgcccttccaccaagtttatggagaaaacctcccyggacgcacctgcagccaggcagccctgaagcccaagcagaaggcagaggagcctgagggcctgggagaccatgatgaaatctctgcagtgctgcccctgcctgttgacattccccatgggactgacgggcaaagttctctgcctccaagggtgacagagggatgggggaggggaggacacaggcgtcctctgagcaccccagctgagagctgcacctggccggccagtggccatgcatcccctgctgcccagccactgagctcaagtgggggggacaggagaaaggtcaggtgaccccagctgtgctgcagagcggacggttttgttgccagcgtgcaggtgttaaggtgtgtgtggcaccaaca

SEQ ID NO: 227982 - DNA, 474 bp, Homo sapiens
cctcctggtggatgggggtgtccggagcaagggcggggtttgggaagcccgggctggctcctggatttgcccactgcccttccaccaagtttatggagaaaacctccctggacgcacctgcagccaggcagccctgaagcccaagcagaaggcagaggagcctgagggcctgggagaccatgatgaaatctctgcagtgctgcccctgcctgttgacattccccatgggactgacgggcaaagttctctgcctccaagggtgacagagggatgggggaggggaggacacaggcgtcctctgarcaccccagctgagagctgcacctggccggccagtggccatgcatcccctgctgcccagccactgagctcaagtgggggggacaggagaaaggtcaggtgaccccagctgtgctgcagagcggacggttttgttgccagcgtgcaggtgttaaggtgtgtgtggcaccaaca

SEQ ID NO: 227983 - DNA, 516 bp, Homo sapiens
gtcaaactaagaattcccttccaggtatctcctatttctggtctaacgagctctggattacatcaagtttctcctctctttacattttctcctatgttattttcatattacggtcatgatatagcatataatgtaaaagagaaaatgtacatatatatataattaaaattmactgttcccagcagcagttgcatataccttgtgactagtcaataaatattaactagttgtttatggagttttattttctcaataaacagtgaattttcatatcttcattagaatttatgcttctgttgatataaaatctgtgactggcaaaataaaatggtctaaggtcaaagggtccccataggttgagcttgtaccaatggtctcccgagttattatgactcatgaatacctatcttagccctcattggcctctactattcatttgtctgggatccactttagaatgggaattctaaggctgggctaggtgttatttaccatcgcacccactgcacctgccaa

SEQ ID NO: 227984 - DNA, 599 bp, Homo sapiens
ggcagaaaccaaccccaaggagccaagaggtgccctaaggataactgagaaaggctccaaatgaagcctccaaataartggactgaaaggtaagatggcacaccgggacaaggggaagcacagaaaaaggaaaaaggcagacaagaggctctctacagtctacatcacacagcaaaagcttttcccattcaactcagaaatgtcttgttaacactacatagataaacatgttctgtgctggattaggtacaggattggattaagtactatataacatccttttcctattttttttcatgctctcagagacatttcctattaaaaacttgcttaaaatgaatgttacagcatggtggtgtgaatctatatcctttcggaacccaaggagtgaaaagctttggtcattagtcagtcgagattatagcacttgtcctactgtgggaagcaggtatgctgtttccttccttaaacccagaaatacacacatgtgtatgcaattgtgtatgtttgtgtagttatctgctaatctctttgtttctactctccctcaacaacagtatgataaatcagtttggtcagcccagccaagctgtgggtaa

SEQ ID NO: 227985 - DNA, 562 bp, Homo sapiens
ataactattatagagaattttaacaaaatgttaagacttacaactgaattatatatttaagcatattatctaacatgaaaatatgatttytatgtaatttgtcagggatatgtgaatgtagtcacgtatatgtataattgttatatgtatatacatatatacataatatgtatacacatgatatacataaagtacataatattttgcataaaatacataatatgatatacataaaatgatttacacaatattgtctgtatatataaatatacacatttcatatatacatgtatgtatatacatattgtgaattaattatgatttacacaatattttctatgtgtacaaatatcataaaatgaggcaccattttggccaaacattttaactatccttttgtaagccagtcactgttctatacactgtagtgataatcccaggttctgtgtttgattttcttctagcagaagcccccgcttttaggaaaatataccaatcccagaggtttgagcatgctctccaggctcggttatctgcattaactacttaatattaaggggac

SEQ ID NO: 227986 - DNA, 613 bp, Homo sapiens
tgtcaaagagggaaattagttttgttgggcatggcttgtttttgagcagtccatgttccctgtcactttgtcacactctgggtgcttgcaaattgattgtggaataaattgctcctgactcttttcaagaacaggccttaaccttttaagtaattaattgccagatatttacttcattttccttctgtaccatcatctggggtgactgtcctttccccagtttcctgaatctgtgcccatccaccataaatctgcaaattcacttaaatgaatacaaggtaatttgatgttgcatttgatgtggcattaagtgctacacaattgttgacttcaaagtcaaatacataaatcactgctcatggaaagaggaaacatttcttctgaaatggtttgaatacgaccatgcagtcaggttcagatatgtgaagataaaacaacattaagcaaactggttatcagtttcttatcaaaactaygtaagtaagaaagaaaatatacatatgtatctacataagatgaataaaaacttaaagcaaatcctggcttttgttacatatcctgctgtgatattttgcagatccaggcatcagctaatgttttccccaagagcaaa

SEQ ID NO: 227987 - DNA, 570 bp, Homo sapiens
gctattgaatcttgaatgctttccaaatcgtctgaagctgtttctacaacaaagttctttttctttcttaagacaaaattagacatgtcctgtgagtgtcagctgagcctaaacagagattcagaattaaattgtgcctgattaaaacactggtgggccaccagcctgagacaatakgcgtagggaaggaggggttgggggagctttctttaagaacaaagttttttggatgggtgtctgagaaaagcaaggaactcagagaccagtttagtgtctatgccgagtccttccccatggaagagatctgaggtcaaggaagagcaaggaatgtaaattaaagttgagcagttcttatttacttgaaacttctctggggccaggtacaaaagtgggcttctaagctatacgttccaactaaacacacgcagtagaccccagtgcagtaatgaccaagggaatgcaactccagttactacctagaaagtatagagtactgggaacaccagcaaacagaatccaggcagccaagcagcattctcaagagtgagtggacagtggtggcagctgtca

SEQ ID NO: 227988 - DNA, 570 bp, Homo sapiens
gctattgaatcttgaatgctttccaaatcgtctgaagctgtttctacaacaaagttctttttctttcttaagacaaaattagacatgtcctgtgagtgtcagctgagcctaaacagagattcagaattaaattgtgcctgattaaaacactggtgggccaccagcctgagacaatatgcrtagggaaggaggggttgggggagctttctttaagaacaaagttttttggatgggtgtctgagaaaagcaaggaactcagagaccagtttagtgtctatgccgagtccttccccatggaagagatctgaggtcaaggaagagcaaggaatgtaaattaaagttgagcagttcttatttacttgaaacttctctggggccaggtacaaaagtgggcttctaagctatacgttccaactaaacacacgcagtagaccccagtgcagtaatgaccaagggaatgcaactccagttactacctagaaagtatagagtactgggaacaccagcaaacagaatccaggcagccaagcagcattctcaagagtgagtggacagtggtggcagctgtca

SEQ ID NO: 227989 - DNA, 388 bp, Homo sapiens
gtattttaaattataccctagagtcagagccagacatccacaattcataccatggcccttaaaatcctaagatctgaaacaagagcctttcattatgcaaattgaatttaaagaaagtcttaactgaaatgaagaaaattaacccactaatcacattttgtaaacttctcttcttcctgattcacagtattagaaatggaaatgcgtatggtcactgatcctgggaactctatcctttatttgcagggcaaggaaggtagccatctgacttggcagagaatscaatgtgtttagatctgaggagtggaaagaagggagaggcgtatttgccaggtagttacaagactgatagtttttcagagtcgcaggatctaaagtaaatcaatac

SEQ ID NO: 227990 - DNA, 388 bp, Homo sapiens
gtattttaaattataccctagagtcagagccagacatccacaattcataccatggcccttaaaatcctaagatctgaaacaagagcctttcattatgcaaattgaatttaaagaaagtcttaactgaaatgaagaaaattaacccactaatcacattttgtaaacttctcttcttcctgattcacagtattagaaatggaaatgcgtatggtcactgatcctgggaactctatcctttatttgcagggcaaggaaggtagccatctgacttggcagagaatgcaatgtgtttagatctgaggagtsgaaagaagggagaggcgtatttgccaggtagttacaagactgatagtttttcagagtcgcaggatctaaagtaaatcaatac

SEQ ID NO: 227991 - DNA, 572 bp, Homo sapiens
tacttgttgtcatgtctttttttattatcacaatcataatgggtaggaaaaggtatcttatactggttttgatatacattttttactgrataagataacatatttcatattccctatttctatatcttctttcaagaaatgtctattcaagtcatttgcccatttttcaatagagttgtcttttcattgttgtggcattagaagagttctttattatttgtatataattcccttatcaaagacataatttaaaaatattttcttccattccatttcccccttaggactcataattttgctgtggcttaaagattataaaacagattaggaaatgaaaaagtaagaagctgctctaggacgggttaaacaatgtcagcatgaatgcaagaatactaaactcaaaatataatttccttccctcacacaatagtcaagctctggagcctttgtttcacagttaatgaaaaataacatgttttcagactgtggatacatgaatactaaaaagtgatgataaaagtttagtctggagtagagaaaactcttaattgacaaacttatattaaaaaatc

SEQ ID NO: 227992 - DNA, 476 bp, Homo sapiens
cttgatttcattaaatattcactgtataggtactgctttatgtacatagcagtaccttaggcatagggacactgcagtgaagaatagatatgctccttcttctgtaggactgtgtagtaaaatgaaggaccctgaaacatttataacattttataactacatattacatgaygttataatctctaccttttattttttggtattaactaaattctataggaacaaagaggtgaaggcaattctacatgggcatttgaaaaaattttgaagaatgaatgactttcacataaacagcaagattattctaggagagggaacagaatcagtaaagcacagaagcataaatatgttcagtaggttgggagagaagtacgtagactgcagtgtaggctgcatgataggatatgatggtaggagaagatgggggttccagtataggttggaatatttcatgtgactcttcagagaataacagt

SEQ ID NO: 227993 - DNA, 476 bp, Homo sapiens
cttgatttcattaaatattcactgtataggtactgctttatgtacatagcagtaccttaggcatagggacactgcagtgaagaatagatatgctccttcttctgtaggactgtgtagtaaaatgaaggaccctgaaacatttataacattttataactacatattacatgacgttataatctctaccttttattttttggtattaactaaattctataggaacaaagaggtgaaggcaattctacatgggcatttgaaaaaattttgaagaatgaatgactttcacataaacagcaagattattctaggagagggaacagaatcagtaaagcacagaagcataaatatgttcagtaggttgggagagaagtacgtagactgcagtgtaggctgcatgataggayatgatggtaggagaagatgggggttccagtataggttggaatatttcatgtgactcttcagagaataacagt

SEQ ID NO: 227994 - DNA, 554 bp, Homo sapiens
catagcatacatttatttttcttacatgcttatttttttttggtttgcaatgcatatgtggaaaataagtagtctgatgaacataatgagatgtatgaacttcaactataaatagcttacaaaataataggttaataattcagcaaaataaatgccctgtataaaccatcaccttggaaggccatatacaccttaatcccatgacraagccaatagtaaaaacaagtgtagaacttctcttttaaaattatttcacaggctgaagtaactacagattgtaatattcacagaattgaaatttatgtcctgggactaagcagcatgttagagttaagaccaggcaggaattcctaaagggcaccccaaatccagaaatctggggaaaaacatatgcagcaataatttagttttccagaagaaacaaaaaaaattaatcaatttattactaaagaggtagtatcatcatagtgaccacagggtatgtgttgcacttccctttctgtctagggcaccaagtaagtgccatcatggagtttgtcttcctgtctaaagca

SEQ ID NO: 227995 - DNA, 570 bp, Homo sapiens
tcatactctcctcggttaattttttccttacagagtcacaagttaacaattctgaaattacattgtatgtgtcctagggttgaacaaataagagaataaayggcagatcatggaagccaggtttctccctgtcagagaacgttacaaagttacaaataagcaaggcattgaggctagaatgaacactaggatattggattagcttcagacagtatgaattcatgtttagtttaatatatatatattgaaccatatgtttatacaaacacggatggatacagagataattgcaagtattacatatgcatgggtgactaaacactcatacatttcctagctctgtccactgagagggcctagcagcagtgacaccccattagcaatgaatatacccagagtacagatcttgactccaagtaatcattgtccagtaaaacaaaccaaggctgcttggaaaaatgtcaagcctaacgtttttaggcctacattggccctaaattatattatgccatttaaatgtggaaaattagcttccaatataatttaggtgtttgttaccaatgtgcctag

SEQ ID NO: 227996 - DNA, 615 bp, Homo sapiens
gctaggtaccaggaatagagagatgaaaaggactcagagttaatcatcttgaaaagctcayagtggagcaggagaagcaaataggttaccagtgatgtcagcggtcaaggctgtaatagatggagtgttgattccatccatttggggcatgttgacaagggtttccgagaagagtttatacaaatggaatgactagcctttcttgagagcttattacaggacacacatggttctgagggctttataatcattctaatttactcttttcaatgaattatgcagaaggctttattaataaccctattttagagataaggaaagtaaggtttgaagatgttcagtagcttgtccaacatcccatagctaaagaatggcaaagtccaacgtccaactccagtctgcagacttctcagttcacacacaggctgtcatgccctacctcaatgttagagagacgtcaaaggaacaaacagagtttattaaaccaactgtaaaatgttccaagttttctacaaagagttttctagaacaaactgtaacacataacactgttgtccaaagacatttcaccataatataagcaaccttgtttcatgaattggggatatcctggaa

SEQ ID NO: 227997 - DNA, 433 bp, Homo sapiens
cttcatgaatagcatggtgcctgccttgtggtaatgagtgagttctcactctgtgttcacacaagttctgattgtttaaaagagtgttgcacttcccctctttctctcttgctctgtctcttgccatgtgacatgcctgctccttcttcaccttccaccatgagtaaaatctccctaaggctttaccrgcagtggaggagatgatggcaatatgcttcctgtagagcttgcagaaccatgagaccataaacctcttttctttataaattaccccatctcagatattcctttttagcaatgaaaacagactaacacacttagtatagatctctgagctctaggctgccacaaatctcagctgaacttgctccggaaatctccaaagtttcccattgtacttgaaaatggtctcatgaattctcagttcataaaa

SEQ ID NO: 227998 - DNA, 444 bp, Homo sapiens
ggtattttgagctcataccactgcacctgtggtccaaaatgaaattaaatggaagaagcatcaatcatagaacactttcttcgtacaagatgtgatgataaacaagttaatgcttttacactgttggtgggactgtaaactagttcaaccattgtggaagacagtgtggggattcctcagggatctaaaattagaaataccattttgtgtttggaattggtgggttctttgttctcgccgacttcaagaatgaagccatggactctcrcggtgttacagttcttaaagatggtgtgtccagagttttttccttctgatgttcagaggtctccagagtttcttccttctggtgggttcatggtctcactgacttcaggattgaagctgcagaccttcacagtgagtgttacagctcacaaaggcagtgcagacccaaagagtgag

SEQ ID NO: 227999 - DNA, 556 bp, Homo sapiens
gggaaaatcccactcaatcatgatatcttacgatatattattacatattacaatatgaaatcttatgttatattatttgaaatcacggtatattatccttttgatgtgctatggaatttagtttgctagtatttttwtgagaaattttgtgtctatgttcatcagggatattggcctgtagtttttctttttgttgtgtcctaagctggttttggtatcaggctagtgctggccttataaaattagttaaggagaattccttcctcctcatgtttttggaacagtttgaggagaactagtattagttcttctttgatagtttggtagaatttggcagtgaagtcattcagtcctggacttttctttgttaggaggcttcttactcctgactgagtctcatcactcattattagtctgttcagattttctatttgtcattcagtgttaatagtttgtatgtataatttatccatttcttctaggttttcctgtttgtgagtatatagttgttcataataatctctgatgatctttgtatttctgtggtatcagctga

SEQ ID NO: 228000 - DNA, 589 bp, Homo sapiens
taagtgggcagttcaatatgtttatattcaaggttattatcaatatgtgagtgctcatttttgtcatttattaattgatttttggttgttttgtttatcttttgttcatttctttctcttattttttatcattgtgctttggtaatcttctgtagtggtaatttttgagttttttcttttccttttttcgtaatgtttgctctaaccgggggtttaaattttcatgtgtttttatgatggtagatatcatcctcctgcttccaggtgtgggactcccttaaatatttcttatagggctagtctagtggtgaaaaatccmctcagcttttgtatgtctggggaagactttgtttctcctttatttataaaggataactttgctgtatccttggctgatagttttttctttcatcactttgcatatatcatcccattctctcctgacctgtaaggtttctgctgagaaatctgctgattgttcctttataagtgactaagtgcttttctcttgctatttttacaatccctctttgtatttgatttttgaaatttgccatagagaagacctttttgaattgtatgtatttgg

SEQ ID NO: 228001 - DNA, 586 bp, Homo sapiens
atttctcccttctgcgaggcaacaatgcttattctaccattgatacctgtagaaaacagatctctcgccctggctggcaaaacccaaaataaattctattggaaaagtctaagagaaaagtggtatcatgactaccgatgagttaaacctcccagcctctgctgagctggtccagttggtacctcacagtatcgtccactatagtataatatgtacatctagattatttgaaaatttgagtgcataattgataayaaaaccaaaagagctttaatattaatcagctcctctcattgaggagtgagtacaatctcactgtgaggacacggtgaaatcttagtggtttcttaagtgggataagcatttcacagagggtgcaggaagaaaaaacagaccttaagtgtatatttattcagtctcattcttttatattactttggttgtagtaaggtatataaaatatgtaatatattagtgcaatagcacatacatataatttataaatacataaatatacatattaactgggcatttattcagattgtttttataagatatgcacaggatgaaagcagaacggaaaccc

SEQ ID NO: 228002 - DNA, 577 bp, Homo sapiens
atagtatctttgcagagacattgggttccattttatttatgataatgtgtttatcatcttccaggatctataataacaggtggttctatggtgaaaactggtgtggaggttgggatgacattaagaaattaaagatctttatacaataggagattaggtcatgtttatggattggaaagccttacattatgaattgcagattctcttaaaattaatccagaaattatatatgatattaatcatgattctaacagggtgtgtgtatgtgtttgtcttggtgaaattggcatgttttcagaaagttacatagaaatgccatcaggccaagataatcttgaagagcaaagtggaaggagttggatcaggtatcaagttattctatacctacagcatttagtactggatagtattggtacagacagagaaaaatagaagargggaatggaatgctgagtctagaagcaaattcagccctacacgggcagtaagtgaagtgtgacatttgtcctgaagagcaacagggaataaaaaacttttcaataaattgtgatagggcaattgaatatccacatatcta

SEQ ID NO: 228003 - DNA, 577 bp, Homo sapiens
atagtatctttgcagagacattgggttccattttatttatgataatgtgtttatcatcttccaggatctataataacaggtggttctatggtgaaaactggtgtggaggttgggatgacattaagaaattaaagatctttatacaataggagattaggtcatgtttatggattggaaagccttacattatgaattgcagattctcttaaaattaatccagaaattatatatgatattaatcatgattctaacagggtgtgtgtatgtgtttgtcttggtgaaattggcatgttttcagaaagttacatagaaatgccatcaggccaagataatcttgaagagcaaagtggaaggagttggatcaggtatcaagttattctatacctacagcatttagtactggatagtattggtacagacagagaaaaatagaagaggggaatggaatgctgagtctagaagcaaattcagccctacacrggcagtaagtgaagtgtgacatttgtcctgaagagcaacagggaataaaaaacttttcaataaattgtgatagggcaattgaatatccacatatcta

SEQ ID NO: 228004 - DNA, 578 bp, Homo sapiens
aaaagtctaacctcacacaaatgccagtgcttttcctttgtgacttttcaagcttcatttgttagatatgtctctacatatgtagaaaaaaagatgattgttgtattttagattccaccattgatctacacaagaaaaaggttgttttgtgttatttgcatttcctggtatttatttttgtttggggctctatccttattaactgttaacaatttcatgraatatgaatagtcattttttatacattgaagaaagaaatattgagtccaggaaatacaagctagacacatacctgcctctttggagttgagccttctgcaggatataagtgagtatgtaaacaagatgcaatatgatgataaagaatatggaaggcactacaaatgcacataaaagggcctataatcgaggcttgagcaatcagagaggtgaggtctgagctgatacctggcaagtaacatggagataagtattgtttctgacagaaaaaagactttaaacacatctcattagagatgagatacagccagtgccccagaggtactgaatactgtaggcaattgtagcacaatggtagg

SEQ ID NO: 228005 - DNA, 645 bp, Homo sapiens
atctaaaacttaaaatccgtttaaacttactctttaactcagcatttggcctatgttggtgatgctttcaatacacaagaaaacaatgtaaatttagcattttaagtgtagtttttataaatgtcaataagatcaaagtgatttgtaatgaagttgaaatgttctatagccatactaatgttttgtcttcctgttctatcagtgatgaacaaagggatgttaaaatctttaattattactgtcatttatctatttctcccttcagttctgcttactttccttcatgaattatgaggctttattattaagtcagtgccccctttggcatattattgtcctctcatgaattggttatttcataattatgagatgcccccattttctctgataatgcatccccttttccagtttacattgtattttgctgatacagccacacaagcttcctaatrcttgttgtgtatatggtttatctttttgtataggtttacttttcacctatctgtgtctttatattgaatatatgtttctggtagacaacattagttgggtcttcttttcttgtctaatatgacaatctctaccttacaattggataatttagttcataaatatgttaaataaaacatgttgctactttttaaa

SEQ ID NO: 228006 - DNA, 542 bp, Homo sapiens
ttctaggcatacactttaaaatggctgttttaccctcttcctactataagcacaaggggatttttctccaatattcattgtgagaacctgataaagttcttacaggtaaaacctaccataatttgaatgttccttaagtctgtaatcccaggagatttccttttatatttcattttatttcttttatttccttttttattttaggtcagagggtatctatgcaagtttgtcacatgggcatattgcatgaaactgaggtttggggtatgaatgatcctgtaacccaggtagtgaacatygtactcaacaggtagttttcattatttatttatttatttatttatttatttatttatttatttacttacttacttatttttacttaaatttactttaagttctgtgatacatgagcagaatgtgcagctacataggtatacatgtgccatggtcgtttgctgcacctatcaacccatcatctaggttttaaaccccacatgcattaggtatttctcttaatgctatccctcccctagcccccc

SEQ ID NO: 228007 - DNA, 542 bp, Homo sapiens
ttctaggcatacactttaaaatggctgttttaccctcttcctactataagcacaaggggatttttctccaatattcattgtgagaacctgataaagttcttacaggtaaaacctaccataatttgaatgttccttaagtctgtaatcccaggagatttccttttatatttcattttatttcttttatttccttttttattttaggtcagagggtatctatgcaagtttgtcacatgggcatattgcatgaaactgaggtttggggtatgaatgatcctgtaacccaggtagtgaacatcgtactcaacaggtagttttcattatttatttatttatttatttatttatttatttatttayttacttacttacttatttttacttaaatttactttaagttctgtgatacatgagcagaatgtgcagctacataggtatacatgtgccatggtcgtttgctgcacctatcaacccatcatctaggttttaaaccccacatgcattaggtatttctcttaatgctatccctcccctagcccccc

SEQ ID NO: 228008 - DNA, 519 bp, Homo sapiens
ttaattgttattattttattttatttctcactaaatgcctgatctttaagaccttcgaaagctgacttttattctggtgtaaagaacagagtttatttaccttgagctacrggggaactgaccagatgttcacaattatacattttttatcctttgctctgtctctaccaaaggctagtcaggcttctttccttcctaacattctgcttgcctccaagcctgagcaagcactcaaatggggaacatgccacttaccaggttaccctgaaaattggatgactacagtgagacactttttctgttggacttcactagtcatttcctcttgcttgtccagctttccctttaaagggaaagctcctaaacatttacttactcctccctaccctataaaaggaaagctttatctgtttgattatgagattcttgcagatttctgagattagaacattttccctattgcagtagtctttgtaattaaaatttctccttttctagttttcatttgtttttatttga

SEQ ID NO: 228009 - DNA, 607 bp, Homo sapiens
taaatctactttgctaatagtattagcagctctatgtagataattaaaaatatttaaaatggtttgattacttttgtttgaaaaataacccaaaaaggttcagaaaatatgatataaatgaatataaccccattaaaatgtgttagcttattatgtgagtaaagtcaggacaggttgtgccagagtgggagaaaaaaaacaattatgtttgcatttttaaataaatgaaaacatagaaaatgattcttaactactatataatagcctaatggcattattttactttctttctccttttatccttttttcttgacttattttatgtactaacatttccttaggctatttatgctaatcttaagagcactaattattcagaattcttatctgacaaatgcacactcacatactatttgtctttagkcttagcaacattttaatggtgataaacagaaatacttccaagagtaattgactgccattttcgactgccattttctaattatgttttattctattacttggctgaaaagatttttactgatgcataaaaaatattccaaaagcaagaggcacgtttttagttattttattgtcttctgtcaaa

SEQ ID NO: 228010 - DNA, 599 bp, Homo sapiens
tcctatgtctattgcagcactattcacaatagccaaaataatgtaattaatgtgtgtctattagtgggttaatgggtaaagaaaatgtggaatattatgtagccataaagagaatgaagtcctgtcaatttcagcaacatcggtgaaactggatatgattaaataacccaggcatgaaaagaaaacaatacatgttttccctcatgtatgggagctaaaaacatgtattttgtgacgttagagtatagaatgttgattaccagaggctgggaagggtaaacagaaagagggaatgaagacaggttggttaacaggtacaaaaatcagttagaaggaataagttctagtatttgataatgcagtaggaagactgtagttcacaataatttattatatatttcaaaatagatagaaaagaagaattgcagtgctcccaacacaaaagatraatgtttgagacaatggatatcctaattatcctgatttgatcatggcacattatatatatatatatcaaaatatcacatgcacctcccaaaatgtagaactatatcaattaaaaaataacaacacctcaaaaagattaatgagataaagaa

SEQ ID NO: 228011 - DNA, 621 bp, Homo sapiens
gagtcaacagcaacaacttagctgaaagataagaagtcaaaaggacattctattttgaagatcatttcttctkacgtcttggttccttccttagatacatctgagaagcagctattaccctttgtaaactgctgtgtggatataaacatctcctaattcctcgttgatttcagacaagttaatttaacatacatctcaaatatataaaaattaattaaggcattagaaaatggatgattaaaatatcaaaagaatagtttaggaataatatgaataattatagaaacattttaaaatatcaataattagaaaattaaatataagcaatagtaatgaaacaagcaattaaaaatattaaaggaacatgtgttttgagatgaaaaaattaaagggatgaaattagacctttgatctgtagcctttatctctttctttctttagttgttataaataacttgatccttaaagaaaataaaaagtcttgtaagtgatctcttgagggaatgtccagccagctgtttggagcctgaaatgcatggacttttgctaggtcatatgaatctaatgacacaagtcagaaaccttggcctaagagagactatagttttacatatactgtta

SEQ ID NO: 228012 - DNA, 542 bp, Homo sapiens
ttacatctttgtaaaaattctaaagtcaaattgctggtagtggctgagtcaatataatatttctaatcatacctaatattgatgttttttgttcaattcatgtttacagttagcagtttacttttctattcctgctatcataaawttagtagttaaaacaatacaatctattatcgtacagttctgtaggttacaagcctgacatgggtctcgggctaaaatgaaggttttcacaggccattgtttcttttttttgaggcctccaagggaaaatacgttaacttgtctttccagcttctagaagtcactcagctttatttgctcgtggccctcttcctacaccttcaaagcggcaccattgcgtttctctcatcattcttctatgtcacaagtccctgtgactgaacatatccagaaactgttctctgattttaatgacccatgtgattagctagaacctacctgcataatctaagagaggctgcctacctcaatgtacataacaatcttatctacagattcccttgtgtcatgtgagttaa

SEQ ID NO: 228013 - DNA, 542 bp, Homo sapiens
ttacatctttgtaaaaattctaaagtcaaattgctggtagtggctgagtcaatataatatttctaatcatacctaatattgatgttttttgttcaattcatgtttacagttagcagtttacttttctattcctgctatcataaaattagtagttaaaacaatacaatctattatcrtacagttctgtaggttacaagcctgacatgggtctcgggctaaaatgaaggttttcacaggccattgtttcttttttttgaggcctccaagggaaaatacgttaacttgtctttccagcttctagaagtcactcagctttatttgctcgtggccctcttcctacaccttcaaagcggcaccattgcgtttctctcatcattcttctatgtcacaagtccctgtgactgaacatatccagaaactgttctctgattttaatgacccatgtgattagctagaacctacctgcataatctaagagaggctgcctacctcaatgtacataacaatcttatctacagattcccttgtgtcatgtgagttaa

SEQ ID NO: 228014 - DNA, 542 bp, Homo sapiens
ttacatctttgtaaaaattctaaagtcaaattgctggtagtggctgagtcaatataatatttctaatcatacctaatattgatgttttttgttcaattcatgtttacagttagcagtttacttttctattcctgctatcataaaattagtagttaaaacaatacaatctattatcgtacagttctgtaggttacaagcctgacatgggtctcgggctaaaatgaaggttttcacaggccattgtttcttttttttgaggcctccaagggaaaatacgttaacttgtctttccagcttctagaagtcactcagctttatttgctcgtggccctcttcctacaccttcaaagcggcaccattgcgtttctctcrtcattcttctatgtcacaagtccctgtgactgaacatatccagaaactgttctctgattttaatgacccatgtgattagctagaacctacctgcataatctaagagaggctgcctacctcaatgtacataacaatcttatctacagattcccttgtgtcatgtgagttaa

SEQ ID NO: 228015 - DNA, 512 bp, Homo sapiens
tcactctgtgtgtgtctacatccttgttcttcgtggctgtgagaccatgaacctcaggtgatactctatgcaacaatgctgtttcaatattactcaaaatgatgatttaaaaatactgagaaattacaatataaataatttgacaaagattgcataggtaaccaggattagaacttataagtgcctcacaagtcctttgtcttacatcacactggtttccaaatagtacagatgactaatsgcatttgtatctttatatcaggaatcaaatttaatagcaattttacaacctcaatgcttttcattaagtttggggtaaaaagaaaaaagagttctcatatcataatccttaattaagataggcaataacacattttctgatacttaaaattgattatttctgtgagtagacattaatccatataaatttatggggtatattaaattctatctatataatcattatattaatattttaataaaataacatagactcaaaaaacaaaccaaat

SEQ ID NO: 228016 - DNA, 574 bp, Homo sapiens
tttcattagtgacatttttcaaatcaaatttaaataatccttggttcagactccaaacaggaaatcagttcaaggagcagggatcagaatgacaaaagaactgctcacttagaggataccttaaaatactctgctcattgcaaaaaaaataaataaataaatgtaagcttccagatttttctgaccttaatgcactgatgtttcggtttggatttaactgtgaatgaaaaactttgaaaagccatataatccatcaatattatatttgctagcacctgagtttcatacaacatcaaagtatttttatggctttgatatttttttcttccgtaattatgccagcccaagatatattgcatttaatactcttttcctgacttgctcttattagcagttaacactttatgtagaacayatgtagaattcctgacatctgttattgcaaccttgttttgactgataatatactagtgtttaatttaggacaaaaggagaacatattttcaaatcgcacatgtaaattgaagattatctgtcctgtgtaactatatatattatgatatgcaaatatgtg

SEQ ID NO: 228017 - DNA, 580 bp, Homo sapiens
agcaagacacaatagaatcattttcaagtattagccacagagtggtgtcattataacatcactttcacatgtaaatataaaatgaaagtttaatgttaaaaataagaaaaaatgtaaatgtataatagaccaaaaattgttctatttttgtccttggggcagtgatgttaaatcatctcatatctatgagacattgctagttataaggaatattcatgttctcsttttcttcttaggcacatagcagtcagttctgaataattgattgtgagctgaaatagtcatttttaggcctcttccattaagcctccatctgaatacagaggataacaaaggcttagaggagaagggagccacaatatggaaggcctggatccctgaatgactatgtggatcacaattcatcctccccactcctacatcacccctcatgcctacccacattgaattgtcagtaaaaataagctttgtttgcccaataccacagatattttagggttgtttgttataaaagttagtctacctggaccaattcaataactgattatataaccctggtattactgagtttaattggaat

SEQ ID NO: 228018 - DNA, 535 bp, Homo sapiens
gagccacaatatggaaggcctggatccctgaatgactatgtggatcacaattcatcctccccactcctacatcacccctcatgcctacccacattgaattgtcagtaaaaataagctttgtttgcccaataccacagatattttagggttgtttgttataaaagttagtctacctggaccaattcaataactgattatataaccctggtattactgagtttaattggaatctatggatattaaagcttctggtccgtgggtttttgsaaactaaatagtggtaaaactttcaaattatttactatagaaagatgaatcataccacagagctgctaggggcaagtttaatcaaattgcctataaagtgttaaaatatccattttgtgtaatggaagatctattttaaggtgttctaaatggtaaaataaaatctttctgcccaaaagaaatgctgctttccatcactataactgatgttttgtagcacatattccacaaagatggtaatactttaaaaatgttctatggaaaaaag

SEQ ID NO: 228019 - DNA, 558 bp, Homo sapiens
gtgtaatatggattatagcagtaccctaactgttctccttgcttctgcccttcttagctagactagtgaatctgttaaaacctaagtccaatcctatgggtcctttttaatcccaaagagttcctatttcattcaaaatataagccaatgtcataaaagtgacatatgaggcctttcaacatttgctggccacttctaagcccccacctctctgaactagtaccttttctcttgttcactggactctggccacaagggcttcctgacagcccttctaaaacagcaagcagagcccactatagggcctttgtgtttgacggccctctgcctagaacggtcttctcttaggtatctctatggctaccttccttgttctttaccttctccctcctctcctgacacacatacactttctagttctcaggaagctgctttatttttctttrgtgcttatcagtatctgacatactgcttactactacgtatttcaattattcatcttttttgttgtgtgccaccccactagaatggaagcctaatgaggcagagatttgagtt

SEQ ID NO: 228020 - DNA, 519 bp, Homo sapiens
gggggcatagtaagactttatagcacagactgctttaaacaaataagtcagagacagggactccctcaaagcaaagtcctgctttccccagtgcacagtgcctgagggaaagggtgagggatgggtctgatgatactacaggagtatccaggaaaaactcaaaatttcaaggaagtaaggataagaacatctaggccaccatgaaagatgaatttatactgggaacgtgtatcactaaaaggatacgaaatagccacttcctcagcacaacagagttagccagctgtcagctgctaaatttagcaaaacttggagcaaaccagtttaatactgtgtattcacttttaattmtaataatgccatcgtttcctaatgccttctttttagtgatgtatatccctattatatgtaatcaggatgttatactctccttctgaaatagagactttgcactacagcagcagtttaaaaacatgggctttagactgaagctttcatttgactttttgctccatccac

SEQ ID NO: 228021 - DNA, 519 bp, Homo sapiens
gggggcatagtaagactttatagcacagactgctttaaacaaataagtcagagacagggactccctcaaagcaaagtcctgctttccccagtgcacagtgcctgagggaaagggtgagggatgggtctgatgatactacaggagtatccaggaaaaactcaaaatttcaaggaagtaaggataagaacatctaggccaccatgaaagatgaatttatactgggaacgtgtatcactaaaaggatacgaaatagccacttcctcagcacaacagagttagccagctgtcagctgctaaatttagcaaaacttggagcaaaccagtttaatactgtgtattcacttttaattctaataatgccatcgtttcctaatgccttctttttagtgatgtatatccctattatatgtaatcaggatgttatactctccttctgaaatagagactttgcactacagcagcagtttaaaaacatggrctttagactgaagctttcatttgactttttgctccatccac

SEQ ID NO: 228022 - DNA, 613 bp, Homo sapiens
aggaatttattcatttcctctagattttctagtttgtgggcatagaggtgttcataacagtccttgagattttttattttttaatttcggtgggagcagttgtaatgtcaccttcatcatttctgactgtttatttgggtcttctctctctctcttttttttttgtttttcttttcyttttttttttttttttttttttttttttggtggtgctgttgttgttaatctagctagaggtctgtcagtcttatttatcttttcaaagaatcaacttttggtttccctgatcatttggtatgggtttttgagtctccatttcattcagttttgctctgattttagttttgttttttcttttcttttcctctgctagctttgggattagtttgttcttgtttttctagttcctttaagtgtgatgttagatcattaatttgaaatctttctgacttcctgacataggctttagggctataaactttcttaacactcctcttgctgcatctcacacgttttgatatattgtgtccctcttttcatttatttctagtaattttttgatctctgctttaactttgttgtttattcagaagtcatttgggagaaagttgtt

SEQ ID NO: 228023 - DNA, 613 bp, Homo sapiens
aggaatttattcatttcctctagattttctagtttgtgggcatagaggtgttcataacagtccttgagattttttattttttaatttcggtgggagcagttgtaatgtcaccttcatcatttctgactgtttatttgggtcttctctctctctcttttttttttgtttttcttttctttttttttttttttttttttttttttttggtggtgctgttgttgttaatctagctagaggtctgtcagtcttatttatcttttcaaagaatcaacttttggtttccctgatcatttggtatgggtttttgrgtctccatttcattcagttttgctctgattttagttttgttttttcttttcttttcctctgctagctttgggattagtttgttcttgtttttctagttcctttaagtgtgatgttagatcattaatttgaaatctttctgacttcctgacataggctttagggctataaactttcttaacactcctcttgctgcatctcacacgttttgatatattgtgtccctcttttcatttatttctagtaattttttgatctctgctttaactttgttgtttattcagaagtcatttgggagaaagttgtt

SEQ ID NO: 228024 - DNA, 419 bp, Homo sapiens
cgccaatatttattattttttgatgttttaatcatggccattcctgcaggagtaaagtggtatctcattgtagttttaatttgcatttccctgataattagtgatgttgagcattttttygtatattttttggtcatttgtatatcttcttttgagaattgtctattcatgtcgtttgcctactactattttttttttttttttctgagacagggtctcactttgtcacccaggcaagagtctgaagtgcagtgacatggtctcaactgactgcagcctcaatatccctggttcaggtgattctcccaccccagcctcccaagtagctgggacaggtccatgccaccatgcccagctaatttttgtattttttgttgagatggagttttgccatgttgcccaggctcagccatttgccc

SEQ ID NO: 228025 - DNA, 578 bp, Homo sapiens
tcaactatctttagcaggagatctggttcctgtaaatttatactatcttttccattatttagctgagaggcaaatgggaaatgtgttatttgacctcagtccctcaaatgtctggcattttaaagcagcagcacagggtggttccagcagccccrataagcaggaaactagcaggaccataggggattgactatggaagaatcctgggactcacaaactagtgtgaaggctagaacaagcagaaaggtagagatagaaacttgactaatggtcttcttaatttcacatgagagaagaaatagaaaacatgtttccctcccccacccataaatatctatgcccatatttcctgatttgtccaggacaagctagattatgtctattcagttagcatactcactcactttcacaagtgtctctgtttagatgagaagttacatggccctccccatatctggacttccttcccattccatcaagtggctgaatatctgaagagataacacaatggtatatcaatcaactctccaactaaagacagatgatgatgcttctaagcagtaaggttagcacaagca

SEQ ID NO: 228026 - DNA, 546 bp, Homo sapiens
tacatggccctccccatatctggacttccttcccattccatcaagtggctgaatatctgaagagataacacaatggtatatcaatcaactctccaactaaagacagatgatgatgcttctaagcagtaaggttagcacaagcagggaaaagtggattgcatggaayaaatttctctgtttttcagcagtccgtaataataagttatgtactaagtaattctggacttcaattaaattatcagttcatttttttttcttggtcagaattaacttgtaagcagcagcactcctgattatactctctctcttctaagaaacaaattgtcaaaaagttaaattcagattgtatcagattgaatgttttctggaaaatgtctaaatagcttgttccctgtctcacctcactcttcaccagtgtatactgctcctatatggtccttgtgaagttataattatccaccctccctccctgactataatagttttgtttaagggacatgtaaatctctctagactttagtctaccttctgtaatatgaagaattt

SEQ ID NO: 228027 - DNA, 546 bp, Homo sapiens
tacatggccctccccatatctggacttccttcccattccatcaagtggctgaatatctgaagagataacacaatggtatatcaatcaactctccaactaaagacagatgatgatgcttctaagcagtaaggttagcacaagcagggaaaagtggattgcatggaataaatttctctgtttttcagcagtccgtaataataagttatgtactaagtaattctggacttcaattaaattatcagttcatttttttttcttggtcagaattaacttgtaagcagcagcactcctgattrtactctctctcttctaagaaacaaattgtcaaaaagttaaattcagattgtatcagattgaatgttttctggaaaatgtctaaatagcttgttccctgtctcacctcactcttcaccagtgtatactgctcctatatggtccttgtgaagttataattatccaccctccctccctgactataatagttttgtttaagggacatgtaaatctctctagactttagtctaccttctgtaatatgaagaattt

SEQ ID NO: 228028 - DNA, 608 bp, Homo sapiens
ctagttattattacctgcatgaataaataactacctagacacctatgtaaacacaaagtacgaacagctgaggctgagtatatttctaagaaaaaatcacttgtacttacagtgcttgtgataagctaaaaaagctgagtttatgggcatcggcatacagggttcagcacccttaaatatctgaaggtaaatgattcaggggactggtaatgtggacactgtcaggtctgtacctgtgctttggcactaggagtctagaaaatgccaaaatcatcactttgatacatttattagtagaaatctcttcatttatttatttaaattgaaataagtaagttgtaaaacaaatggtgatttctccaaaagaagttaagctatcactaataaatggaaagatgtatattaaaatagctttatgattatgtaaattattcttttaatttttatgaatctgaacttcgctactcagtactctctatcaayaagcattgacagtaactcaaggtaaaaattaaaaataaaaactcacattttaagaaaccaatattaagctagctatgctatagaggtgaaaaataatattgatattaatatttgaaaagatctga

SEQ ID NO: 228029 - DNA, 374 bp, Homo sapiens
tgcatatgcagtctgttgtacaagraaaacattggactaagagtttaaaaacccagttcaagtccaactttttgaactaccttgtctcctgactttagatatatttattgacttccatgtgcttcagttttgtaagaaaggtggaggtgagaaaatggaattcatttgcatcatgttggaaatttatcctgcttctgagtattgtatcattgtgacgttataggagttagttaccaacacatctattaaaaatatgctgacgtctgctaatatggtggctgcacaaagaaagaaaattctacgggaatacccattactgttccttttgccatgttgtgatcatttattagaaaacaacaaagccaaggcaatga

SEQ ID NO: 228030 - DNA, 374 bp, Homo sapiens
tgcatatgcagtctgttgtacaagaaaaacaytggactaagagtttaaaaacccagttcaagtccaactttttgaactaccttgtctcctgactttagatatatttattgacttccatgtgcttcagttttgtaagaaaggtggaggtgagaaaatggaattcatttgcatcatgttggaaatttatcctgcttctgagtattgtatcattgtgacgttataggagttagttaccaacacatctattaaaaatatgctgacgtctgctaatatggtggctgcacaaagaaagaaaattctacgggaatacccattactgttccttttgccatgttgtgatcatttattagaaaacaacaaagccaaggcaatga

SEQ ID NO: 228031 - DNA, 374 bp, Homo sapiens
tgcatatgcagtctgttgtacaagaaaaacattggactaagagtttaaaaacccagttcragtccaactttttgaactaccttgtctcctgactttagatatatttattgacttccatgtgcttcagttttgtaagaaaggtggaggtgagaaaatggaattcatttgcatcatgttggaaatttatcctgcttctgagtattgtatcattgtgacgttataggagttagttaccaacacatctattaaaaatatgctgacgtctgctaatatggtggctgcacaaagaaagaaaattctacgggaatacccattactgttccttttgccatgttgtgatcatttattagaaaacaacaaagccaaggcaatga

SEQ ID NO: 228032 - DNA, 451 bp, Homo sapiens
  misc_feature (1)...(451): n = A,T,C or G
nnnnnnnnnnnnnnnnnnnnnnnnnnnnnnnnnnnncgtaaatcaaaccaactaccatctataaattcacccacaaacaaccaatttcaagtttattgcagttgcagtcgacatctcctatgctacgtgagagctagaaactttactattgaatttggtgagtctggggtgatatacaataaactaattttcaaagtgctcgtttttgctcctgatagcagcagatcagcattcttactaaactatatracagctgacattagaattttaagatttactgttcaaagcccaagagctgtaaactagttcagaccaattcagtaaaagggccaagtctaggtgagagtgattaagaacataatcaaattgaactgcctgtaagacttcatgaaaaattatttttcttccctataaaatagtgcaatttcagtaggcatctgtaaaagcatga

SEQ ID NO: 228033 - DNA, 569 bp, Homo sapiens
tgtttgttgtataaacaattcttaaagataaaaaagtggtcatgagtaagagacattgtcagaaaatacataggaattttcataaatagttttctttcaacagtagcaaaagatcaatgaagttagttgcccaatgtaagaattaaatgtccaataaaaatttttagataatttttaagttctgagcttgtaactttgaactgctataaaattgcttggaatcttgcaccaaaagcaaaaacccattttgatgaaagttataaaagaaaaattattttgattatggaaatgttaatagaaaattatgaagaaacaaattttgaaatattttacaaaaagtaaagattttaattcaagctaccaaacaatttcctatagtctataggaactttctaacaaacaccaaatatcaataaatccaaaatttgaaaaatcacaagtgcttattttttagctttagttgagtcgtacaacattagagacatagcccagttaacactttggatasattcttctcaaaaagaacttcagaatttatgaagaaatatcaattttgtgaactaaaaaat

SEQ ID NO: 228034 - DNA, 588 bp, Homo sapiens
gattatatgtaactcactatcaaaagctctccatgaaaagtctggttttagcatgaagctggctcaagattactacagttaaaaaagccctgagttttgtagcatataatcgttatagatttctgtcacagaaatccatagagatgtaagaaattcctttctccacgtaatataatcttcaattttatgaaamtgttaaagttatctttagatgattaagatggaaattgcttgtatgaaagttctaccacctgaaggtattggttaccacttggaacaaatctctatttaaatgacgtattaaactcatgtctgaaaaatctttgtccaaaaatgaaatgttagtgtaaaatgttcattaggaacctcatatccattatctgaggtttcctaaaagcaatgatggaataaagaacttttacagcccagccatcatttttagagaacaaattatttaatgcatgaagcaaatatactaggaggaatgcaaaaattcctgaggtgcacaggggctggggggacctcttctaccgaagatttcaattgcttccattgaaaattaacatattttattactgggaatagttt

SEQ ID NO: 228035 - DNA, 522 bp, Homo sapiens
cagcatttaaatattaatgtgttttattttgaataatgaaagctataaaatacaagcagtctactttcatctcttaggaggtgtaatttttttgcagtttcgcatatgctcagacctaatcctagcaagacatgttattttcatgacatatattgacactgcattaatcaatcagctttaaaacttaaaaattccaattcagtgtatgtgctattttttaaatatgctaaatttaaascaaaactacaaaaggtaatgtctaataggaagaatctgttttttctcatacaatttaaacatcatatagtgtgaagtaacagaagatgcttgcttctgtcctaatatagtattcagacaaagtttcttttgttttattgcatactgagtgatttggcctctattgaaaagcagttcagaaaatctcagaggaggataatgtctgttgacgataactgatgctggcttccatggaaatgctaatttggtaacagttgctgtcaatcagtcgctttgagttattgt

SEQ ID NO: 228036 - DNA, 603 bp, Homo sapiens
aattgccacactgctttccacaatgagtgaactaatttacaatctcaccaacagtgtataagggtttctttttccccacaacctcaccaccatctgttattttttgactttttaatagtatccactctaactggtgtgagatggtatctcattgtggttttcatttatatttctctaatgatcagtgatgctgagcttttttgatatgatcattggccacatgtagatcttcttttgaaaagtgtctatttgtgtcttttgtgcactttttaatgggattgtttgttattgtaaatttctgtaagttaattatatgctggatattagacctctgtcagatgcatagtttgcaartattctctcccattctgtaggttgtctgtttattctgtcggtagcttctattgctgtgcagaagcactttagtttaactgggattctcttttcttatactaccaattggaaactctgtctaggttgaaagttggaggaaacacagtgctcaatacattgtccccccagcactccaggattactgtcttgcattgttgtttggtgtcttgaaattaaagtcaaaacagagcaaatgctgtggtataagtt

SEQ ID NO: 228037 - DNA, 603 bp, Homo sapiens
aattgccacactgctttccacaatgagtgaactaatttacaatctcaccaacagtgtataagggtttctttttccccacaacctcaccaccatctgttattttttgactttttaatagtatccactctaactggtgtgagatggtatctcattgtggttttcatttatatttctctaatgatcagtgatgctgagcttttttgatatgatcattggccacatgtagatcttcttttgaaaagtgtctatttgtgtcttttgtgcactttttaatgggattgtttgttattgtaaatttctgtaagttaattatatgctggatattagacctctgtcagatgcatagtttgcaagtattctctcccattctgtaggttgtctgtttattctgtcggtagcttctattgctgtgcagaagcactttagtttaactgggattctcttttcttatactacyaattggaaactctgtctaggttgaaagttggaggaaacacagtgctcaatacattgtccccccagcactccaggattactgtcttgcattgttgtttggtgtcttgaaattaaagtcaaaacagagcaaatgctgtggtataagtt

SEQ ID NO: 228038 - DNA, 594 bp, Homo sapiens
gattaacattccattgaatatgcatatagaccacactttatttgtctactcatccattgatggacatttacctgtttccatgtcttagatatttagactaatgctgtaataaacatgagggtgcacaaatatctcagagatgatgaattattttattttgtatattcatccggaagtgtggttgctggatcatatggtagttctattttaaaattttttaggaaacttcatattattttttataatggctgtatcgattttctttcctaccaagagtgtgaaagggttccctcttctccccattctcacccaccaacacttactttgccttttaataatagccattttaaaaggtgtgaggcgatatctcattgtagtttagatttacatttccctgatgattagtgatgttgagcacttcttcaaaaacctgttgacrattgtgtgtcttcttttaagaaatatctatccagatccttagatcaatttttaatcaggttattgctttatttgctattgaattctttgtgttacttatatatttgggatattaacccctatcagatatatagtttacaaacattttctcccatt

SEQ ID NO: 228039 - DNA, 594 bp, Homo sapiens
gattaacattccattgaatatgcatatagaccacactttatttgtctactcatccattgatggacatttacctgtttccatgtcttagatatttagactaatgctgtaataaacatgagggtgcacaaatatctcagagatgatgaattattttattttgtatattcatccggaagtgtggttgctggatcatatggtagttctattttaaaattttttaggaaacttcatattattttttataatggctgtatcgattttctttcctaccaagagtgtgaaagggttccctcttctccccattctcacccaccaacacttactttgccttttaataatagccattttaaaaggtgtgaggcgatatctcattgtagtttagatttacatttccctgatgattagtgatgttgagcacttcttcaaaaacctgttgacgattrtgtgtcttcttttaagaaatatctatccagatccttagatcaatttttaatcaggttattgctttatttgctattgaattctttgtgttacttatatatttgggatattaacccctatcagatatatagtttacaaacattttctcccatt

SEQ ID NO: 228040 - DNA, 581 bp, Homo sapiens
atgtgtgtatatatatgtatgaatatacatatgaatatacaaatattatttagtctttggaaaagcagatcatgtcattggccacaatgtggttgacctggaggacattatacaatgtgaaagaagccagacacagagagaagaatactacatggtattacttatatgtaaaaactgaaaaaaaaaatcaaagtcaaatatatacaaatacacagagataaaaaataaaacaatggttaccaggggtggtgaagctataggaaatgaggagatgtaggccaaacggtacaagtagcagatatgcaggagaaacaagtctagagctctaatgtaatgaggattatagttcatgagattctattgtataagggattttctgttaaataaataaatgttagctgttattctcatcgacaaacataactatgtcagatgacagatatatacatctgctccactatagtagccaatttactgtctacatgaatgccataacatcatgttgtaaacctcaaatatacacagtcaaatttatttwaaaaataataaaaatagaaaaaaattccactgagatgatctat

SEQ ID NO: 228041 - DNA, 573 bp, Homo sapiens
tatgcttatatttaacatgaattattctaggcagcatttgtatttgtttctgacagcaacctgaggtgccattaaccagggatcactttaaatttatatttcatactaggggatcttgaaccaagcatcagtataaactcaaatgcacaaggcaattctgtgactggaaaacatacatatatttgccagttcccagggcagaattattttgtcctatttggaacggaggccaagatagttaattaaacacactgtctttgtatgtgggctgatttttttttttccttttttycccagtctaccctgtcacaggctgtgcaaccctccaagcctctggctgcttgtggaagtcttggttcctacctcactttgacaagggtttactccttttcagtggtctccacatgaccataaaaatccctaacgtttagttttacaatcagcaaatgtccgtaggatggctctgaatttgcttacatgtataatagtcatttttattccacttttgtctccaggaatttctttttttttttgaagtttagccatcatttgaaaatatttcatttttcctag

SEQ ID NO: 228042 - DNA, 564 bp, Homo sapiens
aaagttgaagtgaaggaaattcttccaaacttattctctgaggccaatgttaccttgataccaaaactagccaaggacacaataaaagaaaactataggctaatattcttgcttaatacaggtgcaaaaatcctcaacaaaatactagtaaactgaatccaacaccacattaaaaacatatgagaggctgaagtgagaggattgtttgagcctgggagattgaggttgctttgagccatgatcacaccactgtactccaacccgggtgacagagtgagaccctgtctcaaaaataattaattaaaagacaatatagcatgattaagtgggatgtgaaccagagatacaggatgatttaacataygcaaatcaataaatgtgatacatcacattaacagaatgaagcacaaaaccatttgatcatctcaatagaaacagaaaaagcaattggtaatattcaacatctcttcatgataaaaactctcaacaacttaagcatagaaggaacatacctcaacataataaggccatatatgacacatccacagactgaattggaaaaag

SEQ ID NO: 228043 - DNA, 490 bp, Homo sapiens
attactaaaaaatatgcttataaacaaagctctctaaatatttctaattttttactgatgataatattcttgaagaaattacccctgaattttacatgagctattgcttttataatcataagacttcacaacaaaaatcatttatacaaatttagaactctttcatcattgtttgtttgtttgtttatttatttaatgagacagagtttcactcttgtcgcccaggcwgtagtacagtggcgcgatcttggctcactacaacctccacttccaaggttcaagcaattctcctgcatcagcctcctgagttgttggaattacaggagtgcaccaccacacccagcaaattttgtatttttagtagaaatggggtttcatcatgttggccaggcttgtcttgaactcctgacctcaggtgatctgcccgccttgacctcccaaagtgctgggattacaggcatgagccaccacgcctggccatcattgtttc

SEQ ID NO: 228044 - DNA, 562 bp, Homo sapiens
tttctgaattggggaagaaatggacatagagaccagtataacagtaggatgtaggttgtttttaaaaatgactatgcaaactcaagtcataaagattccagctcacagtatcagaagtaatttgggagaggtaagaatgttagagttgatttttaaagatgattaagacacaaaaactgcgttaaattttgtaacctatttgtataacttatcttaatttgtactgcttgacattgtgcaaagaaataaaattgytgggtgagagagcgagactccgtctcaaaaaaaaaaaaaaaaaaaagaaattaaattagtctgcaacatttgaacttaactaggctgtgttaaataatgtaccagaccaagaaatttaagtgatttcttcattggttccagctatgctattaagtgctatgtaaccttaagagagtcacttaacttctctgggccttgctctcctcatctgtaaaatatggcattaaattagatgaactatgagattctaattagttccttactggatgattactgtttatcacctttgacaagtctgaatagccac

SEQ ID NO: 228045 - DNA, 475 bp, Homo sapiens
gagctggtctctctgaaatccctctttttggtttgcagaatgccaccttctcactgtgttttcacctggccttttttcggtgtgtggctgctctcctggtgtctgtttcttcttatgaggacattggtcttattgaataagggcccacacttagaagcttatttactctccattgagtccttaaagacctgtctccaaatatattcctattggcaattagggcttcaatctataaatttggggttgatacaatttagtctttgatacctagcttacagatttttctgacaccatagtggatggtgaattgcaagaatataggcaacagaagtagataaaatggatgaattccagatttggtgacagagtgcaaactggaaaggaggaaggacataacagtcccctgtaattcacagacttctacytgcatggtccaagaagccttttacaaagatgtggattttagtatgtgatc

SEQ ID NO: 228046 - DNA, 509 bp, Homo sapiens
aggtgacatcactgatatgcaatgactcctccttgatattattatgaaataaagaagctgtctgtagattcagaggcaatattgcaaggatagaattttaacaacacatgaggacatattatacaacaatgtgtataatatgtacgtgtattattttacctattgcatgtatattatatgaaatataattatatattatgttctcatttgtatgaaataggtaaaagaatacatacacatgatttcgtgtgtgtatgtgtgtatrtgtgtgtgtgccgctgaaatacaaatatcatatttggttgtcatctcagactaacatttagctttgtatagcgtcctctgtgttcaaagagaggttgcttgtgatctgtacaaataccctgttgatgccctctaaagaaactaccaaagccttaattaggatattaaatgtcactttttttaaatttttcactcagaaaaaaaattgttaataatcaggattctaaaaccatagctacagttgt

SEQ ID NO: 228047 - DNA, 628 bp, Homo sapiens
ttattaaacctaatagattatgagccccattaagaatcagagcataatatgttcctccttctatctccagcagttagcactgtgtttgacacactgtgattctttaaaaaaggcaaaaatattgatgtagtatatatacatacactctcttaggactgctaagcaaagtaggaataccctaaatattgatcctttgaggacatgatagcttacacaagtaacatgaaggcaggggttttgtatatatgttgttcactgtaatattcccagcayctaagacagtgactgcacacatagcaggttcacagtacattttgttgactgtttaatgaatggacggataactaacatagccatgcttaggattccccttatgtaatggtacattggactcattcattatgtggattctaacagtcataattcttgttttacctatttatttactaaggcatcaatttcccctggaaaaattctaagatctattgaagaaaacaaaagatatttagaaacggaacatgttgtcaaataacaaaggctgacattatacatagtagacacacacatccaaattatttggttagaaggaccactatcaagaattgtggacttactgacaaatgaatga

SEQ ID NO: 228048 - DNA, 628 bp, Homo sapiens
ttattaaacctaatagattatgagccccattaagaatcagagcataatatgttcctccttctatctccagcagttagcactgtgtttgacacactgtgattctttaaaaaaggcaaaaatattgatgtagtatatatacatacactctcttaggactgctaagcaaagtaggaataccctaaatattgatcctttgaggacatgatagcttacacaagtaacatgaaggcaggggttttgtatatatgttgttcactgtaatattcccagcacctaagacagtgactgcacacatagcaggttcacagtacattttgttgactgtttaatgaatggayggataactaacatagccatgcttaggattccccttatgtaatggtacattggactcattcattatgtggattctaacagtcataattcttgttttacctatttatttactaaggcatcaatttcccctggaaaaattctaagatctattgaagaaaacaaaagatatttagaaacggaacatgttgtcaaataacaaaggctgacattatacatagtagacacacacatccaaattatttggttagaaggaccactatcaagaattgtggacttactgacaaatgaatga

SEQ ID NO: 228049 - DNA, 549 bp, Homo sapiens
tcgtgatttacatttggatccttacctttttatctgccattcagagtattctgcccaagaatttcccaaacactagtctacacattttttatgaaaaatttttactcctctgcagcaaaagaaggaaaaaaaaaaaagcactattacatctatatccccaaatctctgtaactgtctctatatcccgacacagtaaaaagtgaataattctctccaatgggcttcaattaaataaaaaaattgttctgtgaaaaatctaatatctatgcctgttcattctaggttcattctgacctcattactaggagacactgataatcatcagttatcactctttgccccaccataaacttatcgttctcctgacactgtttcatatcttttcccctagactatatygtgcttcattttctcagggccttgctaggtgatgacctaccttattggataaagtcaaagatagttccttttttctcttcctcttccctaagataagagccagaaaacaatttcattcctaaattgtgggctttcctctgtaaaagagaa

SEQ ID NO: 228050 - DNA, 608 bp, Homo sapiens
caatacccaggcaggacatcctggccctagagtaagactctaagacttgtgagcttcaacagggactcagcacataacaagctgtggtagctatgggacaagactccatctccttgagaaaagtggaggaaaatgtaaaggggacattgtcttccatcttagtaaccagtttgcccatgrtgtggtggtggagcaccaagcagaattttggggcccctaattccaggacttggcttttgggtggcatttctggatctgctctgggccagaggggatctcactaccctgaaggatgagtcaaagtccaggtggtatttaccacaagatgactgaagagcccttgggccttaagggaacattgtttgtaggctggcagtactccttgtggcctggggtggtgatggcaatggagtgagactcctctgcttttggaaaggggagggaagactggggagaactgtatcctgtggtttgattgtaagctcagctgcagtacactagaacaccaggtagacttcaaaggttttgactctagtccttgactcccagacagcacctctagaagcactcaaggcctggggaacttgtggctccaaagagaagaacac

SEQ ID NO: 228051 - DNA, 608 bp, Homo sapiens
caatacccaggcaggacatcctggccctagagtaagactctaagacttgtgagcttcaacagggactcagcacataacaagctgtggtagctatgggacaagactccatctccttgagaaaagtggaggaaaatgtaaaggggacattgtcttccatcttagtaaccagtttgcccatgatgtggtggtggagcaccaagcagaattttggggcccctaattccaggacttggcttttgggtggcatttctggatctgctctgggccagaggggatctcactaccctgaaggatgagtcaaagtccaggtggtatttaccacaagatgactgaagagcccttgggccttaagggaayattgtttgtaggctggcagtactccttgtggcctggggtggtgatggcaatggagtgagactcctctgcttttggaaaggggagggaagactggggagaactgtatcctgtggtttgattgtaagctcagctgcagtacactagaacaccaggtagacttcaaaggttttgactctagtccttgactcccagacagcacctctagaagcactcaaggcctggggaacttgtggctccaaagagaagaacac

SEQ ID NO: 228052 - DNA, 569 bp, Homo sapiens
actttactgggcttggtgtgccccctaaatcagatggagcttatatcacaagacccacatcctttgaaatatttggaaaacctttccatgtaggatggatacaaacaaacccagaatgcaaagaccagtaaatgtccagacccagatgatcatctacaaatattaagaccatccaggaaaatatgactgtaccaaaataacttaataaggcaccatgaaccaatcctggagaaacagaaatatgtgacctttcagacagagaattcaaaatagatgcactgagaaaattcgaagaaattcaagataacacagggaaggaattcayaattctatgagataagtttaacacagaaattgaaataactacaaagaatcaagcagaaattctggagctgaaaaatgcaattgatatactaaagaatgaatcagagtcttttagtagcaggactggtcaagcagaagaaagaattagtgagctcaaaggctatttgaaaatacacactgcgaagagacaaaagaaaaaagaattaaaaaaatgaagtgtgcctatagaatctaaaaaatagctt

SEQ ID NO: 228053 - DNA, 631 bp, Homo sapiens
agaaaacaagtcttaaaacattcaaaaaatgagayagtatcaattatcttctctgaccacaatggaataaaactagaaatcaataatgaaaggaattttggataatatataattacatggaaattaaacaatatgctatggaatgaccagtaggtcaatgaagacattaagaaggaaattgaaaatttatttgaaacaaatgataatggaaacacaacataccaaaacatatgggaatacagcagaagcagtactaagaggaaagtttatagctataactgcctgcatcaaaaaagaagaggaatttcaaagaaacaacctagcaatgcctcttaaagaactagaaaagcaagagcaaagcaaagccaaaattaggagaaaaaaaggaaatagtgtaaatcagagatgaaattgaaatgaaaaaaatacaagagatcaatgaaacaaaaagttgtttttttgagaagttaaacaaaattgacaaacccttaagccaaactaagaaaaaaaaagagagaagaactaaataaataaaatcagaaatgaaaaaagagacattaaaactgataccacagaaagtcaaaaggccattagtggctactgttagcaactatatgacaataaactggaa

SEQ ID NO: 228054 - DNA, 631 bp, Homo sapiens
agaaaacaagtcttaaaacattcaaaaaatgagacagtatcaattatcttctctgaccacaatggaataaaactagaaatcaataatgaaaggaattttggataatatataattacatggaaattaaacaatatgctatggaatgaccagtaggtcaatgaagacattaagaaggaaatygaaaatttatttgaaacaaatgataatggaaacacaacataccaaaacatatgggaatacagcagaagcagtactaagaggaaagtttatagctataactgcctgcatcaaaaaagaagaggaatttcaaagaaacaacctagcaatgcctcttaaagaactagaaaagcaagagcaaagcaaagccaaaattaggagaaaaaaaggaaatagtgtaaatcagagatgaaattgaaatgaaaaaaatacaagagatcaatgaaacaaaaagttgtttttttgagaagttaaacaaaattgacaaacccttaagccaaactaagaaaaaaaaagagagaagaactaaataaataaaatcagaaatgaaaaaagagacattaaaactgataccacagaaagtcaaaaggccattagtggctactgttagcaactatatgacaataaactggaa

SEQ ID NO: 228055 - DNA, 579 bp, Homo sapiens
taaatagcttcaggaaaaaaatggatgaattactattgcttaygtttagtgtgcccctgcattgcaaggcttgaaagcagctgtttcctcctttcattgataaactctgagtctgagaattgtctcaggtctgaaaactcattgaagaataatactttttctaaggggtgacattagctaccagcccatctgctgttcaatattttttgctgcatagatcaagtagcatctatttgtctttctacactgcttctagtctccccagggtccatcagacatcatcacagattgtggggtcaggggtctgtggttaccgttctagcctcattgctcatttcacaattatgcccaccttgcttttgatgcttgagtgcagccaccagctccatcaccaccttcaacacaagaagcccatttgcacagggatacctcttaccatccagcctggtccacaaaggagagacaccactgagcttctcaatgatgccagtgcctcctcactaggcttttcttactgctttagtaaagggactgttttatggtcccttccaggacatatgattacctggcgggttctca

SEQ ID NO: 228056 - DNA, 579 bp, Homo sapiens
taaatagcttcaggaaaaaaatggatgaattactattgcttacgtttagtgtgcycctgcattgcaaggcttgaaagcagctgtttcctcctttcattgataaactctgagtctgagaattgtctcaggtctgaaaactcattgaagaataatactttttctaaggggtgacattagctaccagcccatctgctgttcaatattttttgctgcatagatcaagtagcatctatttgtctttctacactgcttctagtctccccagggtccatcagacatcatcacagattgtggggtcaggggtctgtggttaccgttctagcctcattgctcatttcacaattatgcccaccttgcttttgatgcttgagtgcagccaccagctccatcaccaccttcaacacaagaagcccatttgcacagggatacctcttaccatccagcctggtccacaaaggagagacaccactgagcttctcaatgatgccagtgcctcctcactaggcttttcttactgctttagtaaagggactgttttatggtcccttccaggacatatgattacctggcgggttctca

SEQ ID NO: 228057 - DNA, 582 bp, Homo sapiens
ctttcacatgtacccttgaacctaaaataaaagttaaaaatgtgatgtaacaaaatatagtgtaaactacagagcattttacttcaaggcatttctcttcctccaaagatgaaagttacccgaacggggcaaaggcccggtgattctcttagggtggtacctgctatcccctgacctgcttttctaggctattgttaatgttctttcaacttaagcttcttggctgtctcggkttggtgagtttgcttccatcctttcgtattcattgagatcgcgcattacattagtgatttggtggctccacatatgaaggtcagagagtaattaatcagaaattgcttacttcttgggaaactgcatcctgcttcccaaatgcctactacatattccgtttgagtgtcatgcagatgtcacaagctcactctgcttctagaggaaaaaagtagtcttcagtttcttacataacatttgtcaataatttctatgattctgagttgttctgtagctcaggaagcaccatggttcaacctcgatattttggaactttgaagtttctgttagtcgtgtttgtttcatgtttgg

SEQ ID NO: 228058 - DNA, 582 bp, Homo sapiens
ctttcacatgtacccttgaacctaaaataaaagttaaaaatgtgatgtaacaaaatatagtgtaaactacagagcattttacttcaaggcatttctcttcctccaaagatgaaagttacccgaacggggcaaaggcccggtgattctcttagggtggtacctgctatcccctgacctgcttttctaggctattgttaatgttctttcaacttaagcttcttggctgtctcgggttggtgagtttgcttccatcctttcgtattcattgagatcgcgcattacattagtgatttggtggctccacatatgaaggtcagagagtaattaatcagaaattgcttacttcttgggaaactgcatcctgcttcccaaatgcctactacatattccgtttgagtgtcatgcagatgtcacaagctcactctgcttctagaggaaaaaagtagtcttcagtttcttacataacatttgtcaataatttctatgattctgagttgttctgtagctcaggaagcaccatggttcaacctcratattttggaactttgaagtttctgttagtcgtgtttgtttcatgtttgg

SEQ ID NO: 228059 - DNA, 603 bp, Homo sapiens
tattgatttatcaatattatcaatattgatgaatacaaaggggggacttaaattggcccaagagtcccatagacagtgtctgtttttttaaaataaacatagaaattggccctttttgtcttaaagcttgaagcttacatttgttttatctgagttccttcctcaggaagagacccccagkcctctcaaaaagtatcaaagaactgaatttcaccagattatcacatccagacattgagactccagacccctcattcattgtgactgactgcttccttacccctcctgagttcctgttttctcatacatagttacatttctaccctgctatataatcctctaattttagttaatcagggagatggaatttagattgatctcccatctcctcctgcaacacctgattaaagccttcttctttggcaataattgttgtctcagtgattgtttttttgtgcagtgagcagcaggacttacactgcatgatggtgtttcagtaataaatgcagtaggatagctacaacccagtgcatatagcaataagtttgggtttggtttatccttgtcatctatgcatcttaaggaccttataatgtaagcact

SEQ ID NO: 228060 - DNA, 442 bp, Homo sapiens
gcccacactgtaactcccttcttagcctgttgacttaaagataggaggagcccaaagtgtccaggtggcaatcttaacttccagtwtaatagaattgtcattgtgtttcctggtggcagcattcctccctctggaactaagacctctaggccagcagaatgtaatgtcgcaggaacaggaagcaaaaattttgctagtggatcactaggggtgatgatgagtggtgccacttccacttccacacctcgattcctggtcctatgaatcctggctatgggagaaacagtaccatattttggacgctgattcagagcatgcatggccttctgaagaacttcgccccagcactgcaaagaattgtcacctagttggcattgtaattgtgacttcaaaaggccattctactattctatcaatccaggtgcttcaggatgatggggaa

SEQ ID NO: 228061 - DNA, 517 bp, Homo sapiens
tactctgctttaaaaaaaaaaaaggtttctttctttttttttcttttattttctttttttgagccagagctttcctctgttgcccaggctggaggcagcggtgcaatcttggctcactgcaacctccacctcctggrttcaagtgattctcgtgcctcagcctccagagtagctggaattacagatgtgcatcaccacaccgagctaacttttgtattttttagtagattcagggttttgccatgttggccaggctggtcttaaactcctaacctcaagtgatctacccactttggcctcccaaagtgctgggattataagtgtgagccaccacacccagactattttcattttaaggtcttgttttgcatacctgagtgagaaaaataaaaacagaagtagcaaaaaagatcctatttactaaagtcacaggacctgcctatatttacctcttctgagatgagccttactggaataaaattatttttcccaatagcacagacttgtttgtaaaatt

SEQ ID NO: 228062 - DNA, 544 bp, Homo sapiens
agactctggtgcaatgtagccagaaaaaccaaacaaattgacagccagatgaaaagcgattggttcaattgaggtacacctgccaaatcagggctgccagctgggaaattcttacgcattttcctaagtggctgttacataaaatattgagcctgcgtgtatctgttaagtcatcatggctctgatatttaaagagccttgttcttttattttttccttcctggaatggggaatcaagagaccagggtttacatattgaaaacaagaaaccaaatcaaacagtggcttattctttaaagtaaacagagcaaaggctatcagtggcagatgtaaccaagagctggctctatgcagacaaagaggagattatgaaaacaaaaatctcttccactgaaataattatgtttaattactgatccaggwactgcatttaacgtttttcatttgcacaaatcttaagggtaaatgaggctgacaaatactaatcaggagacaggggagattatttcatggttttgggtgggatgagcatctaaaagcctat

SEQ ID NO: 228063 - DNA, 596 bp, Homo sapiens
caccatttgattgcttcccatgccctacagaactatatttataaaaggattttgtccttttgccctttccataactcaccatcaactgtgaatcaagtttcagkaacaatggaggctgttttcctgaatcaacaggcaagctttattgctttttctttttcagggcttctttacttgctcattttccagagttctgctgttctagactctcatttatattaatcagtcagagtccctcatctgcttactgaatttgctgttgcctggaagaatttccaagtactcttttgcaaggaaaacaacatattttgtagtaggaagtagaagttgcccacgggccacttacaatccaactttcaatcagcagcttgaattagatatttggagttagatttttttgtgtgtcttgtttattttataaaaggacattcttatttctcatttttgagtttaagttggctaataaatgtataatgtgactttcctaagaagtcacaatattacttaatatatattactatattatatagcatttatatattatatagtattatatatattataataagtataataaatatttacttattatgtat

SEQ ID NO: 228064 - DNA, 606 bp, Homo sapiens
aaaataataataatgataatataattaaggaaaaggggggaagggatgaaaggggtggcatagacaattcttgttaagttattgaatgtagatcttggaggaaagaaaaaattagggggagattctgctgatggaatccgctgactggaaggacaccttcaggaacagctccgcttccaccccacccccatcttcacatgcacttgatccaaccaggggcccttccccggctgggtcttttagcttcccactcactttccaggattagaaagttcaacccaagtgtcttargttttgtatctgtctcagtgcattttccctccattcactctggcttgacctcaaggggagaagagggaaaggtccttcgtgctgcagttcaacctccctaaacccctgtgaggcttcctactcttcataccccagagcttcccctggaggctgaggtgagggaggccatgtgaaaaggaatgaaagggaacctgaaaacatatttccacttagctgatgctgggcctccctctctcattggccaaggccccgagtcatggcagccattcaaggctggcttctacattgcgtgcagttgagggtccttctgactcc

SEQ ID NO: 228065 - DNA, 549 bp, Homo sapiens
ttttttttattttttaaggtaatcagtccatttagatatcaaaccacaaccttactggttctgaaatgkgcatggtaatcttgagcctactgactattctcttattgtacacagtatatttgaggagtggaaggagcagttgctctaaatttcatgcaatacaggtaagtaattaaggtttttttggtacaaatataggaaatatatgcaaatgtagagtgtattccatggtttctacatactcataacctgtagcacgttatagttctgggcttccaaactggtcaaaactttaataaaaaataagttttaaaaatcacatatacatattagatgtaaatatatagacacacatacatgcacacatatatataatcccaaacctgaaagtcaagaatttaccaaagatataaaagagggattgtcttattctattttctgttgctataacagaatactacagactgaagagtttataaagaaaaaaaaaacacttcttaccattttggaggctggaaaatctaatatgaaggcacaggcatccagtaa

SEQ ID NO: 228066 - DNA, 549 bp, Homo sapiens
ttttttttattttttaaggtaatcagtccatttagatatcaaaccacaaccttactggttctgaaatgggcatggtaatcttgagcctactgactattctcttattgtacacagtatatttgaggagtggaaggagcagttgctctaaatttcatgcaatacaggtaagtaattaagktttttttggtacaaatataggaaatatatgcaaatgtagagtgtattccatggtttctacatactcataacctgtagcacgttatagttctgggcttccaaactggtcaaaactttaataaaaaataagttttaaaaatcacatatacatattagatgtaaatatatagacacacatacatgcacacatatatataatcccaaacctgaaagtcaagaatttaccaaagatataaaagagggattgtcttattctattttctgttgctataacagaatactacagactgaagagtttataaagaaaaaaaaaacacttcttaccattttggaggctggaaaatctaatatgaaggcacaggcatccagtaa

SEQ ID NO: 228067 - DNA, 536 bp, Homo sapiens
caggtaagtgtggaccattccttcagaatacagccaggtaaccatggactgtttcttcgggatgggcccaggtaagcatggaccattccttcagaatggagccaggtaagtgtggaccattccttcagaatacagccaggtaagcatggactgtttcttcaagatgggcccaggtaagcacgmaccattccttcaggatggagccaggtaagtgtggaccatttcttcagaatacagccaggtaagcatggactgtttcttcaggatgggcccaggtaagcatggaccattccttcaggatggagccaggtaagtgtggaccattccttcagaatacagccaggtaagcatggactgtttcttcaggatgggaccaggtaagcatggatcattccttcaggatggagtcacgtaagtgtggaccattccttcaggatggaatcaggtaagcaaggaccattccttcagaatacagccaggtaagcatgaactgtttcttcaggatgggcccaggtaagaatggaccattccttcag

SEQ ID NO: 228068 - DNA, 495 bp, Homo sapiens
aacatgaatagtcctatatctactaaagaagttgaatttttaattacaaccttcctaattagcaaacttcaggccttgattgttttactggtgaattccaccagcatttaagaaagaaataataccaattctgcaaaatctcttccagaaaatagaagaagagaaaacactgctcaataaatattacytttatacaaaaactacacaaagatattctaaaaaaagagattcttacaaatatccctcatgaacatagttgcaaaagttctcaacaaagcattagcaaatcaactctagcaatatgtaaaaatgataatacaccatgacttagtggggtttatcccagaaatgcaagtctatctcaacattaaaaattaatgtagaaaaagcatgtgacaagtctcaatgtccatttataataaagatgctcaaaaaccttagaaaagtctcttatctcaataaagggcagctacaggaaactgcattggaccccac

SEQ ID NO: 228069 - DNA, 588 bp, Homo sapiens
agcttttatatatcacatgatatagattattttatggacagtattaatgactagtgaataatataaattatgattttttgtggcaatacctatttaacagatcatccctcaagcaagctatatttttatatttgcaagacttaaaattatatgaagtgaggttattcaatgttatttcaaaagtatatactgatttataggttagtctcaagtattaaatcacatttgtggagactataactgattaaaagtcctaactcctaggtaaggagaaaatgaaacttaatcttggttttcttctttttgaaatttagatcctgttaagactattgcatgtttcattgataaatgtttaatggaaacatcaaatggaggacatgcagttttacaaagttaggaacagcttctgtactgaaaacctacaagcagatattttgtgaacaaaatttgatttggtttgaacttttaagtmcttttcaatttataatttttcttctttatttgtaatgatttagtaggtcatggggacatgtcatctttctgcataatctaacttttgtcatcttttatcaacttttaaaaatataa

SEQ ID NO: 228070 - DNA, 518 bp, Homo sapiens
gaattcatttattggttcaaacagttttttggtggagtctttaggtttttctaatataagatcatattgtttgcaagccagagtaatttgagttcttcctttccgatttgggtgtccgttgtttatttctcatgccttattactctggcttaggcttstagtattatgttgaatgagaatagtgaaagggggcattcgtgtcttgttccagatctttgagggatggctttcaattattccctgtttccatatgatattagctgtggatctgtcatatatggccttaattattttgaggtatgttccctctatacctagttggctgggggggagggacttgtcagaaagagatgttgaattttgtcaaatgccttttcagcacatatttaaattatcatatggtttttgtgttcttggttcttttaatatggtgtattacatttatcgatttgtgtatattgaactatcctgtatccctgggatgaatctcacttgatcatggtgcatgatctttttaa

SEQ ID NO: 228071 - DNA, 593 bp, Homo sapiens
aagcttgctgcttcaggcaaatacttaacttccttacaactcagatgcctattcattgacagaaggataatccagaaagaatgctgatatctttataagatatatatgtataatcaaaatataaaactcaccaaattatgaaaattgcgccttatggaaggtacacttccaggaaatactggcttcagaagtttctggcaacttgtaggccatgtaatatacaaatcatcattttctaagtcattaatccactagaaaagaacgcagacacttgtgaaagctatattaacactgaaatcattttcaaagccagatttttactatatcgtgataaataaaaatatacatagaattttctatatttctgattaaatagaggarctagtttaatattctctaaattaaggaatacattatgtgcaacaattttatacttgtgtagccttttacattaagccttctctcaaaaacaattcctttcacttgtgtttgtttttcatatcccaacgtaaaattgtatgaaaattactctccataaaccacttaagagagatgaatatttattttaattatcagcagtaaatgaagccctc

SEQ ID NO: 228072 - DNA, 588 bp, Homo sapiens
aagcttgctccagcctattcagttaaaaaatatcagagtgttaaacaaaatatgattgtttgaataataaacataagaaaatggaacaccgccacatttttatatgccataggaaaaaacatccattttgctaactttatctgtcctttccaaacattgcctaaaggaaagtaatttacctacaaggagtcaaaaaactttttatgtaaagggccagagagtaaatattttaggctttgtgagccactcagtttctgacatagtgactccactctcgttacagcacaaaagcagtcatagacgacatatgaataaacaagtatggctgtgtccccaaaatatttacaaaaacaagcagtgggtggacttgctgattcttggtatagagtatgacattaacttaataaamatccaaacatttatcggcatcagagacttatttatccctgtatttatatgttcaataaacacttattcaatcctgccacctgcattaggctagatactgtgattatagagctgaaagtcttttctcaaggggttcacatacagacagacaaaacacaggcatgtagaagactctatggg

SEQ ID NO: 228073 - DNA, 425 bp, Homo sapiens
aaataacttaagatttatttttgatacctaaaatattaacactcttgattaatgaaaattatgtttttataggcttattatctttcccagcacattattatctttattattattatcttttcctgaccacagctacatcccctgccctcagggtcatcgtattaaccttcctgtaccaggagaacagaatgcatttccagctctctcctagggatcctgctgcctctacttttatgttaaggacacrttaaaaatgcattctccagtcttatatatttcttgtatgctctccctctgtctttttatggctttgttttttttggtctggttttacccattacctatgctaatgttttctattattaaagatccacagttgcttatctgcaatccttaattctaaaagcaaaattcttataatggtg

SEQ ID NO: 228074 - DNA, 425 bp, Homo sapiens
aaataacttaagatttatttttgatacctaaaatattaacactcttgattaatgaaaattatgtttttataggcttattatctttcccagcacattattatctttattattattatcttttcctgaccacagctacatcccctgccctcagggtcatcgtattaaccttcctgtaccaggagaacagaatgcatttccagctctctcctagggatcctgctgcctctacttttatgttaaggacacgttaaaaatgcattctccagtcttatatatttcttgtatgctctccctctgtckttttatggctttgttttttttggtctggttttacccattacctatgctaatgttttctattattaaagatccacagttgcttatctgcaatccttaattctaaaagcaaaattcttataatggtg

SEQ ID NO: 228075 - DNA, 452 bp, Homo sapiens
cgaaccaagctcttcttggttatttatgaagtcaaccttgaatactaaccattttctttttccttcatgaattattgcccgtgacttacaaaggaatagaagcccaatctcagtttaacagaaacatgaaycagacaaaagccatgtttgagtgttatctaatgaaaatactaaaacactagcatggagtggaatgtaagcccttaaaatctgcactagcggactgggaattaaagagatggaaaggatactaaccacttgagaaaacaacaagaagaggactgttctattttttgcattaatatcaaagaaagtggagtgatttaaagaactctgaaattgaggataattaaagctggcatgataaaaaggaggaaggcacagaatcaaaaactaaatgtttatatacaatacaatgcagcttgatgctgtctctctgaaagtagaaaaga

SEQ ID NO: 228076 - DNA, 452 bp, Homo sapiens
cgaaccaagctcttcttggttatttatgaagtcaaccttgaatactaaccattttctttttccttcatgaattattgcccgtgacttacaaaggaatagaagcccaatctcagtttaacagaaacatgaaccagacaaaagccatgtttgagtgttatctaatgaaaatactraaacactagcatggagtggaatgtaagcccttaaaatctgcactagcggactgggaattaaagagatggaaaggatactaaccacttgagaaaacaacaagaagaggactgttctattttttgcattaatatcaaagaaagtggagtgatttaaagaactctgaaattgaggataattaaagctggcatgataaaaaggaggaaggcacagaatcaaaaactaaatgtttatatacaatacaatgcagcttgatgctgtctctctgaaagtagaaaaga

SEQ ID NO: 228077 - DNA, 567 bp, Homo sapiens
tggatcagccccattattattcatatcatcacaagtgctttctaagatgttgtcaccagattagggcacaaagtggggaagagagctggaagggcttctccttaaagagtatggttattgtacttcacttccatgcttaatcatttgataacactcacccacagttgctattttggatactctataaaattcccaggcagttacccatttaatctaacataaatatgtgttaaaatcttttctgctatttctcaaggtcacgtgtttgcccatggaacttagagtactggcatctcactcagtcaccgcaacaatggattaaatccttcttgacaggtggtacctctgtgttcctagtggcatcataccacagaaggcttctccctcacactaatgggactgaatcaataacatcagactaaaaacattaaccttaggagtcttattattctgaaaaatataataaaaccttcagaatgaaggttttattattaaaactcagacccaattaaaatgatacaaatgagaaagctagaactttgakaagttagattacccaactttaca

SEQ ID NO: 228078 - DNA, 484 bp, Homo sapiens
aggagtgaggtcccaattcatcactggctggtagttggggcctctcagcaatgtcaggctgcctgcattgctcttcatagagcccagttcattttctaaaccagcaatggtgcagagagacattctcctgcttctagtttctctggcttcccctcacccacacctctcttctgtgtctcttctgcctccaaccagagttaaatctcttaagtgctcatgtgattacatggagcccactgcatgaatcacgatcrtctcctaaggtctgcaaccttaattacatctgcaaaatcccttatgtgatgtaacatattcagtttccagggcatcttggagagtcattctcattcttgctgccacaaaatattcctcattccttcatgaaatgttgtttgctttcatatatttgtctctagagaagcatcaggtattttctcaacatcccttcatgttaaaaaccctcaacaaatgaggcattggagga

SEQ ID NO: 228079 - DNA, 474 bp, Homo sapiens
caagaaacccatatcacagatcctcatgatggtaaggaagcctaatgggaaggaaagaaaaaaggacattttattttttgcatttaaaaattattcatgtgaagtctccatttcatctaatattttaagaatcagttcttactttaacagctgcccatgtaatatagtaatttagttttatttatttatttwtttttaagacagagtctccctcttgtctcccaggttggagtgcagcggcgcaatctcagctcactgcagcttacgcctcccaggttcaagcaattctcctgcctcagcctcctgagtagctgggattacaggcgcccgccaccatgcccagctaatttttgtacttttagtagagacggggtttcgccatgttggccaggctagtctcgaattcctgacctcaggtgatctgcctgcctcggcctcccaaagtgctgggattacaggtgtgagccactgggc

SEQ ID NO: 228080 - DNA, 474 bp, Homo sapiens
caagaaacccatatcacagatcctcatgatggtaaggaagcctaatgggaaggaaagaaaaaaggacattttattttttgcatttaaaaattattcatgtgaagtctccatttcatctaatattttaagaatcagttcttactttaacagctgcccatgtaatatagtaatttagttttatttatttatttatttttaagacagagtctccctsttgtctcccaggttggagtgcagcggcgcaatctcagctcactgcagcttacgcctcccaggttcaagcaattctcctgcctcagcctcctgagtagctgggattacaggcgcccgccaccatgcccagctaatttttgtacttttagtagagacggggtttcgccatgttggccaggctagtctcgaattcctgacctcaggtgatctgcctgcctcggcctcccaaagtgctgggattacaggtgtgagccactgggc

SEQ ID NO: 228081 - DNA, 559 bp, Homo sapiens
tattaaaacaggcacatagaacaatggaacagaatagagaacccagraataaagctgcatacctacagccatctaatctttgacaaagtcaacaaacataagcaatggggaaaggactatctattcaataaatagtgttaagatcactggtgagccatatgcagaagaatgaagctagaaccctacattttaccatatatgaaactgaactcaaggtggatcaaatatttaaatgtaagacctcaaactgtaagaatcctagaagaaaacctatggaacaccattctggacattggccttgggaaaggatttataagtcctaaaagcaattgcaacaaaaacaaaaattgacaagtgggatccagttagactaaagagcttctgcacagcaaaagaaactatcaacaaagtaaacagacaacgtacagaaagggagaaaatatttgcaaactatgcatccaacaaaggtttaatattcaaaatttatgaggaacttaagcaattaggcaagcaaaaaagcaacaaccccacttaaaaatgtacacaatatatgaacaaa

SEQ ID NO: 228082 - DNA, 559 bp, Homo sapiens
tattaaaacaggcacatagaacaatggaacagaatagagaacccagaaataaagctgcatacctacagccatctaatctttgacaaagtcaacaaacataagcaatggggaaaggactatctattcaataaatagtgttaagatcactggtgagccatatgcagaagaatgaagctagaaccctacattttaccatatatgaaactgaactcaaggtggatcaaatatttaaatgtaagacctcaaactgtaagaatcctagaagaaaacctatggaacaccrttctggacattggccttgggaaaggatttataagtcctaaaagcaattgcaacaaaaacaaaaattgacaagtgggatccagttagactaaagagcttctgcacagcaaaagaaactatcaacaaagtaaacagacaacgtacagaaagggagaaaatatttgcaaactatgcatccaacaaaggtttaatattcaaaatttatgaggaacttaagcaattaggcaagcaaaaaagcaacaaccccacttaaaaatgtacacaatatatgaacaaa

SEQ ID NO: 228083 - DNA, 559 bp, Homo sapiens
tattaaaacaggcacatagaacaatggaacagaatagagaacccagaaataaagctgcatacctacagccatctaatctttgacaaagtcaacaaacataagcaatggggaaaggactatctattcaataaatagtgttaagatcactggtgagccatatgcagaagaatgaagctagaaccctacattttaccatatatgaaactgaactcaaggtggatcaaatatttaaatgtaagacctcaaactgtaagaatcctagaagaaaacctatggaacaccattctggacattggccttgggaaaggatttataagtcctaaaagcaattgcarcaaaaacaaaaattgacaagtgggatccagttagactaaagagcttctgcacagcaaaagaaactatcaacaaagtaaacagacaacgtacagaaagggagaaaatatttgcaaactatgcatccaacaaaggtttaatattcaaaatttatgaggaacttaagcaattaggcaagcaaaaaagcaacaaccccacttaaaaatgtacacaatatatgaacaaa

SEQ ID NO: 228084 - DNA, 545 bp, Homo sapiens
aggatcactggggatctaatcacagtcccacactgaccagctgtgagacctgagcacatcacctgacttccctgactgtttcccagtttcgcaacagcaattgtcagaggtgtttgaaccagagcaactccatcttgaataggggcaggggaaaatgaggctgagamctactgggctgctttcccagatgcttaagccattctaagtcacaggatgagagaggaggtcaagacaagacacaggtcataaagaccttgctgataaaacagtttgcagtaaagaggccagccaaaatccaccaaaaccaagatggtgatgagagtgacctctggtcgtcctcattactacactcccatctgcaccgtgacagtttacaaatgccacggcaatgtcaggaagttactctatgtggtctaaaaaggggaggcatgaataatccaccccttgtttatcatattatcaagaaataaccataaaaatgggctactgtctatgaagtagccattcttttattcctctacttaataaacttgctttcactttat

SEQ ID NO: 228085 - DNA, 545 bp, Homo sapiens
aggatcactggggatctaatcacagtcccacactgaccagctgtgagacctgagcacatcacctgacttccctgactgtttcccagtttcgcaacagcaattgtcagaggtgtttgaaccagagcaactccatcttgaataggggcaggggaaaatgaggctgagaactactgggctgctttcccagatgcttaagccattctaagtcacaggrtgagagaggaggtcaagacaagacacaggtcataaagaccttgctgataaaacagtttgcagtaaagaggccagccaaaatccaccaaaaccaagatggtgatgagagtgacctctggtcgtcctcattactacactcccatctgcaccgtgacagtttacaaatgccacggcaatgtcaggaagttactctatgtggtctaaaaaggggaggcatgaataatccaccccttgtttatcatattatcaagaaataaccataaaaatgggctactgtctatgaagtagccattcttttattcctctacttaataaacttgctttcactttat

SEQ ID NO: 228086 - DNA, 520 bp, Homo sapiens
atcacctgaggtcaggagtttcagaccagcttggtcaacatggcgaccccatctctactaaaaatacaaaaattagcaggtatggtggtacacacctgtaatcctggctacatgggaggctgagacatgagaatcacttgaacctgggaggtgaagtttgcagtgagctgagattcttccaccacactctagcctgggcaacagagtgaggcttcatttcaaaaaaataaaaaataaaaaattttacaaaataacatgatacatgcaataatctaagtatgtagataaaagcttttgagaaaatattcaagggactccaaaaattttatatgtctagaggaaagaaataaggctgaaaagtgatacagatgctagcaaacaaagggtcccctatgcaatgcactctgccagattcttacggacatgagagttatattctttgattaatacaattttattttttgcaaacatataccagtaaastatttaatatttgatttacgtttttaatttgtatata

SEQ ID NO: 228087 - DNA, 596 bp, Homo sapiens
taaagtaataattaatattctgttgcacacttatgcagtgatatttttcattataaaataagcctaatctggtcatcacaccttttccaagttatccaatttctaagctcctttttatagaaaatctcaaaaatgtgcttatgcttgtgttttgtacttcctcagcccacttctggcttatatccaatccaatcaggcttttatgtccaccaatactcttgttgctgaaactagcatgttcaataggcagtattaagttcttacacggcttgtactgtcagcaytatttgacataagtactctgtcttaatttttgcttttagttttcaggacacagtctttctgttctcttccaatcttactgtatgctccttttaaaatgctgtttgcttaatctctaattcttatagatttctaatgttgtggtgacctgattcatcctattctcttttctatttgcatacatgccgccatctcttacagttatattagttaaacaccatttagcgataacttaaatttctgtctccaaaactgtattattccttggattccagagtcatatatttaactgaatacaaaataaggccacttag

SEQ ID NO: 228088 - DNA, 596 bp, Homo sapiens
taaagtaataattaatattctgttgcacacttatgcagtgatatttttcattataaaataagcctaatctggtcatcacaccttttccaagttatccaatttctaagctcctttttatagaaaatctcaaaaatgtgcttatgcttgtgttttgtacttcctcagcccacttctggcttatatccaatccaatcaggcttttatgtccaccaatactcttgttgctgaaactagcatgttcaataggcagtattaagttcttacacggcttgtactgtcagcattatttgacataagtactctgtcttaatttttgcttttagttttcaggacayagtctttctgttctcttccaatcttactgtatgctccttttaaaatgctgtttgcttaatctctaattcttatagatttctaatgttgtggtgacctgattcatcctattctcttttctatttgcatacatgccgccatctcttacagttatattagttaaacaccatttagcgataacttaaatttctgtctccaaaactgtattattccttggattccagagtcatatatttaactgaatacaaaataaggccacttag

SEQ ID NO: 228089 - DNA, 518 bp, Homo sapiens
cttttagttgaaagaaattagaagcaactagtttaatctttgcaaattacctatatacatatataatgtaggtgaaatatatgctccttcctatgtgtaattaagttattaagctctcagaaatattgtaagtgaaaaaaaatgtggttcttactccagctacttctacctacttcaaattcaacgaatgttttgttattctaagtgtggtgtgtgtgtgtgtgtgtattttttcttcatatctatatagacaatatttaaaataattacagataggcaaaactttccagtcatatgttctaggaagttgctttgattattactttatgtatttttcccaaaaactatgaaacgtgtgagatgttcaccttagttgccagaaaatatgttagcctgtcacagtttcatgaatactggcagaccacggaagactcctgggtaagagataggaattagatttcttctaattcagcaagccgcatragctttacggttgcatcagctctcttcatcttctg

SEQ ID NO: 228090 - DNA, 578 bp, Homo sapiens
attactgggtatatacctaaaggaatataaatcattctactacaaagacacatggacacatatgtttattgcagcactatttacaatagcaaagacacggaaccaacccaaattctcatcaacagtggactggataaagaaaatgtaktacctgtacaccatggaatactatgcaaccataaaaagaaatgagattatgtcctttgcaggggcatggatgaagttggaagccatcatcctcagcaaactaacacaggaatagaacaccaaacgccgcatattctcactcataattgcgagttgaacaatgagaacacatggacatgatggggagaaacacacaccagggccagtcaggggataagggctgaggggggagagagcattaggacaaatagctaatgaatgtggggcttaaaacctgtatggtgggttgataggtgcagcaatccactatggcacatgtatacctgtttaacaagcctacacgtcctgcacttgtatcccagaacttaaagtaaaataaataaatattttttaaaaaaagtaaactaatacaaaatatttaaataactgtt

SEQ ID NO: 228091 - DNA, 597 bp, Homo sapiens
aaaacaaatactcctgttgtaaatatataaacagtatataaggttacctaagtgtttatgtggaagctggatagcctaatgtataggctgtcccaattataaattgatggcttacctgttctaaatgtacacttaaatgcccttctttgtaacattggagctctatctggtaaacatctctttttgacagctcaacaagtattagactttgtcaggagagagtgttcaaaggataactgagaaaggaaggagcccctctcctcttctatgtgaagcacttacacatatatactcttgcttataggatatggctaccaggagaaagcttgcttgttggtgggaagattccttktcagttgtctgaaggagacccagtaatgaatgccctttggtaagtttctccagcacatagttagagagcttcttggtgaattttactttactgcagagggtaattcttaccaagttttctagcaaggcagtggacagcttctaactgagtttcaccaatagctcagtgacagatttccttcctgacagtcctaacctacaacaccttagcatatcgccctgccattaagtaaacagcagcctcac

SEQ ID NO: 228092 - DNA, 599 bp, Homo sapiens
atcatactctagagctcatggtagagggactgaattgtgctcaaggatctatagatatgtctgactgtgagtgttatgtgtgccctggaacaggcaactgtcataaatatctgtatcctgaaaatgcaaaacttctatccatataaataggacaatatttttaagttttcttgatacagtatatggtaccttctagatatagcataaggaagtgaaggaatacacgttacaggcctgttggwgaatatagtaaaattaattgggatgtatgttatgaacatgcacaaatgcggaagaaaaagcaacaactcaaactcaacacaagctaagaagtttttgtaaaagctttgcaaagcataaagcctttcttcctctaagaaaataaagggtctctgatgggatagaaatagttacttcattaaaaatcatttgcgtttgatattctttatcaaatattgatgttgatattgaatattgatattcttagcctatagttagcattttatttctatggaaagaataaatatttctataatagcatatgagtcctggcaaatttccataaactttttgcttaaaacaacacaaatttattgtct

SEQ ID NO: 228093 - DNA, 596 bp, Homo sapiens
agaattagaaaatatattataaaattcatattgaagcaaaaaagagcccaaatagccaaactatcttagcaaaaagaacataactggaggtatcacattacctgacttcaaactatgctataaggctacaataaccaaaacagcatagcactggtacaaaagccaacacatagttcaatgaaacagaatagagaaaccagaataaagccatacacctaaagccatcttatctttggcaaagtcaataaaaataagctataaggaaaggactccctattcaacaaatggtggtgagatagcttgctagctggttagctatatgcaaaagagtgaaactggacccctccctttcactatacaccagattgactcaaggcagatcaaagacttaaatgtaagacctcaaactatagaatcctagragaaaacctgggaaacactattctggacatcagctttaggagagaatttgtgactaagttctgaaatacaactgcaacaaaaataagaattaaactagctctgccaagcaaaagaaactatcaacagagtaaagaggcaacctacagaatgggaggatatatttgccaactatg

SEQ ID NO: 228094 - DNA, 541 bp, Homo sapiens
aatgcattttcacgagcattgttagtggaaagcactaacgggatatttgaaattggatttaaatgataaaattggggaggttaaataagattatttggaaaaagagactaacagacaaaaatgaatagctaatagattatacttggctacagtacctagaatgctgactaacatagtaaatattgtgggttaagtaaagggaaagcttaagaatgattctatgtkgttagttttaccaaatagactagtgccatgtatttttgttttgttttgttttgttttatgagaccgagtctcactctgtctcccaggctggggtgcggtggcaggatctctgctcactgcaactgtcgtctcccaggttcaagcgattctcatgcctcagcctcctgagtagctgggactacaggcgcctgccaccacatctggctaatttttgtatttttagtagagatggggtttcaccatgttggccaggctgggcttgaactactggcctcaagtgatccgccaggagggaggattaagaagaaatcaatca

SEQ ID NO: 228095 - DNA, 429 bp, Homo sapiens
agactgaatcacatgggaactctgtgtttaacctgtttaggaactgccagattgttttgcacaatggctgcacattcccactagcaatgcatgatggttgcaatttatctactgtcctcattaacacttgttattctctggtgtgatttttaaaaatctcattgtcttcttgattctcatttccctaataacaaataatgttgaacatctttttatgtgctcattgaccgactgtatatttttggagaaatgtcaatgmaagtcctttctccattaaaaaaaataggttgtttgtctttttgtttttgagtcctttatgtattctgcatataagtcctttatcagatatatgctatgtaatttttttttctattctgttggctatccttttactttttaatagagttctttaaagcacacaagttttta

SEQ ID NO: 228096 - DNA, 456 bp, Homo sapiens
ggtgtgtatatttcacattttgtttacctatttatttgtcgagggacacttggtttttttgcacatgttggcaattgtgaataatgctgttgcaagcatgggtgcacaaataattatttgaattcctgatctcaattattttaggtataccagaagtggaattgctggatcctatgatgatctatttataatgttttgaagaaactcctcagtgtttttcatagcagctgcaccatattacatttccaccagcagtggactagtattccaatttctccacaccctagtcaacacttattacatgggctgtttgtttgaaagtagccattcttatgggcatgaagtgcctatctcattttggctttaatttgcatttccttaatatttagtgcttttgaacatcttttcttgtasttattggccatttgtgcatcttcttgggagaaatatctattc

SEQ ID NO: 228097 - DNA, 529 bp, Homo sapiens
attgctgtgctcatcaggttkacaactgagtactgtcgtagactaaaatttccaaaaggtggaaatagacgtgttagctaccattctagttacttgatttatctacttttgataatgatgatgacaacatttatgtgatgatgatggggatgaaaaaaagatctgatttcatgctcacttatgagttttatctttagattttttttaaatgatgtcctagtttatagaagattgtgagtcgatgcagatgaaggaagaaatccaaaatagactggatgctaaaataccaagtaaagatggcaaattacagaaataatgggatctcatactggtgattctcaaactttgctgcactttcaaatcacctggggagttttgttagaatcctgactctcattttttaccccataccaaataaataagacagtctgaggtgaaacataggtgtcaagtgatttttgctttgttttattttgtttataactcccttgattatttcaacatgcaaacaaacttgaaagccaatgca

SEQ ID NO: 228098 - DNA, 529 bp, Homo sapiens
attgctgtgctcatcaggttgacaactragtactgtcgtagactaaaatttccaaaaggtggaaatagacgtgttagctaccattctagttacttgatttatctacttttgataatgatgatgacaacatttatgtgatgatgatggggatgaaaaaaagatctgatttcatgctcacttatgagttttatctttagattttttttaaatgatgtcctagtttatagaagattgtgagtcgatgcagatgaaggaagaaatccaaaatagactggatgctaaaataccaagtaaagatggcaaattacagaaataatgggatctcatactggtgattctcaaactttgctgcactttcaaatcacctggggagttttgttagaatcctgactctcattttttaccccataccaaataaataagacagtctgaggtgaaacataggtgtcaagtgatttttgctttgttttattttgtttataactcccttgattatttcaacatgcaaacaaacttgaaagccaatgca

SEQ ID NO: 228099 - DNA, 436 bp, Homo sapiens
acatagcaagggcattatcaaggtctcttgatgaattttttttaaaaaaaaacaaaagcaaacaacagcttgatgagaatgcagattagtgaaaaaatggagtgtttagaacragagaatagaatactatgaaattggagtatggtgaatacaggaatgacaaaagcaatatcttaaaaagataatcttaaaagtataaaagtttttgaataaaaatggtttgtactaaacctgttaaaagtaaaatgtcatttgggggctaatgtaggagaaaatataattttttaaggtttttgacatttttattttgcaaaaatgcagaatatacattttatttaaaaatctatactgtatacattctcaactataaataatatttgagaaaaacattaaatgtaaatatttccatttcactctaaacaaatgacaataaaat

SEQ ID NO: 228100 - DNA, 669 bp, Homo sapiens
caccacatgttctcactcataggtgggaattgaacaatgagaacacttggacataggaaggggaacatctcacacctgggcctgttgtggggtgggggaagggggaaggaatagcattaggagatatacctaatgttaaatgacgagttaatgggtgcagcacaccaacatggcacatgtatacatatgtaacaaacctgcacgttgtgcacatgtaccataaaacttaaagtataattaaaaaaaaatttttcctccaagtcatgaaggtaaacataaatgaagtggtgtattagtctgttttcacactgctatagagaaacaccccaaactagataatatataaaggaaagaggtttaattgaattctcatggttctggatggctggggaggcctcaggaaacttacaaccatggcagacrgtgaaaaggaagcaagcaccttcttcacaaggcagtaggagagagaagaatgaaggatgaacgtccaaacacttataaaaccatcagatctcgtgagaactcactatcacgagaacagcatgggagaactgtccccatgatccaatcacctccctctcttgacacagggaattacaggtccctccctttaaatgtggggattacaattcaagatgagatttgagtggggacacagagccaaaccat

SEQ ID NO: 228101 - DNA, 549 bp, Homo sapiens
gggcaaaatgatagaattatgaggtcaaattgaaagcaaaactatgaaaaccttatgaatactattttaaatgcaaaaacgattatacattacacatttgatatttttcactcaactttttattttcaaggtctttcatagtttttaaacttattagtggagttttcagtgtgtttctttatcctaagaaactaactttataaccctttccccatataactaaatataccttatgtatttattttargaggttttattattatgtaggtatgctaaggtgaatagattagaagaaaattgcaactgaaaagatagtttcttagtcatatactatggtctgaatatttgtgcccctcaattaataacttgaaattttaactctccgggtgatgttattaggagttggtaccattacccgtggcaaatattcaagttactggtggcaaatatgtacaggtccacagcaaccttaattcttgcctccttagaagaacgaatttgactgaggggtataaggcagaaaaagagactgaggcaagttttagagca

SEQ ID NO: 228102 - DNA, 507 bp, Homo sapiens
tttccatgaattttctctcttcaaacaggtcaccagtcccaaagggacatgtcatgccttgcctgtatctgtagttatataccastgtatgtgttccccatggcatctagcatacttcctcaaactcagaagttagttgatgtttgataaatgctgtcattgattttatgtactcatatatagatgtggattaaagatagaacgaatttttagttttatggaatgattcaatttagtatgtgccttctgggattttcttgggtaaacatcatcagcaagcttgtttctctatcatgttatacctccttggcagagctctgctgtggatgattgttgttgaagtgaaaggagggaaagggataagattctgaaatgtgatttgggtccttttgaaaactgacatagcatttcagattccaaagtacttgtgttgtccaccttcatgaaaagttgagactaaaagaaagaaggtattataaagtttaaaacattggattgcctcaaatc

SEQ ID NO: 228103 - DNA, 507 bp, Homo sapiens
tttccatgaattttctctcttcaaacaggtcaccagtcccaaagggacatgtcatgccttgcctgtatctgtagttatataccactrtatgtgttccccatggcatctagcatacttcctcaaactcagaagttagttgatgtttgataaatgctgtcattgattttatgtactcatatatagatgtggattaaagatagaacgaatttttagttttatggaatgattcaatttagtatgtgccttctgggattttcttgggtaaacatcatcagcaagcttgtttctctatcatgttatacctccttggcagagctctgctgtggatgattgttgttgaagtgaaaggagggaaagggataagattctgaaatgtgatttgggtccttttgaaaactgacatagcatttcagattccaaagtacttgtgttgtccaccttcatgaaaagttgagactaaaagaaagaaggtattataaagtttaaaacattggattgcctcaaatc

SEQ ID NO: 228104 - DNA, 574 bp, Homo sapiens
tcaatttcaaaatctggaaactggcatagtgccacctattcttcaaaattttgttaagcaaattaaaaggctacaatgtagattattaaccccatttcataggaagaacataatctatgatctagattattaaaaggctacaatgtagattattaaccccatttcataggagggacataatctcagatgaaagaacagacctttagattgaacatatttagcttgataaggtactctttatctttatttttctattttgctaaggcaacttggtacttggggatggattgagaatgctggtatttgggaatctccactgtaactcccagcctctgttagattggagtagcttcttaccaggttgtgtttaccttagtacagaattgcatttctatgactgtcaggcaggtggactgtcaaacgtgctaggaaaagcgaagtgaaacctgtcgttaagccttaagggtagccaatgcactttccagagaaggccccaagcttatacctagagacagttgygcagttttccttggaaagtatttcagaatccgtgtagatgttcaaaaaataatgc

SEQ ID NO: 228105 - DNA, 574 bp, Homo sapiens
tcaatttcaaaatctggaaactggcatagtgccacctattcttcaaaattttgttaagcaaattaaaaggctacaatgtagattattaaccccatttcataggaagaacataatctatgatctagattattaaaaggctacaatgtagattattaaccccatttcataggagggacataatctcagatgaaagaacagacctttagattgaacatatttagcttgataaggtactctttatctttatttttctattttgctaaggcaacttggtacttggggatggattgagaatgctggtatttgggaatctccactgtaactcccagcctctgttagattggagtagcttcttaccaggttgtgtttaccttagtacagaattgcatttctatgactgtcaggcaggtggactgtcaaacgtgctaggaaaagcgaagtgaaacctgtcgttaagccttaagggtagccaatgcactttccagagaaggccccaagcttatacctagagacagttgtgcagttttccttggaaagtatttcagaatccgtgtaratgttcaaaaaataatgc

SEQ ID NO: 228106 - DNA, 507 bp, Homo sapiens
ttaattgtataggtagaaacacaatctataaagtataataatttagtcaaataaaatcttttaaaagccycaaatttgtgttttatttgtacatatcaaaatttattctatgaagcagtacattaaaatattaaacactgaaatgatggaattttcaaattaaacactacagtatatatatatttacatatacatatatacacacacatacatacatatatataaattcgtaatatggaagctgttgttaatttaaataattttaatgaggttaccaagatgtgtcaaaaaagcagcatgcttttctaagattatttttaattcttcctagttcagtaagaactcatttcaggttttagataaactggatgatatgtgattttttgagaatttttttcatcttgaaattgatttattaatgtctagttgttgtcagatctagcctaaaatatgactttaacagtaaatattgtgtaaaatatgtatacaaattatgttagtttccat

SEQ ID NO: 228107 - DNA, 519 bp, Homo sapiens
attcacagtaactttaagaaacgtcaggggaaccaacccgccagaggtggacgaaatccccaagcctgagaaatgagaaagggtgtgattactgtggttactactaattcagcaataaaaccgcaaacagayaacaaccacagaaccataccattaaattccagggcctggcacactctagtgccacttccgagtcattcaggtcactcctgtgtaaaacatgctgagaaactcacactaaagcaaagtgggtaattttaataggtaagtattccaccaccgaattgaaaaccttagtccaacgtggaggtaagacaccagaagcaggaagagtgtaactaaattggagtaaactgtattttgtagaagttcaggatttaacttactgcgaagatagtatgttaatcctatttcttgcaggtttatgttctgccacagagttgggctaggaacagtgccctgatctattttgaggtgtccttaatgttctcattggtctcaaatcagtggttcagcgat

SEQ ID NO: 228108 - DNA, 519 bp, Homo sapiens
attcacagtaactttaagaaacgtcaggggaaccaacccgccagaggtggacgaaatccccaagcctgagaaatgagaaagggtgtgattactgtggttactactaattcagcaataaaaccgcaaacagacaacaaccacagaaccataccattaaattccagggcctggcacactcwagtgccacttccgagtcattcaggtcactcctgtgtaaaacatgctgagaaactcacactaaagcaaagtgggtaattttaataggtaagtattccaccaccgaattgaaaaccttagtccaacgtggaggtaagacaccagaagcaggaagagtgtaactaaattggagtaaactgtattttgtagaagttcaggatttaacttactgcgaagatagtatgttaatcctatttcttgcaggtttatgttctgccacagagttgggctaggaacagtgccctgatctattttgaggtgtccttaatgttctcattggtctcaaatcagtggttcagcgat

SEQ ID NO: 228109 - DNA, 519 bp, Homo sapiens
attcacagtaactttaagaaacgtcaggggaaccaacccgccagaggtggacgaaatccccaagcctgagaaatgagaaagggtgtgattactgtggttactactaattcagcaataaaaccgcaaacagacaacaaccacagaaccataccattaaattccagggcctggcacactctagtgccacttccgagtcattcaggtcactcctgtgtaaaacatgctgagaaactcacactaaagcaaagtgggtaattttaataggtaagtattccaccaccgaattgaaaaccttagtccaacgtggaggtaagacaccagaagcaggaagagtgtaactaaattggagtaaactgtattttgtagaagttcaggatttaacttactgcraagatagtatgttaatcctatttcttgcaggtttatgttctgccacagagttgggctaggaacagtgccctgatctattttgaggtgtccttaatgttctcattggtctcaaatcagtggttcagcgat

SEQ ID NO: 228110 - DNA, 576 bp, Homo sapiens
actaggtgttaggcaccatttctctcttaggtaccattatatatagtctttctccttattaagaaaatgacttaaaataatacttcccaaaagctrttttttggaatacttattatttgttcagcaattttttgagctcctagaatgtgttaggtggtataatccatgtaggtcttttagttgtcaataaatatacattgttcctgtttcaatctagtgatgttatgagggatgagctgaagaagatttttttttttaaagtgtgagtctttggttgcaactgaaaactctctgcctaatttaggcaagaaggaacttagtagaaggatatcaggagctctaagaattgatgggaagcctagctagatacccaggatagaaagccagcaggagaactccagagggcacagaagcagtgacaacaggataatatcaggacaggaacgttatgagatggtgtcttccattgctgaaatgggtgagtcccaattgattgctctttgtactcccagttgtagtctgcagcttccagttgttttagcctggagcattggcctgtccctcagttgtggtagt

SEQ ID NO: 228111 - DNA, 576 bp, Homo sapiens
actaggtgttaggcaccatttctctcttaggtaccattatatatagtctttctccttattaagaaaatgacttaaaataatacttcccaaaagctattttttggaatacttattatttgttcagcaattttttgagctcctagaatgtgttaggtggtataatccatgtaggtcttttagttgtcaataaatatacattgttcctgtttcaatctagtgatgttatgagggatgagctgaagaagatttttttttttaaagtgtgagtctttggttgcaactgaaaactctctgcctaatttaggcaagaaggaacttagtagaaggatatcaggagctctaagaattgatgggaagcctagctagatacccaggatagaaagccagcaggagaactccagagggcacagaagcagtgacaacaggataatatcaggacaggaaygttatgagatggtgtcttccattgctgaaatgggtgagtcccaattgattgctctttgtactcccagttgtagtctgcagcttccagttgttttagcctggagcattggcctgtccctcagttgtggtagt

SEQ ID NO: 228112 - DNA, 563 bp, Homo sapiens
tctcactctgtcacccagggggaagtgcagtggtatggtctcagcccactgcaatctcaaactcctgggcccaagcaattatcccgcttcagcctcccgagtagccaggactacaggtgcgtaccaccaggcccagctactttttaaattttgtttcatagaaatggggccttgctatgttgcccaggctagcctcaaagtcctggcctcaagcagtcctcccacctcggcctccaaaaatgttgggattacaggcgtgagccactgcaccccagcctacttgtatatttaaagagaagagattaaattttttaagtttaatttatacaaatcataatttaatgattccaagctcagactaattataaattaagtaaaatctagaacagaagattgtggtgctttgttattttatagaatatttatgttaagccaaatttccccaaggcattttcttgggccctggagaaagacacttaagtttacatagtaaagggctaactactttacaaataawgttcacgtgtaatgatttctgactagctaatatttttacaaggttt

SEQ ID NO: 228113 - DNA, 528 bp, Homo sapiens
gttctagctgagtggttttctgtcttgctgtcttgctgtgtcatgtccggggtctgtgtttcttcctctctgattctaaccccattgagtaaattggagatggctgctactctgctctaaggcccattatgtctcagaatgatcccttgcactgggtgtaatacctcrgtctggagaaggttgagttggatttggtgtacctgtgatgggagctaggttcttcatcccaacaccagtcattcaacagtgcttactgaagaaagtccccaagtagttaggatgccgtacatacaaaacagatgtttttctgttagggatttgctgctggagggaagagagttctaccacatgtggtggaagaacagggcctggaagatgggctttgagcctctgtagtgagagcacagttcacatccatgtttgtgctgggatcacggaaagggcttttgatggcattttagttctctgtcgctgatcatttggacccagacttgattttcacagtgctttatgggggctgctgccatt

SEQ ID NO: 228114 - DNA, 611 bp, Homo sapiens
aagcttcttgtggttaggaatagtatttgagattttggtggcatctaattattttgaacttttaaagccttaaagagtgaaatataaggccacaatacatttttctgatagctttcatagtctgttagtctgtgttgcttattttagggggacratgtctaaattgaaatgtttatccactatagttgtaatgatctttttcagcctctttagaaagcagttcattgagcgaagaagagaaaataaaaagaaacataaaagggtaatatgcataggacttttgagcctgttactatttcctagctgaagtttactttaaaaaaaaaaaagtaggcattgggcagacactgtgtgcacgtgtgttggaggaggaggcggggcctgctcatttgtttgcccattgtgaggctgtcctgcacctttgtgcttttttgtaacagggtgaaggcccctgaatagaggccttgtgccctgcttgatttgaaatccatgctgtttatggaaaggaacctgcagggcacccagcgggaagtctgtgtgacaagtggaaatctagaatctggaagaaacgtggtgtttgagggggaaggtggtggggagagtggtcataa

SEQ ID NO: 228115 - DNA, 468 bp, Homo sapiens
ataagtgaattaattagaatgtacattttcttaaatactgcacataccttcagcttactccagtaccagacatctgcatgcacaccccacattctacattacacagatattgcacaagtttcaatgccaaaatactaatgcagtctggcaagatttagggtttacctttcagtattattttgtgaaagtattcagattsaatactatttcgcagaaaagctacatgaccaatttcaggaaaagaatgcttgctatctttccttgatccacagtattaaaatctgtaacaatatatttaggcatttcatttatgttttccagcatttaaaattccgcaaaacctgtgtttgaaatttcttatagcattcctttacaaacaggagaagcttcgtctaatgtaaaaaaaattaaaggagtccacagggcaataatttttccaccagaggtctcactctacattctgaaaag

SEQ ID NO: 228116 - DNA, 490 bp, Homo sapiens
atgaaacatattagaatcagaacctattacaccagatacagtccctcacgacaaagctgtctagtaaataaagttttctctttatcatgtcttcctcccacagagaatcttaattgtgttctttcagacagtaatggttacctgcaaagcagcatcatgctaagaaaatgacatttttctcagtgtctctaagtgtttgaggaaaggatttagatattggctgtatatctgcctctttctattatttaccctattttatttcttactgggcttacccctagatcaggtggaatcattcccaaaataagatgaactccacaacaggtggccagatggtgagaagcaggaaagtgcccgaacagttgacttgttgagttttcagtttttgcatataaccatctggtttaacaagccatagttccagctgaaaacagtttctcttttaagayattattgctccattatctggacataacaaatgagaagaggt

SEQ ID NO: 228117 - DNA, 614 bp, Homo sapiens
atttatttgctcatttttttctttttactcatcagtggtcaaatagcatattaacacattmgtctttttaaaggatataaaggaggtctgatcatttccttttggagcctagtccagcatgtatttcagaaattttaaaaaaagtcatttatgatgtaaccaagcttaaattaatattgctgcttgaatgcaaagaatcgtattcataaagatgactagagtctcaaccattgtgcacttttcttacttggtctgtgggaactttttgcatgtagtgggtggaaacagaattccagtgttcctaggccccttggtaaaactctatctcaatatcacctcttagcctatgcagacggtttggaaagaccacttacacaatttcagtaaaacatcttgtcagatttttatctgaactttatttgtccccatcttgattgctaattaatgattttaagatattcaattaacctattttgtccgtaactcaagttaacctataaatgtaaaaaccttttgaggtggcattaaccattttatctgcacctccaccccatcaccatatttggttaactgacaaattcactgattataatcaagtataggtaacacactat

SEQ ID NO: 228118 - DNA, 543 bp, Homo sapiens
taaaactctatctcaatatcacctcttagcctatgcagacggtttggaaagaccacttacacaatttcagtaaaacatcttgtcagatttttatctgaactttatttgtccccatcttgattgctaattaatgattttaagatattcaattaacctattttgtccgtaactcaagttaacctataaatgtaaaaaccttttgaggtggcattaaccattttatctgcaccyccaccccatcaccatatttggttaactgacaaattcactgattataatcaagtataggtaacacactattcatgaaaagtaatggtgctggagctaatttttggctctcgcttttttacttttgatggtacctctatttcttcctttactttcctttctcaacttcatttcttcctgctttcataaatcagataaactttgttattcccatgaatatttaactgtaaattctataaatttaggcatgctttttgttacttagtccatatgaaaattaattgaaactttcaatatgtatactaatttagaatt

SEQ ID NO: 228119 - DNA, 591 bp, Homo sapiens
tgactgaatatattttagcaacatagttagacttacattttgtagttgtcatttcatttgtatattaagaatgggtcagcgagaggcaagaaagtagattgttaaacacattagtgttcctaaccaatcccagttccaattcctacacaattggagtcacatgcctgagaaatgatgtggggtaaagagaagcggatagagwtatgaagagatgttaaagatgagcattagagaggcacggcagtagattggctaagaagagaaaggacaaagcgggtaaaaactaaaactcaggttcctggattaaaaacttgagggatggatgtcctctcatgcacatgcatacatgtgtgcatacacatacaactacacacacacacacacacacacacatctgtctgtttcttactgctagagatttccattttattaccttgagttcaactctctattttttacattttatgaattactcttatattcttctgaatttatagtgtcacacgagcccacaggttgaaatcagttattttccaccgtatattttttcctcaattttaaacattttaatgaatatctatacacatcaaa

SEQ ID NO: 228120 - DNA, 600 bp, Homo sapiens
atatcctaaagatacagcttgataaattttcacaaagaaaacacatccatgtagccagtaccttgattaagaaatagaacataaactgaaagccagatacccctggagcctgttttcattcataaccagctgcctcaaaggtaaccgcgattctgacttctactagctttagaagggtttttgttttcaaaatttatatatgttgaaaaaaaaggtagtgtgctgggttttaatttttttcatgttgtttgtttttcattatttkcaggctttaaatttaatgtaagtcaagtgattgtgccctatagcactttggttcatgctgttgtaggcaggaggctgattatttctgtgaaaatagtaactgaaaaacatcagagtgagagtagaatataaagagaatgaaagacatgggctaaatacaaaattatacatggaaggaatagaaaattcaagctaggttatatctgttttcataatgtttatgcaataaggttctaatttgtatttagcaagattgttaataaaatgataccatctttattttaaatcattgatgcaaataatttattataacatcaaataataattttaacattt

SEQ ID NO: 228121 - DNA, 630 bp, Homo sapiens
tgtttaaacaattttatgctgtgttttatagcattcaaacatgagttctgggaaaataaaacaggactggtgagaggaatcatggtgccgatagacaggagtaaactgattcaagttattgggcaaagatgccctcgatgctagagatttggatttgatagacatagtaataaaaatagaaatacagtggtataaaatctacctaaaaggggcaaaatcaagattgctgactagttgctggtagtgtgtgtcttctccacagagaagagccagaagagtaagcagatacattttgaaaaaatcttctagaagagaaagcttggcttcacgggaaaagggacagaaaacatcagaataaggaaggagagttcaaggcaccttacccagccaggaaaatgctgagagctgggagargcttctggacatggggaaacagaaagaaagaaatccctagaggtcaaaaactggcttttatcatcttgtatacgggagaaacccttagacaaaccaagcttgctaaagattgcacagagacattgctccaggttgggaacccacacagaatcccacaggcatctgagcctggagcagcctcagctgggacccatcttgagaacttagtactgggga

SEQ ID NO: 228122 - DNA, 607 bp, Homo sapiens
tgaaaaagttaattcatcctaatcaattgggctttagtcttgggatgcaaggatgattcaacatatgcaaatcaataaatgtgattcaccacataaaccaaattaaaaacaaaaaccctgtaatcatctcaatagatgcaggaaatgcatttgataaaatccaatatccctgatgataaaaacctttaacaaactaggcatcaaaggaacatagctcaaaataataaaaagacatccatgacaaacccataaccaacatcatactaaataggcaawagttggaagcattctccttaagaactggaacaagataaggatacccattctcaccatttctattcaatatagtactgggagtcctatctagaagaattaagcaagagaaagaaataaaagacatttaaatagaaaaagaggaattaaaattatctttcttcacagacaatgattctatacctaaaacacccaaaaattgtacacaaaagacctgatatatgacttcagcaaagtctcgagatacaaaatcgttgtacaatatcagtagtatttctatacccaataacattcgagctaagaaccaaattgagaacacaatctcatttaaaat

SEQ ID NO: 228123 - DNA, 508 bp, Homo sapiens
tcccataactgcctcaggttggattcctaccctgtcttcaggacttgaattgcaacagcagtgactgaggaaggacagcaagcacagtgaatcaagactgagttttgacacagtatccaaatcaacatggcttcaatctttcttcctgagtaatacaactaacctaaagaatttggggccaaatttagaaagaatatttaaaagcaacctcagctccagcaccactccctactccagcctgagaaatagttgttcttatttcctttgtattcaaccttgggaaaacagttaatatcatctctgtattagttgtaatctcttaatccccattgtcttctttgacctgaggcatgtgtctcccagtaatctcttcatttagtaatgatcatctgcaatttcttcttgtaatgctaataatmcttggattccacacagggcagagggcagtgacttcccaaaccactgtcttatcttcttttcaaacacattatcaagttaaaacaattct

SEQ ID NO: 228124 - DNA, 547 bp, Homo sapiens
tctcttctcttaccttaattcaaggattatttttcttctctgttgatggcattctttattagaccctgcaccaataattctgcaattccttgagttaccagaattatgctgttttctacatataatagaagcaccctcttctccaattctatgccctgctctgtgttctatcccctgaatcacctatataggtcttctcagtttcatttttatactccaaccctacctcaaccagatcttagagtcctttataaaaacatccttgggttttgtctatacatgctttgcccaatgagtgtcaaaaaatgtcaccaytgggatgagatgtcgtgcctaacacaatccacccacttattcctcactacctttcagaaaaaaaaaaatgccatatgcaaatttctccaaatactgaaaacaacttaagaacatttgcattttcaggagattacttccatatacttccctgaaaaaagacctacattatgtataacacatctactatttctttttgtaaggattaaaaacaggcacattcctatctaatgag

SEQ ID NO: 228125 - DNA, 637 bp, Homo sapiens
tactatatatatgaataaattaaagctacaccatgttattcaacacatattattagtaaagaccatttccatgctgttcttaaaaaaaatgcatatctaacatctagccaataataatgataattcttgtggccctgatcatttgctatttgcagaaaacaatataaactttattttttgtagaaattattataaaatttgattttgaatgacaaatcatgtaagatagattttaaaaaacatggtaaaataaagaattactctttaggatagaaaatttgttttattatccactataaaatggataattttatgacatgcataaaattttaaaagtaaacattaygcaggtcaagtagtttgtaacaagcataaagtcatgttaaacaactgagacttattttacacatttttatactacaaaagaaaacaaagtttaaactcatgactgtatcattgggttttccttgataaaaaataagccttgacttatgtgaagattaaaaaagcagactgcaatttaaatcattaattgaaactttaatgatagcaataagaataaaaataatacaatccagaatttttgctagaaatagagatctcttcgttccataaatagcccaaaatttaaatgagt

SEQ ID NO: 228126 - DNA, 637 bp, Homo sapiens
tactatatatatgaataaattaaagctacaccatgttattcaacacatattattagtaaagaccatttccatgctgttcttaaaaaaaatgcatatctaacatctagccaataataatgataattcttgtggccctgatcatttgctatttgcagaaaacaatataaactttattttttgtagaaattattataaaatttgattttgaatgacaaatcatgtaagatagattttaaaaaacatggtaaaataaagaattactctttaggatagaaaatttgttttattatccactataaaatggataattttatgacatgcataaaattttaaaagtaaacattatkcaggtcaagtagtttgtaacaagcataaagtcatgttaaacaactgagacttattttacacatttttatactacaaaagaaaacaaagtttaaactcatgactgtatcattgggttttccttgataaaaaataagccttgacttatgtgaagattaaaaaagcagactgcaatttaaatcattaattgaaactttaatgatagcaataagaataaaaataatacaatccagaatttttgctagaaatagagatctcttcgttccataaatagcccaaaatttaaatgagt

SEQ ID NO: 228127 - DNA, 489 bp, Homo sapiens
caaaccatagactcagagcaaatattggaaataatatttgatgaagaattgtataaaaatataaaacaaagccttaaaattaaacaatgagacaaatagcacaattaatatgtgagcaaaatatatgyccatttatgatttgaacatataagttgccaaagaaggtatacagatgacaaatatacaaatgaaaagatgttcatcagcgtttgtaattagggaattgcaaattaaaacaataatgatatgcctttacactcctatgagaatagctttaagatcccaagcctggcaatacatattgatggtgaggatacagagcaaccaaacctctccttcattctggtgggaatgcaaagtagtacagtaactttggaaaacagttgggcaatttcttacaaaggtaaacagtcttaccatacaattgcatataattacacttctagatagtcacataaatgatttgaaaagttatgctcacacaaaaac

SEQ ID NO: 228128 - DNA, 622 bp, Homo sapiens
atcaaatgacatcaagttacccatattttcagcatattctgttaacaaaataatttgccacttataaatttggggatgaaaactgctagctatatagtaaaataaagtaacatgagaaatgtttgttttctgcacacatgctaatttataaatgctaattttataaaataaattataaatgcactttttaatatcccttcatgcaatttaaactgatactctatmtcttgtgaaagagaggcagcaaattcttgcattttattgaaggctcactaaagttcctagctgtgaccacttcaatgatgatttgttaaggacttctgcatttttaaggctgaaactcatctggtttaaggttaagctgactagggcgtaaatttgcaacaagagaagcatggtatcatacacaaattttaagagtccatgtgagtcacagcagatagaatcatccttctaaattatatacttttcactgtcaacatttgtgtttttattccttcttttttttctatttaaaataaaaactcagtgatctgtcagtgaagtagcaaaggaaatatatatgagtgaatggcaaatacttaagtaaaagaaaactaatgtgagatggaatttgcattct

SEQ ID NO: 228129 - DNA, 337 bp, Homo sapiens
tgtaagatatatttgtcactttaaaaataacaacatttaattaaacttacttacccaaagtgcaacaattcatatttaatacactcatttatgagtaataaatttaattttaaaaggaaataatgctatgttaaaaccattwttgataggcttaacatttatgcataatttttgaaataacaagggcatttttttgtggaaaaactaaaaaggaatatcttttagattataccgtttccagtttactaaagtgtaattcaccaaaaaaattgtatatatttaaggtacactatgtgattgtgaaataattaccataatcaagctaattaatatgtcc

SEQ ID NO: 228130 - DNA, 613 bp, Homo sapiens
tctttacgtattctgaatgtaatttcattatcagatatatacttgcaaatatctttcccagtcttaacttgttatttcactctcttaacagtatctttcaaaaagcagatgttcttaattttaataaaattcattgtgtaaattcaaccaccttttatggattgtggttttaatatggaacttaagtatcctttcactgattttttttctatggttttgtccatgagtttcataatgttaagttttatatttagggtcatgatccgttgtgagtttttttggcatacaatataacatatggattgagattcattgtttttgcatatggatgtacagttgttccagttccatttgttaagaatatatatttctctactgaatcayctttgtaaccctgttgaaaatcaagtgaacatatgtaaattgtctatttttagactcagtattctgatctatagtgtggtgtgtctaaatggatgactgtaacacagtatcttgaatacagcagccacacaataactgctgtacatagagtttcttctcttatttttcaaaactgttttggtcaccctcgtgaccttttatttccaaataaattttagagttatattgc

SEQ ID NO: 228131 - DNA, 382 bp, Homo sapiens
gaattctctctcagttcagctctgtctgctcagttaggtttcattatctctagctgttttgctctccacctccttccagctctgtctcctcatctcagtgagacgtactggccctgtctgggttttcccttctcttgtggtttagcaacttttctccaggcattaaactgaagaaatcataaggttaccttatttatttcccttctctaagtaattattktccttcattgataaacaacttattgaggaacattattcctctatgcgtgtgtgtgtgtgtttgtgtatgggtgtgtgtataaattatctatcaggtgtgagagtaaatccaattcttgtttctccatcttgactgaaagtggaaataactggttaattttgt

SEQ ID NO: 228132 - DNA, 562 bp, Homo sapiens
tgtctcttttatcaaaacaaatacttcccaaagcaggttttccatttttctctaataagataatattgaacaaatctaggcttacccttctgcaacttttcatattattctcgtttcaagaaattcttcttcaaactaaataaaagataaagagacattattccaactttaaagtcctcaagaaaacaaagagattttgttttttgttgatttttttatttttgctcccattcctctttttccttttcttcacctaagttcttccttctttccaaacttatgtcctttctccaacttccccaatgatttttcctcttctctttcttcttcctcctctgttattttcccttcatataaagacaagttaaatttctctttaatgctcakatgttcaatgaaaggaatccagagatctttaatcaggtgagattatcatgatttgttgatgatgtttctaaagcttttgtgagaaagattgatttttttggtccccccaaaccttgagatgtgggtaagcagtttaagtggagatgtccctaaaagggaatagagaaaaacaaac

SEQ ID NO: 228133 - DNA, 452 bp, Homo sapiens
cagtaataggttaaactttgcttttagaaaaatgcttccattctgatcctaattaacagtacttaaagtgggtttaaatttctacccagtattatactatcccaaaccagcacttattttcaaacagcagtgcaataatcctaagtcacaaattttgccagtagcagtggtgtggtgcagtccaaagaggcctggactgctgtcttactctatactaactaactaaccttgctctggaaggaaattgctcaggcttattctatttagaccagagctgtccagcagaactttctatattggtgaaactgctctgtgctgtccaggatggtagccactagacacatgtggctacygagcactttggcatgtggctagcacaatgtgggaactgaattttaattttaattaaatttaaatttaaatgccacatatggttacttgctatcatacta

SEQ ID NO: 228134 - DNA, 497 bp, Homo sapiens
aaatattaactgaaaaaaagggcctttaaaaatgagctttaatgacaattttagtatgtcttaaaaaggcaagactcaagaatgcccacgtgatcctgtctcagcagaataagtgggtctcagctgcccgtgtccatcacaggcagggtggtggctgatcagaagactgtgttctcgacatgggtgagatgctgggagcttggccactgcccaggcagcacagggaagctccggaamctgggagaccccagcaatgggctttattatgatcccttactcctcacttattcagagcagtactgattctaccaagtgtgtttaaactgtacaccagatctgcctaaaaactccctgagccaaatacctaagggaaatccttacaagctcacaagagacagggatagctcagcctgccaatacttaatggttttctgccctggtgggaagagaaacatacaaaaaaccttttctcttcctgtgggtatgacattattcta

SEQ ID NO: 228135 - DNA, 476 bp, Homo sapiens
ttctattgtattgtcaagagttatcagtagctacctctcccccacactccagattctgagcccttttaaggatgaatttctgcctactgtccaacaaagtggagtgaaaaaaatgtacgcaaatccctttccccaagaaattattgaaaaggtaatatgttaattcttaatacttaaaagatcacgtctcagcactacaaaggtgtttaggcactggaatataaatccatggtaatagctaaactattccaaagtgtaagtcatttcacaggctgggtgtccatatgcagtaggggttcccgggcttgggagagagaacaacsagtccataaatgacaaacttttattatgatatatttatgtcccatgtactttaaaatttttaattgacaaaaattgtatgtattgtgtacaacatgttttgaaatatctatacactgtggaatggctaactctgtcagggaagttgccccaat

SEQ ID NO: 228136 - DNA, 424 bp, Homo sapiens
tttaaaaatctaactctggcaagggttcagagaaatgggcactctcatgcacaatatgaaggaatgaaaactgggactttttagacggtaatttggtaatatttaccaaaatataaaacatgaatactatctgggcaatcctacttctaggatttgttctaaggagataattgtgtaaaatatttatctcagagtaatttgtaatactggaaatctaaaaggaacctacaatagtacacatatgccatgacacatacaaacaacacaatactaagtagcgattaacaatacatggtagagggtgaacaaaatgtggtatataacgatggaatattgttcagccttcaaacacaggaaattctgacacattacaacattgatgarccctgagaacattacgctaagtgaaataagccagtcgcaa

SEQ ID NO: 228137 - DNA, 588 bp, Homo sapiens
acacgactttttaaaagcctattgtactcatttgtatctaaggcctgagagaaatttcccccatgggtctctgtgaaagacataagagagcaaatgtgttatgcagtagagtaaacccttagctcccctccactaacaacagtgcttgtacaacagcaagaaacaatcagtgcatgtaatggttgttcaaaaaaataaaagtcacaaaatttcacagaacaaaggaacttcagtgattatctcgttgttgacctgaaatcacagaggaagggtttactttaaatatctagttacgtctaaggaatattttttaaaatccctagtgactcatgtacctttacttcaagtctatacctgaaatactctatttcttcaaataactcactacragcaaacaagcccaccctatacttcttcagtctctaaggacctgagataggcaacaatacgacttacaatgctcacgtctatccaatggttagaaggaaattccccttcctggactttctcaaaacactacccgctcacttccctctgatctctcacctgcaatctgtgaaaacttgtcagaataggcaacagcccgag

SEQ ID NO: 228138 - DNA, 588 bp, Homo sapiens
acacgactttttaaaagcctattgtactcatttgtatctaaggcctgagagaaatttcccccatgggtctctgtgaaagacataagagagcaaatgtgttatgcagtagagtaaacccttagctcccctccactaacaacagtgcttgtacaacagcaagaaacaatcagtgcatgtaatggttgttcaaaaaaataaaagtcacaaaatttcacagaacaaaggaacttcagtgattatctcgttgttgacctgaaatcacagaggaagggtttactttaaatatctagttacgtctaaggaatattttttaaaatccctagtgactcatgtacctttacttcaagtctatacctgaaatactctatttcttcaaataactcactacaagcaaacaagcccaccctatacttcttcagtctctaaggacctgagataggcaacaataygacttacaatgctcacgtctatccaatggttagaaggaaattccccttcctggactttctcaaaacactacccgctcacttccctctgatctctcacctgcaatctgtgaaaacttgtcagaataggcaacagcccgag

SEQ ID NO: 228139 - DNA, 378 bp, Homo sapiens
aaattagaattaaggtttcccgactgacctccagcaaggtaaaactgcctgtcttcccccaaaattattttcttcctcagactttataaacataaacgaaccttcatatgaaatttctatcccaaattcgtattatttgatggaccagaaagattttaagccaagaatttaaagtggtcctgaggtggtagtgcccccaggttctaggtagaagcaaacgcagatcctattgggaaaaacctaaatgactcaaataattccaacagaaaaatttgcaagaaataatttgttctatctccaaatcacaaaacatagaaggcatcatgaaatargcccagaaagactggagttaacagtatgatcagaagcaaaatataa

SEQ ID NO: 228140 - DNA, 579 bp, Homo sapiens
gattaagtcttacaagatctcatggatttatcaggggtttcctcttytgcttcttcctcattttctcttgctgccaccatgtaagaagtgcctttcacctcctgccatgattctgaggcctccccagccatgtggaactgtaattccaattaaacctctttttcttcccagtcttgggcatgtctttatcagcagtgggaaaatgaactaatacactgtgtgtatgacctcaaatggtcttgaaagcatcatggttattgatttggggattacagataaatgactgtgattgtgagtaggcaaattcacaaattcagaagccatgaatactgaggatcaaccatatattatctcacataagactgctatgggtgactcacattcattctttatccattttgagtgacttctaagatattcaccaaggggcctcagtggtcacaaacaagctggatgggaaagtacaaattactgtaaaaatcaatacacagatactagtacttgggaaaattataatatcagtctcagctcctgatagccatatctccctgtattcatttggttttctaacaaaatgtt

SEQ ID NO: 228141 - DNA, 419 bp, Homo sapiens
ggcacacagggagcatgccatgtggagctggagatggtcacccacaagccaaggagatgctgggggcacattgtcccacccaacccttggaaggagccaccctgggacatcctgayctcagtctctttggctcagagttgggaggcgacacattgggctgttcaagccgttcagtatgtggtgctttgttatgaaagcctgatcggactgatactccattcctccataacagacactgacacagcttccagagtcttctgagaagaaacaagctccggggaataccttacacactgctggcttctttggggaaatcatccctcacaaacgcttgcctttctagcctgagcccttctccccagctgccaagctgcctttccttgaccaaatcattgaagtcccacctgcctcacaaacat

SEQ ID NO: 228142 - DNA, 353 bp, Homo sapiens
gacaaatcccttcacctttctgagcccgtttctaatcgggttgaattagatactctgcatatttaaacaggcttctaagaatctatgaatttggaccctcggtatcctaataagcaggacagacttcatgacagagctacaagatcaccagcagtgatttggggaacctaacgccaaggcctgcgatgcagcctgctctagccaggctcttcctgagccctcactgtgagttccttcacgtagccatgaccatcagctgattggtgttgttaaycaaaaggaagtggtggccttccacctcaagcatatgcacagctataaatgcagagaaggggaagaaacatgaaaaacag

SEQ ID NO: 228143 - DNA, 522 bp, Homo sapiens
  misc_feature (1)...(522): n = A,T,C or G
nnnnnnnnnnnnnnnnnnnnnnnnnctctattttgatcggtatgattgaaaattcagtaaaatcttgctatttaagactccctaaagagagaggaactgcccttctaattactggaaagtgtgaagtattgaacaacataaaygcactttccttttaaaagcaaaccgtagttcagtggagtctaatacagactcagtccctcagctgcagctctaaaaagctctgaaaaacaacacttttttttttttggtaagtcttagagaagctctcgtagtgataacacctgctctaaacagacacacagctctttatagtctttatttattccacttagtgagaatattcatgttcttaaatgtaaaagtacagaaatattaatgcatggaattacaggattctctccagactatattggaatggcatgtaaccagcagggtcaacatgtatgtttacctttctaaattctgagcaatgtctttctcagttctgaaatttagattctaaattttaattccaaattc

SEQ ID NO: 228144 - DNA, 490 bp, Homo sapiens
gaatggttttgagatacccgcctgatacccttctcccaacccatcccccttttccttttggacattcctctttaaaatgttcccacaaaacggcatccagaccttcttgataacactggttggcagtgcctgttttaaaaagctttaccctaagccaaaatgcgagaagcaaaaawatatatatataatgtgctggattgtaattgccatggagaaaatatagggatgggactatttacacttattggagcccccagccttttctgcttccagggttattggattttcattcatttttgccattattttttctaaacctgttaaaagaaaacttcagcagaattaaatttaaagcagtttaattgagtaatgaatgatttgcgaatggggcagcttccagaatcacagcggattcagagactccagggatgcctcatggtcagaacatatttatagacaaaaaaagggaagtgacatacagaaattgcag

SEQ ID NO: 228145 - DNA, 598 bp, Homo sapiens
agtagtcacccctgcagtaggtactgtgaaggaggatgctgaggtcaaggaagaatcttcagcctcagaaatgtctttgattgtgaagtcacagaagctgcctgggtggcagactgcttgtgcactcctgtgcagatcaggggctgcaacccaattcttgccccacagcaggtcagtgagaaggcagacctacaaatcagcatgtgcttgcttcatatgatttgtctcatttaactggccagacagctgaggcttaagtggtgttatcaaaataccaaggctgaaataaatcaacataacagagttttagaacaaataatcaatataaagataattaaaagtaaatacataatctgaaataatttgggggaaataattcaggaacagaatgaagagggaaaccctcaggttctcctcgaaatattgtaagtgagtcagaaaacaggaccagtaatggcagaggcagaagagcggcaggagacggcggttaccccacagcagaacgctgctctgtgagaatcccccagcrggtaccccattccagctgtggttcgcctacaggcagtcagcctccctgaacctctgcagagggcaggga

SEQ ID NO: 228146 - DNA, 174 bp, Homo sapiens
gaattcctagtgtgcagtgacaataaagagcaggctcactggtgcttggttttattattgttttaaaatcccccacagrtgatgagcccccttctagcctgcgccagggcagaccccttgctcaccccgtccttggtgctctgctgggatggcacttctcactgcccttatgtt

SEQ ID NO: 228147 - DNA, 570 bp, Homo sapiens
ctctcttacccggagagccacctattgctgtttccacaggtgtgtttggccgtttgccacctggcactgtcagcttgcttcttggtcgctcaagcctaaatttaaaaggtgttcaagtacatactggtgtaatcgactctgattattcaggtgaaattcacattgtcattagctctgcagtatcttggtatgcagcagcaggagacagcattgctcaacttcttatactccgttacattccactaggatctagttcttgtaagagaaccagaggtttcagaagcacagactttcagggcaaaacagcctatwgggccagcaagatttctgatactcgtcctgtgtgctccatgcatacatattcaaggaaggaagtttgagggaatgattgactcgggtgctgatatcaccattatagcctcatatcaatagcctagacactggcccaaagaatatgcatccacagccttagttggtgttggtcaggcttcagaggtttatgaaaattccactattttacactgtacgggcccagagggacagactggtactgttcaccccctcattacg

SEQ ID NO: 228148 - DNA, 578 bp, Homo sapiens
tatttctctcttacccggagagccacctattgctgtttccacaggtgtgtttggccgtttgccacctggcactgtcagcttgcttcttggtcgctcaagcctaaatttaaaaggtgttcaagtacatactggtgtaatcgactctgattattcaggtgaaattcacattgtcattagctctgcagtatcttggtatgcagcagcaggagacagcattgctcaacttcttatactccgttacattccactaggatctagttcttgtaagagaaccagaggtttcagaagcacagactttcagggcaaaacagcctatagggccagcaagatttctgatactcgtcctgtgtgctccatgcatacatattcaaggaaggaagtttgagggaatgattgacwcgggtgctgatatcaccattatagcctcatatcaatagcctagacactggcccaaagaatatgcatccacagccttagttggtgttggtcaggcttcagaggtttatgaaaattccactattttacactgtacgggcccagagggacagactggtactgttcaccccctcattacgcct

SEQ ID NO: 228149 - DNA, 629 bp, Homo sapiens
ccttctatctcttttttttttttttttttttttttttgagatgcagtctcactcttgcccaggctggagtgcaatggccaatggtgcaatctcggctcactgcaacatctgcctcctgggttcaagcaattctcctgcctcagcctccagagtagttgggattataggtgcccgccaccatgcccagctgattttttgtatttttagtagagaaaggatttcatcatgttggctaggctggtcttgaactcatgacctcaggtgatccacccgccttggcctcccaaagtgctgggattacaggctgagccacccagcccagtccttgccktctcttaaggtaagatgtcattgatggggatggtgaaggtagcttgggggtcatggtggcagtgatatgaggaacctgaacagacagagattgaattcactttggagggagaaggaagaatgtgaatattatcgtgttacaattttatcttatttcctattaacacaagctaatattgtttatattaatttaaaaccaccttttaatatattacaaatattgcccttgtctgtaatatttttctataacaccatttttctttgcataatatcccataatatgtattaaacatttccct

SEQ ID NO: 228150 - DNA, 629 bp, Homo sapiens
ccttctatctcttttttttttttttttttttttttttgagatgcagtctcactcttgcccaggctggagtgcaatggccaatggtgcaatctcggctcactgcaacatctgcctcctgggttcaagcaattctcctgcctcagcctccagagtagttgggattataggtgcccgccaccatgcccagctgattttttgtatttttagtagagaaaggatttcatcatgttggctaggctggtcttgaactcatgacctcaggtgatccacccgccttggcctcccaaagtgctgggattacaggctgagccacccagcccagtccttgccgtctcttaaggtaagatgtcattgatggggatggtgaaggtagcttgggggtcatggtggcagtgatatgaggaacctgaacagacagagattgaattcactttggagggagaaggaagaatgtgaatattatcgtgttacaattttatcttatttcctattaacacaagctaatattgtttatattaatttaaaaccamcttttaatatattacaaatattgcccttgtctgtaatatttttctataacaccatttttctttgcataatatcccataatatgtattaaacatttccct

SEQ ID NO: 228151 - DNA, 563 bp, Homo sapiens
agcaaacggcacaccaggagattatataccatgcatggcttggcggatcccaagcccacagaaccttgcttactgctagtgcagcagtctgacatcaacctgcgaatcagcagcctgccagggagaggggcatctgccattgctgaggcttgagtaggtaaagaaagtggccagggaagctcaaactgggcagaacccaccacagctctgcaaggcctgctgcctctgtagaccccacctctggtggcagggcatagttgaacaaaaggcagcagaaacktctgcagacttaaacatccctgtctgacatctctgaagagagcagtggttctaccagcatggtgttcaagctctgagaatggacagactgcctcctcaagtgggtccctgacccccgtgtagcctaactgggagacatctcccagtaggggccaattgatacctcatacaggtgggaaccccattgggatgaagcttccagaggaaggatcaggcagtattatttactgtttttttttatttgctgctctgcagcctctgctggtgatacctaggcaagaggg

SEQ ID NO: 228152 - DNA, 563 bp, Homo sapiens
agcaaacggcacaccaggagattatataccatgcatggcttggcggatcccaagcccacagaaccttgcttactgctagtgcagcagtctgacatcaacctgcgaatcagcagcctgccagggagaggggcatctgccattgctgaggcttgagtaggtaaagaaagtggccagggaagctcaaactgggcagaacccaccacagctctgcaaggcctgctgcctctgtagaccccacctctggtggcagggcatagttgaacaaaaggcagcagaaacttctgcagacttaaacatccctgtctgacatctctgaagagagcagtggttctaccagcatggtgttcaagctctgagaatggacagactgcctcctcaagtgggtccctgacccccgtgtagcctaactgggagacatctcccagtaggggccaattgatacctcatacaggtgggaaccccattgggatgaagcttccagaggaaggatcaggcagyattatttactgtttttttttatttgctgctctgcagcctctgctggtgatacctaggcaagaggg

SEQ ID NO: 228153 - DNA, 613 bp, Homo sapiens
aagctgtcgagtctgtgtcctcccacctcccaagtcaagcatttgccaggatgtagaggctccaagcattgattggtagcaatttccccatccttaatcttcctttatgaaacattgagtcccattccggtactagcttcaagtaacaaatttgtgtccaggcctccaactctcatggaacattctagagtccctgtttctagtaacaagctactgtctgcttctagacccagagcccagcaagcctgtaattccagccccactcacggcttaaattgtttgttcatttctgataaataaggactttctttaattttttctgtccatgtctgcattacagagcagcgagaaagtgttaaaatataaatytacttttccaatttgaccagaaatctcttctctcccttgaatcaatgaatgagaacaaaaatgaatgaatgaatgagaaaagaaaattctcattcataataaattagaagttgactagcagaaaaataaacaatgaagatgcagtttcttaagatcagaaagaacgatcaagggaaagcagtgtcacccatttaaggagactaacatagcaggaagcaatgatggaagagaaagtaaccagggt

SEQ ID NO: 228154 - DNA, 613 bp, Homo sapiens
aagctgtcgagtctgtgtcctcccacctcccaagtcaagcatttgccaggatgtagaggctccaagcattgattggtagcaatttccccatccttaatcttcctttatgaaacattgagtcccattccggtactagcttcaagtaacaaatttgtgtccaggcctccaactctcatggaacattctagagtccctgtttctagtaacaagctactgtctgcttctagacccagagcccagcaagcctgtaattccagccccactcacggcttaaattgtttgttcatttctgataaataaggactttctttaattttttctgtccatgtctgcattacagagcagcgagaaagtgttaaaatataaatctacttttccaatttgaccagaaatctcttctctcccttgaatsaatgaatgagaacaaaaatgaatgaatgaatgagaaaagaaaattctcattcataataaattagaagttgactagcagaaaaataaacaatgaagatgcagtttcttaagatcagaaagaacgatcaagggaaagcagtgtcacccatttaaggagactaacatagcaggaagcaatgatggaagagaaagtaaccagggt

SEQ ID NO: 228155 - DNA, 404 bp, Homo sapiens
tctcttctctcccttgaatcaatgaatgagaacaaaaatgaatgaatgaatgagaaaagaaaattctcattcataataaattagaagttgactagcagaaaaataaacaatgaagatgcagtttcttaagatcagaaagaacgatcaagggaaagcagtgtcacccatttaaggagactaacatagcaggaagcaatgatggaagagaaagtaaccagggttgaaaagagaagcaagatgagattaaaggaagcaagagcacagctgttagagaaatcacttgcaatgcatgtttctagaggccagttcaagaagtggctgtggggaacaggaaaaggagtaacaggcttatatgtcaartgattgcaaagaaagcagcttttacctaattccagattgcccca

SEQ ID NO: 228156 - DNA, 547 bp, Homo sapiens
ggctaaactgggactggctgaagccttgagccttcaatattcatctttggaaaacacatgggggtcttccaatcatttaaaaaaattctaacagactaacattgcaagtccaggctccattagtctcagtggttaaacttaaatctcttaacatgtaagtccttctgtagttgctgtccagtaataaagtgggtgatggaatttttaagaaaacactttatggctctgcaatagacgaatttttccactgggatttatataaygacttcggagaaaactaaaacaatgtataaaataaaaccctgtggaagaaaaaataattataaagaattcccacctgaaatgatggaatgcctacagttgtagaattctgtattttgtttcactatctgtttaataattaaaggcccttttagtagccaaaagttccactttaaaacactgtattctagggtgctaagaatttggtgcagagcagtaactttttccaagtgtggcaagagaaacattcaaaagagaggcatctttgacctaaaactcactcaag

SEQ ID NO: 228157 - DNA, 509 bp, Homo sapiens
agctaggcaagatagaaaaataaaaggtatccaaattggaaaggaggaagtaaaattatccgtgttggcagataacatgatcttacatacagaaaaccctaaagactgygccaaaaagctgttagaactaataaatgaatttagtaaagttgcaggatacaaaatcaacacacaaaaatcaggagtgttcctatatgctaatagcaaactatctgaaaaaaaaattaagaaaacagttctatttataataactaccaaaaataactagaaataaatttaaccaaggaagtgaaagatctttacaatgaaaactacaaaaaaactgatgaaagaaattgaagaagacacaagtaaatgaaaagatatcctgtgtgcatgaattagaagaattaatatagttaaaatgtccatattacctgaagtgatctacaaaatcaatgcaacccctgtcaaaataccaatgacatttttcatggaaatagaaaatcctaaaatttgaatggaaccac

SEQ ID NO: 228158 - DNA, 409 bp, Homo sapiens
ccgccggcggcacgcagcccagcgcctcgcagcgcgcctggctcacctggcagctggcgcacgccggggccgccctgcactgggcgctggccacgctcgacagcctgctggctgcggggccctggcccgcgggcccgccgccctttgcgcccgctcctggggggccttaggtgcgcacgggagccagcaccctcgccttggaaaagctcgaaccctctgccccagaggcgatcccgactctgcaccgcaaactctacggcgccctgcaggacggcggcctcctgccgcttggacgccagccaggagctccccggcagcagcagagcagaaagaaggatggccccgccccacttcgcctcccggcggtctccctcccgcyggctcacggagatagatggctgcctagctc

SEQ ID NO: 228159 - DNA, 595 bp, Homo sapiens
gggtagattcaactgtgaaaatggtaagaccttgaactagaattttaaataaatgtaacacctaagcatcagcatatctatacacatcagtacatacatttaaaataaacattagcatctcattggaaggcataattaactatttagtcatttaatttgcaaacaatttttaccatatttttagcactaaggtagtcccatttgttacaacttttaattctgcctgaaatttttgaaatatctgtaagagtttacgtatagtgcaatgtttcagagtctctaggtatgagctgtgctttcttgtgcaactttaacaagttattttctttgtgactcaaatctcagttgtttaaaatgrgaatggtaactgactcagaggccagtatacataagtgctataattggaacaacctctacaaaattcatgttcaaatttaattgccagtataatggtactgggaagtagagcctttagcctctttcctatttggaaaaaaaaaaaagtgcagctcactgccagtgcttgcttaattttacataaatatactctttcaagctaaagcaaatctgactgattttcaatgtgaaaataaaa

SEQ ID NO: 228160 - DNA, 595 bp, Homo sapiens
gggtagattcaactgtgaaaatggtaagaccttgaactagaattttaaataaatgtaacacctaagcatcagcatatctatacacatcagtacatacatttaaaataaacattagcatctcattggaaggcataattaactatttagtcatttaatttgcaaacaatttttaccatatttttagcactaaggtagtcccatttgttacaacttttaattctgcctgaaatttttgaaatatctgtaagagtttacgtatagtgcaatgtttcagagtctctaggtatgagctgtgctttcttgtgcaactttaacaagttattttctttgtgactcaaatctcagttgtttaaaatgagaatggtaactgactcagagsccagtatacataagtgctataattggaacaacctctacaaaattcatgttcaaatttaattgccagtataatggtactgggaagtagagcctttagcctctttcctatttggaaaaaaaaaaaagtgcagctcactgccagtgcttgcttaattttacataaatatactctttcaagctaaagcaaatctgactgattttcaatgtgaaaataaaa

SEQ ID NO: 228161 - DNA, 513 bp, Homo sapiens
ttattcactatgttcaatttaaaaacactatttttaatttataaacctacaaaagaaaaatttgatgtaagaaaaactgggttcaagttcaatagggtatatcaatttcatcttcactcaagaaaaggcttaaaaggttttttgataccaatccttttcgtattacttgacaatgaaaatttataacatgtaagattaggttatgcttcaaaaggcaatcatgccttagataatgacasaatttgtaggaaaagttctgaaaataaaatgacagctcaatgaaggaaagattatttttttcaaactaaaaaataatggtataacttccaatgttcaggctggtcaaaaggaaatttgtagggcagtaaaactgacatacctgaagcaatacccccaaaatataacatttccaataccttctacatataaggaatatgaatctaataatggttttaaaatacatgtttcttgttaacttgttgaacaaaatgcagggagaggatacaaaatgcc

SEQ ID NO: 228162 - DNA, 423 bp, Homo sapiens
gctcacccatctctgtggccactggacagtggctaccttttctagctttcacaaaacactattttctggaaaataatcttatgcttgaacactttcagagttgagctgttttgtggtggatgagagactgggcaaggtggcccagccataggctgattttcatgtccctgggagggaatccagctagctttcagtggctggagaatgagttcagtgtacttgaaaatacayggacactttttggggggagtgtgttggttttgtctttcccaagcccagtaataataagttctttcaccctcagctttgctaagaccttacccttcctcttccctctggcctcttcctctgcccacttcctaatccacaaatagagccaagatttctccttccttgatactccagaatctgtcacaaagggag

SEQ ID NO: 228163 - DNA, 581 bp, Homo sapiens
ctcagctttgctaagaccttacccttcctcttccctctggcctcttcctctgcccacttcctaatccacaaatagagccaagatttctccttccttgatactccagaatctgtcacaaagggagagtcaaggggagttggtagtcaactgcatattttcattaaggctatgttaagaattgggaagcatctccccagcctcaatcaggaaagggatgggatcttgggtgcaagaggtagctcttcttcaccaatgtatttagggtcatgaggattgttccttatcccctgagctcagggcctcaagcctcccaaactccagttccacattgagatgtgtgaagtttcttatcccttgccctgcctgagggctgagtaggacacttgtggccctgtggtgcctatgcacccccaagaataacaccatatgtctgcatacagttcagtatgatgaaggagcagagagcmtaagtctagattgtgagggttgttctttaacagattttattctcattatttaagcctctaaacacttgtccagttgggttttgtgtttattagaaaggaggtattcattgaaca

SEQ ID NO: 228164 - DNA, 556 bp, Homo sapiens
ctctaatgtcctttataaaagtaataatatttcctttctatccattcagataccgtaactcttttyggtttgagtccagttttcactttctcagtgtaatgtttctttaccatcaaggtggctattcacttcctgcttctttctctctgaagtcatggggatttttatatctgcttctctctaagactgtttaattctcactctgaagctttttctgctattccatgctatagcatgtagctgaaaaatgacacccctaaatggtggccccagctcttaagattataggtttttatacatgtagtatccatagctagctaacagaagtctataaatttcaatttcaggttcttaggcaaaagaatattattggactacctggtgtttaccacggtccaatcaattgtttttagccagaatttggattatgtaatacaaacatagtggcccacagctttcagtgtgggtaatggtctcagagaagggaagcagggattaagaagacatctcaaaatgtgtaagtgtataatgtatggcagaaagaatatgagcaacc

SEQ ID NO: 228165 - DNA, 558 bp, Homo sapiens
ctaagcactacaagaaaaattcaccatgagtagtataaagtggataacctttcctatttattctcttagccacttatcagctcatcagtacttcttggtggactcactttatttttcttttctggcttttttggatataataacaaaagtttatgttagctagcttcagtaaatacaggaatttgtgataaggacctgggtacatcccttacaagctaagggcaagatagttcagccagtcctcaccagggactagaaataggaactaggaaggaactaggaagccattgggaattgaaattgtgcaaatgatctctttaaagacrcagttcttatgtctctgcttctcggtgtgtggatggttcatactttgacttgacgagctttctgtttacgtagagaaaatatggtttactagtacctgctttatataatttctaaatttaagtaccaagtggagactaactggagtcaaatttgttagaagaaagaatcttgttggacatcttggtttgagtcagatttgtctccaactgtgcccatggagaattggggtaa

SEQ ID NO: 228166 - DNA, 507 bp, Homo sapiens
cattggggcacaagacaagtctcaatatatttaaaataattgtaatcatacagagtatgttatctgaccacaataaaattgtgtttgagttccctggaggcaggtgttgaaaaggagtttgtcttactactttttgtgttgctgtaaaagaatgtctgaggctgggtatatataaagaaaagaactkcttataaagagaagtttatttagctcatggttctgctggctgagaagttccaggacatggccctggcttctggcaagtgcttttgtgctgtgtcacaacatggcagagaaggtcaaaggagaagtgcatacatgaaaaggggaaaacctgaggggtgtcctaaggagaagtgcatacatgaaaaggggaaaacctgaggggtgtcctggctttaaaacaacccactctcatgggaactaattcattgctgtgagacctaatccagtctcatgagagtgaggactcaccactatgagaacagcaccaagccattcatgagg

SEQ ID NO: 228167 - DNA, 400 bp, Homo sapiens
gcagctggagaaagaggagggggtgggggacacctgggagcagagccattcctgccttgaagtcactctgggagcttggcccttgcaaccctcccgcagccgtctacggacgggtcatggcccactcactgtcgacctcctcttcccccgcatcttccatcgggcacagccgggaggcctctgcgtccaggcacaaacggtggagaatccccgacggctcccctcgcagtcccggcagataaaccggaaaccgatggcggaaggtcaagccacgaccagccccakccggagagcgaggccacgacaagcccgattccggcagatcacgacgcccccacgatcgcatatgatgcaggtttaggggctgggatcttggatgggtggggaggatggcgcatgg

SEQ ID NO: 228168 - DNA, 400 bp, Homo sapiens
gcagctggagaaagaggagggggtgggggacacctgggagcagagccattcctgccttgaagtcactctgggagcttggcccttgcaaccctcccgcagccgtctacggacgggtcatggcccactcactgtcgacctcctcttcccccgcatcttccatcgggcacagccgggaggcctctgcgtccaggcacaaacggtggagaatccccgacggctcccctcgcagtcccggcagataaaccggaaaccgatggcggaaggtcaagccacgaccagccccatccggagagcgaggccacgacaagcccgattccggcagatcacgacgcccccacgatcgcatatgatgcaggtttaggggctgggatcttggakgggtggggaggatggcgcatgg

SEQ ID NO: 228169 - DNA, 458 bp, Homo sapiens
ttcctcctgggtccaaactacccagtctccccagcactggcaggggaaaaatggcagactggagctgcagtgatggctgccactcctcctaccrggaactcaagtcatcttaggcagcaggaagccacagtgatggtggccagtccttcccgcaagaactcagcagccttaggcagtctccagcctagtggctgctgagaatctgcacagctctgtggtaggctctctctagccttgtggctacacaccaaggccctggtgtgtgggctcacgaaggggatctcctgatctgtgggttgcacagatccatggaaaaagtgtggtttcctgggcagggtagcacaatcactcactgcctcccttggctgcaggtggtagctccctttgccttgtgtggcttccaggtgggccgtcacaccaccctgcttttcctcactctccgtgcttttcctcactct

SEQ ID NO: 228170 - DNA, 468 bp, Homo sapiens
gtttaccaagtgtcactggacacgtcagggcgttctgagaccttagagagcatccagtcctgtccctgcagtttacaaatgaggaaaccagtaccctgagagtggctgtactatccactctcaggataccaaagatcatctggaaagtcactggtggagctggaccggggcccaggcatctcttctcctgtccggggctcttgacttcaggaccacctttctgaaacccatgatggggcaacaccaggacactttccagcctgcaggtgtctgtcccgcggaagcgagccaggccacrtgtgaattcctgttttctgggtgggtttcagaaggtacgagcaagtcggcagggtgacagcccaggtgcttcttgggttccccaaaacgcggttatgtttagcagcatcctcagaaccaaaggtggggtgggggctgcagatgttgtgggggccctctgaagtgaaaaga

SEQ ID NO: 228171 - DNA, 466 bp, Homo sapiens
gactgagcttcaaggcctctgtccctccaggagggaggtgcatgaccagagagggaggcctgaggatcttcttccctgccccagagggtctgctgcctgagctctgtgatagcgcagagagtaaaaggatcaagcttgattgaggcctatctctcaatgcraaagtttgctagttaagaggagagtgggaagggcatttctggcaaagagaaaagtgtggacaggcatggcttaagggatggggagggagacagacagagctgagggtgaagggccttttgctcagctgtgggccttggccttcccttgtgcagggacacacagccttagagccactggaggttttagtgggaaagtaatatggtcggggctgtatctcagaagaaaacaaactaatgggaacaggtcctgtgatggtggacctgggtcagctacggagggagggaagatgtgagatgtgtactgg

SEQ ID NO: 228172 - DNA, 540 bp, Homo sapiens
tactctttgtgattttgatttaatttttgagaatgatgcttctctgtttatatatgttggctgaaatttgcgtatgttaaagagaataattttgttcagttttctgattatttgagtcttctatacacctcagtttagaggattgcgtgttggttagtaaaaaaagcagaacattttattctgatgtcatttccacattagccctccccgaagtgctgcctgactgctggtatgttcactgatcatttgtgtgtcttgcccctaacaattgtagtttccttctagcctttttagtccctagaagcttttgtttcttmgcggattatgcttaccagtagagcatgatgatagtcttttattcttccaaaacgttattatctgtatagtttcattcttcctaaaccttattatctgtatggtttcattcttcctgcccacccccccagccttttactagaggtttgtcaaaataggaggaaaaaggattaaaaaaaattttttatgggtacatagtaggtgtatatatttatggggtacatg

SEQ ID NO: 228173 - DNA, 612 bp, Homo sapiens
ccacttaaccctgttgaaccctcctgacttcccttctagactgtgstctcctaaagctcagtttacctttaggctctcagcacctgcacaggtgtcagacacatagaacacactaacaaatgttagcttgacatatgttaatcacatgttgatatatgattaaagataagtgaggaataaataagaaatgaattttgtgtatgtgtgtatatacaagtatttgagagtttcttttttttttgagatggagtctcactctgtcacccaggctggagtacagtggcgccatctcagctcactgcaagctccgcctccggggttcatgtcactctcctgcctcagcctcccaagtagctgggactacaggcgcccaccaccacgcctggctaattttttgtatttttagtagaaacagggtttcaccatgttagccaggatggtctcattctcctgacctcatgatctgccagcccaggcctcccaaagtgctgggattacaggcatgagccaccgcgccaggccgagagtttcttaccatgaggcagtcttttaaatgaaactaactaatggcatgttctctatgataattcagtaattaatctccccttgaga

SEQ ID NO: 228174 - DNA, 612 bp, Homo sapiens
ccacttaaccctgttgaaccctcctgacttcccttctagactgtgcyctcctaaagctcagtttacctttaggctctcagcacctgcacaggtgtcagacacatagaacacactaacaaatgttagcttgacatatgttaatcacatgttgatatatgattaaagataagtgaggaataaataagaaatgaattttgtgtatgtgtgtatatacaagtatttgagagtttcttttttttttgagatggagtctcactctgtcacccaggctggagtacagtggcgccatctcagctcactgcaagctccgcctccggggttcatgtcactctcctgcctcagcctcccaagtagctgggactacaggcgcccaccaccacgcctggctaattttttgtatttttagtagaaacagggtttcaccatgttagccaggatggtctcattctcctgacctcatgatctgccagcccaggcctcccaaagtgctgggattacaggcatgagccaccgcgccaggccgagagtttcttaccatgaggcagtcttttaaatgaaactaactaatggcatgttctctatgataattcagtaattaatctccccttgaga

SEQ ID NO: 228175 - DNA, 612 bp, Homo sapiens
ccacttaaccctgttgaaccctcctgacttcccttctagactgtgctctcctaaagctcagtttacctttaggctctcagcacctgcacaggtgtcagacacatagaacacactaacaaatgttagcttgacatatgttaatcacatgttgatatatgattaaagataagtgaggaataaataagaaatgaattttgtgtatgtgtgtatatacaagtatttgagagtttcttttttttttgagatggagtctcactctgtcacccaggctggagtacagtggcgccatctcagctcactgcaagctccgcctccggggttcatgtcactctcctgcctcagcctcccaagtagctgggactacaggcgcccaccaccacgcctggctaattttttgtatttttagtagaaacagggtttcaccatgttagccaggatggtctcawtctcctgacctcatgatctgccagcccaggcctcccaaagtgctgggattacaggcatgagccaccgcgccaggccgagagtttcttaccatgaggcagtcttttaaatgaaactaactaatggcatgttctctatgataattcagtaattaatctccccttgaga

SEQ ID NO: 228176 - DNA, 612 bp, Homo sapiens
ccacttaaccctgttgaaccctcctgacttcccttctagactgtgctctcctaaagctcagtttacctttaggctctcagcacctgcacaggtgtcagacacatagaacacactaacaaatgttagcttgacatatgttaatcacatgttgatatatgattaaagataagtgaggaataaataagaaatgaattttgtgtatgtgtgtatatacaagtatttgagagtttcttttttttttgagatggagtctcactctgtcacccaggctggagtacagtggcgccatctcagctcactgcaagctccgcctccggggttcatgtcactctcctgcctcagcctcccaagtagctgggactacaggcgcccaccaccacgcctggctaattttttgtatttttagtagaaacagggtttcaccatgttagccaggatggtctcattctcctgacctcatgatctgccagcccaggcctcccaaagtgctgggattacaggcatgagccaccgcgccaggccgagagtttcttaccatgaggcagtcttttaaatgaaactaactaatggcrtgttctctatgataattcagtaattaatctccccttgaga

SEQ ID NO: 228177 - DNA, 567 bp, Homo sapiens
atggcatgactccactctttaagtgtgggtagatcccacaggaaagtgactgctggttccccaactccagcaactaggctccacctttttggcctaaacaagtgagaaggattatctggaagatgggaattaaaacacaggtggtaggggactgtgaggggatggcaggggtaggagctcagtatcctacgactggaggctgggcccatgacctataatraaatcagagttggagcagcccatacctccaccaatccacacatctaggccttatttccctcctcaaagctttggctggagatggaggtaggggaatcactgccagatcttgctgggcaacagaggctcccttgctactgctcctgggcctgagaatcaaactgtcctgtccagatcaggccctatcttttgaaggagaaatatttctgttactcattaccctaggaacaccctatggaatcccactgaggtctcactgtgcacacacacgcacacacactctcctctactctgaagattatacattcctataattcatatttgctctatatgcattagacagacagg

SEQ ID NO: 228178 - DNA, 449 bp, Homo sapiens
ggtcacactatcaacttcacctctagcggcccactgagattttagttatgggtttagaaggaaacaggggtgttgggggtggctcctgaggagaatcaacattatcttgcctggcaactgcctcaggggaggccatcactgttgcctcaggcagcacagggtttatctcctcagacagaggtggaaaggctgatggcagcatgggtcaggtgaggggatgttgccactatctggggatggggaagctgttccttttgggcaaaaagtttcatcggagtttacaaactcagtgtccccagcttcatcggggtcctcccacacatccccattccaagttgcagggtccccccacacatccccattccaagttgcagggtcccattcttttccaatcaaygccctcactttaatagtagacacctggtgaggctgtgcatgcaccttttgtt

SEQ ID NO: 228179 - DNA, 550 bp, Homo sapiens
tttctgtctgtctcctggaggtttacaatgggcagcagctctgataatgactaggcaatttattgagattatattttgcattttgttctcactgtagtttttgttccccaatattttctctctgagaaagtttcctgtctttttttggtgccctcttgattgagagatttgttttgtaggatctacgtagtcactttttgacacacccttcctgtctttgattgggagaaattctgctcgatcctcccagagkggggaggaaatgggcaagtgcttttgcctggtagagagtgggttcggaaggcaaaagcagacagaggagttagaaattctccaagatgaaaagggagaagaagttggggggttctgggagaagttggcaccagaaagggcccctgtggagctgtcaggacctgatggggcatgtgaagaagctgggcaccaggtactgagtctctggcctcagcaaagctccccaaacccaaccctggcacaagctcagcagaaccattccccgtcacacagtcacgcaggcctggaccaagagacc

SEQ ID NO: 228180 - DNA, 625 bp, Homo sapiens
aaagcatccaatttggggagtgatttactttttgaatagaacagatataatagcctggctctcacacacttgaataatgatcagcttctttgaccagaaaagggaattgcacgtgccccaaagtctgacttttcagtgcacctgtaaatgtgtcttgccagtgacctgatactttatttgtgtttaggcctcccttaagtgamtatttagtgggagaaacttgagtgcaccagctttggagacaggcaaatctgggtttggatccaagctctaccattcacaatctgttgatcaaatctcttgacttctctcagtttcagtttcctcatgtaaattggaaagaatagatcctaccccttagagtttctatgaaggttaaattaaaacatactattgtatgtgttttggaacaaaattaatgtgtaggcatccacagctctcctgtggcctgcagcagggcatttggccattgctttccccctttcctctctgaggagaaacaacccacatggctggattctggaaaggaagaactgcattcccaggggtctgtgcttaacacagtgctttcttctcagtaagcgctcactaaacagaagtgacaacattactcccagccactgca

SEQ ID NO: 228181 - DNA, 506 bp, Homo sapiens
gcctttctcagtatgtcaactcctcataaataatgggtggaggcccagtgggggccactgtccttattaacctactccccattgtcactcatggcacaataaagaaacatattccaaactaagaaactgaaataatgagagatctaaatatgagatcaatattcctcaaagcacttgggaagagagaggcaacaatggccttgtgattggaccaagagattggggagtgcttggtcatacgtaagtccccagttttggtttctgattgcagacctcagagagaacttttaaaaagcaggtgcccttctgcttcccatattttgcagacagtggctttgaattctatctgcaggccttccttcaactgtcagcaaaggagttcattagcacttgcttgcaagaaccacatcaaagatgggtctagttgcagtttgtaggaatcaggttgcctttattatccatgacctcagggtgggtccttgggamgtggacaattttttaaactg

SEQ ID NO: 228182 - DNA, 503 bp, Homo sapiens
tggttgacagaaaatctgtttatagcatggtttactgaatattttaagcccacagttgaaacctactgctcagaacaaaagattgcttttgaaaaattacygcttattgacaaatgtacctagtcacccaagagctgtgatagagatataaaggacattgatgttttcatacctgctaacacaatgttgattctgcagcccacagatcaagaagtaatttccaccttcaagtcttattatttaagaaatacattttgtaaggctatagctgccatagatgctttaaatagtgattcctctgatggacaaagtaaactgaaactctctggaaagaattcaccattctagatgccattaagaatatttgtgattcataggaggaggtaaaaatatccacactaaagggaagtttggaagaagttgactccaaccctcatggatgactttggatggattcaagacttcagtggcagaagtaaccacaggtgtgttagaaatagcaa

SEQ ID NO: 228183 - DNA, 578 bp, Homo sapiens
ggacacttcagatagaaacaagtggattagtaaatatcattttaagctgattaatttactcatttttatctctcatttgtgttcaaaagaacttaaagcagaaatttwaaaagtaccttaggtcaaagacagcagagagaggagaaccattctgatggtgtggatcaaatgtggtttcctaggccttggaaggaaagagagtatcccacttgggagtgggggagaagaggctcccagacctctaaagatagcagactttggtgctaggaggtgcagtgaagaggaaagttcatccaggtggaagatccagcatttactaatgcataacaaggctggtacttgccaattgggtgtgtatttcaatttggctggagtgccaggtgtgagatgagagatatgacacagttcatacccccaacgtcttcatgataattcaaaccagctgagtttactgagctttaggtatcaaacaccagctaccaaaagatcatacctctgggaaaagtctgggcccaaaccccaagtctagtagtctgagatgagggaagcatgacataaattacacagacttgaagggg

SEQ ID NO: 228184 - DNA, 578 bp, Homo sapiens
ggacacttcagatagaaacaagtggattagtaaatatcattttaagctgattaatttactcatttttatctctcatttgtgttcaaaagaacttaaagcagaaatttaaaaagtaccttaggtcaaagacagcagagagaggagaaccattctgatggtgtggatcaaatgtggtttcctaggccttggaaggaaagagagtatcccacttgggagtgggggagaagaggctcccagacctctaaagatagcagactttggtgctaggaggtgcagtgargaggaaagttcatccaggtggaagatccagcatttactaatgcataacaaggctggtacttgccaattgggtgtgtatttcaatttggctggagtgccaggtgtgagatgagagatatgacacagttcatacccccaacgtcttcatgataattcaaaccagctgagtttactgagctttaggtatcaaacaccagctaccaaaagatcatacctctgggaaaagtctgggcccaaaccccaagtctagtagtctgagatgagggaagcatgacataaattacacagacttgaagggg

SEQ ID NO: 228185 - DNA, 552 bp, Homo sapiens
cagttcatagtaaaattactgaggcataatacacacaacattaaattaacaattattcaatctcatgtaaaatttgtaattgaaaaaatatagatgaaaaatcaggacttcttcacaaaatatagagacgaaatatttgactggaaagattggacttgggactctgggagagaaaagaaagacattgatttttaacatactgattccttttctacggatttttaagttttttcagatcatatttaccacatgttctatgcatacttgtagttagaatagtctaagattcatggtctgtttgcaggaagtttacatataattttctaatatttttwactgaaagagaatgaaatttgggagtgagtgggcagtattgtaaaggggaggaggggtagatggatgaaaggatggggtgcatatctgtctccctgccacaccctggagaccaagtaggaccctgaagaagtccaaagcacaagggctctgtgttcctgaaacaccaggaagatgggcacaggcagagccacgtagtgattccctctgacataaggt

SEQ ID NO: 228186 - DNA, 560 bp, Homo sapiens
aatcatccactccatggctctcctccaatgacrtgtggcctggaggcttcaactggaggatatataaaagagcctcttacttcctggcaacacaaggcctccagactcctcctgggataacttgtccacacatcttccactagggtaaggctacttctggctgaggagacacttggatgtagctcaagtgctgcttaggcagtcctgatctctcctctcgtctcttcccagggagctgaaaagccaggtaggagatgcttggggtagaaagaagggaagagaagtggatccctgcaaaagaaagaccccaaataatctaacatgggagaaagccatagaagttagagggccagaaaagcagagatgggacagtcagacttaggagtctggggacagaataagacagagtaaagaaagagcagagacttggctctcctttgcacttaaccaggtggacattgggctgggaaaagtaaactgtcagctcaactaagtacaatttgtctttttttttttttaaggaagcatatatcattaacatggttattagtaagtgagtc

SEQ ID NO: 228187 - DNA, 291 bp, Homo sapiens
tctgtgccttgtgggatcctagcatacccaaaactgtgcggcttgaagcttctctgcccgctraacaggaagtatggggttcctgactcttcaagaagagccacacagagaggtcttaagcatgcctctggaccttgaacacaggccagaaagaggcttgaaggtgagggcagagtcaagaaagggtggaaagacaggccaacccactctcccaagggtaccttcttcaggacagtgatttactccaatttagtgatcaggaaaggagaggattgtgtagagcaatgtccg

SEQ ID NO: 228188 - DNA, 609 bp, Homo sapiens
accttgaagacaagcccttgtctaaccccagtgttgagtggtttagagatggaaatagctttattcatgagggagtaagaaaggaaggttagctaacaagaagtcattgaggccaagggtttaccttctcagaattctgctcaaaaagcagaattagctgctctaatcaggaccttccaactgtgaaaagacttaagcctgggttggatggctcacgcctgtaatcccagcactttggcaggccgaggtgggtggatcatctgatgttgggagttcgagaccagcctggccaacatggcgaaaccctgtctctactaaaaatacaaaaattatccgggtatggtggtgggcacctgtaatcccagctacacgggagggtggggcacragaatcacttgaaactgagaggcagagtttgcagtgagccaagatcatgccactgcactccagcctgggcgacagagcaagactctgtttcaaaaaagaaaaaaaaaaccctcaagagtcaatgtgtttactgactctaagtatggtttccgggtgcttcaggctcatgcaaccatagggaaggaaaggggactatcaagagccaagggatcccccatacaa

SEQ ID NO: 228189 - DNA, 517 bp, Homo sapiens
  misc_feature (1)...(517): n = A,T,C or G
agtctcctgaaatgaactagctggcctgtggtgtaggacacaggacccagccccaccttatggctctaaagcccttgctcaaagccactgcagatgagttagctaggtctctaccacctcccataatactcctctgnagagaaataaaggtctttcacaccctgcccaggaaagggatttgcttagcctcaaatgtgcacattcagaaatagcttgtcataagaaagagaggatagtttgcagagaaataacccttgtaagtccacatcctrttccttttaaataagagagtggtgccaagggaagagcccttagaatgtcaaagccaacagggtgctcagataccacccaagtacagttccatctttggccataaggagacaatggtgtcaagaggctaaggccatatgatctgtaggtgaaaaacctgggatgagaatcaaggcctcaaaccttttccactacatcacagatttaggagcagttagacggaaggcttcaatctggagaacactaa

SEQ ID NO: 228190 - DNA, 517 bp, Homo sapiens
  misc_feature (1)...(517): n = A,T,C or G
agtctcctgaaatgaactagctggcctgtggtgtaggacacaggacccagccccaccttatggctctaaagcccttgctcaaagccactgcagatgagttagctaggtctctaccacctcccataatactcctctgnagagaaataaaggtctttcacaccctgcccaggaaagggatttgcttagcctcaaatgtgcacattcagaaatagcttgtcataagaaagagaggatagtttgcagagaaataacccttgtaagtccacatcctattccttttaaataagagagtggtgccaagggaagagcccttagaatgtcaaagccaacagggtgctcagataccacccaagtacagttccatctttggccataaggagacaatggtgtcaagaggctaaggccrtatgatctgtaggtgaaaaacctgggatgagaatcaaggcctcaaaccttttccactacatcacagatttaggagcagttagacggaaggcttcaatctggagaacactaa

SEQ ID NO: 228191 - DNA, 517 bp, Homo sapiens
  misc_feature (1)...(517): n = A,T,C or G
agtctcctgaaatgaactagctggcctgtggtgtaggacacaggacccagccccaccttatggctctaaagcccttgctcaaagccactgcagatgagttagctaggtctctaccacctcccataatactcctctgnagagaaataaaggtctttcacaccctgcccaggaaagggatttgcttagcctcaaatgtgcacattcagaaatagcttgtcataagaaagagaggatagtttgcagagaaataacccttgtaagtccacatcctattccttttaaataagagagtggtgccaagggaagagcccttagaatgtcaaagccaacagggtgctcagataccacccaagtacagttccatctttggccataaggagacaatggtgtcaagaggctaaggccatatgatctgtaggtgaaaaacctgggatgagaatcaaggcctcaaamcttttccactacatcacagatttaggagcagttagacggaaggcttcaatctggagaacactaa

SEQ ID NO: 228192 - DNA, 517 bp, Homo sapiens
  misc_feature (1)...(517): n = A,T,C or G
agtctcctgaaatgaactagctggcctgtggtgtaggacacaggacccagccccaccttatggctctaaagcccttgctcaaagccactgcagatgagttagctaggtctctaccacctcccataatactcctctgnagagaaataaaggtctttcacaccctgcccaggaaagggatttgcttagcctcaaatgtgcacattcagaaatagcttgtcataagaaagagaggatagtttgcagagaaataacccttgtaagtccacatcctattccttttaaataagagagtggtgccaagggaagagcccttagaatgtcaaagccaacagggtgctcagataccacccaagtacagttccatctttggccataaggagacaatggtgtcaagaggctaaggccatatgatctgtaggtgaaaaacctgggatgagaatcaaggcctcaaaccttttccactacatcacagatttaggagcagttagasggaaggcttcaatctggagaacactaa

SEQ ID NO: 228193 - DNA, 527 bp, Homo sapiens
aatagccctgtcctacctctactccaaaaccagaggactgcccaggtgccttcaagtctgtccctgttgtgcttcctcagatgttgttgggggtaattctttttttttcttctcagtttgttagtgagcattggggttgattctgtgaaaaatattccagtataaatcaacttttctaacaccagcttctactatatacagtgcctgaactaaccccaaaagatttggacggtttattgggacccaaaaataaaaaaataaataaccctgaaagagaaatacactcatgaacattaagatactacttcaactgatctgtacagcagcygtggaattatgatttgacccactttacaaatggggaaacagaaattcaagaaggatcaatcacttgcacaaagttagtaaatacagtgctgagactagagcctaggtaatgctgattcttagcccatgggtcttcccattctaacaagctgccttctgtcatactgttctttctgaccacaaagatggaatggagactt

SEQ ID NO: 228194 - DNA, 513 bp, Homo sapiens
gaattcttgaaagaatatgaaaagtgattacctgagtgctctaaagagaaaacaatagaatgcagattaaggaccatagtcaaaactaaaataaaatctataatggagataagtttgcattttttctccccactttggggcacttgggaggagctaagggtcttcagagcctgtagccaacttacctgtggcaagttttctgacaaggatctctgtcagctggcttccttgtaccatttgctcacagaatctctgtctctggtagtaggcaatgtcagtgttcctgagaaggccctcaaaagacttgactgtgttcttcacatgctgggtgaaaaggtagcagacacctctcccttcctgtrtcttctgtcgtaagtgggtcagttcttcagcctgagcctgaattaagggatcatgtatcctaaggtgggaaagaagagtaaaatgtatgagggaatgtagtgaataataggttatagaagtttcagaggagagatctcttagaatccctgt

SEQ ID NO: 228195 - DNA, 478 bp, Homo sapiens
tactggggagaaacaggggctccagacctatcccgccttcaatcaaatatctctgctttggtgagttttacaaatttgagcttctatgatttcatttcaacaaaggattaaaagaagtttcgaatgckacaatctaccttatgtctgaaaccctctaaggatagtcagtgctggtcctgagcgaattaataattcattttccacacaacagctgctcaatcatctatctacccaatagccctaccagttaatactccacctagtataatacttttttaaaaagtttggaggagaaacattgttatcatgaaaggcactttggaaagtttgaaaatatctcttatagaaaatattaatgacaatcaccacatctataaatgggaacaaatataataattacagaaaatagttgttcagagttttatatgtgttagagatggttctaactacttgcaattgtgcatttaatcttcataac

SEQ ID NO: 228196 - DNA, 478 bp, Homo sapiens
tactggggagaaacaggggctccagacctatcccgccttcaatcaaatatctctgctttggtgagttttacaaatttgagcttctatgatttcatttcaacaaaggattaaaagaagtttcgaatgctacaatctaccttatgtctgaaaccctctaaggatagtcartgctggtcctgagcgaattaataattcattttccacacaacagctgctcaatcatctatctacccaatagccctaccagttaatactccacctagtataatacttttttaaaaagtttggaggagaaacattgttatcatgaaaggcactttggaaagtttgaaaatatctcttatagaaaatattaatgacaatcaccacatctataaatgggaacaaatataataattacagaaaatagttgttcagagttttatatgtgttagagatggttctaactacttgcaattgtgcatttaatcttcataac

SEQ ID NO: 228197 - DNA, 478 bp, Homo sapiens
tactggggagaaacaggggctccagacctatcccgccttcaatcaaatatctctgctttggtgagttttacaaatttgagcttctatgatttcatttcaacaaaggattaaaagaagtttcgaatgctacaatctaccttatgtctgaaaccctctaaggatagtcagtgctggtcctgagcgaattaataattcattttccacacaacagctgctcaatcatctatctacccaayagccctaccagttaatactccacctagtataatacttttttaaaaagtttggaggagaaacattgttatcatgaaaggcactttggaaagtttgaaaatatctcttatagaaaatattaatgacaatcaccacatctataaatgggaacaaatataataattacagaaaatagttgttcagagttttatatgtgttagagatggttctaactacttgcaattgtgcatttaatcttcataac

SEQ ID NO: 228198 - DNA, 478 bp, Homo sapiens
tactggggagaaacaggggctccagacctatcccgccttcaatcaaatatctctgctttggtgagttttacaaatttgagcttctatgatttcatttcaacaaaggattaaaagaagtttcgaatgctacaatctaccttatgtctgaaaccctctaaggatagtcagtgctggtcctgagcgaattaataattcattttccacacaacagctgctcaatcatctatctacccaatagccctaccagttaatactccacctagtataatacttttttaaaaagtttggaggagaaacattgttatcatgaaaggcactttggaaagtttgaaaatatctcttatagaaaatattaatgacaatcaccacatctataaatgggracaaatataataattacagaaaatagttgttcagagttttatatgtgttagagatggttctaactacttgcaattgtgcatttaatcttcataac

SEQ ID NO: 228199 - DNA, 465 bp, Homo sapiens
acgctgggatttccatatctgtattcctcagtctctcaactactccctgttttagagatgaggaaagaaaagcctacaggctgataaagtcacttgacaagatgattcagctggaatgaggcagtcagaattcacatcccctgaggtctgacgccacatctttttcttttctttttttttttcttttttgagatggaatctcacttttttgcccaggctggagggcagtggcacaatctcggctcactgcacctctgactcccgggttattctcctgcctcagcctcccaagtagctgagattacaagtgtgccccaccayaccctgctagtttttgtattttcagtagagacagggcttcaccatgttggccaggctgctctcaaactcctgactgcaaatgatccacccaccttggcttcccaaagtactgggattgcagtaagtgagccaatgcacccagcc

SEQ ID NO: 228200 - DNA, 429 bp, Homo sapiens
catattcattaataattaacttttagaaatctcaatatttaggttacaggatagcaaatatggaatgtgatctagctaaaaaaggagtgaacatcattcaaagacaaaagactttatcctgttggggaaagggttggcatattttcactgaatgagaaaaagtatgattttcctattgtctttatytgaaccttaagtatggctttacaaggaggaaaaaggaggaagaagaagagaaagaagaggatgaggaagaggaggaaaagagaaggaggaggaggaaggtgcacattgatgccactttgagaagaagtggactgtggtggatttgtaatgtatcagttttgccaagctgaatgcacatttcccagatttgccatctttagatagctctaggttagcctgggcaacaggagacacttggaagat

SEQ ID NO: 228201 - DNA, 454 bp, Homo sapiens
ggaaatctgacacaacatttacaagacctaattttgaaaatttaaaatagtgtaaggcccctaggcttaattttacaggggaaagattaaagggacacaagcaaacatataktctctctctgtgctgtgggacactggtaattttttgacttaaaatatttgatacttaaaatgccaaacttctacatttctgcagtaacaaggcagttatcatattgaataccatttctttctctccagtaagtagagttaatattagcacatgaactgaaaatattaagtgattataaaaaagtccaaataaattcattaaaatttagcttggcaaaatgttagtttcatgttcttggtagaagtccttttatatttatattcaaatgaaatgaacaattaacaagcaaaggaaatggcatcaaatatttgacaccctgcctcccaaggtgtattgattcat

SEQ ID NO: 228202 - DNA, 454 bp, Homo sapiens
ggaaatctgacacaacatttacaagacctaattttgaaaatttaaaatagtgtaaggcccctaggcttaattttacaggggaaagattaaagggacacaagcaaacatatagtctctctctgtgctgtgggacactggtaattttttgacttaaaatatttgatacttaaaatgccaaacttctacatttctgcagtaacaaggcagttatcatattgaataccatttctttctctccagtaagtagagttaatattagcacatgaactgaaaatattaagtgattataaaaaagtccaaataaattcattaaaatttagcttggcaaaatgttagtttcatgttcttggtagaagtccttttatatttatattcaaatgaaatgaacaattwacaagcaaaggaaatggcatcaaatatttgacaccctgcctcccaaggtgtattgattcat

SEQ ID NO: 228203 - DNA, 607 bp, Homo sapiens
atgaaaaaacattgaattactattttgtcatgagaactttataacaaaatttaattttcaatcctgttttggactagcattaaaaaaccaaaacacccaaacctgagagtagtgttggtatcagacacaaagtatgtgaattctgataccttttcatcacttgtacactaggaattctattttttaaatgatatcctgccagctttttcacaatccattaattcctggatcaacatcagaaggaatgtcagagcagagtgaaattcttgtaagacacagatgtcaggatcaaaagtcagagacattctctgagcagcagggaagcaagcttgttagactttaatcggaacaattagtatctgccatgtgacagwctcgatgccttgccttatatttctgttaagttccaggcatgctgaaaacacaaagtcttcttctgagtttgatggaaaatttcacaagcttttggactcattatttttggccaggattcttaagttttgttgatcctctccaaatttccttaaatggtaaattgttgatgtacttaataaactagtgtctagcttattatagaggcaaatttttatcttttctgagtgcatgt

SEQ ID NO: 228204 - DNA, 498 bp, Homo sapiens
ttgtgaggcctagggatctgagagttaatttcaatattgagatgaattaaacatgcttcctgaatcgagattacatgagttaattacttacagacatgcctagatactttgttctttaatcggaaaaaatccatatggaataatcattttcagtatttttaaggcctcatgtatacaagctgtcaatggtgcagttttcctttcgtattttctgctactctacataatgtagactctataagcagttatagtttacgttccatataasgtgtcatagaatatctaaacctccaggttaacttactgagctttaaaaaaaagctaagcagccgggcgcagtggctcacacctgtaatcccagcactttggaaggccgaggcaggtggatcacgaggtcaggagatcgagaccatcctggctaacacggtgaaactccgtctctactaaaaatacaaaaaaattagctgggcatggtggcaggtgtctgcagtcccagct

SEQ ID NO: 228205 - DNA, 498 bp, Homo sapiens
ttgtgaggcctagggatctgagagttaatttcaatattgagatgaattaaacatgcttcctgaatcgagattacatgagttaattacttacagacatgcctagatactttgttctttaatcggaaaaaatccatatggaataatcattttcagtatttttaaggcctcatgtatacaagctgtcaatggtgcagttttcctttcgtattttctgctactctacataatgtagactctataagcagttatagtttacgttccatataacgtgtcatagaatatctaaacctccaggttaacttactgagctttaaaaaaaagctaagcagcygggcgcagtggctcacacctgtaatcccagcactttggaaggccgaggcaggtggatcacgaggtcaggagatcgagaccatcctggctaacacggtgaaactccgtctctactaaaaatacaaaaaaattagctgggcatggtggcaggtgtctgcagtcccagct

SEQ ID NO: 228206 - DNA, 548 bp, Homo sapiens
  misc_feature (1)...(548): n = A,T,C or G
caggttcctcttctagagaaatgttttctctggagctctgggaaaagaagttttctgggacacctgttgagtgttacacccaccgttctgtggttagaggagagggtgtrcagaatccctcgtcacccagctggtctgagacagcaaaggtcaacaccaagcctccttggcctcttgccctgttggggggcacccagaggacggtgtcccagctccattccagtagagctgcaggaggaagaagatgaccgggcgaatttgactcccaggaagggactttcaatttgaggccagattanggttggaatggggtgggaggtagtcctaattgctctggagagaagctcagaatggggaggagtggggatagagcagagtggaggcagggctagatcagagtcttctgaacacctggtaatggctcacaccggcccagaacctcattcacctcagtcaatcgtcatccagtgagagcctctctggcctggaatgggccccttcccccaagtggtcagtggatgtatggctgtggggcctctgtttatgtc

SEQ ID NO: 228207 - DNA, 548 bp, Homo sapiens
  misc_feature (1)...(548): n = A,T,C or G
caggttcctcttctagagaaatgttttctctggagctctgggaaaagaagttttctgggacacctgttgagtgttacacccaccgttctgtggttagaggagagggtgtgcagaatccctcgtcacccagctggtctgagacagcaaaggtcaacaccaagcctccttggcctcttgccctgttgggggrcacccagaggacggtgtcccagctccattccagtagagctgcaggaggaagaagatgaccgggcgaatttgactcccaggaagggactttcaatttgaggccagattanggttggaatggggtgggaggtagtcctaattgctctggagagaagctcagaatggggaggagtggggatagagcagagtggaggcagggctagatcagagtcttctgaacacctggtaatggctcacaccggcccagaacctcattcacctcagtcaatcgtcatccagtgagagcctctctggcctggaatgggccccttcccccaagtggtcagtggatgtatggctgtggggcctctgtttatgtc

SEQ ID NO: 228208 - DNA, 548 bp, Homo sapiens
  misc_feature (1)...(548): n = A,T,C or G
caggttcctcttctagagaaatgttttctctggagctctgggaaaagaagttttctgggacacctgttgagtgttacacccaccgttctgtggttagaggagagggtgtgcagaatccctcgtcacccagctggtctgagacagcaaaggtcaacaccaagcctccttggcctcttgccctgttggggggcacccagaggacggtgtcccagctccattccagtagagctgcaggaggaagaagatgaccgggcgaatttgactcccaggaagggactttcaatttgaggccagattanggttggaatggggtgggaggtagtcctaattgctctggagagaagctcagaatggggaggagtggggatagagcagagtggaggcagggctagatcagagtcttctgaacacctggtratggctcacaccggcccagaacctcattcacctcagtcaatcgtcatccagtgagagcctctctggcctggaatgggccccttcccccaagtggtcagtggatgtatggctgtggggcctctgtttatgtc

SEQ ID NO: 228209 - DNA, 592 bp, Homo sapiens
ttttagaaatagtgaatgtgttcattatcttgattgtgatgatggtttcacaggtatggatatatgttcaaacttacgaaattgtacactttaaagtgtggagtttattgtgtttaaactattattccataaacctatttttaaaaacccagtgcagtaaagtgctgtggcaaccwgaagagcagtgatgcaggagattctgttagtccaagaaaagcagtgggtctctcctgggaaaggaaagttggtaaaggctttacaagggtggctgaccttagctgagctgggaaagatgaataggcatttgttgaaatgctacaaagacaaaacattctaggtgcagagatattgccagtaagcattgagagataagaaggagcatgacagataatttggggacttacgaggaatgtggggtcctggcagccagagaggtaaatgaagctagagaggtaggtaaggtccaaaccagaggtcttgtttgtcatcccaaagtgttaggattttagcctgtaggcccaggggagccactgaaggtgtctaatctgaggagtaacaggccacgtttgtgttccaggaagattattctcac

SEQ ID NO: 228210 - DNA, 581 bp, Homo sapiens
atggatgaggagttccggacatctcagcgtatctgggagggaatgtgcctttgggtggttaagtctgtgacatctgctgaatcagagtagaacctgttggctgaggaaggcttgacttctgccatgctgcaggtggtactccagctcaaatacaaacgctcacagccgatgcctgtgctttccacgcaccatgttttgttctgggcctagtggaagtgagtgagcctgagaggtgagagtttgaccatgcaactctgtagggagggaggtgtcctcatagtctcaccttgcaccrggtgctgtgttcttcgtggagtttagtcctcttatggagaactcctgatctcattgccggataagcacaccaaggcctaaagcagtttgagtaatttactccaagcatcttagccaagtaccaggtgttgaccatcagtctggggccctgagagctactgtcagccacagtgctataaactctccccaccaaaaccgcaataaaaatttcagaaggacgagttaacaatggcagagaggggacaggatgtctggggtgggtctggcgagggtgaagcaaaaggcca

SEQ ID NO: 228211 - DNA, 613 bp, Homo sapiens
cacatcttctagactataatccaaaaggctctgtccatcctaccccactggccacactgaggcccacgaacactgcatcctgggtatgttgcatccaacacactaacaactcggtgccratgcccctgagccagagatcagccatttctggcctaagccatcctcctcagctcaactatgctcttcccacctgggtccagcctcaagcacggggtaggtgctcactgatatttgctcagtgaaaacctccaatgcctcctcccagttcccagtgccgaccacggctctgtcccctcccttgtcccacacgcaaggccattaaagccacaggcatttcggaaggcctctgcttgttgtccccagttcctcctaataattctttctaccgggtaccacatcagacagaactaagcacatttgccgcttcaggaaattccagtgtcagtttttcacggtagccccctctcactccctccaactccgggagctgtaaccttcccacccgggacattcctgtccggctttctgctgacctgggtctttctcctcctccagtttcctccctgaccatcccttcgaaggacatctttctgggactcttcctagatgccca

SEQ ID NO: 228212 - DNA, 398 bp, Homo sapiens
acttaattactctgagatgcacatcttctagactataatccaaaaggctctgtccatcctaccccactggccacactgaggcccacgaacactgcatcctgggtatgttgcatccaacacactaacaactcggtgccgatgcccctgagccagagatcagccrtttctggcctaagccatcctcctcagctcaactatgctcttcccacctgggtccagcctcaagcacggggtaggtgctcactgatatttgctcagtgaaaacctccaatgcctcctcccagttcccagtgccgaccacggctctgtcccctcccttgtcccacacgcaaggccattaaagccacaggcatttcggaaggcctctgcttgttgtccccagttcctcctaataattc

SEQ ID NO: 228213 - DNA, 602 bp, Homo sapiens
gggtgtatttgtgagaaggcacaatcttaaaaaagtgatggcatctagacaaaaagactgagccccagcaccccacagcagacctgtgaatctggcacacagatctgtgaagctcagtcccatttgtggtgatgtcttccctccaagaatagacttttccagcacctgggctacagtttcaaaagattaaaatgcacatgctgcctcagtgatctccaattcaatggctttctgacgacaatcagcagtatttacttggaatatttttccagtcattttatttttgtcctcatccagctgacattctatttttcacacatttttatttagtttctttcacgttttgtgttgttttcgggttctcgtttttgttctagcttttgtactcactttagcgagcgagagatgctcagccctttgctccttttagcaccagtcctctgtcctcccacggggcttgaagagtcagctcagtgtccaccgtcaccaccaactgtgcaaatgacagcaaagggctgccagggtctagggctrgtcctctgtgtgccatggcaggggctgatgtggaggggagagctcacgggcacagggagaaggcatgg

SEQ ID NO: 228214 - DNA, 448 bp, Homo sapiens
ttggaccaagattgaccgcaggtcactgaaaccgtggaaagtgcaattgtggacaagggggctactgtaatgctctggatttcctagaattcgccrtagcatggtctatgttttcatgttgctttttggggatgcttggaggaagcccacaggaagtgtggatgtgggggccacgtggggaacccctgaggcccgtggcctgcagcctgtaccaccttgccagccatgcggttaagagactttagggggacccctccagcctccacctgagtcgtcgcagctaacaccacacagagtccagatatgtcatttccgccactcctgcccaaacgataaggtcatcagcaaaggacattgctgttgttttaagccaccaaattgtagggtggtttatcacacagcagccctttacagcatgtgtacaaatcccctgtcgatcatttcacac

SEQ ID NO: 228215 - DNA, 416 bp, Homo sapiens
gaccgcaggtcactgaaaccgtggaaagtgcaattgtggacaagggggctactgtaatgctctggatttcctagaattcgccgtagcatggtctatgttttcatgttgctttttggggatgcttggaggaagcccacaggaagtgtggatgtgggggccacgtggggaacccctgaggcccgtggcctrcagcctgtaccaccttgccagccatgcggttaagagactttagggggacccctccagcctccacctgagtcgtcgcagctaacaccacacagagtccagatatgtcatttccgccactcctgcccaaacgataaggtcatcagcaaaggacattgctgttgttttaagccaccaaattgtagggtggtttatcacacagcagccctttacagcatgtgtacaaatcc

SEQ ID NO: 228216 - DNA, 582 bp, Homo sapiens
ggtataagtaacagctaaattcatcagagtaaaaacatttttttaaatacaagcagatatagtatggtgaggtaaaatttcttcgcaacatatttaactagtttcaatacagttttaaagctatttatcctgtcttttaacttaaaaatgcctaaatgaacatttatgttagtgatcaaactcaacgcaccctttactcaagaaacatactgagcatctatttgataacaatgatataataagtaactttagctataaatgtcataggttatttttaatttttgattttttaagcctaagatattaaaacaaaaggatattataagtaatactgatgaagtaaaattagaaatggaaactttttaccacagatgattttacctggttcaaatgatttcttactgtcctcaattccgtatctcgtgttctcagcgtcagctgaagttgtttgtttgcttcaacttctttcctgtactgctcttcttttcttcttaagtgtcccctgattttttcatacaatgcactggcattttttctcttctcttcttcttgtcktaaggtagatctgcagtgaaatgtgtt

SEQ ID NO: 228217 - DNA, 577 bp, Homo sapiens
gtgggagccagagaaaggcaactatggaagtctgtgtcctctaaggccccttgccacttgcctgggcccgtgctgcacctgccatacagaaatccctgcccatccctgctaacccttatttccagatgcaggaagtgaggctcctggggtcattctcctcaccctggttgtgtccagggtgtgtgcttastccccggtggtcccgtgggcagtaaggatggccacagtgctgcaggccactgtgttcctgcaagcaaggagacaccacactggggaactgtatgtcagattcctgcccaagccccaggtctggcacagaggaagactgtggagagcaacacctccctgccctgctccttcccaccctgctctgcgtgtcttgatgtctagcaggtgtgttctgatctctcctgatgtggaccccagtggaggcactgcttcgacaggaagcatggtgctgtcagggcaggatgtgcgccaggatgcctctggctgcgctaggctgaaggggtgctttggaaggccacggtgctgcagggcatgtaggttgaagggtcctggctgggagccagctaag

SEQ ID NO: 228218 - DNA, 550 bp, Homo sapiens
acgaattcagcttctgtgtgtgtgactgtgttctaatactcattacactagaaaaacaggccatagttctatatgcatttctccatatgtgctgaaacatggtcaggtcccatctgcaaatttacctttagaaattagctgtaaagctcatccttatattccaccccttgtgaaaagctgaaaagcagattggtacctcaccgttaaagactgcaaaagcactactgactctgaaatgcttcatactcttgtaaagtatatccttatacttgctgtaataaatactttgatttatagattaatgtttgtgacagctggcatcatccagtttacccatgccaggggacgctgtggaaataggactaattaacatttgcatttcagcttcggctaccctagcaggtaggataaaggtcttggagaggaaggatgaccagtagtgtaactcttaaagtatcccttaatctgttggcctctctaaggcttacagaattatacaaggttcagtatgtccatrttttattcctaatagctagtaccaagtatgctg

SEQ ID NO: 228219 - DNA, 402 bp, Homo sapiens
gaattctttacaacataatcttcccattcatggccatgatattcttctccattattcaagttttcttatctatctttcaaaaaaggacataagacactagcatatttcttgttaggcttttcctaggtaatttttaattgctattataaatagtatccgtttttcccataaaatattkctatatgtttgtatattaatcttgtactgttacctttttcaactctattggttctgataacttgtcagttgtctacctttcatcttctaggtaaatatttcttacaaataatgagatttgctcttactttccaatttatctcattacttttacttgtcttactgcactggctaggacacccaagaatactattgaatagaagttgtagagggtatccttgtttg

SEQ ID NO: 228220 - DNA, 572 bp, Homo sapiens
tcctatttacgttgctttagctgtgtcccaaagatctgctatgttgtgtctctattttcattattttcatagaatttttttatttctgtcttcactctttatccaaaagtcattcagaagcaggttatttaacttccatgtaattgtatggttttgatacatcttcttggtattgatttctattttcattgagctgtcacctgagagtgtggttagtatgattttgcttttttgaatctgctgagacttgctttatggccacgcatgtggttgatcttagagtatgkgccatgtgcagatgagaaggatgtattaatatattatatgtttgttgggtgaagttttctgtagcagtctattaggtacaattggccacatgtcgagtctgatctaacactgtgcagggttgacctctcccactataattgtgtggttgtctaaatctctttgtacgtctctaagaatttatacatcttcgtgctccaggttgggtgagagtatttatttaggatagttaactcttcttgttggattgagtcctttatcattatataattcccttctttgtcatt

SEQ ID NO: 228221 - DNA, 572 bp, Homo sapiens
tcctatttacgttgctttagctgtgtcccaaagatctgctatgttgtgtctctattttcattattttcatagaatttttttatttctgtcttcactctttatccaaaagtcattcagaagcaggttatttaacttccatgtaattgtatggttttgatacatcttcttggtattgatttctattttcattgagctgtcacctgagagtgtggttagtatgattttgcttttttgaatctgctgagacttgctttatggccacgcatgtggttgatcttagagtatgtgccatgtgcagatgagaaggatgtattaatatattatatgtttgttgggtgaagttttctgtagcagtctattaggtacaattggccacatgtcgagtctgatctaacactgtgcagggytgacctctcccactataattgtgtggttgtctaaatctctttgtacgtctctaagaatttatacatcttcgtgctccaggttgggtgagagtatttatttaggatagttaactcttcttgttggattgagtcctttatcattatataattcccttctttgtcatt

SEQ ID NO: 228222 - DNA, 580 bp, Homo sapiens
gaacaccagatgaatactctgaaagactataccatgccatatagatatcagactgtctaaagtcaacaggaacgaaaaaatcctacaatcatcaagaagaaagcatcaagtcatctataaaagaaacctgatgaaactaacagccaacttctcagcagaagtcttacaaggcagaagagattgggatcctactttcacaatgctttcagaaataaactgccatccawgaattttctctccagctagaaaaagcttcataaatgaaggagaacaaaagtctttccaagaccagcaaatgctgagagtattcttcaccactagatcagccctacaagaaatgctcaaagaaggcctaaacatggaaaacagctgtcaatgttcatcatcataaaaacacactgaagtgtaaaattcatagctggtgtacagtggttcatgcatacaatgtgagcattttgggaggccaaggcaggaggatgacttgaggccagggatttgagaccagcctgtgctatgtaacaagatggcatttctacaaaaatcatttaaaataaattagctgggtgtggtgtgtatgcct

SEQ ID NO: 228223 - DNA, 447 bp, Homo sapiens
atgacttgaggccagggatttgagaccagcctgtgctatgtaacaagatggcatttctacaaaaatcatttaaaataaattagctgggtgtggtgtgtatgcctgyagtcctagctacttggaggctcagtaggcaattcttatcttgctataaaggattacctgaggctggttaatttacaaaaaaaggaagtttaattggctcacagttctgcaggctgtgcagtaagtgtgacattagcatccgctcctggtgagagcctcaggaagcttaaaatcacggcaaaaggcaaaggggaagcaagcacatcacatagcaagagtgagaacaggagcatgaggagggaggtgccacacactttgaaacaagcagccctcatgtgaactcacttaatagcaaggggatgggctaaacctttcaggagccaaatgctcccatcatccagt

SEQ ID NO: 228224 - DNA, 447 bp, Homo sapiens
atgacttgaggccagggatttgagaccagcctgtgctatgtaacaagatggcatttctacaaaaatcatttaaaataaattagctgggtgtggtgtgtatgcctgtagtcctagctacttggaggctyagtaggcaattcttatcttgctataaaggattacctgaggctggttaatttacaaaaaaaggaagtttaattggctcacagttctgcaggctgtgcagtaagtgtgacattagcatccgctcctggtgagagcctcaggaagcttaaaatcacggcaaaaggcaaaggggaagcaagcacatcacatagcaagagtgagaacaggagcatgaggagggaggtgccacacactttgaaacaagcagccctcatgtgaactcacttaatagcaaggggatgggctaaacctttcaggagccaaatgctcccatcatccagt

SEQ ID NO: 228225 - DNA, 447 bp, Homo sapiens
atgacttgaggccagggatttgagaccagcctgtgctatgtaacaagatggcatttctacaaaaatcatttaaaataaattagctgggtgtggtgtgtatgcctgtagtcctagctacttggaggctcagtaggcaattcttatcttgctataaaggattacctgaggctggttaatttacaaaaaaaggaagtttaattggctcacagttctgcaggctgtgcagtaagtgtgacattagcatcygctcctggtgagagcctcaggaagcttaaaatcacggcaaaaggcaaaggggaagcaagcacatcacatagcaagagtgagaacaggagcatgaggagggaggtgccacacactttgaaacaagcagccctcatgtgaactcacttaatagcaaggggatgggctaaacctttcaggagccaaatgctcccatcatccagt

SEQ ID NO: 228226 - DNA, 507 bp, Homo sapiens
taccaaaaatgaattagtggatgatttgtagcattgcaaagtcttctttatctaaaaagattttaccwtatgacaccttaaagactgagccctacagtgcatttaagcactttttctaaagattattaactggaaaagagtaaactttaaattattcagagcttgaatcagcaccaatcagaaaaagcaaattcttaaattttaattccaatgatctatcataataagatagtgttatgtatctagatacactctgtgcttaaatacagttttaatgtattacaaggtccactaatgacagtggattttaaaattagtaatatttactgatttcctgcattgaaataagtcacaaagttactgtttgtatcttaacaccaaaggtcccaatctacaaggcacgactgggttgattttataagcccattttctccctgaatgtagacaacgaagtgaactagagaccaaaagccaaaataaatatttaatgttggcactaatgattgg

SEQ ID NO: 228227 - DNA, 507 bp, Homo sapiens
taccaaaaatgaattagtggatgatttgtagcattgcaaagtcttctttatctaaaaagattttaccttatgacaccttaaagactgagccctacagtgcatttaagcactttttctaaagattattaactggaaaagagtaaactttaaattattcagagcttgaatcagcaccaatcagaaaaagcaaattcttaaattttaattccaatgatctatcataataagatagtgttatgtatctagatacactctgtgcttaaatacagttttaatgtattacaaggtccactaatgacagtggattttaaaattagtaatatttactgatttcctgcattgaaataagtcacaaagttactgtttgtatcttaacaccaaaggtcccaatctacaaggcacgaytgggttgattttataagcccattttctccctgaatgtagacaacgaagtgaactagagaccaaaagccaaaataaatatttaatgttggcactaatgattgg

SEQ ID NO: 228228 - DNA, 328 bp, Homo sapiens
taatgaaagaaactgaagaagatacaaacaaatggacagacatcccatggtcatgaattggaaaaaaaaatcatactgttaaaataaccatactatccaaagcaatctacagattcaatgtaatccttatcaaaataccattgtttttcaaagaaattgaaaaagcaatcttaaaatttgtatggaactgaaagaagatcccgaacagccaaatcactcctgagcaaaaagaacaaagctggagaaattgcactacttgacttcaaartatattaagaggctatagtatccaaaataacatagtgttgatatgaagacaggtacgtca

SEQ ID NO: 228229 - DNA, 567 bp, Homo sapiens
tatacaactcaccataaagttgaatcagtgggagccctgagcttcttttcctgcaactagagtgtctcatctgggggtgataggagacagtgacagatcatcaggcattagattctcagaaggagtgtgcaacctagattccttgcatgtgggtagttcacaatagggttcatgcccctatgagaatctactgtcacagctgatctgacaggaggtgatactcaggggtaatgcaagtgatggggagcggctgtaaacacagatgaagcgctgctcacctcctgctgtgtggcctggttcctaacagaccatggatcagtactggtccttggcctgggagttgggaatcccttctttgtaacacaaaaatggcctaatacacgtgcaaagtgaaagaagtcrgtcataaaaagttgcattttgtatgatgctatttgtatgaaatggtcagacaggtataacctatggagacaaaaagtagagggtggttgcctaggaccaggcaaggtggaaagacttgagtaggggatgcagccagtgatggctaagtgaaatggggtttcattt

SEQ ID NO: 228230 - DNA, 477 bp, Homo sapiens
ggtaacagagaagataaaaaaaattaaatcattacattaaaaatcaaactactaatcaaaatcttgtattatacttaggcaatgtttttgcatctactagaagattatgcattaaaattatatcccaaagtggttcatgattaaactacagctcttgactgaggatcatttgttgctgtatacatgagagaaagtgtgtgtgtgtgtgtgtgtgtgtgtttgtacatgtatgkgtctgttggtaattcaaatatgcagaaaaaatcattatccaaagagcatttttttatttatgtttctatacttattacctaacagtacctaagaattcaaagatgctcaagtgaaataaatgtatagaacttgaaatttatccaaaagttacttccctaaaatagcctttttttttttaatatactttaagttttagggtacatgtgcacaacctgcaggttagttacatatgtatacaaagaa

SEQ ID NO: 228231 - DNA, 511 bp, Homo sapiens
acatcattatatattaaatcttcatatatacaaggatccatttctaggttgtttctgaagtatatttaaggagactgagtaatcctatttgtcaatatcatagtgagaaggaagatagtagcattaaggaagctggataaaaagataaagccagatcatatagygtttgcaggctcttttaaaataaattagaagtaaggatattaatttggtttaaaaaatcatgttgtgtttggtacagatagaagatacggggtaagatagtagaagaaaaggccaattcaggaatccaagcaaaagagattatagcagaatagatgaagtagaactaattgaaaatatttggagtctttggctagtctttattgtctaggttactctagataacccaaatattaatattttgggggctatactacagtgagctgaaccacaaggaagtgtatacaggaaatttcacttttctaggatgcttagagaatagtttccaataaatcagaaatgctagtta

SEQ ID NO: 228232 - DNA, 606 bp, Homo sapiens
taagtgttattacaataaaaaataactatgtgacataatgtgtatgttaattagctcaatttagccatcccacaatgcatacatatttcaaaacatcccattgtacaccataatatacacatttttttaatttgtcaatcaaaaagaattttaaaataaagttaacaaaacttcaaatacaataaaggaagagagaagaatgtggatatggggagggagaaaaatggaaactttgaaaagagcaagaatatactaggaaagaagacaagatgaaaaatattataatagaagagayagcacatagagaaaagaaaaaaagccaaaaatgatacggaaatggaaatggcctgagcattactttttcctgacaagagattgttatcacagatggtcaatttgttataaaagtgagtttggctccctcttgttctctcgttcttactctcatgtataatgccttctgccacattttgatgcagcaagaaaaccctcaccagatgccactccttgatcttggactttctagcctccagaactgtaggtcaaattaatttttttcattgtaattatccagtctgtgggacttggttatagcagcataaaata

SEQ ID NO: 228233 - DNA, 620 bp, Homo sapiens
atatacttgagaaacattcgggttatggcttgtatcaatagtctgtcccattttattgccacacaatagtttatggtatgagtaaaacactgtttagctattcaaccttgaaggacatttttgttagtctacaatttgggagtattttatgaataaagctgttccaaacatttcaatacagtttttgcctaaacataagttttcacttatctgagataaatgccccaaagtccaattgctggatcatatggtaatcatgtatttaattttataaaaatttgcaaagctcttttccagacttattgtaccattttacattcccaccagcaatgtatgagtgattcaatctctctacgtcctcactagcatttagtgttttcacaattactttttaatcattctgagacatcagtagtactatctcattgcaaatttagtytgcattccctaaatgactaatggtattaaagcgtcttttcatgtgcttattttctatctgtataaccttttcactgagatgtctcttcagttttttttgcccattttctagttggatggtttatttactgttgagtattatgacttctctgtatatttcaaacacaattcttttgatggat

SEQ ID NO: 228234 - DNA, 610 bp, Homo sapiens
aatgaatatactaaaaaaacttaatgccaattatatatggtgctatatccacttattttaattcctttaacattttatgtatttctaaacaaactatactaatctcataataaaaagaaattcacatgtagaacacaaaacaatgcttgagaaaccaaatgtaacaaaatatactcttcaaaatgactatcaaagaacagttctaaggaattaatccaataaaaaataaagccaacctagaacgccaaaatattttaaagagaatttttaaattattatttacatatttgataatcactccctttccttttagctttacagctgaggaaagggaaaaaatgattcagttacaggtgattcatatttcatagaaattcatttttagggaatcgagccttagcagttattaattattagaagatttatagtacatttaagaatgatgcatagccgtggctgctggaaaagaatggagccgatccaaatagcatggaaataagtgttgcatttatacataaggaaagaggatttaatttcatcattattaytgccattttaacagcaatacagcgctgcagcagccatcataattattgtcataggctgggag

SEQ ID NO: 228235 - DNA, 558 bp, Homo sapiens
ttaccttttctctccaacttttctgacatctctttgattataaatgtatttttgccctcaccaagcacacattttaaattgatatttctatgcccaactgtcttaggggattttaaattcctcaacagatttcttacccatcgtagtattccccaaatatagcgccrttcttggaaaataagtagatctgtaaaatagttaagtgaagttttattacttggcaacatgaagcactacaaagcaaatacttgcctctaactgcaagttagaaaggatccctgtattcaaataactatatgaaaattgaggaacattagaactattaccaagcaaaattagatactttgtgagcctcatggaaactgaaatgaagctgggtagaatgaggaagaggccttcaaacacccagaatatgtcctgcttctcagaacatgctgtaactgaattctcttgaattcagatattgtattcataaatcagaacacgggaaagtaagggggagaagtattatattttaattgcaacttgtagcaaactacttccatgtctttcattcta

SEQ ID NO: 228236 - DNA, 596 bp, Homo sapiens
gctttgtcagcaagtagtggtttattgctattcccttctaatttcyctgtgggcaagtgcaaacttgagattacaagacaaaccgtcaggtgtcagattgttcatcttcctcttcagctatctcctttgtcctcattaactcgctcacctgtctatgggagaaacattgccttgtctcctcgaagtgcagcatgtgagtaattttttaaagatatattacccatggacatacttagagaaagtcctctttattactttatattatattttatcaacattacccattagaaaaaaatgcaaaaaggatgactgccttttaggaagtagtatagctaaagaggtgcatttcactttcccttgatattttttatttccatatgatgaaagtaaataacttggagtgaaaagaaaaaggatgtagatttgtatgaggtcagagatgaagagggtcctcctgtggcatatatgaagatgggccaggaaatatttgcagacaaggaatgtagacatcataattagagaatgcaatgtttattcttatcagttcaaaaaattggctcaggtctccatctgacaactacccaaagcttgtgaca

SEQ ID NO: 228237 - DNA, 443 bp, Homo sapiens
ttctgaaattatgcatgtggaaacacttggtattgttacctgctattaatctcaaatgatactaatacaaatacatgcacacagcacatacaccacacactgacacacccacccacacacacacctcacgtatagccaatctataagatctttttcttcctaagagtcacttaaatttaaattacattatrtttttaaaataaataaatgtaagtatttattgtattcctgatcatggactcaacattaagtgcatttcagtagttactaagagtataacatggaaacaaaattaaactataaattctggcattgcataaatcactggatacatagttattttggctctgaagtctataccctcatgcacacaaacaaaagtcattagatgatacctgttgttaataggctattttattttattagattatgcttcttgaatc

SEQ ID NO: 228238 - DNA, 568 bp, Homo sapiens
gctcaaccaatgatttataattaatatacaatgagacaccacactattgtaaaatttttatatataaatgtggtgtcagtacatttatgacaaacctggacatttctttctccataacacagaaacaaacagaatgtctgtcctaacccatgcaatacctgcagtgtaggtcatattataatgaaatgagtttttatcacttcccaactgagctcattactccatttaggtagatcaaattgcttatcttgacagagatttgattaccaattaactgtagaataagccaacaaaaatgaagggatggaaaatgcattgaagtttactgagacatctttattaaatatggaggtctgcagcataaatactcccmaaaaaattgtttttcaaaaatgttatagatgccacatgaggtggtaatggtatttttgacaaaataggaaatcttagtagctctgtagtgaaacttaaggtgaccttgtaaatagctgacataagccatttaataaaactcagattttctgacattgtttacttttgccacaatttgacactgagttgcatcaag

SEQ ID NO: 228239 - DNA, 599 bp, Homo sapiens
ctctaaatttgttatttagagcagagcgctgtaaatatattgccccacttgcttttataaataaagttttattggaattcatccatggctacgtgtttatgtattgyctgtggctgcttttgtactacgagagcagagttgagtagctgcaacagagaccataggatgcacaaaaccaaaaagatttaataactggtcctttacagaaaacaacaataacaaaaaacttgccaactctgctccagagcctatgccattaagctaggactcgattcatctctaggactcgattcttttaccaaaataatttttcaccttgtaggcaagtctcaatggaattccagcatcatcaagcaaccatttgtaaaatgtctgtcatttttgaaatacagaaacagagctttgggaaaatctccatatgcttgttgaaagttcatacttctgaagaaataagtctacctttgaataatccacatgatttaatttgcccttctccggtatgatttttccacgtttgattatactttacattgaggaaatcagtttacacttaacttgtttagcatgtgctaaatagtaaatcataactgtagaagaca

SEQ ID NO: 228240 - DNA, 565 bp, Homo sapiens
atcattgtgtcttgacaaaatttagtcccctagatattggcagctataagggaatctgggaaatgtagtcttttgagtgagtagccatgtcctcatgtaaaacctggttgtgccttcactcctatactaaaagcaagaaagggtaaatataccgacgataggtgtcaatgtcatcgagtctaacaatagagaggtatagaggcatgtygatatattttgaagtatcttttttgatggaatagtgtaacatcagtgatatggtttggctgttttctcacccaaatctcacatcaaattgtaatcctcacaatccccacatgtcaagggcatgaccaggtagaggtaatcggatcatgggggcagtttcccttatgcagttctctcatgatagtgattgagttctcatgaaatctgatggttttctaagtgtgtggtagttcctcctgcattcactcctccttcctgccgccttgtgaagaaggtgccttgcttcccctttgccttctaccaagactgtaactttcctgaggcctccccagccatgcttaactatgagtcaattaaa

SEQ ID NO: 228241 - DNA, 492 bp, Homo sapiens
taagacagccatagttaaaggcacagttaacaagagtattttgttattcctgtggcatacaacttaacataataataataattactgtgacaacatatattaagacatgtattcattttataactgtcatatcatcctggaacttccggaggccaaggcgagtggatcacctgaggtcaggagttcaagaccagcctggccaacatggtgaaaccttatctccactaaaaatacaaaaattagttgggcgtggtgattcatgcctgtaatcccagctacttgggagcctgaggcacaaaaatctcttgaatctgggaggcagaggctgcagtgagctaagattgtgccactgcactccarcctgggcaacagagcaagacccatctaaaaaataaataatagataaataaataaataaaacccaaaggaagctgaacaccacctgagattgacaatgcttcctgcataattctaacataacaaataagccga

SEQ ID NO: 228242 - DNA, 526 bp, Homo sapiens
tatttaggtcaaaaatcactcaagcgcataaacataccaccccaaactcaacaacacaatactgyatgcatttccaattctttatatagacagggcattttacagttagttctccctttttcttctttttttttaactgcattttaatgccccaggtttgtttaaacttctgtcagaatgttgacttggactgagattttatttttaattcagaaaagaagaggatataatgtctttaaaagaagaaggaaattcggagagttttctgcaattagcaccatagaagtcagttaagatgccttctggaaatttccaatagatagggggtaagttagaatggcagcaggcagcaaatgaaaacagcacttggcaatttgggaatcctttttttgtgacaaactatctggtaggcaacaattttggctttctctaaacttgtataactcgctgttattttggctgattttgatcattagcacaattgcacatagagaaccgtcagtcaaattaacttaaggctgaattc

SEQ ID NO: 228243 - DNA, 526 bp, Homo sapiens
tatttaggtcaaaaatcactcaagcgcataaacataccaccccaaactcaacaacacaatactgcatgcatttccaattctttatatagacagggcattttacagttagttctccctttttcttctttttttttaactgcattttaatgccccaggtttgtttaaacttctgtcagaatgttgacttggactgagattttatttttaattcagaaaagaagaggatataatgtctttaaaagaagaaggaaattcggagagttttctgcaattagcaccatagaagtcagttaagatgccttctggaaatttccaatagatagggggtaagttagaatggcagcaggcagcaaatgaaaacagcacttggcaatttgggaatcctttttttgtgacaaactatctggtaggcaacaattttggctttctctaaacttgyataactcgctgttattttggctgattttgatcattagcacaattgcacatagagaaccgtcagtcaaattaacttaaggctgaattc

SEQ ID NO: 228244 - DNA, 431 bp, Homo sapiens
catggcctcagggcttctggacttctttaagcattggcaaagtatgcattgcttaatgctaatccaaaacataaatataagcctattctgtatgataaagatggcatagcaccaccacaggatttcagtacctgaaagtctcattagcaaccagtgacgccagtttattgttgtggctaagataaaaacataaataacatagggaaagttaatgactttgacccatatgtcatcccagcctggtatataaacaagtaaagattccactatagttaaaatagagggacgtgaagactgaattaagccataacacagtgcccgttactattagcatgggcaaatgaaagccaaaaaaactgcaccaaagcatgttcatttcagagcagcaacttaatcaaaaagaaaaatagcrttctttcaactttgaattc

SEQ ID NO: 228245 - DNA, 367 bp, Homo sapiens
taccctgataccaccagctaaggacacacaaagaaaactacagagcaatattgctaatgaacatagacacaaaaatcctcaacaaaatactagcaaaccaaatcygacagcacatcagaaaaataataatacattcatgatcaagtgaaaatttttccagggatgcacaaataatccaacatacacaaatcaataaacatgacacatcacatcatagaatgaaggacaaaaactatatgattttaattgacatagaaagcattttataaaattcaacatttcttcatgataaaaatgtacagaaagaacataagcacagaaagaacatatatcaaaataataaaagtcatgggtgacacacccacag

SEQ ID NO: 228246 - DNA, 367 bp, Homo sapiens
taccctgataccaccagctaaggacacacaaagaaaactacagagcaatattgctaatgaacatagacacaaaaatcctcaacaaaatactagcaaaccaaatctgacagcacatcagaaaaataataatacattcatgaycaagtgaaaatttttccagggatgcacaaataatccaacatacacaaatcaataaacatgacacatcacatcatagaatgaaggacaaaaactatatgattttaattgacatagaaagcattttataaaattcaacatttcttcatgataaaaatgtacagaaagaacataagcacagaaagaacatatatcaaaataataaaagtcatgggtgacacacccacag

SEQ ID NO: 228247 - DNA, 367 bp, Homo sapiens
taccctgataccaccagctaaggacacacaaagaaaactacagagcaatattgctaatgaacatagacacaaaaatcctcaacaaaatactagcaaaccaaatctgacagcacatcagaaaaataataatacattcatgatcaagtgaaaatttttccagggatgyacaaataatccaacatacacaaatcaataaacatgacacatcacatcatagaatgaaggacaaaaactatatgattttaattgacatagaaagcattttataaaattcaacatttcttcatgataaaaatgtacagaaagaacataagcacagaaagaacatatatcaaaataataaaagtcatgggtgacacacccacag

SEQ ID NO: 228248 - DNA, 628 bp, Homo sapiens
gttgaaataaaacttgattagacatgatcttgacacttggctgaattgaaagaagattttatttcacgtgtatcaagtctgggcaaatatgtctttagaaagtcaagtacatatggcaaaataactaatatatgtacaatttcatgctttacaaatacatgtgcaaatggtgataaccctgcatctgcatcaagttaaatgtaccagaataattggcttaccaytcaatattgagtcaattcaaggaagagaaattccaatttaactgcatcaattcataagtaaaataatcaaagaagaatgaaatcaaaatcctatttagtcaatgattgagtcaaatcataaagagaaattccttgaaattcatttttaaagtgcagttttcaggaggtgactcatccttttggatgttaaaatcatgtcgccaaatactataatggtgaataaaataatgcaacatgttattcggacctgaggtgagaaaggcttgaagtaggagacaagtaaagaaatgggacagaagtgcagagtcctgagaagaaaaaaatgatgagatacggagcgtggcctgaaacacaaagcacaggacaccaaggtcaaagacaactctatggttctaagctttata

SEQ ID NO: 228249 - DNA, 628 bp, Homo sapiens
gttgaaataaaacttgattagacatgatcttgacacttggctgaattgaaagaagattttatttcacgtgtatcaagtctgggcaaatatgtctttagaaagtcaagtacatatggcaaaataactaatatatgtacaatttcatgctttacaaatacatgtgcaaatggtgataaccctgcatctgcatcaagttaaatgtaccagaataattggcttaccattcaatattgagtcaattcaaggaagagaaattccartttaactgcatcaattcataagtaaaataatcaaagaagaatgaaatcaaaatcctatttagtcaatgattgagtcaaatcataaagagaaattccttgaaattcatttttaaagtgcagttttcaggaggtgactcatccttttggatgttaaaatcatgtcgccaaatactataatggtgaataaaataatgcaacatgttattcggacctgaggtgagaaaggcttgaagtaggagacaagtaaagaaatgggacagaagtgcagagtcctgagaagaaaaaaatgatgagatacggagcgtggcctgaaacacaaagcacaggacaccaaggtcaaagacaactctatggttctaagctttata

SEQ ID NO: 228250 - DNA, 628 bp, Homo sapiens
gttgaaataaaacttgattagacatgatcttgacacttggctgaattgaaagaagattttatttcacgtgtatcaagtctgggcaaatatgtctttagaaagtcaagtacatatggcaaaataactaatatatgtacaatttcatgctttacaaatacatgtgcaaatggtgataaccctgcatctgcatcaagttaaatgtaccagaataattggcttaccattcaatattgagtcaattcaaggaagagaaattccaatttaactgcatcaattcataagtaaaataatcaaagaagaatgaaatcaaaatcctatttagtcaatgattgagtcaaatcataaagagaaattccttgaaattcatttttaaagtgcagttttcaggaggtgaytcatccttttggatgttaaaatcatgtcgccaaatactataatggtgaataaaataatgcaacatgttattcggacctgaggtgagaaaggcttgaagtaggagacaagtaaagaaatgggacagaagtgcagagtcctgagaagaaaaaaatgatgagatacggagcgtggcctgaaacacaaagcacaggacaccaaggtcaaagacaactctatggttctaagctttata

SEQ ID NO: 228251 - DNA, 628 bp, Homo sapiens
gttgaaataaaacttgattagacatgatcttgacacttggctgaattgaaagaagattttatttcacgtgtatcaagtctgggcaaatatgtctttagaaagtcaagtacatatggcaaaataactaatatatgtacaatttcatgctttacaaatacatgtgcaaatggtgataaccctgcatctgcatcaagttaaatgtaccagaataattggcttaccattcaatattgagtcaattcaaggaagagaaattccaatttaactgcatcaattcataagtaaaataatcaaagaagaatgaaatcaaaatcctatttagtcaatgattgagtcaaatcataaagagaaattccttgaaattcatttttaaagtgcagttttcaggaggtgactcatccttktggatgttaaaatcatgtcgccaaatactataatggtgaataaaataatgcaacatgttattcggacctgaggtgagaaaggcttgaagtaggagacaagtaaagaaatgggacagaagtgcagagtcctgagaagaaaaaaatgatgagatacggagcgtggcctgaaacacaaagcacaggacaccaaggtcaaagacaactctatggttctaagctttata

SEQ ID NO: 228252 - DNA, 495 bp, Homo sapiens
aacactctaataacaatcgatgcttttaaarctgcgaccctttaggtccaccccaggaaagaccaatcccttgcttatacctaactgtggcctgccctctttgttctgttactttctgattataagtctcttccctgatagatgattctggagagaaaacagtattggaggctgttgattggaaaagtagctcctaataccatctttgcatgagctctctggaatagccaaatgttctagattctgtatttgatattttggcatcttggagcctggctgatggtagagacacagcccctcccagagttagccagttcccacagacagtacaggattcacctacaaacacatctttcacattcaagccaaccaatccagagcccacacctccaaccacctcctttattgggctctcacactcaaggccaccagttaccagtcccagtcactccagggccaggtaccagacaactaaggcaattctatggcccagag

SEQ ID NO: 228253 - DNA, 687 bp, Homo sapiens
aaaatctttcaatatttcccattaggtgtgatgtttattttagagttctttctcttccaagctactctatcagttaaagaatgttcccttctaatcccacactcagaatttttttttttcttttatcgtgaatgggtgttgaattttatcaggtgcttttttggcatctatttagttgattgtccttttattttcttagtgtggcaaattacattgactaattttttgaacattaaatcaactttgcatcctagaataaatccaatttggacttgttttattatacttttgattaggtcctcaatttggtttgttaatgctttatttagtatttttacactacgttattagggagactgrcttataagttttctttctttgctgattttggtatcaaggttaactggcttcataaaatgaagtggaaagtgttccctttttctatccctgggtgagtttgtgtgagatcagtgtcactccttcttaaatgtttagaaggatttcattagtgaagaatttgggcatagaattttacttgtgggaaagaattaaattacagtctcactttctttcatacatggatgacaattcagattttctactgcatcttatcttagttttggcaagtaatgctttaccaggaatttgcctattttatttatattttgaaatttattggtatgacat

SEQ ID NO: 228254 - DNA, 594 bp, Homo sapiens
ggtcattaggttgggccctaatcctatatgactggtatgcttctaaggagaggagatgaggacacggacacacacacagagaagaccatgtgaaaacacagggagaagacagcatctgcaaaccaaggagaggggcctcaggaaaaaccacccctacccacaccttggacttccagcttccagaactgtgagatagatttctgttgtttaagccctccagtctgtggtactttgttatgtcagccagagacraatacaaacatcatgattgttattgttttaaacagttttatcctcttatttattctattgtttcttattcctcccacatcattatgctcccttcaggataattttcctcattcatggtaaatttcttcagtattcctttttgaattggtatgcttgtgacaaattattttggcttttgtctgaaacatcattactttgtttttaatttattaattgggaaaatgttaattaatatagtatcattttttaacaatcacttgtgccaagcactgtatttaatattctatataattttttcactaaatatttacaacagtccaaggaagtagaattggccatctc

SEQ ID NO: 228255 - DNA, 578 bp, Homo sapiens
ggagatgctgctgctgctgctgctctgtgggccatgctgggagtggttagtttttaaagataagagaacattgacggagggttgagggatgggtccggctttcccccaccccagctgtactactgtgctttaaccagagtagcccccagcctttttacaaaagtcttatctcagattttatttaaaaaaaaaaaaaaaaaaagcagctctaatttaaagcagatttaatgttaaaaaartaggcctaaatattcatgacgaattttcaattaaaaaaaagagagacatacgaccaagtcattctagtttccattgttatcttctggaattcttttcagttccagttttcattcattcaagaaataatttttgcaaggctactctgttcaaagcaccataaatgctgaatttgtctaatattagtttttgcaaagttgaaatctccatctttggctcttctgacctgggaatcctatctgtaaaacttcagctgcttctggcacaacacaatcctctctccccatgccagggttggagtttgatggtttacacatgttcatttcaatctcctgttattg

SEQ ID NO: 228256 - DNA, 578 bp, Homo sapiens
ggagatgctgctgctgctgctgctctgtgggccatgctgggagtggttagtttttaaagataagagaacattgacggagggttgagggatgggtccggctttcccccaccccagctgtactactgtgctttaaccagagtagcccccagcctttttacaaaagtcttatctcagattttatttaaaaaaaaaaaaaaaaaaagcagctctaatttaaagcagatttaatgttaaaaaaataggcctaaatattcatgacgaattttcaattaaaaaaaagagagacataygaccaagtcattctagtttccattgttatcttctggaattcttttcagttccagttttcattcattcaagaaataatttttgcaaggctactctgttcaaagcaccataaatgctgaatttgtctaatattagtttttgcaaagttgaaatctccatctttggctcttctgacctgggaatcctatctgtaaaacttcagctgcttctggcacaacacaatcctctctccccatgccagggttggagtttgatggtttacacatgttcatttcaatctcctgttattg

SEQ ID NO: 228257 - DNA, 603 bp, Homo sapiens
gcagtcacaaacccacatctaaagagcaaaaacctagactcggggggagttttcagtgcagctcagactcggggggaatcgatcatctcttgttgatgatctgagctcacgagatttttttaatggttctgggggaaagaagttgcaaacagctcaagcagctcttccctctgaatttcctatttccaccatgcgtctttccttggctcctttgcactccagctcccgcttcaccacccccacattgaatcattggctactgagaccactgtcaattctcctacctctttggctaaatctgacagcatttaggggaaaatttgatgagctgtttccagaattgttcacaaacccacagacgtacaaatgtaaccacatacatacgtactaccacgccatcgttcaaatcaatgctttccttttcttgctgttcaaaaacctcaggatgagatggcagagatgcrgcaatgattgcaattagttggcacaacccacgaaaacctgcgaggtagataacagggtggacggagggggcggtggagcaaacatttctagatttagtcttgatcttgttgccttaacaacttgatgtagatttcaaag

SEQ ID NO: 228258 - DNA, 551 bp, Homo sapiens
ctctgcaattacttcagggatgtgatattgcttttgatttatcattttcctaggtagaggcagatctaatggcttgtacttggccttttccaccatcacagtcctcatttcacaggttggggaagaaatgtgggaattctgccagctgccaagtatgtctattcccattatgcattctggaactggggaaataaccataggatgggttcagagacccactggatccatacctgagctaaaactccattgatcatctgacctccataagcccctattctgaccagaaagctaagatgatgctacaggtctctcagaatcaatgtcagttcagagctagtgtctagtagtcccctaaaggtttgatttccttttctccagtgcacatttaccctggaaaaaaaaaaaaaccacaggtccctttggagaaggcttggagagtgattaacagtataaatttttagtagcgtatggagtctttcctgaagaggacctgacctccctttcattcagggggttctggytctgcaaactggctcatctgggaattgatt

SEQ ID NO: 228259 - DNA, 588 bp, Homo sapiens
aagactctggacagtaacttgaagctataggataaaataaagaacactggtaaaggaaactatataggtaaacatactggccagcattattatacttttggtttgtaacttccctttttatcctacacgatttaaaagtcaaatgcataaaattataagtctatcttaaagggcaaatactgtataaggatacatctgcaacaataacataaaggggaatgaaaagagatgtataggagcagagtatttgcatactattgaaactcatttgatattactcaaactgggttgttatcagtttaagatattaatattaatctcctaaggcaaccactaagtaaataacttaaaaatatacagaaaagtaaagaaggagggaatcaaaatggcacactacaaaaaatcaactaactccaaaaagaggcagtastgtagtagtgtagtgtagcaaatgaggaataagtaaaataaataaacatgtaaaatatacacaacaaatagctaaatggtagaaataaatcctttcttatcagtaattactttaaattcaaattgatgaaaacctcctattaaaagacagggatgaaa

SEQ ID NO: 228260 - DNA, 572 bp, Homo sapiens
gttccctgttagaatacaccctccagatcaacagggaaatattatagctacatttgagccttttccttttaaatttgggatacaccatgaggggcccatccctggccttgttccaaactggggcattttcggctcaggccattccctcacccctgtacaaggtttgtccccgaccacagccagtagtgccacagtagatttatgctgcacaaaagctgtgagccttctgcctggggaatccctgcaaaaggtcccaacagcggtccatggacacttgccagtggggatgataaaattacttttaggaaggtctagtttaaatttaaaaggggtacaagtacaaacaggagtcattgattcagattacaatatggaaattcaaattgttatatctacttttgttccctggaaagcagagccaggagagcrcatagcacagctcctgattgtgccatatgtggaaagggggaaaagtgaaattaaatgaacaggaggatttggaagcatgaataaacaaggcaaagcagcttattgggtaaatcaaattactgataaatgtcctacctgtgaag

SEQ ID NO: 228261 - DNA, 400 bp, Homo sapiens
cttatttatttatttatttatttatttgagacagggtctcactctgtcccccagkctggagtgcagtggcatgatcttggttcactgaagcctcgacagcctgggctcaagcaatcctcccacctcagcttcctgagtagctgggattacaggtgtgcaccaccgtgcccggttaatttttcaaaattttttgtagagatggggttttgccatgtttcccaggctggtctcaaactcctgggctgaagtaatcttggcctcccaaagtgccgggattacaggtgtgagccaccacatctggcaactatatccaaccattatctcctacctcctgtttcttaaaggtctggaatcagagtatctttgagaacatctgtttgatgcatgatttttttccaca

SEQ ID NO: 228262 - DNA, 579 bp, Homo sapiens
tttattttccagatacattataagctcaagaaaacagactcaacagtataattatgtcataataacttaattgcacataatgctttaaagtctgtttggatgaagttctcaaatactttggtatatgatcttcagggactttaattagaaacaatagaaattattgctttaaaatggacaagtccttggttaaagttctacattttgggcatttatttttggttaagatggtccccaaaccaattaatggtactgatatattactagtttacaagacttcatttactctacctctgatgtagagggaggttacagatactcatttactctacctctgttgtagtgggaggttacagatactcacttactataatatgtcattggatagtttcartctttcacttataagcagagaaatcaatagatttattatttctctgtcagttttctgttataacctaaactgtatagtaatttgcagtaactgtagacattgttccacagtgtatgtgattatgattgataagatgtagcgcattaaatttagagttagcttattctgataagtcaatattagac

SEQ ID NO: 228263 - DNA, 579 bp, Homo sapiens
tttattttccagatacattataagctcaagaaaacagactcaacagtataattatgtcataataacttaattgcacataatgctttaaagtctgtttggatgaagttctcaaatactttggtatatgatcttcagggactttaattagaaacaatagaaattattgctttaaaatggacaagtccttggttaaagttctacattttgggcatttatttttggttaagatggtccccaaaccaattaatggtactgatatattactagtttacaagacttcatttactctacctctgatgtagagggaggttacagatactcatttactctacctctgttgtagtgggaggttacagatactcacttactataatatgtcattggatagtttcagtctttcacttataagcagagaaatcaatagatttattatttctctgtcagttttctgttataacctaaactgtatagtaatttgcagtaactgtagacattgttccacagtgtatgtgattatgattgataagatgtagmgcattaaatttagagttagcttattctgataagtcaatattagac

SEQ ID NO: 228264 - DNA, 558 bp, Homo sapiens
ggagatagaagttcacggattcaataaatacttaaggaatgaaatctgcaggaggagttgatgatggagttgaaatagagggagatattgaaagaagaccagattgcaattggttgttgcattatcaatttatcaatgggtcaagaatttagacaggacttcatggggatggcttgtcactgtttcatggtatctggaatatcacctgaagaaaatcaaatggctggaaatggcttggatggcttcagatgtgagtatctgaaggcttcttcattctcatgtttaaaggctggcatggaatgactaaaaagcttaggcctagctggggttgtctactgggatgactatacacagcctctacatgtaggttgggcttcctcatggcagccttagcattgttgaagttctctcatggcagctttccgtaagcattccaacaaataaggttgacattattctatatctagtctcagaaatcacaaaccttcacttccacygtactattggttgaaacaatcacaagctcacacagattcgaagagagggtacagaaacccc

SEQ ID NO: 228265 - DNA, 604 bp, Homo sapiens
tcctgcagatggttttccactcggggacactattgcaaccgtcccttattatgtctcttacgtttttcaaactgaagtcgtttatataccacttttatgacatttgccacatctatgtaccactcatataattacttaatgtatccttttatttatgtcataaaacattgaatacatttattagtagtagtagcagtagtgaggggcattttatgttacttctacaratgtaaaaacctatattgtatggccttcatagaagaaactcattttaaaaggtttttcccccgaatttttgagtaaaaataaccaaagtattcaaaaacacccagaatcagcttatgttccattaaaaacacacatgacacactttgggaactatggacatacaggtaaggtcttcattgtcaaagtacacaaagccttcatgatctggccccggtttctcttcagcttcatctctttctgagccatgttttacaccccattgtttagcttgcttgcataataataataattcatatttccctcaaatccactctattttagacacctagttcacagcaattcctaggtgacagaaaacatttcactccttggttta

SEQ ID NO: 228266 - DNA, 542 bp, Homo sapiens
tgaaagagagtgaaagcaagcaacttgcaaagcatatttgaagatgttgtgcataaaaaattttccaacctcaccagagaggtcaaattttaaacaaaatttcagagaatcttgtgagatcctataaagaacaaccatctcaaagacacacagtaatcactttaaccaaaggtcaatgcaaaagaaaaatattaaagtaaactagtattattttagaaaatgtctgtttgtcctttgcccactttgttatgggttttttttttttttcttgtaaatttgtttaaggtcctcatagatgctggatattagatctttgttggatgcatagtttgcaaaaataattatctcattctatakgctgtttactctgttgatagttttcatttgctgtgcagaagctctttagtttaattagatctaatttttaaatttctgtttttgttgcaattgcttttggtgtcttcatcatgaaattcctgcctgtgcctatgtcctgaatggtattgactaggttgtcttacatggtttttatagtttagagt

SEQ ID NO: 228267 - DNA, 530 bp, Homo sapiens
gggctgctgaaacccctattttttaacataaamttttaattgtttggggaacaggtggtttttgactacatggataagtaatttaatggtaatttctgagactttggtacacctgtcaaaagagtgtatatactgtacccaaagtgtagtcttttatccctcagcacccttccccacatttccttgagtccccaatgtccattatatcattcttttgcctttgcatcctcatagcttagctcccaattataagtaagaacagataatattggtttttgattcctgagttacttcacttagaataatggcctccagttccatccaagttgatgcaaaattcattatttcattcctttttatggctgagtagtatttcatggtgtatgtctatcacattttctttatccactcagtggttgatgggtatttagggtggttccatattttgtaattaggaattgtcctgctataaatatgcgtgtgccagtgtctttttcatataatgacttcttttccctctgggtggatac

SEQ ID NO: 228268 - DNA, 530 bp, Homo sapiens
gggctgctgaaacccctattttttaacataaacttttaattgtttggggaacaggtggtttttgactacatggataagtaatttaatggtaatttctgagactttggtacacctgtcaaaagagtgtatayactgtacccaaagtgtagtcttttatccctcagcacccttccccacatttccttgagtccccaatgtccattatatcattcttttgcctttgcatcctcatagcttagctcccaattataagtaagaacagataatattggtttttgattcctgagttacttcacttagaataatggcctccagttccatccaagttgatgcaaaattcattatttcattcctttttatggctgagtagtatttcatggtgtatgtctatcacattttctttatccactcagtggttgatgggtatttagggtggttccatattttgtaattaggaattgtcctgctataaatatgcgtgtgccagtgtctttttcatataatgacttcttttccctctgggtggatac

SEQ ID NO: 228269 - DNA, 391 bp, Homo sapiens
gattctatttatacattttaatctctttgttaaatttatctgatagatttctgaattccttctctgggttatttggaatttacttgagttttctcaatttgctatttttgaattctccatctgaaaagtcacgtatctctgtttctccagtattggtccttgatgccttatttagtttgtctggcgaggtcattttttcttgattggctcttgatgcttgtagatgctcattgatgtttcagcatttaagggttaggcacttattgcagtctttgcaatytgggcttgtttgtgcttcttaggaaggctttctaggtatttgaagaaacttgggccccaaactctataaatgctgtgggttcttgcacattcacagtgataccgccttgct

SEQ ID NO: 228270 - DNA, 506 bp, Homo sapiens
tatgctttcaattttttttaatgtatacctaggagtacaattgatggaccatatggtaaccctatgattaaccttttaaggaagtttttttctaaagcagctgtgccattttacattctccttagaatgctataaaggttcccattttgccacatcctcacttatgcttataattatatgtatttttttattataaccatcctgggtgggtgtgaagtggcagctcaatgttagttgttcaacacatatttgttggatgaatgtatctagaaagattagaagtactggactgtttccttaaaagattatttacctttgattaaataccagaacaggtarctcttgattttctgatcctctctggtttttctgacccatgatgacttccatatttttcttgcctttctcatatttgagttccagtgaggcaacttctttccacaccatttggaaagctgatgcaagagtcacttatatggattcctcaagctctcacttctgctact

SEQ ID NO: 228271 - DNA, 608 bp, Homo sapiens
ttattgccctgttgaactctcccatagtaaatttaatttcttgaaattcaccttggagcttactatttgtttggctatctgcctagaaagcacgctacgcataaatcgcaagacccattggtcgggcaaatgtgatttctctaaagataaattcattcttattatctgatcacctctggaggatgaattccccatggctgtatgaatctagaatattattcattaaacctattgagcctgcaacatgatcaaatacaggtagtacctgtataaaaccagtggaactgttggagtcaggaaaatatagttcagttcaccacaggatattccaatgactataaattaatcagcttgcctttagtacctcctccagatcccaagagagacaatacaaagtaggcaaaaattgatttgggcctaagtttagaaatatctcatttttggtagattcaaactttgtaatggtagtttaaaaagacgttttcacaattcccgtatttctaaaataattttagacttatctgaatttttgtatttaaatatctwgaagttcagaattgaggattatttgacttaggttaaaatttttatttataccacctatatag

SEQ ID NO: 228272 - DNA, 562 bp, Homo sapiens
ggatttttgcatctgtgttcatcaaggatattggcctgaagctttctgttcttgttgtgtctctactaggttgtggtatcaggatgatgttggcctcatcttctttttaaaggctaaatagtattccattacgtgtgtgtgtgtgtgtgcatgtgtggggtttgtgtgcatgtatgcatcctcacattttaaaaattcattcatcccttgatggacatttaggttgagtccatatgttggctattgtgaataatgctgcaattattgcagtkattatgggaatgcatacatttcttcaacatactgatttcagttcctttggatatatgccaggtaatgggattgttggatcatatgtagtttgatttttaattttttgagcatgctccacatagttctccataatggctgtatcaatttatattcccaccaacagtaaataagggttcacttttcttcacattcctgccaacacttgttatctttttttgaaaatagccattgtaaaatgtgtgcagtgatatctcattgtggtttagacttgcatttccctgatgattag

SEQ ID NO: 228273 - DNA, 601 bp, Homo sapiens
aacttagaggaattctaaacatgataaatgtttcacacacacatcttgatgtcaaggatagaatttatccaatataagagcagacaagtttaataaaccacttaagtgttataaggcatgtttcatactgcaatgaattatgtccctatctgtggttcaatgtatatgttctatcattttgaatattgaattwaaaaaaacctgtataaataatgtgaaaggtctgatttaaagcaacaaatgctaataaaatcaaattgaaggctgacagaacttcagtaactcacagatatttcttaggaaaggtataatagggaaggtattaaagagggcgtcttgatattttctttaataagtctgtttgaaatcatgttgaatatccagatttttcaaaggcaaattcattcaatttgtagaactttaaacatccacaattatatctggttcatggcacctgttttaataattaggttttccagaaaatatgtatttccaaaaaattgatcttttaattgagttttcatatgacagcactagagatattccttacacttatggagagttatatttctgctagaagttcctgtaagaaaaattattt

SEQ ID NO: 228274 - DNA, 433 bp, Homo sapiens
gttcaaattcaaattataaataaaacacttayaaaaggccttttataatcatattttgtaggaatttaatgtttatttccctaatgtgaagacaatgaagtggtcagagttcagcatcattacacatttccttcttgatgttgactctgtacacagtgactcctctccaagcccccgccaacttggcaagccagagcaggggagaaaactgcaggtctaccacatggcaggccagcattctctctccaggccaacaggctattctgctaatgggcttttgtattttgtaattaaataaagaagccatgtaatgcatgcttatctcttcacttgatggaattttggtctgttgagctacctaagttatatatgtcataaataagttcctaaatatattaaaaatgcttatagattctgtttttcagggaaaagg

SEQ ID NO: 228275 - DNA, 478 bp, Homo sapiens
ttatcctggcctacgtacaagaataagcaaaggtggttagcttgtgaggttagaagcaaaacggagccagctaattaggtttctctcattcttrtaattttgcaaggatggtttcagtattaccctcattattctgatgagaaagttgaggcatggagaagccaagtaacttgcctaaggtttcctacttgataggggtaatagggagatggaaacctgggaagtctgatacaggacacttaattttgaccattatgcacactgcttctcattagtcatgcataagacatataatgctggaaagactttcacacacttagctcaaaatgtaaattacatttatgtttaaatgtaatttacattttttgggatttagttatttgtaacctatctttattattccttcaataaccttactccatctcttaatttaatacaaaagctaatgcaacccctccctttttgttcatagaatagg

SEQ ID NO: 228276 - DNA, 493 bp, Homo sapiens
ggccaggctgatcttgaacttctgacctcaggtgatccactcgcctcagcytcccaaagggtagtgacttttatattgtacacatacagtcatgttatgtttaagtgaaattggtctcagttcacatggtattcaaatatatcaatactgtagtattctgaaaaggtgcttcccatgtgagcaagtgtgaaactgctgttcatatgtgtattttgggacttagtattcaatacatacaatatagctatattttcttctggcaaaattattttcaattcacatgaaattaaatatatcagcacttcataatatatagcaaaaaatgccatggatttccaggtgcttaccatctggacaactttgaggatgatgaaacgttgtataaggtttctcccagatcttttggaagctcttcattttaaagagtgtctccttaagttatgctttctgctcaccctcccttgccctttttttgtgtgtgttttttcaacca

SEQ ID NO: 228277 - DNA, 633 bp, Homo sapiens
atgtgaagaacatttcctaaaatgatattggacctactgccattaagaaggaagcagaggcccaagctcaactcagttcagggtctctaatatctaccactctctcttcctcgctctctatatctctctcacctcactcccccatctttcaatggaagctcaactactaagaggtagagaaagaattctaacataggagtgtttgaccccagactgtgctcttagccattattctgcactgccacccatgtaacctgctcctccatcctcactggaccagcctgagyaagcggccacccccagccacctagtgcaggtgacccagggcccttgctcaaatgcacacaacccagaactccctttgatcctgtccccatcatatacagtgggagatggagagagctgcttgttgtaaatgttcaacatttcattgaactttaagattattttccccttcaatgaaagccttctgagagcaaattttcatagtcaccagcaactctggccctgtaaaatatgttctttcatgatgaaaattaccctttatcacttagacctgcccttcccacatatactaaatgcaatccaatgtaatgagaatatggctagtcaatcacaggtcataaattaata

SEQ ID NO: 228278 - DNA, 633 bp, Homo sapiens
atgtgaagaacatttcctaaaatgatattggacctactgccattaagaaggaagcagaggcccaagctcaactcagttcagggtctctaatatctaccactctctcttcctcgctctctatatctctctcacctcactcccccatctttcaatggaagctcaactactaagaggtagagaaagaattctaacataggagtgtttgaccccagactgtgctcttagccattattctgcactgccacccatgtaacctgctcctccatcctcactggaccagcctgagtaagcggccacccccagccacctagtgcaggtgacccagggcccttgctcaaatgcacacaacccagaactccctttgatcctgtccccatcatatacagtgggagatggagagagctgcttgttgtaaatgttcaacatttcattgaactttaagattattttccccttcaatgaaagccttctgagagcaaattttcatagtcaccagcaactctggccctgtaaaatatgttctttcatgatgaaaaktaccctttatcacttagacctgcccttcccacatatactaaatgcaatccaatgtaatgagaatatggctagtcaatcacaggtcataaattaata

SEQ ID NO: 228279 - DNA, 346 bp, Homo sapiens
tacttctatgactgcatttaaatcagtcagtcgaaacagtacccacagggcaggctgtactttctgtttgaatgagtcttccaaaccaagacctttagttagcataagagatcattcctttatataaagggatgaccctctcacttagaagttaattcctctcatttgtggtttcctaatttgattgaggttggttagtgtaactcatgacaaagatcccatgcttttcccrctcagctcattgtatgcctcacacaacaggagagcaggccatttccttcctgccaggggaaaaattctttcgactaataagttgagatttttaccctgtccccatagaaatact

SEQ ID NO: 228280 - DNA, 580 bp, Homo sapiens
aaaataaaaatgaaaatccttcatgttataagatgcaattctgtctgccatttatatgggagtctaggaatatgagcccaaagagagaaggaatgagaagaaggggaaaaaacagtttcttctcacattactggtaaggttatcccatgcgacaacctgaaagaaacaaaattggtttggtaccctcttccagaaactcatctataatttttttctcgctttctcacagtcaccttgcgggtccwagcagtttcatgtttccctaaactgttttattatgaaaccctcctttcctgttgtcaagtataggatgcttcattcatcttaatcaaaatacattgttgtcatcaaaaggaattcctggtgaccaaaataatttgcaatgaggtatgaatgacctcataatcatttcaggctatttgcccttaaagtagcatggaaatcagccccaaagaatcttttcatttcatttgttcatttcaggcaatatgataaaattgaaaaatttcacaaatgtcaggagaacaagatctggtgtctgggtttcaactcttagagcttcccagctcgtagctatgct

SEQ ID NO: 228281 - DNA, 580 bp, Homo sapiens
aaaataaaaatgaaaatccttcatgttataagatgcaattctgtctgccatttatatgggagtctaggaatatgagcccaaagagagaaggaatgagaagaaggggaaaaaacagtttcttctcacattactggtaaggttatcccatgcgacaacctgaaagaaacaaaattggtttggtaccctcttccagaaactcatctataatttttttctcgctttctcacagtcaccttgcgggtccaagcagtttcatgtttccctaaactgttttattatgaaaccctcctttcctgttgtcaagtataggatgcttcattcatcttaatcaaaatacattgttgtcatcaaaaggaattcctggtgaccaaaataatttgcaatgaggtatgaatgacctcataatcatttcaggctatttgcccttaaagtagcatggaaatcagccccaaagaatcttttcatttcatttgttcatttcaggcaatatgataaaattgaaaaatttcacaaatgtcaggaraacaagatctggtgtctgggtttcaactcttagagcttcccagctcgtagctatgct

SEQ ID NO: 228282 - DNA, 647 bp, Homo sapiens
cattttgaactgaattgctaattagattttcatgggtcctaaaactggctagatgggttttgaaagttttgggtttggtttcgaagatcacagcagaacacaaagcagcgtttcttaaagtgtggtccataaatcactcctgtcctctggtggctttggggcaaatcgtttatgaatttcagaggaaaaaggaaacttaaaacccttcattcacaaatatttaacacatttaaaacataagataaatgtaattctcactgatgtatgctctggttttaattgtcattagcatcctaaaagtggcccacrtgctgcaagaactctgctgatcaggtctcagcttccattcggttaatcaaatgcagtgtgcttaggtcaacttattttcatattattagcatgttaccatttgcatttgttacatttgacttttttacattgtcactattggaatttattattcaatttctaattttataagaagagcaatcacacaaaagtagtttatgaaaacataaagacagttataaaagtattgacagaaatataccaccactataatcatctttagtgaccaggattcagaatgaatatagaatgtgattatgtatgtgcttagacaagggaaaaacagctagaagcatctg

SEQ ID NO: 228283 - DNA, 647 bp, Homo sapiens
cattttgaactgaattgctaattagattttcatgggtcctaaaactggctagatgggttttgaaagttttgggtttggtttcgaagatcacagcagaacacaaagcagcgtttcttaaagtgtggtccataaatcactcctgtcctctggtggctttggggcaaatcgtttatgaatttcagaggaaaaaggaaacttaaaacccttcattcacaaatatttaacacatttaaaacataagataaatgtaattctcactgatgtatgctctggttttaattgtcattagcatcctaaaagtggcccacgtgctgcaagaactctgctgatcaggtctcagcttccattyggttaatcaaatgcagtgtgcttaggtcaacttattttcatattattagcatgttaccatttgcatttgttacatttgacttttttacattgtcactattggaatttattattcaatttctaattttataagaagagcaatcacacaaaagtagtttatgaaaacataaagacagttataaaagtattgacagaaatataccaccactataatcatctttagtgaccaggattcagaatgaatatagaatgtgattatgtatgtgcttagacaagggaaaaacagctagaagcatctg

SEQ ID NO: 228284 - DNA, 647 bp, Homo sapiens
cattttgaactgaattgctaattagattttcatgggtcctaaaactggctagatgggttttgaaagttttgggtttggtttcgaagatcacagcagaacacaaagcagcgtttcttaaagtgtggtccataaatcactcctgtcctctggtggctttggggcaaatcgtttatgaatttcagaggaaaaaggaaacttaaaacccttcattcacaaatatttaacacatttaaaacataagataaatgtaattctcactgatgtatgctctggttttaattgtcattagcatcctaaaagtggcccacgtgctgcaagaactctgctgatcaggtctcagcttccattcggttaatcraatgcagtgtgcttaggtcaacttattttcatattattagcatgttaccatttgcatttgttacatttgacttttttacattgtcactattggaatttattattcaatttctaattttataagaagagcaatcacacaaaagtagtttatgaaaacataaagacagttataaaagtattgacagaaatataccaccactataatcatctttagtgaccaggattcagaatgaatatagaatgtgattatgtatgtgcttagacaagggaaaaacagctagaagcatctg

SEQ ID NO: 228285 - DNA, 590 bp, Homo sapiens
tatgactgtcagtttgactttctcaggctttctctcacccgtctcaatatctgatgccttttgcatttccaaaattctatgatttgctgcctggattatgacaaatgatgtagaggttaatgcaaattatctcttcatttatctaaactgttaggtgaagccaaaaaaaaaaaagtgagatagtcctttggactattgattacttcaatggtttttcaatccacacacacatttgaattacctaaggaactttaaaaataaataatgatgtctggatccaacctccagagattctgatttaattgctctagggttgatgtccagacatgagtatttttttaaagctccccagataattctaatgtgcatccagtgttcawaaccactggggaaatttcttctctttacccccttctgttttcttctctttatctttccccaccaacttttgaaaaatgttttggtttctcaaatacaatcaaagttctgcatcttggccaacattaatggtgttactcaaaaatttaacatctaaatgtgtgtgcgtgtgtgtgtgtgtgtgtgtgtgtgtgtgtgtgtgtgtgtgtttg

SEQ ID NO: 228286 - DNA, 569 bp, Homo sapiens
ggagtaagacctatttcaaagattctgaaagataatttatgtaaacttattttaattgaataaataccattcagcacatttatggtagctgacacaagaggagaggcttatgaattttagaaacaaaaacggtttaataaaatagtaaaatatacatcattacaaactaaggaaaaataatggacttgtcctccttatccttccagaatgcttcctttcgtttctgaatataatataaagaaatgcttaatacattatctttcaatataattaagtctgcctgggggcaaaggaggtttgcattctgaataagtctatgattgagggatacatttacttgataataaatccaagattgtgattcaaaggaaattagagatctcaaagtatgaaatattcctcttattagaagaaaaagagaatgtcactttacaaaattatcagtcattttgcagagaatragttggtctccataatacaaaataaatttattatttggttagctaattttaaaccacaagaataaattctctcattgatgtggctggaatttatccagacatttgatt

SEQ ID NO: 228287 - DNA, 639 bp, Homo sapiens
aacctattattaatactattatggacgtaagagaagatattacaattgtagaattggaatgaaaggcgatttttaagaataattcagaggacaaraaaacatgcagaagttaaaatagcagaaatgaaacctcaaaagaagattaggaagacaaaatgaagaatctcctagaaaactaacaaaaatgataaaaagtaaatgagaaagttagatgactattctataaattcctatagctaaataacaggaattctaaaagagagaatagagacaatgaaatgtagaaaatcattaaatcaattatttaaggtaattccccagaactgaatactgtaagtttccagatggaatgaggctaggcagtgacctaaaaatagattactgccataccaaggagtattattgtaaaatttcaaaaatatggtgaataaatgaagagccaaatgcattgcagagagaaaaaaaattagatgtcatagaagaaagaagcagcagactggctttagacctctcaacccattattggccagtagaaagtaatagagcaatactttcaaaattttgaggaaaaatgatttttgatttaggggtctatcaattaattaaccataaagatgaactctcaaccataaaggtaga

SEQ ID NO: 228288 - DNA, 647 bp, Homo sapiens
gtgccgatccctgagtgcccctaacaggaccccagctcatgcagcagccttgctctgccctttcttcggaagtcttctaatgagatgtgcatgcagtgcccccacttttgcctcttacaatcactcaggagatgacggcaggtgtactttcctgcagaaatagagagattgtaatcttctctattctttactaaytggctaataagacaaaatgtcatgaactcaagaggggccttcacattccaaaagaactatcacacggctgggctgtgaaccaggtttgactcctctgttctccttaagctgctggaaaacttcgtggccatgaaatgctttggtcatctttcatagtggccaactcttggccatgtgcttaatgcgaggagaactggaattaggtggataatattttatgtgaatcaggaaactctttaggcatgaagttattatcaagtcagctctgaatattctataaatatttattctctcagaggaaaatattacttcaagactgcccagtttttcttagattttatagccttctcagtattttctggctacatatatggggtttctaaagaggctgttacctaagcaatgacctgtgtgtgtgtatgcacatgtattagtcacattaaacaccctag

SEQ ID NO: 228289 - DNA, 590 bp, Homo sapiens
ccaggggctgctgccaggcagcgggcaccactcagaggctccagaaacactgggtgacacccagggccatggaagagttggtccaggaagcagcaggcctgcaatgtacatatgcttaccacgtaaggacttttagctggtctgaccttgcggggccccttctaatttttcaggggtccccaaccacccttggcagctgtrgcaggccctctctcagcctctcctctgggctccctggtctgaggcaactacggactgccacctccgtttacctccaagtgtctgccctggggcccttcaccttgtggggctggccgtggttggagggcagggggcgctggccatcagggagggagggagaccacattccctcccttggttgccacgtgggaacaggaagatggtgaaaggccatgatactgaggttcaccaatatggtgaactcttccggccagcaaaggattctggtcaaggaggtggagccaccggcccggcctggattttccaccccacaatggtaggccaggcatccattccaaaaaacatttcctaagctcccactacatgcccagcctggggccctgagatct

SEQ ID NO: 228290 - DNA, 590 bp, Homo sapiens
ataaattagatatgcttattggtttaatttgtgctaatatatatttaattgaaaaatcaaaaaaatttttttaaattgactgaagttgtattccaaaacatgcaaaatttagtttaaaatagattggatacacttttaaattttaaacaaggtagagggtttagtgctttgcttttttaaaaagtaaatgaaggctgcagctttctgcagtagttgtcttgggaagtagtgtggacatcactcctaagagacgttaaggaagtttagctaacaggctttaaccctttctctccataccagcttttactcttttttttttttttttgagatggagtttagctcttgtcacscaggctggagtgcaatggcaccatctcggctcatcgcaacctctgcctcctagttcaagcaattctcctgtagttcaagcaattctcctgcctcagcctcccgagtagctgggattacaggcatgcaccatcacatctggctaattttgtattttgagtagagacggggtttctccatgttggtagggctggtctctaactcctgacctcaggtgatccgcccgcctaggcctcccaaag

SEQ ID NO: 228291 - DNA, 590 bp, Homo sapiens
ataaattagatatgcttattggtttaatttgtgctaatatatatttaattgaaaaatcaaaaaaatttttttaaattgactgaagttgtattccaaaacatgcaaaatttagtttaaaatagattggatacacttttaaattttaaacaaggtagagggtttagtgctttgcttttttaaaaagtaaatgaaggctgcagctttctgcagtagttgtcttgggaagtagtgtggacatcactcctaagagacgttaaggaagtttagctaacaggctttaaccctttctctccataccagcttttactcttttttttttttttttgagatggagtttagctcttgtcacgcaggctggagtgcaatggcaccatctcggctcaycgcaacctctgcctcctagttcaagcaattctcctgtagttcaagcaattctcctgcctcagcctcccgagtagctgggattacaggcatgcaccatcacatctggctaattttgtattttgagtagagacggggtttctccatgttggtagggctggtctctaactcctgacctcaggtgatccgcccgcctaggcctcccaaag

SEQ ID NO: 228292 - DNA, 425 bp, Homo sapiens
gaattccaagtccctaaggatttcataatttgtctggygaactcctatccacccttcaaaacccagttcaaatatcctctcccacctctccatgctgcttatctcatgctactccctcactggttctctgcacttggccatgtgacctttcggcagctgtgggttgacgggacgcagcaaagctcctgccctcctgaagacctttactgggtgctgcaccctctgccccctcccactcaccattctgagcaacccatgcctacccctcaaatctcagctcagacggcatctccagcatatacagagtgagggcccatggactttacaggcaaggccactgatatgatttgggtctgtgtccccacccaaatctcatgttgaattataatccccaatgttggaggtggggcctggtgggagatgat

SEQ ID NO: 228293 - DNA, 561 bp, Homo sapiens
tgctgggcagcagtttagactcaatggtctcttccaagctggagagtctgggaggycatagctggcccaagacaggtcaagagagcacgtcactcacatggcagaggccgagagcatgagggacttgactctcccaccaggagcctggctgcagttggcacctcggcagctatcatccaactgagtggcaccccctcctgctggcatccaactgagtggcactgctgtgccctcttgcctctccacccaccacaacctatttgccagctgaccccaactgctcccagcagggccaagactgggcagcagtacgggaacaggctgtttctcacttactccctggaattggctggctttgtcctccagcaaaactgttcctggaaggacaaggatctggggtctgagaccaaaggccccccccatcttctcaggcctgggcaagtggagaatgtgacctgtgaccttgaataatgagatcgctaacagcagctcacggttatgaagcacctaccccacgccatgcactgaactaaacttgttgcatgcacgacctcgcttagt

SEQ ID NO: 228294 - DNA, 369 bp, Homo sapiens
ccccaggctgccttagtccagaaggccagctgcctgccaccggtgcccgggacgagcatatcccctgaagctggagaatggtgtccacctttgcatggcagcttctcccaaggcattggctaaaatattgcacttgtaaatcaggaaaactgatgaggcaagggtttcctattacaggacgacgtgccaagcatccaactactatttaaataaataaaactcaaagtgggggtctgagctgcaakctccaatggccctctaggagggcccgagagcccaggcctggacctcctgccccatcagccagttctttaaggaacttggtcaacgcgaagcctccgcggtctccgcagcagggagcagcagctc

SEQ ID NO: 228295 - DNA, 514 bp, Homo sapiens
atgccttatcactgcaaatgtttacccaaaaaaaccataaggctttaatcttgaggatttattccaggtaaatatatctggaataatatcagatcttttacatgaagtataaaggagatatgatttcttatgtccctagccagccctctctctgtcactccacagctagataagaaaaatgttcttcttaccctgttggactctccacctccctgacccgctagaaagagcctctgggttagacccagctgctgatgtagcaccaggagaaaaaaataaagcgatgcagattcaaccagacatgctgcaacacgctatgtagcaaggagttcagagacaaggagaaggagggtggggagcagagccacatgggctgggcctcaaaaggagtgatggaagactctggagggctatttggggaggagaagcawgggttttttgttgttgttgttgttgttgtttgggcttttttgagacagaatttcactcttgtcacccaggctggagtgcaatg

SEQ ID NO: 228296 - DNA, 513 bp, Homo sapiens
gctagtgtatatctgccttcttatcttagcatctaagaagagttatacgatatatcttctggaacaattccaagaatgattctcaaaacctgaaaaaacatttgacccttactgataagtctccaggtatcacactttgatctccagcttttgctacctcacatgtgatacctgctatgctggagcagtgttttaaaaattagggccatttttgtgctacagatgtaacttgtgccttacctataatattattagttgttaaggtgaaattcacataacacattaaccatttaaaaatgaataatttggtggcatttagtacatttacaatgttgtgcaaccactacctctgyctagcttcaaaacatctgcatcaccccaaaaggagacccagtgctgttgttccttggtatccatagggaaggggttccaggatctgcagataccaaaatccgtgggtactcaagtccctgatatgaaatggtacgatacatgcatctaacctaggcacat

SEQ ID NO: 228297 - DNA, 513 bp, Homo sapiens
gctagtgtatatctgccttcttatcttagcatctaagaagagttatacgatatatcttctggaacaattccaagaatgattctcaaaacctgaaaaaacatttgacccttactgataagtctccaggtatcacactttgatctccagcttttgctacctcacatgtgatacctgctatgctggagcagtgttttaaaaattagggccatttttgtgctacagatgtaacttgtgccttacctataatattattagttgttaaggtgaaattcacataacacattaaccatttaaaaatgaataatttggtggcatttagtacatttacaatgttgtgcaaccactacctctgcctagcttcaaaacatctgcatcaccccaaaaggagacccagtgctgttgttccttggtatccatagggaaggggttccaggatctgcagataccaaaatccgtgggtactcaagtccctgatatgaaatggtaygatacatgcatctaacctaggcacat

SEQ ID NO: 228298 - DNA, 512 bp, Homo sapiens
gtctccctaagaatcggggatcagagtatttaaggataatttggtgggcacaggccagtgagtcgggagtgctgattggtcaggtcagagatgwaatcagggaatcaaaggtgtcctcttgtgcggagtcagttcctgctggggggtacacaagatcagatgagccagttgattggtctgggtggtgccagctgatccactgagtgcagggtctgcaaaatatctcaagccctgatcttagattttacaatagtgatgttatccccaggagcaatttggggaggttcagaatctggccgccttcagttgcatgactcctaaaccataatttctaatcttgtggctaatgtgttggttctgtaaaggcagtctagtccccaggcaggaagggggtttgttttgggaaagggctgttatcgtccttgtttcaaagttaaactataaactaagttcctcccaaagttagttccagaatatgtttccttgctatattttgaaatggccctgcaaag

SEQ ID NO: 228299 - DNA, 384 bp, Homo sapiens
tcgaattcgaggccagcctggccaacatggggaaacctcatctctattcagctaggcatggtggtgtgagtctgtagtcccagctacttgggaggctgaggcaggagagtcactagaatctggaaggtggaggttgcagtgagccaagattgcaccactgcacttctgcctgggcaacagagatatcctgtctgaaaaacaaaaaaaaaaaagaaaagaaaaaagaaaaaaagaaaaaaagaaagtagaaatcaagctagcctgcaagccaagattcactgtaaagctaggacctaacagaaaaaaaaaragaaaaaaagctactgcagccctgcaaactgtcattcaattgctaactctgagcctaattgaactggaaagcca

SEQ ID NO: 228300 - DNA, 559 bp, Homo sapiens
taggctggggtgcagtgactagatcatggctcactgcaacctcagactcctgggcctgagggatcctccagcctcagcctcacaagtagctgggactacaggcatgcaccaccaagcatggctaatttttttttttttttaatttttgtagagatgaggtatcactgtgytgccttggctggtctcgaactcctggcctcaagcaatcttcccaccttggaaaatcttatttctatatctctttgtaatttagaatgaacctgatttaataattcattttatagatgagaaaactgagatcactgaattcaagggaaacgattaatgagaggcagagaccagcacagactccaggtgcctatttgtctctaattaatttatgcttcacttggttttgcaacaggtgaagagactaagttaaaatatgagaaaaactctgtagggatcatttctgggggtccatgaggtcaaactattttcctaataatacaaagatgttgtttgcctttttattctcattccctttcatggatgtacgatggagctttctagaaatgaa

SEQ ID NO: 228301 - DNA, 553 bp, Homo sapiens
taaaacacgacaaaagaaacaagaagaaaaggcttataatgtaaaggagaaattaaagaaatagaaaacaaaacaaagaaggagatggcacacattacatcatgaagaaaaaaaagatttaaagaaatcatttatttagcaccgcctaacttccamgtactgcatgccaggtgctggggatatgtttcatatgttgaaaaggaccaacatatgctgtcttgattcaaaccacagatggtctaaaaaggattcctagaaggaaaactcaggacatcagtatttctagcttccatttttattctttgtattttgactttgttcttattgggaactaaaaattaacatttatttgtattcagtattttcttgatggtctggatttcctcttttagaatcacttacagtgtataattactgtgaaaaattcattgatttctcagtttcaacaccctgttcatttctctgtttcttcacttccttttcaatcagtgcttctgcttcttctgccactctcctatctatagtttaagtttggggatattaatttatacag

SEQ ID NO: 228302 - DNA, 449 bp, Homo sapiens
agggctccggggaaaaagtggactgacacaagstgatacatttgacaacgtagaaaactgcatcaagaagctgtgggaagagtacaggaagactttgcttagtgtcatggactgaatgttggcattccccacaaacttcatatcttgaagctcttgccctcagtgtgatggtctcaggaagtggggccttgggaaaataatttggtttaggtgaaatcatgaggatggagccggaatgatgggattagtgcccttataagaaaaggaagagaaacaatttagtggcatttaagtccaggtacaatgttgtgtaccaccacgcaacacgtggtatctatctagtttcaaccattttcatcatcccaaaatgaaaccctcagggattcagcattagcagctccccctgcctccagactctggcaaccaccaacagctctctgtgtctatgg

SEQ ID NO: 228303 - DNA, 430 bp, Homo sapiens
agggctccggggaaaaagtggactgacacaagctgatacatttgacaacgtagaaaactgcatcaagaagctgtgggaagagtacaggaagactttgcttagtgtcatggactgaatgttggcattccccacaaacttcatatcttgaagctcttgccctcagtgtgatggtctcaggaagtggggccttgggaaaataatttggtttaggtgaaatcatgaggatggagccggaatgatgggattagtgcccttataagaaaaggaagagaaacaatttagtggcatttaagtccaggtacaatgttgtgtaccaccacgcaacacgtggtatctatctagtttcaaccattttcatcatcccaaaatgaaaccctcagggattcagcattagcagytccccctgcctccagactctggcaaccaccaa

SEQ ID NO: 228304 - DNA, 483 bp, Homo sapiens
ggattcctttggaaagtcttcatattcttcattacatttwaaaaaaaatttttgtagttttttttagtggaaagggggtttagccatgttggccaggctggtcttgaacttcttgcctcaagtgatatatcctcctcggcctcccaaagtgctgggattacaggcatgagccactgcaccggccttattacatttttgaaaacatttctactgatggcaaattggaatctttttcactgaatttgccggcagagggggtttctagatgactactggaattcatgtccctgccgtccctccctttcccctgattggagcagctgctaggacggtgggcaggtgagcctatgaaggaatgagtaagacttgattctgtaagagaaggaacttgagaagcttgtgaaagactgttctctctgagctagaggacagaatggagccaggtgagagaacttgagaaagaacagatactcagaagggctt

SEQ ID NO: 228305 - DNA, 483 bp, Homo sapiens
ggattcctttggaaagtcttcatattcttcattacatttaaaaaaaaatttttgtagttttttttagtggaaagggggtttagccatgttggccaggctggtcttgaacttcttgcctcaagtgatatatcctcctcggcctcccaaagtgctgggattacaggcatgagccactgcaccggccttattacatttttgaaaacatttctactgatggcaaattggaatctttttcactgaatttgccggcagagggggtttctagatgactactggaattcatgtccctgccgtccctccctttcccctgattggagcagctgctaggacggtgggcaggtgagcctakgaaggaatgagtaagacttgattctgtaagagaaggaacttgagaagcttgtgaaagactgttctctctgagctagaggacagaatggagccaggtgagagaacttgagaaagaacagatactcagaagggctt

SEQ ID NO: 228306 - DNA, 571 bp, Homo sapiens
aagcttaacaagccccaagctaacagatcaactccatcctacaagcctgctccttatccatgactatccacccagttgtctggactccaagccgcatgtcccaagatctccctytctcttgccaaacaaagaaatgacgtgttctctccattcggcaccccccagtatttctcacatccttcccaagccccactttctatttcaggaccttcttgtctctcactggggctcttgcaaatagcctcccaattgatctgcagactcctctcatttttccccccaaatactgataacattttaatgttattaaggcatggatttgaataagctattcctctgcttgaaaacttgcaatgtaggctctccccatggcctacatactggttgaagtccaaactccttagtctgtgccatatttgagggtaacaaatgtatctaatcagaggccttctcttgggaagtgagaatgtgaagaagaagtggcgagggggttttcattcattcaggaaatattgattaacactaactctatgccatgtactactgttctaggttctgggaatacagtgaa

SEQ ID NO: 228307 - DNA, 588 bp, Homo sapiens
agatgcgatgctaggagtgggtagaggctgggtaatagaactgggtacatagaacgttgacagactgaaatgatggattaatttgttaaaattatatttaatagagaaaacttgtagatctcagccattatacaatgtcataagtatagaacgggggaagatatgagttagaaacatgaataagagaattctgttgccaggagcctcaatataaataactagtgaaaagtgatccctataaaagtttttggggtcctagaccacaacaatgaaaataaaattattagaatgatagaggtgagggccctattctgcttttttcagttcagaccatgattttacatttgattctgggccccacacctgaagataaatataactaccgggagtaaattgaaatrtttgtctaagaaagtaagagaaatggaaattatgtttatatagcagtctaaggaattggagatactagcttttgtgacagagaaaattataaaagaaaaagttacttgtaattggtaactttcccattgagtcatcatggttgaacactcttttgtttatggaaagcaaagtcattcttggaataat

SEQ ID NO: 228308 - DNA, 589 bp, Homo sapiens
acagggattagtcatcagtattggttcaaaaagccaaaaactggactcaaaggcagaaacgtcagggcaataggcttgggttcagtataaggagttccttctagcaactggaatattattaatatgagctaggaataagattgacaggtcagaggctggggactgaaacaggtgaaattatgtttcctctacagctcaatgagtgtattattctatgcggagaagaaggtaaccccatttcctacattcttttgaagaaattttattattttgtcattggagaaaatagaggaagaagaggaaatgcattctaactgaacaaatacctagatttgaaatgacaacttgaagttcactatcacatccatctattcatccatccacccatcatccattcaccaagccatccatccgttcatctatctatctagccatccaatgatccacctgtctgtccatccaataaayatctactatctctcactctatgctggacttgtgctaaatactgtgtctataaacacagaaggcttgggcctcatttttaaccttaagagatacagagatcttcagaaggaggcagacagat

SEQ ID NO: 228309 - DNA, 569 bp, Homo sapiens
ctactaaggtccatgctctgtcattcgctgaccaggagrcctcaagcaagtcatttaactgcagtgagcctcagtttcctcatgctctaaaatggggataataaatcacacagttattatcaaaggtcttatgagaattgatgaaataaattaaataaattacgtgaaagcatcttgtaaatatcacataaccacacaaatgcacagatttgttgttttgttttgaaggacatttttgtcaagatgttatcataatcatataaaatttacaataatgtttaatgtctatagattagaaccagggaatttggaggtgacagggtttttttttgaggtgacaagatagactggatggagatgcctgggctttggaattcaggcagatccagatgacaggggatcatcggtttacagggaggggttagacatatgaacctaaattactagattagtacaagaacgaaggaagaggcaggaactgagcatcacaagccaatgtccaaactaagtacaagatccaggtgcccatgtaggcaggagacagaggcaagcagcagaagtctaagtag

SEQ ID NO: 228310 - DNA, 569 bp, Homo sapiens
ctactaaggtccatgctctgtcattcgctgaccaggaggcctcaagcaagtcatttaactgcagtgagcctcagtttcctcatgctctaaaatggggataataaatcacacagttattatcaaaggtcttatgagaattgatgaaataaattaaataaattaygtgaaagcatcttgtaaatatcacataaccacacaaatgcacagatttgttgttttgttttgaaggacatttttgtcaagatgttatcataatcatataaaatttacaataatgtttaatgtctatagattagaaccagggaatttggaggtgacagggtttttttttgaggtgacaagatagactggatggagatgcctgggctttggaattcaggcagatccagatgacaggggatcatcggtttacagggaggggttagacatatgaacctaaattactagattagtacaagaacgaaggaagaggcaggaactgagcatcacaagccaatgtccaaactaagtacaagatccaggtgcccatgtaggcaggagacagaggcaagcagcagaagtctaagtag

SEQ ID NO: 228311 - DNA, 569 bp, Homo sapiens
ctactaaggtccatgctctgtcattcgctgaccaggaggcctcaagcaagtcatttaactgcagtgagcctcagtttcctcatgctctaaaatggggataataaatcacacagttattatcaaaggtcttatgagaattgatgaaataaattaaataaattacgtgaaagcatcttgtaaatatcacataaccacacaaatgcacagatttgttgttttgttttgaaggacatttttgtcaagatgttatcataatcatataaaatttacaataatgtttaatgtctatagattagaaccagggaatttggaggtgacagggtttttttttgaggtgacaagatagactggatggagatgcctgggctttggaattcaggcagatccagawgacaggggatcatcggtttacagggaggggttagacatatgaacctaaattactagattagtacaagaacgaaggaagaggcaggaactgagcatcacaagccaatgtccaaactaagtacaagatccaggtgcccatgtaggcaggagacagaggcaagcagcagaagtctaagtag

SEQ ID NO: 228312 - DNA, 333 bp, Homo sapiens
tagcctcccccttcacaaggagccaacatctccctagacatatcctgctgtttctccttgtgagtacctcccactcccctcttttgctgctaatattttcccttcttcctaaggaatgattactctccacaagactcagcccaggcacctctcctcctagaagccatttcttgatctcccccagtctgagtttggtgccactagttcagwcttccatttgtgcccagtgcataactctatcacagcaccaacatattgaattctggttggctgtggagtgtgagtgtgagtccttctccaatagtagatgacgtgcctttttcctctgtctct

SEQ ID NO: 228313 - DNA, 583 bp, Homo sapiens
ttccataaggcagatattatcattagccccactatcccaatgaaaaaacagattaggagaggttatggtcaaggtcataaacttacaagtggtagarccacttgaacccaggcagctctaactgcccttccactaaggctcctaatttactattctgccaaatatttcctataacaataataactaccacattaataatagtaacactacattactacttgcaccaaaataaattccagaaggatcaaagttttaaaggtaaaaagatgaaacatgaaaagtattagaaggacttcaggtaccaggcaaaatgaagaaagcccactacaccctatctctccctaatctctagttacaactgaaaactatgaacaaaatatgaaaagcagttacctaaaaactaaacaaaagcatacagatagggaatgggggtcaaatttggagcagcaaaccaaacaaaaatacatttcccaagttttcctcccttttctcttttctcttatgcccagtcatagaactgttgtggtggcagtgcaggcagcccaaactgtttctctggccaggataattggggaaagaggcc

SEQ ID NO: 228314 - DNA, 546 bp, Homo sapiens
attctaccaccatattagtacagatgtttactgacctccaatgattgacttaagattttcaactttacaatagtatgaaagcaatatgcatttaggggaaacsgtcctttaaattttcaattttgattttttttcaggctagcaatatgcagtataatattttctcacaaggctaggcagcggtagcaagccacagctcccagtcagccatgcaatcaccagggtaaacaacagattctcaaccacgaactgtgctaccagcctgtattaggccattcttgcattgcaatgaagaaataactgagattgggtaatatataaagaaaagagttttaattggctcatggttccacaggctgtacaggaagcatgatgctggcatctgctgtttcaggggaagcatcaggaaacttacaatcatggtggaaggcaaaggtggagcctgcatgtcacgtggccagagcagcaggaagagagagaaggggaagtgccactcactttcaaacaaccagatctcacaagaactctctcaatatacaacgccaa

SEQ ID NO: 228315 - DNA, 504 bp, Homo sapiens
ctctctcaatatacaacgccaaggggggatggtgctaaacygttcatgagaacttcgctccgtgatccaatcacttcctatcaggccccaattccaacattcaggattacaatgcgacatgaaatttgggcagggaagcagattcaaaccatatcatagatgattttgcccaactataggctaggtaagtgtcctgagcatgtttaaggtaggctaggctaagctatgatgctcagcagattaggtatattaaacacattttcaacttaactgcattttcaacttactatgggcttattgggacataaccccattgtaaatccagaagcatctgtatttgtacaggaaaaaaatatggaagatttcttatgactttcattggtatgtgggttggggtattacaggagctgtttactttctgctgtacacttttgtatttcaatagttaataaggtctatgtattattttgtaatcagaaaatagtcctgggggctttctattct

SEQ ID NO: 228316 - DNA, 504 bp, Homo sapiens
ctctctcaatatacaacgccaaggggggatggtgctaaaccgttcatgagaacttcgctccgtgatccaatcacttcctatcaggccccaattccaacattcaggattacaatgcgacatgaaatttgggcagggaagcagattcaaaccatatcatagatgattttgcccaactataggctaggtaagtgtcctgagcatgtttaaggtaggctaggctaagctatgatgctcagcagattaggtatattaaacacattttcaacttaactgcattttcaacttactatgggcttattgggacataaccccattgtaaatccagaagcatctgtatttgtacaggaaaaaaatatggaagatttcttatgactttcattggtatgtgggttggggtattacaggagctgtttactttctgctrtacacttttgtatttcaatagttaataaggtctatgtattattttgtaatcagaaaatagtcctgggggctttctattct

SEQ ID NO: 228317 - DNA, 320 bp, Homo sapiens
gcagtcttggctgctctccaaggaaagtggtaattaccaaaaagagyatctgctttttagtcctttcttggccacttattatctgtggttccttgagtaggttacaaatttctttgaacttcagttttctggcttgtaaagtggggataatgatacctgtcctgccctccttacaatgttatcatgaggatcaagtgagataacatatatgaagatactttatatgagattataataagggcatgggaatcactcctatcttgtggtccaagaagcaagagaaaagtgaatgaactcaaggatcagagttccatggtacc

SEQ ID NO: 228318 - DNA, 447 bp, Homo sapiens
ggttgcagtgagccgagatcacgccattagactcgtctgggcgacagagcgagactccgtctccaaaaaaaaaaaaaaaaaaaaaaaaaatacagataggcctaagtggaaactattaccctccatagagggcagaggggcagagtagatggctggttttgaggtagttcattcttcattcagacgtgtggcgcccttccccaggccctaacccctggaagagggaggaaaaaggcgatccacagaagtgtctcataaraaatgtagctgctcatctggccattagccgcatctagtcctcaggtgacttttctctgagtcgctctgcctgtcccctgcaagccaaaagggcagccgacgcagcccgtgatgctgggacagcgtccggccgcgcgcaactgacggtcgcgttctgcgcgcgagctagttgcctcccgtacctgccgc

SEQ ID NO: 228319 - DNA, 557 bp, Homo sapiens
tatgcaagctcaacaataagaaaataaacaactcaatttttaagatagctaaaacacagattgtcaataagcctttgaaaagatgctcaatatcgttaatcatttttagaaacacaaattaaaaccacaattagataacacacctattggaacagctaacatttaaaaacaaygactgatacatgtcaaggacacagaacaaccaaaactctcatacactgctggttagaatgaaaaatattatagccactctggaaaacagtttggcagtttcttataaaggtaactacacatttagcacaccagccagtaatcccactcctggtattgacttgagaaacaagaaaacttatgttcaacaagaatgtataagaaaatattctgcggctctattcataatcaccccaaactggaaacaccgcaaatgtccaactagtgaatggataaacactgtagtacagtcatacaatggaattctgcaataaaaagaaacaaactattgatacatgcataacattgatgaatctcaaaggcattatgctgagtaaaataaacca

SEQ ID NO: 228320 - DNA, 557 bp, Homo sapiens
tatgcaagctcaacaataagaaaataaacaactcaatttttaagatagctaaaacacagattgtcaataagcctttgaaaagatgctcaatatcgttaatcatttttagaaacacaaattaaaaccacaattagataacacacctattggaacagctaacatttaaaaacaacgactgatacatgtcaaggacacagaacaaccaaaactctcatacactgctggttagaatgaaaaatattatagccactctggaaaacagtttggcagtttcttataaaggtaactacacatttagcacaccagccagtaatcccactcctggtattgacttgagaaacaagaaaacttatgttcaacaagaatgtataagaaaatattctgcggctctattcataatcaccccaaactggaaacaccrcaaatgtccaactagtgaatggataaacactgtagtacagtcatacaatggaattctgcaataaaaagaaacaaactattgatacatgcataacattgatgaatctcaaaggcattatgctgagtaaaataaacca

SEQ ID NO: 228321 - DNA, 569 bp, Homo sapiens
tactaaacctttttgcaagtttcaacaacactaccacttaatatgtatgttggacaagcttctctctatgcctcagtttccatatctgcaaaatgagaggtgatataacagtaatatatactgataaaaggctttrgagtttcagccctgagttcaaatctggtctctactactttgtgtgttagtctggacacattacctaacttcaatttcctcataagcaaaacagcatattattgagaggaatgactgagaaaacaaatgtgaagcacccagagtacagtgcttgaattcagtaaacacaagctctgttcctctgttcaatatctatctgtacacaatctgtagttcatagagctttctccacttagcctctatagctctcatcttggctttctttatatacactatccctacagaatctcacccacttccatacctttgagggaacaaattcctaaactacctgtctagttttaacctccaagctccagattcgcatttctaataggctgatatatttcttctcctactttccacctgctattttccatacaatccttagctca

SEQ ID NO: 228322 - DNA, 621 bp, Homo sapiens
ccattccttcttatttaacaaatcacattctaccactaccacaccccagcttccgctcatttaagccctcagcttcaaccctcatctagcccattattcctaacaatctcctatttccctgcctcctgtctcatttcttctcaaatactcacttcgctctcaatccttcttttatatactgcaacccagaataattcacaactttgaatggcaagtcatttcatcagaggataatggtccaattcttcatgctaagttttagcacatatatgctatagatacacacacacccatacatatatgataaacttattttacaattttaatttcattttcacattttagataaggtcccaattaagccttctttttctccatttgattccctcttttaagtagtcactgcacattaccactctccaayttcaatttgtcctcacctaacaaagacttcttgtacaccaatcacctcgaaagagcgtgcactcattcataaaaaactcaaattttaaacatcagttgtttggttaaagttaagtctttttaaagtattcactgccaaataaagttagtttttaaaaggaagaaagctttaggtgtgacttagtgggaatatttcaa

SEQ ID NO: 228323 - DNA, 621 bp, Homo sapiens
ccattccttcttatttaacaaatcacattctaccactaccacaccccagcttccgctcatttaagccctcagcttcaaccctcatctagcccattattcctaacaatctcctatttccctgcctcctgtctcatttcttctcaaatactcacttcgctctcaatccttcttttatatactgcaacccagaataattcacaactttgaatggcaagtcatttcatcagaggataatggtccaattcttcatgctaagttttagcacatatatgctatagatacacacacacccatacatatatgataaacttattttacaattttaatttcattttcacattttagataaggtcccaattaagccttctttttctccatttgattccctcttttaagtagtcactgcacattaccactctccaatwtcaatttgtcctcacctaacaaagacttcttgtacaccaatcacctcgaaagagcgtgcactcattcataaaaaactcaaattttaaacatcagttgtttggttaaagttaagtctttttaaagtattcactgccaaataaagttagtttttaaaaggaagaaagctttaggtgtgacttagtgggaatatttcaa

SEQ ID NO: 228324 - DNA, 593 bp, Homo sapiens
aacagaattgaggttctgatgtttattcattatagactttaaaacacggagcagttcctctagacgtatatgaataacttctttaaaacagtctttaaaaagaaaaaaaaataatttatttccagagcaaagttccacaaatctaaactacaaaacgtcatctgaagcacatttcaagtagaagcattggttacacaatttttgcctactatacattcatttatatcttcactgctgcaattatatacaatttwaaaagccttcagaaaatccttagtcattttaattcattaaggatttcaaaggctctcacagttatggtcaatttaagtacttcatttttcagttttctcaatcttaatatgtgctccagacttcccttgagccaactttataaggtaagtttttcttgccttatagttttactatcatatattttttaacatatccagtaactcttaggcatataaagatcatcatttaacctatacatttttaaaattatgatataatttacctatgataaaatgtacagacctttaatgagtttttgtgctttttagaaaaactgaattagttgtcaatgatgaaaa

SEQ ID NO: 228325 - DNA, 548 bp, Homo sapiens
taggaaattggaaagcaggccaacttctcattcttaaagatgagttaaatatgcagagggagggagtaatgtcacaaagaaactgaaaggcagatttgtcatggatttggacgatcaacatttggctgtactgaatgagacagttcagaccttattttccctcagatcatgctcccttccacattactgctcaaggtaaaagcaaatgcctacttttaccattttaaatttattataaaaagtatatgtaaggagtattttaaatatattatgaaagttactttttgaaagtaccaattattwtgtaggtggatcaggttcaccattagtatggaagagaaaaaaaatagaggattatactacccaagtctgactgggaaggaggaggaccattctattttagcatataaagaagttaatattttaattttcctctttccttttctctgcaattccctcctccttctccatcaaggtaaattttccatgatgggattggcctgacacagtgatgggaggaagaaaggaagaagaataggctagtgttt

SEQ ID NO: 228326 - DNA, 615 bp, Homo sapiens
tccaggctggggaggatgttagggattggtgtggtcaggaccagcgctgctatgactgcggatttatttggcatatttgggactgggtgtgatgagamagcagctggcatgtcaagaggttgagggagggaggaagaatgaacaaattatttaggattatgggagtcaggtttctatgagagaaggaagttacaaagatggaaagggagactagattaacctcaaaggattgaattgaaggtgtcaatgtgaactcaaagttttcaatacgtatgtatataaatagatatagaagtaggtgactattcttgaatgtgtgtagacacacgttttcctttgagctgttcaccaataagacagtgagcctttctcaggtcttcatttccatataccatttcccatttaaagaaaccagggctccttggaaaaaagggctaattctagacttggggtagggagtaggaaaaagtgtaagatgagctcgtaaaaaaaataagaggggaaaaagcaatgaggcatctctaaggaacacagaagccagcttgaagagactcccaaaaaccaaatcggggaaaatttcagcatgaaaataagtgacaataatacactgtcact

SEQ ID NO: 228327 - DNA, 615 bp, Homo sapiens
tccaggctggggaggatgttagggattggtgtggtcaggaccagcgctgctatgactgcggatttatttggcatatttgggactgggtgtgatgagacagcagctggcatgtcaagaggttgagggagggaggaagaatgaacaaattatttaggattatggragtcaggtttctatgagagaaggaagttacaaagatggaaagggagactagattaacctcaaaggattgaattgaaggtgtcaatgtgaactcaaagttttcaatacgtatgtatataaatagatatagaagtaggtgactattcttgaatgtgtgtagacacacgttttcctttgagctgttcaccaataagacagtgagcctttctcaggtcttcatttccatataccatttcccatttaaagaaaccagggctccttggaaaaaagggctaattctagacttggggtagggagtaggaaaaagtgtaagatgagctcgtaaaaaaaataagaggggaaaaagcaatgaggcatctctaaggaacacagaagccagcttgaagagactcccaaaaaccaaatcggggaaaatttcagcatgaaaataagtgacaataatacactgtcact

SEQ ID NO: 228328 - DNA, 564 bp, Homo sapiens
acaaaaactacaattctggggaattgaaacatgataccaggaatgaaatagttaatagcaaggaagaaagatagagctgaggaaatctcttagaaagtgttgtaagaaaacaaaaaaaaagaaatgaatgatagagaaaagataagggaactagagaacctgtccaggttgtcaagtatccaaataagagttccagatggaaagcacagagaaaataaaggggaggaaatgagcagcaaaatgggaagttccaaaaactaaaggactaaccaggattggcagcgcttatggagtgccctgaatagtggataaaatacacccacatcaaaacacatacttataaaattttaggataatgggaaaaaaagaagattccacaagctttcagagacaaaatcataggccacatacragaagttagaaatgagaaggatttcaggcttcaaagagaacaaaaaaaacacctttgaatttctgaagaaaaataattttcagtccaaaatattagaaccgtccacactatcaacacttatgacatttccattcaagagagtagaatataaa

SEQ ID NO: 228329 - DNA, 387 bp, Homo sapiens
aaaaaaaaacacacataaatgaaatcacaatagcgtaattcaatttgtataacattcagaagagagcaaaacttcaccagatataggtactagaaacatttaaaatagctagagaatgtttttaaaacatttcaggataatggtttattctggtgggagatagggcaatgttaccaaggaggtgtacacagggcgcttctaatatactgataatcgtctattcttagsctgggtggcgaatatatgaggggtttttaaaaactattttttaaattgtacactttcctctctattatgtgtgaaagttcactataaaaacaaggtagttaaaaaatacctaaaaaaggactgatctttcaatgagttttcattgccagacttaaatat

SEQ ID NO: 228330 - DNA, 388 bp, Homo sapiens
gcaaatagaaaagttggggtggaaacacaggctttttcattctttcccaccacatgagtctttgacaaagcaggaaataaatggttgaatcttcctttgacttatatctccccttcctggtacacaatgtcatcagcttctgcaaaaagttgaccagtgcatgtatgagtagggaggcatcccattttccatggataccaatgcaggaagcagttgttagttcttcattctagactgccactgggcagttgtggttttatcscttttatttaaaacagggaaaacaggcagctgtaattcagcatttgttaaaaaggaaaactgagtcatttgtttttcgctgatttccattctaacctccctctgtgctgatagaagtcaaatagct

SEQ ID NO: 228331 - DNA, 594 bp, Homo sapiens
ggccacaagatcagaaattatagtttataagtttataagttaggcagctggaggctacaagattctgaccttccctaaactgctcttaagatcagtgcttgagatattttgcagaccctgcacttgacagatcagctggcaacasccagattgattaactggcccatctgatattatgcccccacccaggaattgacccagtgcaagaggacagcttcaattccctattatttcatctcctacctaaccaatcaggcactcctggctcattggcttcccccaacccaccaagttgtccttaaaaattcttatccccaaatgctcggggagactgatttgagtaacagcacagcggctctgcatgaattactttatcgcaattcctctgtcttgataaattgactctgtctaggcagcaggcaaggtgaatccattgagtggttacatgactagctcacaattagagactccaaccaaaagctgactttggatctcctggcattcaggtgcttcaaacccaagccagtagtgattctaaatctggtgacaaagcaattccggtgcaacctagcagtggaaggacaaagaatattg

SEQ ID NO: 228332 - DNA, 594 bp, Homo sapiens
ggccacaagatcagaaattatagtttataagtttataagttaggcagctggaggctacaagattctgaccttccctaaactgctcttaagatcagtgcttgagatattttgcagaccctgcacttgacagatcagctggcaacagccagattgattaactggcccatctgatattatgcccccacccagsaattgacccagtgcaagaggacagcttcaattccctattatttcatctcctacctaaccaatcaggcactcctggctcattggcttcccccaacccaccaagttgtccttaaaaattcttatccccaaatgctcggggagactgatttgagtaacagcacagcggctctgcatgaattactttatcgcaattcctctgtcttgataaattgactctgtctaggcagcaggcaaggtgaatccattgagtggttacatgactagctcacaattagagactccaaccaaaagctgactttggatctcctggcattcaggtgcttcaaacccaagccagtagtgattctaaatctggtgacaaagcaattccggtgcaacctagcagtggaaggacaaagaatattg

SEQ ID NO: 228333 - DNA, 620 bp, Homo sapiens
cagatctaagacatacgccaaaatcttcacatttattaaaactaggaaggagtatttcagagccccatattattttctgtacttttctgtatgctggaaagattcaggttaaataataatgaaaagtaaaacagaaagcaataatgtaaaaaaatctatgacaggaactttgcttctgaggtggctccctcttcagaaaataataggaaagaatctgtaatctaataagacaactgtgtttcttcaattcraagccaaaaaggaaacaaagactaatgctggcatatgagaaggtaggaagaaggttaccagttctcactttcactatgtaattatctgcttttggtatggtagcccacacacatctttttttttttttttttttttttttttactttaagttctgggacacgagtgcagaatgtgtaggtttgttacctaggcaatatcattcaggacataggaatgggcaaagacttcatgactaaaacatcaaaagcaatggcaacaaaagccaaaattggcatatgggatctaattaaactaaagagcttctacacagcaaaagaaactatcatcacagtgaacaggcaacctacagaatggggaaaaatttttgc

SEQ ID NO: 228334 - DNA, 556 bp, Homo sapiens
ggaactttgaacaaatttacaggaaaaaaaataaacaaccccatcgaaaagtgggcaaaggatatgaacagacacttctcaaaagaagacatttatgtggccaaaaaacgtatgaaaaaaaactcaacatcactgatcattagataaatgcaaatcaaaaccacaatgagataccatctcacatcagtctgaatggcaattattaaaaagccaagaaacaayagatgctgacgaggctgtggagaaacaggaacacccacatacatctttaagtgtgcctgttatgaagcagtccagagagcttctttcttaccacctccgttgggggtggaggggttaaaaattatagttttctcctaaagtagaaaaggaagaatcattagcttagttatacaagaaggaatcagggattccaactgcttcttaaacagattctcaaccactcattgttttcagcctttactctgtcagatacctgatggtcccaatcccagggcctctgctccacaatataaatagggtcagttcttagctttctccctattgctggtgtagc

SEQ ID NO: 228335 - DNA, 566 bp, Homo sapiens
aacaaatttacaggaaaaaaaataaacaaccccatcgaaaagtgggcaaaggatatgaacagacacttctcaaaagaagacatttatgtggccaaaaaacgtatgaaaaaaaactcaacatcactgatcattagataaatgcaaatcaaaaccacaatgagataccatctcacatcagtctgaatggcaattattaaaaagccaagaaacaatagatgctgacgaggctgtggagaaacaggaacacccacatacatctttaagtgtgcctgttatgaagcagtccagagagcttctttcttaccacctccgttgggggtggaggggttaaaaattatagttttctcctaaagtagaaaaggaagaatcattagcttagttatayaagaaggaatcagggattccaactgcttcttaaacagattctcaaccactcattgttttcagcctttactctgtcagatacctgatggtcccaatcccagggcctctgctccacaatataaatagggtcagttcttagctttctccctattgctggtgtagcattcagtttcctcagatct

SEQ ID NO: 228336 - DNA, 618 bp, Homo sapiens
attattgacatgtacttccacacaactaccatataatgacaatttatgtgtaatatgatgcccttgatcattaaagacagattaaacataacactgtgtctttgttgggagatttattctattgtattcaagtattttggggatcggtcatccatctagtttccagataacatttgcagattattatctcaattcctgcccattcatccggaaggagctatttgcttaagtggacgggactgacctggctacagctcacccttgtcctgccctttcctcttcagaattggaagggaatcctgccctgccgttaggcactgctttctccctttgactggttatactggaagtcattttgcagataagaccagcattaagttttgtraaatagtggcgtccattggtgttgaaaggtgtagaatgaaatcacttaaagtagaagctgttttccaaatgatttcatgtctcagatctaaattattcatttgagaaattaatcagtttggattttaagagttactgttgggtgatgtttttcttcttcttttgcctctaatggataatttgagggaatcagcttttatattaagaagataaaacatgagtttgcaaagttgc

SEQ ID NO: 228337 - DNA, 213 bp, Homo sapiens
aattagcatctgtgtggaaggctttgctcaaggggctgtgggcgggcgggaggctggcaccgaactgaaaactgagcctgggcgtcaacatgggcgggccactatttgcacatttgttttccttctrcctcggatcggttgtctgtatattagggttggctgaatagtacagatgtcaaagggttgagatgctacattgaggggcctgctata

SEQ ID NO: 228338 - DNA, 502 bp, Homo sapiens
gtccaggtgtgttgtaagaaggggagccaattagcctgaggttagcagggaactgtccaggtacatccttggggccctaaggtagaaagaggaaggggaggggttacaggtccacgggactataaatgtgtcttcacacattcacttggaccaggctcatcctagacttctcatggtcatcctggggaggccatcatctgtcccttacaaagtggattttacaggcaactcagtcccaagccatcctcttgagatgtgtattttgaaagaaacgtggttaccaacatctctcaggcattggaaaaaaccattcactgcatgcatattggtgactascacagttctgtccatttcccagaacttttactattactggaatgcctcctcttcactccctttcccaaggtcatgaagcctgccaggatgctgccatggtaagaaactgaggcaaggttctgaggacaaccaatgattgagaggctgtttgatttctccttcctat

SEQ ID NO: 228339 - DNA, 434 bp, Homo sapiens
gggcttgtccaggaacttctccactactactagctgaagggcaacagygccttggtgttgacacttaactctgcacatgggcagggctcttgatctctatcaggactgcccatatcctccaagcaaactgtaaggagtattggtaggagggtacaggaggcaggcctgaggagcctgtgccattctgagcaatatacaatatgtcattaagagagtgggctctggagccaaactgactgggctagaatcctggctttattattttgtagttgtgaacaaattacataacagatatttctgtttctgttttcttatcttttaatggatattaggttccacctcccagggttgttgtcatggtaataaatgtatagtgctaggaacaatgcctgacacataagaagcacctactatcaggtattatattaacagtt

SEQ ID NO: 228340 - DNA, 366 bp, Homo sapiens
aggaatgtgcctctgctccacccacaacatcactgagcagcttaccttttgcgtaargtcactggcttggttgatgtaccggtcacgctccttttccagatgaaagatgatctttctctgcttctgagcctcatccttgtagttctggatttctccctccaggttcctcttggcttgttcatggagctttaccaagtctgtctgcttctgggtcgcattgaccgccttaagcatgttctaaaaataagggcacaaagcagtcacattactcataatgttcaaggatttggggttaagtttaccctctgcctcatctctaacataattagatatcttgtcttttggatgaataaaaatgatcatatt

SEQ ID NO: 228341 - DNA, 366 bp, Homo sapiens
aggaatgtgcctctgctccacccacaacatcactgagcagcttaccttttgcgtaaggtcactggcttggttgatgtaccggtcacgctccttttccagatgaaagatgatctttctctgcttctgagcctcatccttgtagttctggatttctccctccaggttcctcttggcttgttcatggagctttaccaagtctgtctgcttctgggtcgcattgaccgccttaagcatgttctaaaaataarggcacaaagcagtcacattactcataatgttcaaggatttggggttaagtttaccctctgcctcatctctaacataattagatatcttgtcttttggatgaataaaaatgatcatatt

SEQ ID NO: 228342 - DNA, 565 bp, Homo sapiens
gaattcaaaatgcacaaaagggtgaataaaggtgccattctgggtttttcttggttttttgcgaagacccacacccaactcaccttctgctccttcagctgctgctccagcttctgaagctcctccttgctcttctgcacatactgctgcagggcttttatttctgtctgcctgctgtccatgtctgcctgaatctgcttgagctctttctctagtttttccttcttccggaactcccgggaagcttcgttctgacgttgctggatttcttgttggaactagaggttgcggaaaggacaagagagaaagagatgagccctgaccatggcaggtctcagccagccaagccccctcctctctcaggtctgtgattgtcaaggcagcactttgcagtagcatttcccctatagggcagacatccttgagccccagtgttcaaacttttcaggaatattctatactgtttcttggggcyttgaaatcaaatgactaccctgatggtgggcaacaaatccacaaagtgtggtataaaatcaaatacatatggaagctcagagttctaggg

SEQ ID NO: 228343 - DNA, 382 bp, Homo sapiens
atttgagaaaggagcaagatgggaatagagactgtggagggacaaacatcctctggaaggwaatattccttcttcttgccctccatggcagacctgactgatggcatgttcagcctcctcttttgatcgctctgtttcctgctgctgttcagtggtctgagctagggattctcgtaattttaccacttctgataagagctggtctctctcctttgtcacttcttctttgaacctcagtaaatctcggatgctaaaaaggaagaacacaggagtcagactaaatggccatctgctcaggggtccttcatatcattctctgagttcattttcatgggaaagatgtcaggtcaatgattaacactattcagacattaaagagaaa

SEQ ID NO: 228344 - DNA, 437 bp, Homo sapiens
atgcctttcactgcatggccagcacaatttgggagtggcccaagctacttcacagctccacagtgatcacattcactcacagattcattcagtcatgcattgaaacaatccttatgaagggctgggaatgtscccaacatttggatacaagtaataagacaatgagtaagagaaagttcctctctacctgaacataagatcacaaggactgggagacaagggcaggatacaagatcttgccaagaaaaggagggagtgactgactctggttggaggagttggttgcaggaggaagtaaaaaagagagtttttcaagaaatataatagcctggtgcagtagctcgtgcctgtgattccagcacattgggaggctgaggcaggagggtcgcttgaggccaggagttcaagatgaacatgggcaacatagtgagaccccg

SEQ ID NO: 228345 - DNA, 641 bp, Homo sapiens
gttgcctctggaaaaggcagaaaagaaatgggactttgaagggacacgaagttttcatctaatctgaaaatctattcacttcattttttaaaaaatctgaaacaaatgtgacaaaacattaatatttactattttgggtgaatagagactggttgtgttctattatactcgacttttctgcattaacattttatctaaaacttggggaaaaaagggggggatttttcccaccctcaagaatatgtagaaatatatttatagtttattctagaacttttaggaagtttttaaaatttagtgtatgataagaaatagaactctaatttttccaaatataaatcccataacactatgtctatgtttcttgtatgtactttattatactgtgctgtagttatagttacttgtttacatgcttgtctcttccactagacattgccttygtcacatataagaactgttcctgtgtctttctgtatccctagaataagcataagacctggtactcagtgtttgttgaatgagtgtgtgaatgaaaagaagaacgaatgaatgattaatgtaactgactaaacaactctctgccactcccagtagtgccctcattcagattacatcaaatacactcagtaaatcagaaa

SEQ ID NO: 228346 - DNA, 537 bp, Homo sapiens
agttggttaggttatgagggctccaccctcatgaatgggattagtgctttcataattgagcttgagggtgatatatgagtgaaaaataaattatttaggcagatagtgagggtaaggaagtccttggaaaggtttyccttttaatgaaaagcagcccccaaataatttgcttttctaatgcagagtagcctgtaaaattgagctgcagacataaacaagcaagctagaagcttgcacaggtgaatgctgacagttgcgccaataggaaaaggctacccatgaataggcatgttcaaaatggcggctccatcttctcttcactttgccaaccacatgtacagtaaggagcagacaagatggccaagtagaaagcctatttgcataagattagggtggggccatacagcctttcctgctgcaccaggtaaatgtcacacctgatagaaccaatctgtgcatcccacataaatcagacaccgcctcctcaagcctgcctataaaatctggcacaggccagtgtggtgactcatgcctgca

SEQ ID NO: 228347 - DNA, 489 bp, Homo sapiens
ttatgtccctatatttatctaccctctatctatcatctatctatctgtatataaaaaggagatttattatgaggcattggctcatgtcatatggaggctaagaattgccacaatctgcattctgcaagctggggacccaggaaagccaatggtgtaattcagttttagtctgagaatgaatggtgtaaataccggttcaagggtagaagaggagatgggatgtcctactcaagtagtgaggcagaacaaaagggatgaattcttcctttctccaccttttctyatattcgggctcttaaggggttgatgattcccacccacattgggggtggcaacctaccgaggccacttattcaaatgttaatctcacaagcaccctcacagatacacccccaaagtcacatataatctgggcatttcatggcccaaccaagttgacacataaaattaaccatcacagggcccttcataatttggtggcaatgataa

SEQ ID NO: 228348 - DNA, 657 bp, Homo sapiens
atggagtttctatatatctggcaggagacttttcagtggaaaccttattgtcaggagagattggaatgacatatttaaagtgctgaatgaaaaaacttctatcctagaaaagtatatcctgtgaaaatatccttcaaaacatgaagcagaaataaaaactttcccaagcaaacaaaagctgaggaatctcattaacaccagacatgtcctgcaaaaacatggtaaaggaagttcttcaatctgaaagaaaagtatgttaatgatcaataagaaatcatgtgaatggccaggtgcagcggttcatggctgtaatcccagcagtttggggggccaaggyagatggatcacctgaggttgggagttcaagaccagtctgaccaacatggagaaaccccatctctactaaaaatacaaaattagctgggcatggtggcacatgcctgtaatcccagctactcgggaagctgaggcaggagaatcacttgaacctgggaggtggaggttgcggtgagcctagatcgcgccattgcactccagcctgtgaaacaacagctaaactccaactcaaaaaaaaaaaaaaaaaaaagaaatcatgtgaatatgcaatactttttgctgttaataccaagtacgtataaaaaaacagaatattataac

SEQ ID NO: 228349 - DNA, 566 bp, Homo sapiens
taactgactttctgacaaattcaaagctagaaaacagccattatcctgaggaaactgacgcaggaacagaaaaccaaataccacattttctcacttatatatgggagctaaatgatgagaacacatggacacatagaggggaacaacacacactggagatttttggagggtggaggttgggaggagggagaggattaggaaaaataactaatggttactaggcttaataactgggtgatgaaataatctgtacaacaaactcccatgacacaagtttacctatgtaacaaacctgcatatgtacccctgaacttaaaataaaagttaaaaaaaaaatgacagagtwgagaatcaaagagaggtggtctggatccagagtccatactgtaacaaatgtgctatggtatgttggctccccatttatttgagcctccattcttcaagattttgtcagctatactgttgctttaaaatgtgtcaaggttcataacacttacattctatctcgttaatatatttcccaccattaatctttattctatacttaaatgttctcaattatcacc

SEQ ID NO: 228350 - DNA, 608 bp, Homo sapiens
ttttccaatgagtcctattttaaacaatgttgagatgcacatgtttgtacagcatactttgtgatattgcttttattttcttcagacaaagcccaagaggtaagcgcaaatgattatttgagaaggaatccacattcatactgagactgcaaacaatattgtctttcttcaattacagttggcctagatggtttggacactctgggaacaactatctttgatttctataacaactaaattttggaactaaaaagacaatactagaatatggtagtgcacgtgtagttatagcactgaatacatttccaaaaggatttatatagcaattgatttggatcctaagccctcatgaccaagatcctgaattttttaaaaagctactacagagctggtaagtgactaatgtattttgccggattagaagacatcaagtttcagtcttatgattagcaatttaaagtgttattaaaaattctaaaactgcatttaartgatgaaaaattgctgtgtcatactgagactactaagaacaatgtgtgatgcagcaataactcatccaaaaatagcaaactcatgacttgtttcttgttttgcccttaccactgaaa

SEQ ID NO: 228351 - DNA, 412 bp, Homo sapiens
gtagggtttgtaactccgcccactgtagtgctttctagtggatatcaccttgaggacaagggagaaattcttcctgatgyccaaggtacaggggtatgccttatgtagattagcactactggtccgaaagcaagcatagtgtttctcctctgtatcatacagggaaactcctactcttggatttatactgttgtacctggagaagcttcctgggacaagttgacctttctgttcaattcctagcatggttctacttagggatcaattggtcaaaattccttataagtattcaaaacttcttttcttctctttctaaacacctccttctaggtaatctcaacctgacccccagttttaaatacaagtatatactgtgactatactatatagttctgattccttttctgaattc

SEQ ID NO: 228352 - DNA, 412 bp, Homo sapiens
gtagggtttgtaactccgcccactgtagtgctttctagtggatatcaccttgaggacaagggagaaattcttcctgatgcccaaggtacaggggtatgccttatgtagattagcactactggtccgaaagcaagcatagtgtttctcctctgtatcatacagggaamctcctactcttggatttatactgttgtacctggagaagcttcctgggacaagttgacctttctgttcaattcctagcatggttctacttagggatcaattggtcaaaattccttataagtattcaaaacttcttttcttctctttctaaacacctccttctaggtaatctcaacctgacccccagttttaaatacaagtatatactgtgactatactatatagttctgattccttttctgaattc

SEQ ID NO: 228353 - DNA, 412 bp, Homo sapiens
gtagggtttgtaactccgcccactgtagtgctttctagtggatatcaccttgaggacaagggagaaattcttcctgatgcccaaggtacaggggtatgccttatgtagattagcactactggtccgaaagcaagcatagtgtttctcctctgtatcatacagggaaactcctactcttggatttatactgttgtacctggagaagcttcctgggacaagttgacctttctgttcaattcctagcatggttctacttagggatcaattggtcaaaattccttayaagtattcaaaacttcttttcttctctttctaaacacctccttctaggtaatctcaacctgacccccagttttaaatacaagtatatactgtgactatactatatagttctgattccttttctgaattc

SEQ ID NO: 228354 - DNA, 645 bp, Homo sapiens
cattatgaccaagtaagctttattctaggaattgaagagtcgttaaatatcaggaagtcccattaatgaaatctaacacattagagttaagataaaayacctcatgcttatatctgcttatatagacacagaaaaggcatttgacaaaattcaaaatctatcatgttttaaaaaagtaaaaggatcgaataaggttggaattgatggattaagtccttaattcagcagtatatgttatataacttctattctaataaccatcactttatttcacaggggaatatttcttgcaaaatttataacaagaccagatatgtgtttacttatatcatagataaaaagtcaatgtctttttatataaatagcttctaaaatacagaagaggccagtaatcctatagaaaatgacctgattctaagctagtttgtcattaaaataataatagattaaaataaaatgattttctgtaattctaaaatgagctatagaatatgagcagagtgaattgataagtttaaatatttgtgaataatgtgaaaaaaatgcttagtctcactcacaataagcaaaatacagattaagaacatgattattccagtctagccaacatggtgaaaccctgtctctactaaaaattagccgggc

SEQ ID NO: 228355 - DNA, 612 bp, Homo sapiens
tacaggaattgacagcgaacacctcccattcaagttagaatgaacactatttggtcttagacacataaatgttcagacaagaggtttccatttagaagaagccaaccaatgatgagttcagaaaacattcttgttaacacactcaaaaattgcaataaaaaatggagcatcacctgaaaatggtaaactttttaaacaaatagaacgatatgaggataaagggatgtttctaattagattcccttttctaaaatctttcactttccttactagtctgatgctcacagacataaggtcagtgtgatatttttgataacatacgtaggtctgcagagttcatagcactgcagacttgggaagattttacatgtccagtgcatggcccagaggcagcagtatttattttagccagtaacaaacatgataaatgatgtgccaccctccgtcactrctggtcactggaagtgctggctgaccatcagcccagagctcaattcccacaggttccctgccaaactatttgaataaacctaggcaagtttacaatttctgctttggctgaaaaacttctttcacttggcagtctaaatacatttcagagcgtttgaggat

SEQ ID NO: 228356 - DNA, 682 bp, Homo sapiens
tgttgttgtttcttatgatgtctgtttgatttagtaagaaagtaatgctatcttcatcaaataaaggaaagaccttttccttttctattgtctggaaggatttgcgtagaattgttattgtttccttaaatattgttagacttcaccatgaaaaccacctgggcctttagttttctttgtcattaggattttaattaaaaacttgattttgtcaatagatactcttgttatctatttcttcttgagtgaactttgatagtttatgccctccaaggaatgtgttcatttcatctaagttatcaaatttattagaaaaaaatggcttacagtagtccattgtttccttataattactgtagaagatttggtgacacccaccctttcattcctggtattggtaattcgtgcctttttacttttttcttgatcagctgactagaagtctaacaatttaattgattgtttaaaatgattagcatttactttcttggatttttcttataattttcccttttttctttcattgatttctgttytttttattattttctttatctgcttacattgtgtttaatttgctcttctctttccagtttctgaaggtgaaaactcaggtcactgatttgagacctttcttttttgttataatataggatcttagtgcttaaatttgcctccaagc

SEQ ID NO: 228357 - DNA, 556 bp, Homo sapiens
aagggaattcataatcttttttcttaactgaacaggaaaacttatgaaaatcaacaataaatctgaattttaattttcattcaacagctgaaaaaccatgtctgttgaccacattggactattgcctagttaaaatccataaaattctctataaaccaatgaaaagaaagtagtctggcaataatttccaactttttaaatcctaatttttaggtcaggtgcaatgcctcacgcctgtaatcccagcactttgggargcccaggcaggtggatcacgaggtcagaagataaagaccatcctggctaacatggtgaaaacccgtctcttcttaaaatacaaaaaaaaaaaaaaaattacccgggtgtggtggcgggcccctgtagtctcagcaactctggaggctgaggcaggagaatggcgtgaacctgggagggggagcttgcagtgagccgagatcgtgccactgcagtccagtctgggcgacagagccagactccgtctcaaaaaaaaaaaaaaaaaaaaaaattctaatttttagttacaaagaaaaaggat

SEQ ID NO: 228358 - DNA, 354 bp, Homo sapiens
taaggtgcttctctttccttccccttctaattcttttttttttttttttctattaccaaaatgactgcagctagcatggatgcgcatgattcccctgtgttcaggcaggcrtccctatccacagcagaggcctcaaacaggctttctctgctggcttgtgctggacgtttccatattgttttctgagaaggttgtaaaaattattcaccaccagccgcgcagccaaatactttttacacctttatcatcgctagaaaggttaatccttgtctttcacccccaattttatgagtgaaaaacaatagctcatgattaccctcatcaacatctttgattttcagtgaaatcaaggat

SEQ ID NO: 228359 - DNA, 354 bp, Homo sapiens
taaggtgcttctctttccttccccttctaattcttttttttttttttttctattaccaaaatgactgcagctagcatggatgcgcatgattcccctgtgttcaggcaggcgtccctatccacagcagaggcctcaaacaggctttctctgctggcttgtgctggacgtttccatattgttttctgagaaggttgtaaaaattattcaccacyagccgcgcagccaaatactttttacacctttatcatcgctagaaaggttaatccttgtctttcacccccaattttatgagtgaaaaacaatagctcatgattaccctcatcaacatctttgattttcagtgaaatcaaggat

SEQ ID NO: 228360 - DNA, 354 bp, Homo sapiens
taaggtgcttctctttccttccccttctaattcttttttttttttttttctattaccaaaatgactgcagctagcatggatgcgcatgattcccctgtgttcaggcaggcgtccctatccacagcagaggcctcaaacaggctttctctgctggcttgtgctggacgtttccatattgttttctgagaaggttgtaaaaattattcaccaccagccgcgcagccaaatactttttacacctttatcatcgctagaaaggttaatccttgtctttcacccccaattttatgagtgaaaaacwatagctcatgattaccctcatcaacatctttgattttcagtgaaatcaaggat

SEQ ID NO: 228361 - DNA, 540 bp, Homo sapiens
gaattctcttattcattttttactgttttttttttctkggatttgctagatatgattagcttgtcagcaaacaacagcaggttttgcctctttgcagtatttatagcttttatttatttatttatttttttggagacaggcttttgctctgtcacccaggctatagtgcggtggcactaatgtggctcactgcagcctcaaactcggggctcaagtgaacctcccccttcagcttctagtgtagctggaaccacaggtgtgcactgccatgccaggctaattttcttatttttttgtagagaaggcgtcttggtcttgctttgttgcctaggctggtcttgatctcctggactcaagtaagcctcccacctcagcctcccaaagtgctgggattacaggtatcagctaccatgcctggctcttatatctcttaaaaatcatcttgagttgacttggcctcccatgtggaatacagcatgagtgttgatgtcctcatcttgtcccagattgtaatgggtgcctcaggtgctttaccaagca

SEQ ID NO: 228362 - DNA, 542 bp, Homo sapiens
ctgaattctcttattcattttttactgttttttttttcttggatttgctagatatgattagcttgtcagcaaacaacagcaggttttgcctctttgcagtatttatagcttttatttatttatttatttttttggagacaggcttttgctctgtcacccaggctatagtgcggtggcactaatgtggctcactgcagcctcaaactcggggctcaagtgaacctcccccttcagcttctagtgtagctggaaccacaggtgtgcacygccatgccaggctaattttcttatttttttgtagagaaggcgtcttggtcttgctttgttgcctaggctggtcttgatctcctggactcaagtaagcctcccacctcagcctcccaaagtgctgggattacaggtatcagctaccatgcctggctcttatatctcttaaaaatcatcttgagttgacttggcctcccatgtggaatacagcatgagtgttgatgtcctcatcttgtcccagattgtaatgggtgcctcaggtgctttaccaagca

SEQ ID NO: 228363 - DNA, 542 bp, Homo sapiens
ctgaattctcttattcattttttactgttttttttttcttggatttgctagatatgattagcttgtcagcaaacaacagcaggttttgcctctttgcagtatttatagcttttatttatttatttatttttttggagacaggcttttgctctgtcacccaggctatagtgcggtggcactaatgtggctcactgcagcctcaaactcggggctcaagtgaacctcccccttcagcttctagtgtagctggaaccacaggtgtgcactgccaygccaggctaattttcttatttttttgtagagaaggcgtcttggtcttgctttgttgcctaggctggtcttgatctcctggactcaagtaagcctcccacctcagcctcccaaagtgctgggattacaggtatcagctaccatgcctggctcttatatctcttaaaaatcatcttgagttgacttggcctcccatgtggaatacagcatgagtgttgatgtcctcatcttgtcccagattgtaatgggtgcctcaggtgctttaccaagca

SEQ ID NO: 228364 - DNA, 542 bp, Homo sapiens
ctgaattctcttattcattttttactgttttttttttcttggatttgctagatatgattagcttgtcagcaaacaacagcaggttttgcctctttgcagtatttatagcttttatttatttatttatttttttggagacaggcttttgctctgtcacccaggctatagtgcggtggcactaatgtggctcactgcagcctcaaactcggggctcaagtgaacctcccccttcagcttctagtgtagctggaaccacaggtgtgcactgccatgccaggctaattttcttatttttttgtagagaaggcgtcttggtcttgctttgttgcctaggctggtcttgatctcctggactcaagtragcctcccacctcagcctcccaaagtgctgggattacaggtatcagctaccatgcctggctcttatatctcttaaaaatcatcttgagttgacttggcctcccatgtggaatacagcatgagtgttgatgtcctcatcttgtcccagattgtaatgggtgcctcaggtgctttaccaagca

SEQ ID NO: 228365 - DNA, 591 bp, Homo sapiens
gaggctggagtgacatgtgaggaagtcacagagggagcagggccttggaagtcttaaaaagaactctggtcttggctgggyatggtggctcacacctttaatcccagcactttgggaggccaagtcaggtggatcacttgaggtcaggagttcaagaccagcctggccaacatggtgaaaccctgtctctactaaaaaatacaaaaattagctgggcacggtagtgggtgcctgtaatttcagctactggggaggctgaggcagaagaatcacttgaactcaggaggtggaggtggcagtgagtagagatagcgccactgcactccagcctgggagataagagtgaaactccttctcaaaaataaataaataaacaaacaaataaataaaagaactctgttctttattctagggttataggaagcctctgaaggcagatgagtgacatgttaagacttgaatgttaaaagaattgctctggccacagactggggaggggcaaggatggatgcccagtgtcatggagaaaaaataatttttctctctactctacctttcatagctcttaaatggaacttcctgagaaaacac

SEQ ID NO: 228366 - DNA, 592 bp, Homo sapiens
gaattctctttttaaggtagaaggcatgaggttggtttatctcaaagatttttttgcatttctgatttctgtgacagtaaatgattaagtttgcaccctcaaatctactaaacatctgacagcagtttcacctctatgtggcttaattcatggctgcttcwcagtttaaaatcatcttactgcttaagatgggtgaagctaatggctgtagcatggtgcagacataggtggaaaatgtgttcagagctagaaaaggggagatagggactggagtaatttctgatttaaaattattatattaaagtataataaaaacatacatatataaaaaatcattactatcatacataaatgagataatgtttacaaagccctgaatttaatatctctttttgagccggtactaaatttatatcaaatatgtatcttcatatttgaataaaaaaagtcatgctgcaaaaagaaaatcagcaaatctcatttagaaaaaaaaaaatagttcctgaaataaagatgttgattttcttaaagaaaagataatattctcaagagaaaagggtattcctgaatctattttctaacatcagtctgt

SEQ ID NO: 228367 - DNA, 599 bp, Homo sapiens
ctttccctttatgtcatgtcatttgtagcactgacctaaaatcagggtgtctcctaaagacttatgggggttacatatagattgaaccattttgaatttctaaagtatgtatgagtcaagaaccaaaatttgagggtgatcagaatgtcatgtttattttccttagtttaacatatctgagtatagtccctgttccaccaggtggtgggaaagccagcttagacattattcaggctttgtacccttcctcagactttggtaaagcttccaggacttaactcagtgccaaaatacaaagcaacccacccagtcccttatctacatgggttaccattgttccagcccacatggtccccttgagcatgcagcatttgtgctaatcttagagcacaggcatctttggcagagctgggagccatggcacctgccatccagccattttagatatgccctgcagctatcacctttgwtgagtggccatcttccctggcaataagtcatgtcaataaattatcctaaaataacttccttctgtttaggctttggaccgcaatgaatggaaactcaacatttttactttgttttacctttggcctcta

SEQ ID NO: 228368 - DNA, 526 bp, Homo sapiens
catcaaggtgccctgaactctgatgcaggtaggcaggaagtcaagccttggaggcatttttcactccctgccctggaattctgggatctgctttcaggagagcatgtagcccttgctctgcctttgctcatggcaaacttggatgttctcttcctaaattggcacctagaataatccagtgtgtgcttgcagattcatcttgcccacacaagcatgggattctgcaagaaaaatcaagcatcccgcctattccattaccctccatctctctgtacttgtcatgaactctgagagcttgcttttaagcacaygggggtggaggtgggaggcggggattattctgactgaaaccagtcctccaagtctaggcagtaggaggctgcagaaaaggaaatagtgcaagcctgggaagtgagtcttgggggaacctagaggatctcattattttccccttggattctgagtcgggcagggggggacagtgtcatgtattattctgagattagatatcagctgagcctggact

SEQ ID NO: 228369 - DNA, 526 bp, Homo sapiens
catcaaggtgccctgaactctgatgcaggtaggcaggaagtcaagccttggaggcatttttcactccctgccctggaattctgggatctgctttcaggagagcatgtagcccttgctctgcctttgctcatggcaaacttggatgttctcttcctaaattggcacctagaataatccagtgtgtgcttgcagattcatcttgcccacacaagcatgggattctgcaagaaaaatcaagcatcccgcctattccattaccctccatctctctgtacttgtcatgaactctgagagcttgcttttaagcacatgggggtggaggtgggaggcggggattattctgactgaaaccagtcctccaagtctaggcagtaggaggctgcagaaaaggaaatagtgcaagcctgggaagtgagtcttgggggaacctagaggatctcattattttccccttggattctgagtcgggcagggggggacagtrtcatgtattattctgagattagatatcagctgagcctggact

SEQ ID NO: 228370 - DNA, 597 bp, Homo sapiens
gccccatattctccttccacacattatgtgaattatttcgtttctccttgttaatgaaacgaccctaaataaatggttcagggttaattaacaagcatcttctttttttatcttaattaatagactatctttttgagcagttttaggtttacagaaaatggagcagatagtacagggttctcacatgccccttcctcccacaatttcccctattattagaaccttgcattagtgcagcacatttgttataattggtgaaccaaaattgatttgttattattagctaaagtccatagtttacattagggttgactctgtgttgtgtatagttctatgggttttggcaaatgtatattgtcatatatcccccaaaacggtatcattcagaattatttcactgccctaaaaatcccctctgctccacctgttcatctctcccatttttatgtttatttatttctttctttgtttctttccttggcattcctcacatgtgagcaagacttcttctgtcagttcatttagaagacgtggtagtgcctcaaattttcaggacactttgcctaattctgakgagactagttaggaaatatagac

SEQ ID NO: 228371 - DNA, 460 bp, Homo sapiens
ccacaggccacatgcagcccaagatggctttsaatgcggcccaacacaaatttgtaaactttcttaaaacattatgagatttttttgtgtgtgatttgtattttttttagctcatcagctatcagtagtgtatttcatgtggggcccaagacaattcttcttccaatgtggcccaaagaagccaaaagattggacacccctgatctggattcatgcccttgtcagacatatgttaacaaatattttctcccaggctgtggcttaacttttgtaacttttgaagagcaaattgtttttattgtttcaatataactttaagcactaaagcatactgccttagtattagtgtattagattcctagggctattgtaacaaaataccacaaatagggtggcttgaaacaacaggaatttaaccattcatgctagaattctgaaatcaaagtgtcagtagggccat

SEQ ID NO: 228372 - DNA, 460 bp, Homo sapiens
ccacaggccacatgcagcccaagatggctttcaatgcggcccaacacaaatttgtaaactttcttaaaacattatgagatttttktgtgtgtgatttgtattttttttagctcatcagctatcagtagtgtatttcatgtggggcccaagacaattcttcttccaatgtggcccaaagaagccaaaagattggacacccctgatctggattcatgcccttgtcagacatatgttaacaaatattttctcccaggctgtggcttaacttttgtaacttttgaagagcaaattgtttttattgtttcaatataactttaagcactaaagcatactgccttagtattagtgtattagattcctagggctattgtaacaaaataccacaaatagggtggcttgaaacaacaggaatttaaccattcatgctagaattctgaaatcaaagtgtcagtagggccat

SEQ ID NO: 228373 - DNA, 460 bp, Homo sapiens
ccacaggccacatgcagcccaagatggctttcaatgcggcccaacacaaatttgtaaactttcttaaaacattatgagatttttttgtgtgtgatttgtattttttttagctcatcagctatcagtagtgtatttcatgtggggcccaagacaattcttcttccaatgtggcccaaagaagccaaaagattggacacccctgatctggattcatgcccttgtcagacatatgttaacaaatattttctcccaggctgtggcttaacttttgtaacttttgaagagcaaattgtttttattgtttcaatataactttaagcactaaagcatactgccttagtattagtgtattagattcctagggctattgtaacaaaataccacaaayagggtggcttgaaacaacaggaatttaaccattcatgctagaattctgaaatcaaagtgtcagtagggccat

SEQ ID NO: 228374 - DNA, 460 bp, Homo sapiens
ccacaggccacatgcagcccaagatggctttcaatgcggcccaacacaaatttgtaaactttcttaaaacattatgagatttttttgtgtgtgatttgtattttttttagctcatcagctatcagtagtgtatttcatgtggggcccaagacaattcttcttccaatgtggcccaaagaagccaaaagattggacacccctgatctggattcatgcccttgtcagacatatgttaacaaatattttctcccaggctgtggcttaacttttgtaacttttgaagagcaaattgtttttattgtttcaatataactttaagcactaaagcatactgccttagtattagtgtattagattcctagggctattgtaacaaaataccacaaatagggtggcttgaaacaacaggaatttaaccattcatgctagaaktctgaaatcaaagtgtcagtagggccat

SEQ ID NO: 228375 - DNA, 586 bp, Homo sapiens
tgggtgcaacagaagtcaaggattgaggtttgggaacctctgcctagattgcagaagatgtatggaaatgccagatgcccagggaaaaatttgctgcaggggtgggaccctcatggagaacctctgctaagggcagtgtggaagagaaatgtggggtcggagcccccacacagagtccctactggggcactgcatagtggaactgtgagaagaaggctactgtcctccagaccccagaatggtagatccrccgactgcttgcacagtgctcctggaaaagccacagacacttaacactagcccatgaaagcagcagagagggaggctgtaccctgcaaagccacaggggcagagttgtccaagaccacgaacccacctcttggtatcagcacgatctctatgtgagacctggagtcaaaggagatcattttggagctttaaaatttgaatgcatgggccctgtaactcctttgtttggccagtttctcccatttggaatggttgtatttacccaatgtctgtactcccattgtatctaggaagtgactagcttgcttttgattttacaggcttataggtagaaggg

SEQ ID NO: 228376 - DNA, 480 bp, Homo sapiens
aacaatctaatgccaccactgatctgagaggaggtggagctcaggcggtaacgctagctcacctgccgctgacctgccgtgtggcccsgtacctaacaggccagggttcctaacagtaccagtattaggccctgggagttggggacccctgctataaaagacttagtctttgaagtttgatctgctcattcttgtttgagcaaaccatgattagttcatgtctttggttcctaatctattttttctttataattttcttctttttattttattttattttattttgttttatttttgagatggagtcttgccctgtcccccaggctagagtgcagtggcatcatctcagctcactgcaagctctgcctcctgggttcatgccattctcctgccccagcctcccaagttgctgggattataggcgcctgccaccacgcccagctaattttttgtatttttagtagagacagggtttcactg

SEQ ID NO: 228377 - DNA, 582 bp, Homo sapiens
aagacaatgggataaatgtctccagggcatgccagaggtcttcacggcccctcccatcactggcctagagatctaagaggaaaaaaattgtttcatgggctgggcccagggccttgctgctttgcacattctcaggacttggtgccctgcatcccagccatggctaaaaggggccaatgtacagctcaagccattgcttcagagggtgtaagccctaagccttggtggcttacacatggtgttgggcttgcaggtgcacaaaagtcaagaattgaagtctgggaacctccatctagatttcagaggatrtatggaaacacgtggttgtccaggcagaagtttgctgcaggggtggcgccctcatggagaatctctgctagagcaatgcaaatgggaaatgtaggatcagagcccacgcacagagtcaccaatgggacactgcctagtggagatgtaagaagagagccaccatcctccagacaccagagtagtagatccactgacagcttgcaccacgtgcctggaaaagacagagatgctggatgccagcctgtgaaagcagctgggagtgggactgtaccc

SEQ ID NO: 228378 - DNA, 582 bp, Homo sapiens
aagacaatgggataaatgtctccagggcatgccagaggtcttcacggcccctcccatcactggcctagagatctaagaggaaaaaaattgtttcatgggctgggcccagggccttgctgctttgcacattctcaggacttggtgccctgcatcccagccatggctaaaaggggccaatgtacagctcaagccattgcttcagagggtgtaagccctaagccttggtggcttacacatggtgttgggcttgcaggtgcacaaaagtcaagaattgaagtctgggaacctccatctagatttcagaggatatatggaaacacgtggttgtccaggcagaagtttgctgcaggggtggcgccctcatggagaatctctgctagagcaatgcaaatgggaaatgtaggatcagagcccacgcacagagtcaccaatgggacactgcctagtggagatgtaagaagagagccaccatcctccagacaccagagtagtagatccactgacagcttgcaccacgtgcctggaaaagacagagaygctggatgccagcctgtgaaagcagctgggagtgggactgtaccc

SEQ ID NO: 228379 - DNA, 570 bp, Homo sapiens
tgtagagtctagaagattttattacatgattgtcagtttctcaaaaccactgacctcccacaataaccctaaactcagaagtaagtggttttcttaaaccagaagaatgaaattaggagcaggtgagtacaaacataaacaaggtccactctgttggtgatgtagaaattgaaagtgacattttagacagtgccaacacattaaaagcaccaataacaaacattgaagattatatttttctggaagttgagaaagccagcatttaccttaatccttcatttcaytgatgcaaagtaaaaaaaaaatcagccatgcccactgctttaaatatcagcgccaccttcacgtggagtcaaatgattaaaaagcgaagggaaacctgaagctctttttgaaaagtaatttccatggacacacctggctggaggcaggatcgctggccttcatctctacatctgctaaagaacctcataacactgtgacttctatgacacagcttttcacagcctggcttatactatgaataatattatttaaaatagaaacaaggtcttctttacctttattgca

SEQ ID NO: 228380 - DNA, 460 bp, Homo sapiens
tccatgtcaatgtatatatttgcaaaagaatttaaaatttcatttaatcccagtttttattatcaactacttctgatcattgatgcttacaataaaataaataattttgatatttgtaatattacaaactgtgtatctccttacggggagaaaaaaattcgttttattagctactaaatcttttacgtttgttaagagtccacaagatttttcgaggctgaattcaattccaattccctrccttcacattaaagtctacataaactgctccatatgaatagttatttaatattttattacagcttttaattttactatcccctcagtaacttatttccctgcttacaaaccttatggtcaagaaattcttcccaacagcaaatataaattttccattctggtttcctagcattaaaagacttattaaattttccttacctccaccctgacccattcttct

SEQ ID NO: 228381 - DNA, 554 bp, Homo sapiens
tattccatgtcaatgtatatatttgcaaaagaatttaaaatttcatttaatcccagtttttattatcaactacttctgatcattgatgcttacaataaaataaataattttgatatttgtaatattacaaactgtgtatctccttacggggagaaaaaaattcgttttattagctactaaatcttttacgtttgttaagagtccacaagatttttcgaggctgaattcaattccaattccctgccttcacattaaagtctacataaactgctccatatgaatagttatttaatattttattacagcttttaattttactatcccctcagtaacttatttccytgcttacaaaccttatggtcaagaaattcttcccaacagcaaatataaattttccattctggtttcctagcattaaaagacttattaaattttccttacctccaccctgacccattcttctctaacaaaaccacaatcttttacattctcccttccatttctaatgccatcttttgtcatgcattagctagtaccatataagctgctgcaat

SEQ ID NO: 228382 - DNA, 494 bp, Homo sapiens
tctatgagcctgtaaaatcaaaagcaagttagtactgtcctagatacaatgtgtatacagacattgggtaaatatagccactccaaatgggagaaattggcccatttgggccaattggcccaaaacaaaggggctacaggccccatgcaagccctaaatccagtggggcagtcaaatcttaaagctscaaaatgatctgtgactctgactcacatctaggtcacgctgatgcaaaaggtaggttcccattctcttgggcagatccacctctgtggctttgcagggtatagccccctcctggctgctttcatgggctggcattgagtgtctgcagctttttcaggtgcacagtgcaagatgtcaatggttctaccattctggggtctggaggatggtggccctcttttcacagctccactaggcagtgcctctgtagggattctgtgtgggagcgctgatcccacatttctcttttgtactgccctagcagaggt

SEQ ID NO: 228383 - DNA, 480 bp, Homo sapiens
agatccacctctgtggctttgcagggtatagccccctcctggctgctttcatgggctggcattgagtgtctgcagctttttcaggtgcacagtgcaagatgtcaatggttctaccattctggggtctggaggatggtggccctcttttcacagctccactaggcagtgcctctgtagggattctgtgtgggagcgctgatcccacatttctcttttgtactgccctagcagaggttytcaatcagagccctgcccctgcagcaaatttttgccttggcatccagatattttctgttttttttttttttttttttttttttgagatggagtttcgctcttgttgcccaggctggagtgcaatggcgcaatctcggctgaccacaacctctgcctcctgggttcaagtgattctcttcctgcctcggcctccccagtatttgggattacaggcatgcgccactatgcccagctaattttttg

SEQ ID NO: 228384 - DNA, 450 bp, Homo sapiens
gtctgcctctcctagtccactgacttaaacgttaatctcctttggcaacactctaacagacacacctaggaataatactttgcatccttcaatccaatcaagttgacactcaatattaaccatcacagtgatgctyactttcatgtgtaaatatttcggaataattgtttcttcctatttgtgattttatgcattttttacatctttgaaaatccatatgcatggtatatgcaggaatttaccatgcatatagaaatagagtgatatttattttttgttaaatagctgtaggcaaaatttaccagctattaattctttgtggtcaagcctttgtgttgggaatatggatgtgttgggtttcttattttgccttctgacctcaatcaagtctttgtcttttcatgttcttttttctgttctgagaggctgactcccttggattgtgttact

SEQ ID NO: 228385 - DNA, 450 bp, Homo sapiens
gtctgcctctcctagtccactgacttaaacgttaatctcctttggcaacactctaacagacacacctaggaataatactttgcatccttcaatccaatcaagttgacactcaatattaaccatcacagtgatgctcactttcatgtgtaaatatttcggaataattgtttcttcctatttgtgattttatgcattttttacatctttgaaaatccatatgcatggtatatgcaggaatttaccatgcatatasaaatagagtgatatttattttttgttaaatagctgtaggcaaaatttaccagctattaattctttgtggtcaagcctttgtgttgggaatatggatgtgttgggtttcttattttgccttctgacctcaatcaagtctttgtcttttcatgttcttttttctgttctgagaggctgactcccttggattgtgttact

SEQ ID NO: 228386 - DNA, 549 bp, Homo sapiens
agcggttactggaacccaacargtgtggttgtaggaaatgggtctcagataagagctgtgcctttgggaaaggaacattgttactgcaacatataccctgaaagcagaaatggtgacataacttgcagggcccagtgcaaaatgaaaacgaaggccccttgctcaaaaattagtccgagttccaagatggcaacagtaggcggttaaaccaagtgtggagcctttctgagcgtggggccctgtgcaactgtacaggctgagtgaccatgaagctggcttgcctgccagggaagatgctggaggaaaaacaccctaaacgactctgtcttccagccctctgactcttgccaatggctccctttgcccatacccaagtagtagtcaaaatcgaggagcctgattgaagccctccatgatggtcaggtgccggaggggagtgaacagtgcatctggaggagctggggagatctagctccactatggagggccattagaaatttttaagcagaatggcatgtccaatttatttttagaaagagctttttggca

SEQ ID NO: 228387 - DNA, 549 bp, Homo sapiens
agcggttactggaacccaacaggtgtggttgtaggaaatgggtctcagataagagctgtgcctttgggaaaggaacattgttactgcaacatataccctgaaagcagaaatggtgacataacttgcagggcccagtgcaaaatgaaaacgaaggccccttgctcaaaaattagtccgagttccaagatggcaacagtaggcggttaaaccaagtgtggagcctttctgagcrtggggccctgtgcaactgtacaggctgagtgaccatgaagctggcttgcctgccagggaagatgctggaggaaaaacaccctaaacgactctgtcttccagccctctgactcttgccaatggctccctttgcccatacccaagtagtagtcaaaatcgaggagcctgattgaagccctccatgatggtcaggtgccggaggggagtgaacagtgcatctggaggagctggggagatctagctccactatggagggccattagaaatttttaagcagaatggcatgtccaatttatttttagaaagagctttttggca

SEQ ID NO: 228388 - DNA, 560 bp, Homo sapiens
tcatactgaatcctttttgctgagaagtcacttgctcatggggcttgtcttattgtctttttgaagacaggaccttgctgagtgggattgctaaacggagcacagtgctaaaaatctcctgggttaaatgtcaccatactcccatcagggcctggagcacttgctctcagaatttacaaacattaactcatgttggcgctctgtgttgcccaaggagagcatctctacaatttatgaaattctattttactgccagaagtcagcaaagagaaaaagaaagaaagagaggcagaaagagaaaattccacagtcatatttcaaacaccaagggatagatttttttcttaagaatataagatttacaagctccaaacaggagtgaaatagtttgcagaagctctcacagcaaatgaactggtagagttcagattcaaatcctgatctggtgccaagggcaaagcaggtggtctttaatcctaccaggcttctctctgtgagaaggggacatgcttactgtggcctcagcagacagagyaggctgcgtgggatctgggagatct

SEQ ID NO: 228389 - DNA, 603 bp, Homo sapiens
gacaccaacagccttttcagaaggtttgacctaattgttgtagagtattcctactttggtttttctctgtaagagtttgttataaattagcattattgckttcctaaatgtccagaagaatatattggcaaagctattgggttttatagatcatattctttaatccttatgtggctttcagattttctatttttgtcccaatattggtaagttatacttttatctaacaaatttaaacatttcctctaaattttcaaaatattgttttaaagttgttcatcacaaatggagctggaggccatcatccttagaaaactaacgcagccagaaaatcaaataccacattctctcacttgtaagtgggactaaatgatgaggacacacgaacacaaagaacgaaacaacagaccctggggcctacttgagggtggagggtaggaggagggagagcatcagtcagaaaaaaaataactgttgagtatttggcttggtacctaggtgatgaaataatttgtacaacaaacccccatggcacaagtttgccaatataacaaacctgcgcatgtacccctgaacctaaaataaaagttaaaataagtaaat

SEQ ID NO: 228390 - DNA, 234 bp, Homo sapiens
agatcttcttatgatgaattatctcagtttttgtttccataattatttatttttttcttcaacttttattttgtgttctgggttacatgtgcargatgtgcaggtttgttacataggtagtttgctgcacagatcaacccatcatctagctgttaagcccagcatccattagctattcttcttgatgctctcccaacccccaccacacctgacaagccccagtgtgtgttgctc

SEQ ID NO: 228391 - DNA, 426 bp, Homo sapiens
gtgtcctaaattgtgaggtgccattggagtggggccatcagaacaactctgcttggctccctggattcagcccccttcctaggggaatrcacgaatggaactcccacctcaccagaatccccagggccagagtacacaaaactcctgggtctctgtgcatgcgtgagtgtccacttccccaagactccacacagctctttgcttcggacctaagtctctggtggctcaggtatctcctgatccacaggttgcaaagatacatgggaaaaaagtggtttcctgggcagggcctcacagtcactcactacttcccttggctgggggtggggtctccctggctttgtgctgcttcaggtgggttgtcgcctcaacctgcttttccttgctctccatgggtcaagctgtctgcctagaacaagaaagaac

SEQ ID NO: 228392 - DNA, 445 bp, Homo sapiens
gaattccaagccagtgtgtcctaaattgtgaggtgccattggagtggggccatcagaacaactctgcttggctccctggattcagcccccttcctaggggaatgcacgaatggaactcccacctcaccagaatccccagggccagagtacacaaaactcctgggtctctgtgcatgcgtgagtgtccacttccccaagactccacacagctctttgcttcggacctaagtctctggtggstcaggtatctcctgatccacaggttgcaaagatacatgggaaaaaagtggtttcctgggcagggcctcacagtcactcactacttcccttggctgggggtggggtctccctggctttgtgctgcttcaggtgggttgtcgcctcaacctgcttttccttgctctccatgggtcaagctgtctgcctagaacaagaaagaacttgg

SEQ ID NO: 228393 - DNA, 587 bp, Homo sapiens
taacaacaactgtagggaaaattcttttttaattttaattttaattttttatttcagtaggtttttggggaacaggtggtgtttggttacactgataaattctttagcagtaaatttagtgattttggtgcacctatcacatgtgcagtgcacactgtaccaaatgtgttgtcttttatccctcatcccctcccaaccttttccctgagtccccaaagttcactgtatcgttgttatgcctttgcgtcctcatagcttagctccctcttatgaatgagaatatacgatgtttggktttccattcctgagttacttcacttagaataatggtctcaaattccatccaagtgactgtgaatgccattgttttgttctttttatggctgagtagtattccatatatatattttctttatctactcattgattgatgggcatttgggctactttcatatttttgcaattgtgaattgtgctttcataaacatgtgtgcaaatatctttttcgtataacaacttcttttcctctggatagatacccagaagtaacattgctggatcaaatggcagatttacttttagttctt

SEQ ID NO: 228394 - DNA, 587 bp, Homo sapiens
taacaacaactgtagggaaaattcttttttaattttaattttaattttttatttcagtaggtttttggggaacaggtggtgtttggttacactgataaattctttagcagtaaatttagtgattttggtgcacctatcacatgtgcagtgcacactgtaccaaatgtgttgtcttttatccctcatcccctcccaaccttttccctgagtccccaaagttcactgtatcgttgttatgcctttgcgtcctcatagcttagctccctcttatgaatgagaatatacgatgtttggttttccattcctgagttacttcacttagaataatggtctcaaattccatccaagtgactgtgaatkccattgttttgttctttttatggctgagtagtattccatatatatattttctttatctactcattgattgatgggcatttgggctactttcatatttttgcaattgtgaattgtgctttcataaacatgtgtgcaaatatctttttcgtataacaacttcttttcctctggatagatacccagaagtaacattgctggatcaaatggcagatttacttttagttctt

SEQ ID NO: 228395 - DNA, 594 bp, Homo sapiens
taaccaaactcttttatacagccctcaaaatgctgcctccaagtatcagaagcatgtcaggtaacctggacaaggatgaggacataatgmtttttgttatttcctgcagatccaagtttgatctgttataattttcctgcaggctgcagaacatcctttagcatttcttatagtgcaaggctgctggcaacaaatttctcagttctcttttatttgaaaataactttatttccctcttaagatatttttctgtatatagaattctgggttgatactttggagttttttttttattgccatcccattgtgttctggcctccattgcttctgatgagaattcacaaatcattcttaatggtttttcccccagtttatgatgtgtcttttttttgccctgtgtctgctttcaaaaatatctttttggtgttcttcagtttgactatggccccttagatatcttctctttctattggtcctgcttctgatttgctaagcttctcggatttataagtagatttttaaaatcaaattcaaaaaaattttgccattgtttcttccttatttgttgtgtgtgattttcagatcgaaataaat

SEQ ID NO: 228396 - DNA, 594 bp, Homo sapiens
taaccaaactcttttatacagccctcaaaatgctgcctccaagtatcagaagcatgtcaggtaacctggacaaggatgaggacataatgctttttgttatttcctgcagatccaagtttgatctgttataattttcctgcaggctgcagaacatcctttagcatttcttatagtgcaaggctgctggcaacaaatttctcagttctcttttatttgaaaataactttatttccctcttaagatatttttctgkatatagaattctgggttgatactttggagttttttttttattgccatcccattgtgttctggcctccattgcttctgatgagaattcacaaatcattcttaatggtttttcccccagtttatgatgtgtcttttttttgccctgtgtctgctttcaaaaatatctttttggtgttcttcagtttgactatggccccttagatatcttctctttctattggtcctgcttctgatttgctaagcttctcggatttataagtagatttttaaaatcaaattcaaaaaaattttgccattgtttcttccttatttgttgtgtgtgattttcagatcgaaataaat

SEQ ID NO: 228397 - DNA, 591 bp, Homo sapiens
ttgatgagtattttgctttgctgaagtttagtttttcatttgtgaagacagctcattcattgggtcactgaattccagaaacatgttgtgaacatttatatcaatcataattcataagatgctgtagaaagtgaaagtcattgcagagaaacttagttctcaagggatatagcatctaatcacctgctaacaagcaacaaatagtataataatttattattcacaaaattatacttgatctttaaaaacaaaatatgtaaatgaatagcaaagaaatgttaaaatgattgaagtctgttcatgaaatcagtcccaattgaagttagttgagaatgattcatggaaaagataagttagttgaaattaggataaataggtgacagataaagaataagaatatatcwggttattagacaatacaggaaaatacaatttttccatcatttattcacttaatgatattcatttaggacacatttacacctgttgtgggactacaataaggaaaaaaacagatgtttctgtcttcatagtttagacgaggggtcagctaactttttctataaagggtcagatggtaaatatggtacc

SEQ ID NO: 228398 - DNA, 591 bp, Homo sapiens
ttgatgagtattttgctttgctgaagtttagtttttcatttgtgaagacagctcattcattgggtcactgaattccagaaacatgttgtgaacatttatatcaatcataattcataagatgctgtagaaagtgaaagtcattgcagagaaacttagttctcaagggatatagcatctaatcacctgctaacaagcaacaaatagtataataatttattattcacaaaattatacttgatctttaaaaacaaaatatgtaaatgaatagcaaagaaatgttaaaatgattgaagtctgttcatgaaatcagtcccaattgaagttagttgagaatgattcatggaaaagataagttagttgaaattaggataaataggtgacagataaagaataagaatatatctggttattagacaatacaggaaaatacaatttttccatcatttattcacttamtgatattcatttaggacacatttacacctgttgtgggactacaataaggaaaaaaacagatgtttctgtcttcatagtttagacgaggggtcagctaactttttctataaagggtcagatggtaaatatggtacc

SEQ ID NO: 228399 - DNA, 387 bp, Homo sapiens
gtgggctgaaggtggtctggatgaaaattaagacctgtggatgagaaaacttggggtgaaagctttaaagacatgtcctgattactgtttaaattactcagctgttgtagcttgagaacagtcacaaataatacctagtggaataggataagcttgtttctagaaaattctatttatgggtagtgaaacttgaattgtgcataagtttaaaacatgacaaaatattattcttaaaattttgtttagccatttaaaaatgtaagaaacattcatagctcatacacgaattggtagtgggatcacagggctcacatttgactcacaagcaatagtttactgactcrtggtctatgaagaaataaaggatatgtagtttttcaaactatc

SEQ ID NO: 228400 - DNA, 468 bp, Homo sapiens
gatgctagcctgcatttaaaacaaatctagcctcaatcataaacaactccaatgaggtattatggaatacataatatactaatattatatatttgtttaatataaatcacaaacattttatcttgcttgtactctttaaagtcaattatgccaattaaacattgaagaattgattcttataaatctaagtatattaacattttaatttacagttaatgcgttctctgttttataccaccctactcagaggacggacaaagacttacygatttatattataagatccaaaccccagactatggttgactgtaccaagaacgaacactgacccaaattaggccaatcaaatcctttttgccagatttttgcattggaaacataattcattttaatcattttggtttacttgaattgaggtcttggtttacttgaactgaggacttgagaaatctggaatgctgaagtgga

SEQ ID NO: 228401 - DNA, 555 bp, Homo sapiens
attgtttgttttgttggcttcctgaatggtctatgtttatgccaaatttctgtttcatttattttggtctctttttcatgtgttaatctttactctaacattcggtgtttctctgctgccagcagacattcaaggaaattcattaaaaagaaactggagtgtattgcataatattgagaattacagagtggtgtgactcagcaaaatgactgggcagaaagttgctttcgttaaggaaattmccaaatgacaatagatataggtcttttttcatgggcaattctgattctctgagggaggtgagtgaggggaatgccaatttgtttattcccaaatatgtgtacatgcataaatgctcatgtaaactcaactgccagaattccagattgcagtggaatacagaatgagatggaggatttccatgaagcaacatgctttctctgctgcatacactgtatgtaggtggaaggctcttgtttaagttgctcatgatacatactcttttatctccagcataaggttggagaaggaacatgaggatccaagctgctcatc

SEQ ID NO: 228402 - DNA, 627 bp, Homo sapiens
ctttttctttcttctgatgctttctcagagtcacttgatgattaaaacctcctttgtgcttccatctccccagctagcattgctcttttaagaagcaccttcagctcttctgtgtatacttcagattctgccaagttgctctcacaacaactttcagcttctctccgacacatgaacatcttttcytgggagttcatctgaggtttcagtttggtcatattatcttacttcattacttggagagtattgttaacattactggtagctgtaattagcaaattggcgcacctctcattcttccaggaggaattttccttgtgtgtaaggaggagtgaggagtattactgttctctcactaggtgcagaaagaagccctgggactcagagactccgcctactccagttaacactttgcatttcttgggcttgagaaaaagcactgaccacatatccttgtctctggtactttccacaatagaccagttctgttccaaaaaagagaacagctgtaacaacatggaattgtgaaacaggctgccctgtagcaagacagaaatgtgtgtgcatctatctgcctatggggagtccgtgatgcctcttactgagaaaactatcttcaggctctgg

SEQ ID NO: 228403 - DNA, 627 bp, Homo sapiens
ctttttctttcttctgatgctttctcagagtcacttgatgattaaaacctcctttgtgcttccatctccccagctagcattgctcttttaagaagcaccttcagctcttctgtgtatacttcagattctgccaagttgctctcacaacaactttcagcttctctccgacacatgaacatcttttcttgggagttcatctgaggtttcagtttggtcatattatcttacttcattacttggagagtattgttaacattactggtagctgtaattagcaaattggcgcacctctyattcttccaggaggaattttccttgtgtgtaaggaggagtgaggagtattactgttctctcactaggtgcagaaagaagccctgggactcagagactccgcctactccagttaacactttgcatttcttgggcttgagaaaaagcactgaccacatatccttgtctctggtactttccacaatagaccagttctgttccaaaaaagagaacagctgtaacaacatggaattgtgaaacaggctgccctgtagcaagacagaaatgtgtgtgcatctatctgcctatggggagtccgtgatgcctcttactgagaaaactatcttcaggctctgg

SEQ ID NO: 228404 - DNA, 582 bp, Homo sapiens
ttctctgagtttcaatttgggataccagaaacacattgtccccaacagaggccaaaacttccttccctaagcttttgcaggactccaaaagcttcttccaggaccccaggattttgtcaagggagtttggggggcctccgtggagcaccttgggctctccaagaatttctggggcagataattgtttctacagtaagatgaagggtttatgcaccaagaaatctgttagatgttcctgttagacagttcctaaatcagggactgtgtaaacatacttttaaaatgtcactaagcatttagtgttattttcatcaagatttttatgtatttaggtcctacctctgccactaaactgtaagcttcttgaaggcagaatcaatatctccatcatcttttcattactcccagtaaccaggtacattattggcctcaatagatcctgattgatttgattttcatttgaatgtcattgttgtcttggaaatggtgatttgacctattatattttaacaarcaattaaataacaaacgtgtatattaaggagcccctttcccctctgtgtttcttttgcatactaacaa

SEQ ID NO: 228405 - DNA, 432 bp, Homo sapiens
gctcaacaggggcaatattgacyccaagcaggcaaaattgatcctgggggacagagaagcagcacaatgaaaactccattggtattacatgatttgtaaccctctaaaaagccattaatatatgtgtggtaattaaattttatggggtgaggtttatgaaggaaaaatatcttaaaaatgccatataggtataattaaacagttgagagacactgtcgtggacacatagcagaggacagaaagacaagatgtctactcaggtggaatttatgttatacaaggaaaagacagttcaacacatgaatacacaatcaacatttgagatcgtgaaaaatgtcctgaataaaccaaggtaaataaaacgagatttgtgttagattaacagagatgctactttaaattggaaagttatgattcacctttctactgata

SEQ ID NO: 228406 - DNA, 416 bp, Homo sapiens
tattgactccaagcaggcaaaattgatcctgggggacagagaagcagcacaatgaaaactccattggtattacatgatttgtaaccctctaaaaagccattaatatatgtgtggtaattaaattttatggggtgaggtttatgaaggaaaaatatcttaaaaatgccatataggtataattaaacagttgagagacactgtcgtggayacatagcagaggacagaaagacaagatgtctactcaggtggaatttatgttatacaaggaaaagacagttcaacacatgaatacacaatcaacatttgagatcgtgaaaaatgtcctgaataaaccaaggtaaataaaacgagatttgtgttagattaacagagatgctactttaaattggaaagttatgattcacctttctactgat

SEQ ID NO: 228407 - DNA, 544 bp, Homo sapiens
taaaggggatatgtggagcctcctaaaaggaggaactaaacctggtgtgtcgaggatgaggcaaggatgggatggacaatcgggatggagaatgaggctggagagtaggtggagaaagatcacagaagagccatgagaaatagcttgaactctatctcgtaggtagcaggttttaagtaaaaggtgacttagtcaagtatgagtttttaaaaaactttccttgggaactagctgaagaagatcagaggatgagcacaacaacagtgaaagctgtcagaaggctgtggtagcccagagtgacagatgtttttgaggacgatgataacgtagtctgtcagcactactgtaacaaaatactacagcctgggtcatttatagagaatagaaatgtgtttctcagagttttggagcctgggaagtcccagatcaagacaccggcattgttgtctagtgarggctgctccatgcttccaacatggcaccttgtttctgtgccctcacatggcagaaggcaggagggcaagaggatcaaatgctgtgggaa

SEQ ID NO: 228408 - DNA, 584 bp, Homo sapiens
tcatttgtttaacaaatatttattgcacacttctacagtctgagttctgttcttggcattgaagaaacactggtgaataaacatgtctctgaccttggattttaatagagcacgtaacaaataaaaataacaaaaaaattacataaaatcatctcaggaggtgataggtgctacaagccaacagtacagcaggatgggaagctcataagtgatgagaaggatggtattaattaaggtggtcagagatracctcttgaggaggtgtcatttgagcagaaagatgaataagatgaaggaacaacccatttacatcatagggacaacatgacaggcagagggaaacacaggttcaaatctcaggagacagaaaaatttgacatgctagaatcgcaaaagcacactgagatcggagtggaggacgtgaggacaagagcgagggaaaattaggtccaggcatatcacagcagatttattgagttctgtggcttttgttctagtgttacaggggggttactgggaagatttagcgagagagtaatgtgatctgatttccgttgttaaagagtatgctggttgctgggtga

SEQ ID NO: 228409 - DNA, 556 bp, Homo sapiens
atatttacatataatcaggatgttttaatatatttaatgctataatttaaactctgataatttgagaggtaagatatttcattttacttaaagcattgtttatttgtaattgtgataaaatacataacataaattttgccatcttagccattaagtctacagttcagtagtgttaagtgtattcacaccattgtgcaatgaatctacagaactttttcatcttgcaaaactgagactgtgtacccwttaaacaattcctcatcactgcattccttggagtggtgtcacaatcactattctactttctgtctgtatccattggactactctagtatctcatataaatggaatcataagtattgttttactgggactggtttatttaacttagcataatgtcctcaaccttgaggacatgttgtagcatgtgtccgacttccttcccttttaaagctgaacaatattctattgtgtgtatataccacatttaatttatttattcatctatcaatgaacatttggttacttgtacctattggctattgtgaataatgct

SEQ ID NO: 228410 - DNA, 556 bp, Homo sapiens
atatttacatataatcaggatgttttaatatatttaatgctataatttaaactctgataatttgagaggtaagatatttcattttacttaaagcattgtttatttgtaattgtgataaaatacataacataaattttgccatcttagccattaagtctacagttcagtagtgttaagtgtattcacaccattgtgcaatgaatctacagaactttttcatcttgcaaaactgagactgtgtacccattaaacaattcctcatcactgcattccttggagtggtgtcacaatcactattctactttctgtctgtatccattggactactctagtatctcatataaatggaatcataagtattgttttactgggactggtttatttaacttagcataatgtcctcaaccttgaggacatgttgtagcatgtgtccgacttccttcccttttaaagctgaacaatattctattgtgtgtatataccacatttaatttatttattcatctatcratgaacatttggttacttgtacctattggctattgtgaataatgct

SEQ ID NO: 228411 - DNA, 615 bp, Homo sapiens
tggtaccacaatcagtagttgaagtaaacrttttagatgtgaaaaagttcttaatgattcctgattctttgtgacacacagaactaatcactttctgtactgaaatttcatgaaattttttctaataatattgtaatattgtattatgatgtgtttgtgtgccttgaagaactgtgcctatctagcacaagtgaaatatgtaatggtaaaaaatttggatttggaatcagataggcttgaagtaacatatattagggttcaaatcctggtttccagtttaagagttgggtggactttgtcaaatttctcagtattcccaagcttctttcatctgtaaatagaaatagcactatttaaattacaaaatgcgtcaatttatacaaaatctcagttcaatgtttagtagagttataaacaatagttatttttttatgtgtgctgtagactgaatgtttgtgtctgttcaaaattcatatgttgaaacctaatcccaatgtgatcacttttggaggtggaaccttttcaaagatgattaggtcatgagagtgaagctcttctgatgggattaaggcccttataaaagaaactcagagaccgaaacacaaagatgagtca

SEQ ID NO: 228412 - DNA, 615 bp, Homo sapiens
tggtaccacaatcagtagttgaagtaaacgttttagatgtgaaaaagttcttaatgattcctgattctttgtgacacacagaactaatcactttctgtactgaaatttcatgaaattttttctaataatattgtaatattgtattatgatgtgtttgtgtgccttgaagaactgtgcctatctagcacaagtgaaatatgtaatggtaaaaaatttggatttggaatcagataggcttgaagtaacatatattagggttcaaatcctggtttccagtttaagagttgggtggactttgtcaaatttctcagtattcccaagcttctttcatctgtaaatagaaatagcactatttaaattacaaaatgcgtcaatttatacaaaatctcagttcaatgtttagtagagttataaacaatagttatttttttatgtgtgctgtagactgaatgtttgtgtctgttcaaaattcatatgttgaaacctaatcccaatgtgatcacttttggaggtggaaccttttcaaagrtgattaggtcatgagagtgaagctcttctgatgggattaaggcccttataaaagaaactcagagaccgaaacacaaagatgagtca

SEQ ID NO: 228413 - DNA, 535 bp, Homo sapiens
tttgacttattttatcttaattagacaaataatcctcaattgcaacaaatatttatttagagtttcttggtgcttgtctcaagaagggacagtgaggaatcgaagtataatgcccaaccctcaaaaaacaaatagagtttctgggcacattctatgtactaggcttggtgttacggagacacttgcacagacagtctgcttatttagtaaatgctctcatttttatgcataagtaaataacctaaatttatatatccagaaagtatgagtcaaaattcaaatcctgttttaattatgaacccaaagctctttctgtatatctattggtatacatagcatagcatctatacaagtagtatatctattaacagacagawattcacatgcaaagaccagtaagaacatacggtagcaatcaataaagggcaggggaatagtgacagaaaataaccacaagtgtactgtacctgtaaatgttgagatatatgtaacgcactctctccctttccataattcagttctaatttccacctta

SEQ ID NO: 228414 - DNA, 531 bp, Homo sapiens
aaagaaaggtcaaacaaagcaaacttgattccatgttttcaaaacgatgagggaaaagggaacacatgggaatgtgttttttttttaatggaagaaaacaatataaatcaatacacctcaggaaatactgactaaaatattgcttttaattggtacagattcatattgaactaggtaaatatcttaatattacatctcttccttgtcwatggaaaaccaatatgttaatgttagatgcatgttatattttggaagtgcagtgtgaaacaatagcttaaaaattataaataaaaaagaaaagagtacaaaaatgctctaaagtaaatgatagaactcatttcatccgtagttgcagaaagaaccaaatattgctaactctggatgacctctgacaatattctgggtttgaaaatgtttcaaaacacaaattcctttgaggaatttggctatgtaatttaacctatttgattctcattttttgttgttgttatattaaagtatatctatcctagagcaatcttataaatattc

SEQ ID NO: 228415 - DNA, 187 bp, Homo sapiens
actacaatcataggtcagattttgaaaagaaaaaccaactgctacttacttccactcctcaattttcttcttggtcstctggtacctaaactcagcttggccagtctgctaagactacgctaagaaagtgaaaaatacacactaatcatcaaggcctgaaaagtaacatatctttgataaccctata

SEQ ID NO: 228416 - DNA, 602 bp, Homo sapiens
gtgtgtaaatgttattcaatcttaaaaggaaaactgttaaacaacaggttgactttttggaacaggtcactttatcccctaggagcaagggcatcatctaggctgtaattattgattttgcatattcttgctacaaatgacttgaggtagtgtgcataaattaatttgatgttgtaaactgtaagtcactcatgtttaaaytctttcatcctaattgcagagaaattcaaatttaaattcatttcctccaatttgtttgcatcctaattaaatgatagccagggatagccctggaaatagtgaatatattcataaaaacacattgggaatccactgtggacatggccagtccgtggtaactgacataatctgtgtatagacacttacaagctcaacaggctatgtgtaaacaagctagctaattatatccccaaggaatggggttgctaagccctgtattagtcacctttcattggaaaataaaatatcattttgaaattgagcatcttattggtagctttgcatattaagtagtaaaattttaattcccctcccaggcaaaaaattaaaagcaacatggaaaaaaaaagaaaaataagagg

SEQ ID NO: 228417 - DNA, 602 bp, Homo sapiens
gtgtgtaaatgttattcaatcttaaaaggaaaactgttaaacaacaggttgactttttggaacaggtcactttatcccctaggagcaagggcatcatctaggctgtaattattgattttgcatattcttgctacaaatgacttgaggtagtgtgcataaattaatttgatgttgtaaactgtaagtcactcatgtttaaattctttcatcctaattgcagagaaattcaaatttaaattcatttcctccaatttgtttgcatcctaattaaatgatagccagggatagccctggaaatagtgaatatattcataaaaacacattgggaatccactgtggacatggccagtccgtggwaactgacataatctgtgtatagacacttacaagctcaacaggctatgtgtaaacaagctagctaattatatccccaaggaatggggttgctaagccctgtattagtcacctttcattggaaaataaaatatcattttgaaattgagcatcttattggtagctttgcatattaagtagtaaaattttaattcccctcccaggcaaaaaattaaaagcaacatggaaaaaaaaagaaaaataagagg

SEQ ID NO: 228418 - DNA, 593 bp, Homo sapiens
gctttgcatattaagtagtaaaattttaattcccctcccaggcaaaaaattaaaagcaacatggaaaaaaaaagaaaaataagagggaatgtggtaagatatttcatttcaaattcrttaattcatatgtttctcatttgatgttttaataagctattgctttcccttcactgaataggtgtgtactgagaactggatgtactgtaaaggataagactattattattaatgtccatggaagttttaagttgccaaacaaccacccatttttggtagaatctctaggggatagatatatttcaagagatattattttactatatcctgtctaacattcactttgcattttgatagctagatatgatacatgtgactgtagcccaagattattatgtatgtctgtaagtggagcatgacatagtaataaagattccttgagtggcatgatggaccatgcctatgtttttggagaattaactttaatgctatagcacaacctgactttcaattatagtttctaactccttggtcttggcatctttagtctcccctaacagaattcttccaaaaagatgacagtggactacaatatc

SEQ ID NO: 228419 - DNA, 593 bp, Homo sapiens
gctttgcatattaagtagtaaaattttaattcccctcccaggcaaaaaattaaaagcaacatggaaaaaaaaagaaaaataagagggaatgtggtaagatatttcatttcaaattcgttaattcatatgtttctcatttgatgttttaataagctattgctttcccttcactgaataggtgtgtactgagaactggatgtactgtaaaggataagactattattattaatgtccatggaagttttaagttgccaaacaaccacccatttttggtagaatctctaggggatagatatatttcaagagatattattttactatatcctgtctaacattcactttgcattttgatakctagatatgatacatgtgactgtagcccaagattattatgtatgtctgtaagtggagcatgacatagtaataaagattccttgagtggcatgatggaccatgcctatgtttttggagaattaactttaatgctatagcacaacctgactttcaattatagtttctaactccttggtcttggcatctttagtctcccctaacagaattcttccaaaaagatgacagtggactacaatatc

SEQ ID NO: 228420 - DNA, 450 bp, Homo sapiens
tgaagctgtaaaaaatagacttgaggaagagaaagagatctagaaaatagaacagaagtaacaatgtatgaagagatattatacaaatgatgttttctgttttctcttttgagtaaaataaatggttttaaaagaaacaacaggaattgagactaaaaacaatgaaaaagaaattgtgattttaaagtttytgaaatacagaaatagatttagggagtagctttcagcatgttaaagactaagctagactcctgataacccataaacacaaaagcttccagatcccactctactggtctgaatcatgtggattaccagaatgcaagcctttcagaaaaggtcatctgttgtttaacaaatggactttgtagctcaatttaattttactcattttagttcagtatcagttttcaacttaggaccaagaaaaaaaaaaaaagatagttttta

SEQ ID NO: 228421 - DNA, 613 bp, Homo sapiens
taaagcttctcaggctttatttttattagtttacattacatccttacttagtgggatctggaaaaccctgaaaatccaattatatcagttagccaaaactagtttttagrtgcattattttaatatattttacatattccagctatagttattttttataaacatgaagaaattatggttttcatgtgtcaaaagtaataattttaaagcagagaaaaccacagcagcggcggtcaagcaagctattcctgatgagcctctccatggaatggcctgcaactttgaggacttactctttgcccgagtgtttttaaacccacagcttcaccatagccataaagaagggtaaggcgtacatgaactctgctcaactcaaacacatggtgaaaagagcactgtatgcttgaggacctttatgcaccacattcagtgacagctgtcagctgtgagcgtaattataagttttcattacaggttttaattcaaaccaatctttatttatttgaaggctaatattaaaatgggcatgtgaaagttgcacgtattacgagcaaaactctgcctaaaaccatacgtatgaacctaaacactcaggcataaacataaaaagcca

SEQ ID NO: 228422 - DNA, 613 bp, Homo sapiens
taaagcttctcaggctttatttttattagtttacattacatccttacttagtgggatctggaaaaccctgaaaatccaattatatcagttagccaaaactagtttttaggtgcattattttaatatattttacatattccagctatagttattttttataaacatgaagaaattatggttttcatgtgtcaaaagtaataattttaaagcagagaaaaccacagcagcggcggtcaagcaagctattcctgatgagcctctccatggaatggcctgcaactttgaggacttactctttgcccgagtgtttttaaacccacagcttcaccatagccataaagaagggtaaggcgtacatgaactctgctcaactcaaacacatggtgaaaagagcactgtatgcttgaggacctttatgcaccacattcagtgacagctgtcagctgtgagcgtaattataagttttcattacaggktttaattcaaaccaatctttatttatttgaaggctaatattaaaatgggcatgtgaaagttgcacgtattacgagcaaaactctgcctaaaaccatacgtatgaacctaaacactcaggcataaacataaaaagcca

SEQ ID NO: 228423 - DNA, 635 bp, Homo sapiens
caataataagaaaatgactacttccacacagttagagggactgaagtcattaaagacccgaagatatacctaatttctttctaccagatgcactttatcaattccgagacagaatatcgccatttcaatagccactctgtttattcacaacaaaatgacatcaaaaatagacttagataagaatgggtttgtttctggttttgttgatagctatatgactttggctaagtcatgagaaaatttacctgataatatttgcttgaatttttttttttttttacttcctctattgatcatatagttacacttagcattgtgttgttcaaaaaagaccacaacttctcattttatgttctctggcgtgggatagatttagttatgacatattacagaacagctgagtgatctgaaatgcaagctaggagggctcctctaagccttaattaataagtcatccctcttcacctcagtgatttaacatcagtctaagccaatgcaatgaaaataatcacttaggcattcaaggwcaaaccttttacttcaattctactatttaaatatattaatacataacttttcaaaagaatgaaagatgattttatatgattcattaggtatctacattccattataca

SEQ ID NO: 228424 - DNA, 381 bp, Homo sapiens
acatcttaatttcttaacaatacctgtctcaattaataccttcttcatggaggtctcataaggaacaaataccatttcagatagatgtcacttatacacatacatatatacatgcaagtgttttgtaagctgaaaggtatttaacattattcataactctgsagtcatctttattttcttttcttcagaattattagattttagggcaaagccatattatagcacagatgacaaaataacctagatgatataattgtttagttttacacaatgtcctgcacaagtctgtgaacactgctggtctttaataatcccacacagggcaaccattgtccttgtgggagaagcatgacatagcacggcaaaaaattgaaagagaaa

SEQ ID NO: 228425 - DNA, 381 bp, Homo sapiens
acatcttaatttcttaacaatacctgtctcaattaataccttcttcatggaggtctcataaggaacaaataccatttcagatagatgtcacttatacacatacatatatacatgcaagtgttttgtaagctgaaaggtatttaacattattcataactctgcagtcatctttattttcttttcttcagaattattagattttagggcaaagccayattatagcacagatgacaaaataacctagatgatataattgtttagttttacacaatgtcctgcacaagtctgtgaacactgctggtctttaataatcccacacagggcaaccattgtccttgtgggagaagcatgacatagcacggcaaaaaattgaaagagaaa

SEQ ID NO: 228426 - DNA, 643 bp, Homo sapiens
tagaaaagtatgtggatggagagacaagtaaaaattccaagtggggataaayggtagaaacaaaaataaatcatgatatggagctagaaagtaaggggataggatgcggaagctacttcagatagggtagtcatggacagccctttgaaatggtgatattttaacagggactgcaataaaatgagagtgaaacatgcatgcattggaagacattatattccataaagagaggacagtaagctcaaagaccttaaggtggaagtagctcaaagattttgaaggacaactgtgttttgcaagagacaagtgtcccagcagcctgggagagtgcctgagaacatttaaccagaaggacaatgtgcaagtttttttttttttttttcagatggagtctcgctttgtcaccaggactggagtgcagtggcccaatcttggcacactgcaacctccacctcccgggttcaagcagttctcctgcctcagcctcccaagtagctgggactacaggcacacaccaccacacccagctaatttttgtatttttaatagagatgggatttcaccatgttggccaggatggtcttgatcctttgacctcgtgatccacccacctcggcctcccaaactgctgggattacaggca

SEQ ID NO: 228427 - DNA, 643 bp, Homo sapiens
tagaaaagtatgtggatggagagacaagtaaaaattccaagtggggataaatggtagaaacaaaaataaatcatgatatggagctagaaagtaaggggataggwtgcggaagctacttcagatagggtagtcatggacagccctttgaaatggtgatattttaacagggactgcaataaaatgagagtgaaacatgcatgcattggaagacattatattccataaagagaggacagtaagctcaaagaccttaaggtggaagtagctcaaagattttgaaggacaactgtgttttgcaagagacaagtgtcccagcagcctgggagagtgcctgagaacatttaaccagaaggacaatgtgcaagtttttttttttttttttcagatggagtctcgctttgtcaccaggactggagtgcagtggcccaatcttggcacactgcaacctccacctcccgggttcaagcagttctcctgcctcagcctcccaagtagctgggactacaggcacacaccaccacacccagctaatttttgtatttttaatagagatgggatttcaccatgttggccaggatggtcttgatcctttgacctcgtgatccacccacctcggcctcccaaactgctgggattacaggca

SEQ ID NO: 228428 - DNA, 643 bp, Homo sapiens
tagaaaagtatgtggatggagagacaagtaaaaattccaagtggggataaatggtagaaacaaaaataaatcatgatatggagctagaaagtaaggggataggatgcggaagctacttcagatagggtagtcatggacagccctttgaaatggtgatattttaayagggactgcaataaaatgagagtgaaacatgcatgcattggaagacattatattccataaagagaggacagtaagctcaaagaccttaaggtggaagtagctcaaagattttgaaggacaactgtgttttgcaagagacaagtgtcccagcagcctgggagagtgcctgagaacatttaaccagaaggacaatgtgcaagtttttttttttttttttcagatggagtctcgctttgtcaccaggactggagtgcagtggcccaatcttggcacactgcaacctccacctcccgggttcaagcagttctcctgcctcagcctcccaagtagctgggactacaggcacacaccaccacacccagctaatttttgtatttttaatagagatgggatttcaccatgttggccaggatggtcttgatcctttgacctcgtgatccacccacctcggcctcccaaactgctgggattacaggca

SEQ ID NO: 228429 - DNA, 643 bp, Homo sapiens
tagaaaagtatgtggatggagagacaagtaaaaattccaagtggggataaatggtagaaacaaaaataaatcatgatatggagctagaaagtaaggggataggatgcggaagctacttcagatagggtagtcatggacagccctttgaaatggtgatattttaacagggactgcaataaaatgagagtgaaacatgcatgcattggaagacattatattccataaagagaggacagtaagctcaaagaccttaaggtggaagtagctcaaagattttgaaggacaactgtgttttgcaagagacaagtgtcccagmagcctgggagagtgcctgagaacatttaaccagaaggacaatgtgcaagtttttttttttttttttcagatggagtctcgctttgtcaccaggactggagtgcagtggcccaatcttggcacactgcaacctccacctcccgggttcaagcagttctcctgcctcagcctcccaagtagctgggactacaggcacacaccaccacacccagctaatttttgtatttttaatagagatgggatttcaccatgttggccaggatggtcttgatcctttgacctcgtgatccacccacctcggcctcccaaactgctgggattacaggca

SEQ ID NO: 228430 - DNA, 586 bp, Homo sapiens
taggtgatctattaaatataatatagctaaaatggtgataatgtaaaatgcatatttaaatatactttaatatgtataaaagcaaatcactggcaggtggaaatccagcctagaatatcattgaaatataatggacctcatgtacaatataattcccttaaattataattaaggtaagatagagattataactataataattttctgagatgtttatatataatgaatctgatatattgttgttttcacttgattggatacgtctttttaaacaatgatttaaaattcaacggcagcatattttatgactaatttcaaggacaaatttatatttcttagaaaataataatatasgcaaagaaggtgtgtagtggtgtgttgtatatattggaaccaaatgaccatgcatgcaacactatggatggtttaataacaataaataggaataagttataagaattgtgcgggtattcactgaatgattttgcatcaataagtaatgttgttttattagaaacattgttgaataaaattaaagacctaaataaatgtaaaaacatcccttgttcatttttaagatagcaaa

SEQ ID NO: 228431 - DNA, 589 bp, Homo sapiens
acactatggatggtttaataacaataaataggaataagttataagaattgtgcgggtattcactgaatgattttgcatcaataagtaatgttgttttattagaaacattgttgaataaaattaaagacctaaataaatgtaaaaacatcccttgttcatttttaagatrgcaaaactctcctatttattgacagattcagtaaaaatcctattaaaaagtcagcttgcttctttacagaaattgacaaactaaactaaaagtcatacggaaattcaagggaaatcaaataagccagtagaatcttgagaaaaaaaaaaaaagttgaaagactcacacatcacaatttgaaaacttactacaaagctacagtaatcaagacagtgtggtactaatgagagtctacaaataaaacttcacatttatagtcaattactttttcaacaaggtgctaagataattccatgaaaaaaaaaaaatcttgtcagcaaatggttctgggacaaaacatgcaaagaaattaaactggagccctacctcacaccatatataaaaatttagtcaaaatagttcaaagacctaaatataaga

SEQ ID NO: 228432 - DNA, 589 bp, Homo sapiens
acactatggatggtttaataacaataaataggaataagttataagaattgtgcgggtattcactgaatgattttgcatcaataagtaatgttgttttattagaaacattgttgaataaaattaaagacctaaataaatgtaaaaacatcccttgttcatttttaagatagcaaaactctcctatttattgacagattcagtaaaaatcctattaaaaagtcagcttgcttctttacagaaattgacaaactaaactaaaagtcatacrgaaattcaagggaaatcaaataagccagtagaatcttgagaaaaaaaaaaaaagttgaaagactcacacatcacaatttgaaaacttactacaaagctacagtaatcaagacagtgtggtactaatgagagtctacaaataaaacttcacatttatagtcaattactttttcaacaaggtgctaagataattccatgaaaaaaaaaaaatcttgtcagcaaatggttctgggacaaaacatgcaaagaaattaaactggagccctacctcacaccatatataaaaatttagtcaaaatagttcaaagacctaaatataaga

SEQ ID NO: 228433 - DNA, 544 bp, Homo sapiens
ctcggctcactgcaacctccacctcccgggttcaagcaattctcctgcctcagcctcccgagtaactgggactacaggtgcacaccaccacacctagctaattttttgtattttagtagagacagggttttcactgtgttgcccaggctgttctcgaactcctgagctcaggcaatccgcccacctcggcctcccaaagtgctaggattacaggtgtgagccaccgtgcccggcccggctttcttttttagattaggaaatcaaggatcacagaagttaagawatgtccccgaatcacacagctaataaacaacagagtcaagatttgaacacaaatcagtctggccccaaagcccctgctcctgacctgtcccatcaggtcttagaggcaacagagcatccagtccagagcctgaaacctacacaagggtgtaggtatagtcaggaaccatccgtatgtaattgcatttatgtataacctactttgttcagaaagcaagataacatttattggaagtgaaaaagaagtatcaaatgagttaga

SEQ ID NO: 228434 - DNA, 548 bp, Homo sapiens
agctaatgagctaaaaataagtaaataataaataaatcacaaaaaaatcttgtaatgttctaagaaaaatttacaaatttgtgttgggctgcattcaaagccattctgggccacatgcaccccatgggccataggttggacaagcttgatttaaggtttcagaaatacaatcatcctagaaagcatcttcagcatgattcagttttgctttctctgagctcatttattcatttcccttgccagttcattcatttctgatgaccaagcataatcagtgctcacaccaaacaccaggagcgccatttcctggttttaaaaaaagggtaaacacaagggtctatatcatgctgaacactgggtgagggggtccrgggggctgttacagagagaatcatgttgtttattttttctctttcaggaattcactgaaacaaacaaaaaacaaaatagtaaactaggcaaagtgacaatgtagatgagataccattatacctgcaaaacaacccaaaaagtaaatgtcttttcagtaaaagaatgccactactttc

SEQ ID NO: 228435 - DNA, 318 bp, Homo sapiens
tttattttccataagactgaatacacacacacacacatatatatgtgaaagtcaaatcagttttcatactataaatcactacaactataaatcactacaaatattttatcatgatctaatcaatgtagtggttcattgggttatctgattttttttccttagaacagaatttccagtgaggtttcttagcaacggcaggtagaaagttttcatgagcaagcytacatgttacattgtgtttgaggcttcactgctaagtaaaaatgaaactgccccaggaaaatgcctattgaacaaatgcaaagccataaattaaaa

SEQ ID NO: 228436 - DNA, 604 bp, Homo sapiens
cctctgttaactaaagaaaattcaggcttttgaagaatctaaagttaggctttatttgtaagtcttactgaggaatgtaacccgggagaggcttctcaagagttgttatactattttaaagtagtattatggcccacagtttatatataagtgatggcggccctgcctgtgtctagcaggtacatcaaatgtgtttagaagtaacattagatacttttgcaccaacctaatacaagttacaatagagtaaaatgtgaggatacatctggttacagatgataaaagcaaaatccttagacattatcttctgtatttggaaaatgcagtgatttagaacctgcgctctaccccgtgtatcatctttagggcattcttccagagggctgctctcagtccttgagtcaggcactttgtgaagttttgttgacaagggattttgttgaaattctgctggcaagccaagcgaacaagcaaagggcttcttacttttgttactttgtctcacaagttcccccttctggtcstaattcaaccctctgttgtatatacaagaccagcagtgattgtattatgtagttgggaaggctcttctctaggaaagtcc

SEQ ID NO: 228437 - DNA, 570 bp, Homo sapiens
tttctattcttagtagtcactcttgggttttgatgagatttgcgattcacttaactcttttgataatactagcgggcatcctggcggctcccattccctctgagcagcagcactgaccccatgtttgtgcaggatagctggaggagatgctgtgctgaaaagaagcacatttgctggcccatcaacattccatactcttggtataaaaccgatttgggccttccatcttactatgcatcttatgtacttagataagggttccttttgagaagccaagaaggatgaagagtgagtaaaaaacaatgatgattcactcccagtttgtaaagaaaatcaagagcttaaattcaccttgtatggttgtatccactcttaatatcactgactcctttctctcaccctcttgaaaactaaattgtctggaaaaaccrttcctagatgctcctgtaaggatttcattcccaaatcttgttagaatttttgtgaattcttcctgtgcctctcaaattataatgttagtggaacagggcagttacatacaagcatgcatggccacaaagcctccatcca

SEQ ID NO: 228438 - DNA, 530 bp, Homo sapiens
ttttttaaggatttttttaaggaacgagcctatatgtcaatagcaattgcttggatcttagaaatcggttcttgtaggtttaaatatrgctacagctaatgacatattgattattgcagtgaagccttgctaaaagcagttttccactcgattgccaatggaaaccagaagaggtcaagcttagtgaggctggggaaactatcggtgccccacaatctttctgaaattccgggattttgaaagagaaccttgaggcaggttccatagaacttatggctacagacacgtggccatgagaatggatctgttctctacaccctgtgaaggcaataagggcaccaggcaccagaaagctatgctgtttatcattgtcccctcttcccaccatctgttcgccctttctcctctcttcctttccctagaatcaagtctttaagatctgaaatttagaagaacattgatctattactctctccacctcatccccagtacaatactagtaataataatatttctcttcaaatggttca

SEQ ID NO: 228439 - DNA, 429 bp, Homo sapiens
ctgtcttgtttatctctgtatccccggcacatattaaaactctgaagtgtactgaatgaataaagcaaatgaatgaatggattaggtcatgcatgaggctcctacatccctcactgattactgactctatcatggtacttatcacactgcactgtaattgcttgtcctggtagactatgaacatcttgaaagcgtctgtctcttatttttgcaaccctagtgattaaaatagtacctggtacytagtaggcattcatgaaatggtttttttaacatacagggttatatatttcatctacagtattaaatggaaaaaatccagaaggatacacccctatattatggttacctctgaagaaagaaataggaatagggcaacaataagacgggaaaaagaaaacttaagactttttacctctataaatctct

SEQ ID NO: 228440 - DNA, 482 bp, Homo sapiens
atttctctctctctctctcacagatagtattagtatcattaatatccattttcccctttttcccacctatcccttcctctttgtgtgggatgtttactgagcacctgctgtgtgccaaataccatgtgagaaggcaaacatcatttctggcttcttgaagctttcatctgaaaaataaggcaggcattaaataagcaattaccataaagtaggggtgtatcacctataaagacgttcctgcttcacagaagtgaaaagtaccactttcktataaagagcttaagggctcttatccaaattgaagaaaagtgacataggaaatcattatcatgataatagcctggttgttacctctacaatggatgcataatggcaaaacccagcatttcaaacctcataaaatgcaatataggaattttcttagggctgtctactttttccttcactggggaaaaaaaaccatcagaatggggtctttttaa

SEQ ID NO: 228441 - DNA, 428 bp, Homo sapiens
ggaattctgtgtaaaggtagagtaaataggccctgaagagcaatgtacatggatttctgtgcacagatttggtgacatttttttaactcctcagagaacattttaactgcctttctagattttgagattgccatctaaatgattttcagataagcgagatttttttttggcccaaatgatggagtcctccataggtgtgaaacagtttcccaggagtccagattgtggattcatttatatttctcacctgtgctccatctgcctccgcagagaggctgtggttcarcatgtgccggctattccgtggagccactgtcaggaacgctcgctttctgcctcccagcctgatattctgctgcatttgtaactctcttggaagacagatgcaattcatcttcctacatctctataaagatccagaaagatat

SEQ ID NO: 228442 - DNA, 405 bp, Homo sapiens
acattccttgccatcctcaaaatttgtttatcctcaatatctcatcaggttcctaactgtccaccatcccccagatgacatcgcatcaccctggctatcttcagcaagaatcctcttaggcgtcagccagaattctcctaacccctgacgtcctcctcttagtacttttccatccactgaccctctcactgatccttggctataagtccccacttgcccatgctgtattcagagttgaacccaatctctctcccctactgcaagatgctgttgcagtggctccyctaccttctgcaatggtcctgaataaaagtctttaccatgctttaacaagtcttattaaataattttttctttaacacatcctgctagtggttttctatttgtcccacctgttctttggtc

SEQ ID NO: 228443 - DNA, 579 bp, Homo sapiens
tactgtaataaaagtcacatgaatgtggtctctctctcatgtgcatgcacaaaattatcttaatattttcagaccacaggtgactgccagtaactgaaactgcggtaagtgaaacctcggatatggggggactactgagcatggaaagtgctaygacagaagactggttccagctgcagtaaacaagagaggaacagtgacaccaagagactgatttctgtcctttgagatgcaaagagtatacaaagtcaacatgaagataaactcttatcaccaactaaatattgtgctacgagaggtagtcaaagggccagggcagtggctcacacctgtaatcccagccttttgggaggctgaggcaagaggattgcttgagcccaggagtttgagaccagcccgggcaacagggcaaaatccgtatcttaaaaaaaaaaaaaaaaattagctgggcatggtgacgcacacctgtagttccagctactcaggaggctgaggtgggaggatcgcttcagcttgggaggtcaagcctgcagtgagctacaatcacaccattgcattaaaaaataggtaacagagtga

SEQ ID NO: 228444 - DNA, 318 bp, Homo sapiens
gtatgtctttatcagcagcatgaaaacagactaatacaaggtcctttggaatcgtctragttcctaatttatttggatattaacttcttatcagatatatagcatgtaaatattttctcccattctttaggttgactttcattgaattgattgtctcctttgctgtgctgaatcttttactttgatttagtcccatttgtctagttttgcttttgttgtctatacttttggtgtcaaatctgaaaatttattaccaatgccagtgtcaaggagcttttctcctatatttatgtctaagagttttacagtattgctcct

SEQ ID NO: 228445 - DNA, 318 bp, Homo sapiens
gtatgtctttatcagcagcatgaaaacagactaatacaaggtcctttggaatcgtctgagttcctaatttatttggatattaacttcttatcagatatatagcatgtaaatattttctcccattctttaggttgactttcattgaattgattgtctcctttgytgtgctgaatcttttactttgatttagtcccatttgtctagttttgcttttgttgtctatacttttggtgtcaaatctgaaaatttattaccaatgccagtgtcaaggagcttttctcctatatttatgtctaagagttttacagtattgctcct

SEQ ID NO: 228446 - DNA, 318 bp, Homo sapiens
gtatgtctttatcagcagcatgaaaacagactaatacaaggtcctttggaatcgtctgagttcctaatttatttggatattaacttcttatcagatatatagcatgtaaatattttctcccattctttaggttgactttcattgaattgattgtctcctttgctgtgctgaatcttttactttgatttagtcccatttgtctagttttgcttttgttgtctatacttttggtgtcaaatctgaaaatttattaccaatrccagtgtcaaggagcttttctcctatatttatgtctaagagttttacagtattgctcct

SEQ ID NO: 228447 - DNA, 528 bp, Homo sapiens
  misc_feature (1)...(528): n = A,T,C or G
nnnnnnnnnnnnnnnnnnnnnnnnttacagttaaagctgagggatatagtataaaatactcagatgaggctcagggaaataaattggctgataaaggtgctaagctagcatcctcttccttggccgcctaagaaatccaggaagtctccaaaccttgtgactagatacctgggcttcatttcaaatacccacactcctgctaggattatttaccctctttaaataaattgacagaagcaatgtctttacaatgcctctaaaggaaatgtaaaattcacacagcccagataacaatttcagagtcagaaagaattggatgagaaaaaggtgaatgtttgatccacttwagtggacttcagaaatacccagatggccatttgataactcctaagtctgtctcccaagtcattgtgtacaatttgctcatccagatttaccacagaaaggataacatgtagtatatattaaacaaaacaatatggcttggactctttagattttatttggaccaagctgttgccatttgct

SEQ ID NO: 228448 - DNA, 577 bp, Homo sapiens
cttagtctctaaggagaaaatggtttccccagccaaatggcttaggagactttttaagggacttggcttttttttttttcttttaacttttattgtaaggtcaggggtacatgtgaagatttgttacaaaggtaaactcatgtcatggggtcttgttgtacaggttatttaatcacccaggaattaagcccagtacccaacagttactgtttccactcctctcccacctcccacactgcatgctcaagcagaccccagtgtctgctgtttccctctttgtgttaataagttctcatcatttagccttcacttacaagtaagaacatgcagtatttggttttctgttcctgcgttagttgctgaggataatagcctccagctctagccatgttcctgcaaacgacataatctcattctttyttacagctgcatggtactccatggtgtatatgtaccacattttctttatccaatctgtcattgatgggcatttaggctgattccatgtctttgctattgtgaatattgctgcgatgaacatttacatgtgcaagtgtctttatggtagactggttta

SEQ ID NO: 228449 - DNA, 577 bp, Homo sapiens
cttagtctctaaggagaaaatggtttccccagccaaatggcttaggagactttttaagggacttggcttttttttttttcttttaacttttattgtaaggtcaggggtacatgtgaagatttgttacaaaggtaaactcatgtcatggggtcttgttgtacaggttatttaatcacccaggaattaagcccagtacccaacagttactgtttccactcctctcccacctcccacactgcatgctcaagcagaccccagtgtctgctgtttccctctttgtgttaataagttctcatcatttagccttcacttacaagtaagaacatgcagtatttggttttctgttcctgcgttagttgctgaggataatagcctccagctctagccatgttcctgcaaacgacataatctcattcttttttacagctgcatggtactccatggtgtatatgtaccacaytttctttatccaatctgtcattgatgggcatttaggctgattccatgtctttgctattgtgaatattgctgcgatgaacatttacatgtgcaagtgtctttatggtagactggttta

SEQ ID NO: 228450 - DNA, 559 bp, Homo sapiens
atgaatttccctcttatcattgccttacctgtgtcccagagattctggtatgttgtatctttgttcacattattttcaaagaacttcttgatttctgccttaatttcattatttacccaaaagtcattcaggaacatgttgtttaatttccatgtaattgtatggttttgagtgattttcttagtctcaacttttatttttactgcactgttgtccaagagtgtgtttggtaagaattcggttcttttacatttgctaagcgttgttttatgtccaattatgtggctgattttagagtatgtgccatgtggtgatgagaagaatgtatattctgttgtttttgagtrgagagttctgtagaagtcaatcagatacatttgatctaatgttgagttcaggtcctgaatatgttttttaattttctgccttggtgatctgtctaataactgttagtggagtgttgaaatctcccactgttattgtgtgagactccgtgtctctttgtaagtctctaagaacttgctttatgaatctgggtgctcctgtattgggtgcacat

SEQ ID NO: 228451 - DNA, 574 bp, Homo sapiens
atgaatttccctcttatcattgccttacctgtgtcccagagattctggtatgttgtatctttgttcacattattttcaaagaacttcttgatttctgccttaatttcattatttacccaaaagtcattcaggaacatgttgtttaatttccatgtaattgtatggttttgagtgattttcttagtctcaacttttatttttactgcactgttgtccaagagtgtgtttggtaagaattcggttcttttacatttgctaagcgttgttttatgtccaattatgtggctgattttagagtatgtgccatgtggtgatgagaagaatgtatattctgttgtttttgagtagagagttctgtagaagtcaatcagatacatttgatctaatgttgagttcaggtcctgaatatgttttttaattttctgccttggtgatctgtctaataactgttagtggagtgttgaaatctcccactgttattgtgtgagactcygtgtctctttgtaagtctctaagaacttgctttatgaatctgggtgctcctgtattgggtgcacatatatttaggatagtt

SEQ ID NO: 228452 - DNA, 574 bp, Homo sapiens
atgaatttccctcttatcattgccttacctgtgtcccagagattctggtatgttgtatctttgttcacattattttcaaagaacttcttgatttctgccttaatttcattatttacccaaaagtcattcaggaacatgttgtttaatttccatgtaattgtatggttttgagtgattttcttagtctcaacttttatttttactgcactgttgtccaagagtgtgtttggtaagaattcggttcttttacatttgctaagcgttgttttatgtccaattatgtggctgattttagagtatgtgccatgtggtgatgagaagaatgtatattctgttgtttttgagtagagagttctgtagaagtcaatcagatacatttgatctaatgttgagttcaggtcctgaatatgttttttaattttctgccttggtgatctgtctaataactgttagtggagtgttgaaatctcccactgttattgtgtgagactccrtgtctctttgtaagtctctaagaacttgctttatgaatctgggtgctcctgtattgggtgcacatatatttaggatagtt

SEQ ID NO: 228453 - DNA, 362 bp, Homo sapiens
aggatcagtgatcagatctggtaggtggatatcctggtgaccttgaggtggtcacctgggcttaatgaaggagtggacacaggggagctgcagccgtgcagggatgggctgctcagcaacaagtccctcctccaccctcagaggcaccaaatgccaacaagaacygtcctatctgacagcaggaagacagagaccgcaggtggctatggggcaggttcccagtgggaaggcaccactcatagctaacaagtagattataccagactgaagccagtatccctgggaggctataatgggtcctgacacattctctggactgggctttgcatagtcattagattcaaatgccaaaaataccataa

SEQ ID NO: 228454 - DNA, 599 bp, Homo sapiens
gaattcaatttaatgacagaagagaagggatgctggaggtaaattcttagagtttctatctcatagagtttgctcttctgattctctagactgccaaagaacataaagatgtacaaggggacctagctgtagtaaaagcattgctataacaacaaaaactctaaaacagtgcccctcacgattttctactgaaatttctctaacagtagaggtataaaacaagaagttagagaataatgcagaaggggcccaccacagaaatcacatttcttttctgttaagactcatgtgatttttgcatcttactccataatgtattagtggttgcgttaatatgacaatgtctgcaattaaacaccagtaagcaaaatcgatacatcagaatgacttgcagggcttatcatgcagtttcatttacatccctatcccactgccatttacttgagcgtgaatgacacacgrgagattctttgccttccatgatccaactttacacataaataacacaaggctaaagaaaaccagaactcaaattcaccatgcataggagtgataacaaaaatatttaacagtcagtatgggtgattactggccaatca

SEQ ID NO: 228455 - DNA, 551 bp, Homo sapiens
ccactcaagccagccctgcctcggaacctgacaaagttaaatggaagcctacagagctgagctgcatttccatgggagacattttggtcattccaggtgatgatgaactacaccaattgttagtggctgagaagaacctcaggaatgtgccagcatcttttgacttttatttcagggggctgcatctactaccacaacatgcaatatgggtaacactggcatggctggttagatttgagtacctcatgtaaataagtcatgtggtaatagtgatattgatgatcaaatgtattgggagattgagttaargtctcctcaggatgtaataccaacggaaaatgaatctttagaagaactatatttagttaaccatcacctaatttccagataaatagttctgcacaggtcatataagatacaaagagcagtataccaagggggaggatgatcttggggactcctgaaatatactgtaaataacccagatatcctccagtaaataaatggatatacaaagtgtggtatacatacatatgtacatacagtggaac

SEQ ID NO: 228456 - DNA, 369 bp, Homo sapiens
tgtcatattctatggattgagcaagttgcaaggcagccagattcaaggggaggggagctattcctcacctcttgagaagcaatgtgtgttgaggaagggaaagaattgatggtagctgtctttgacttctrccatacagagcaaggtctccacactcctttctcctgtaataattttccatttgaaaattttccttgcaattctcacacctttattatttcatataaattttacaatcaatttttttcttgtctagataaccatgccatttggattaaaattgcattacattgcaacttttgagaaactatgggaggagaattggcaaccttataatattgaatttgctcattaaggaacatagtttct

SEQ ID NO: 228457 - DNA, 573 bp, Homo sapiens
ttatagtgttaacatgcattaattcacttaatcactcctcatttcctccttccctyaacccctgacaaccatgaatctgctttctgtctctagatttgcctattctggacattttatataaatgtgtcatccaatatctgggcttttctgactggcttctttcacttagcaggattctacagtttattgaggttcattcattgtgtaagctgtatcagtacttcattcctgtttatggctgaataacgttccattgtatgtacatatgtatgtataccacattagtatattcatttatttactggaggatatctgggttatttacagtatatttcaggagtccccaagatcatcctcccccttgatatactgctctttgtatcttatatgacctgggcagaactatttatctggaaattaggtgatggttaactaaatatagttcttctaaagactcattttccattggtattacatcctgaggagactttaactcaatctcccaatacatttgatcatcaatatcagtattaccacatgacttatttgcatgaggtaatcaaatctaagcag

SEQ ID NO: 228458 - DNA, 399 bp, Homo sapiens
tggctcagctctgtaggcttccatttaactttgtcaggttctgaggcagggctggcttgagtggtcttgtttccactttggctwtgatgaataatgctgctgtgaacattaaggtatacgtttttgtgtggtttcatttcttttaagtatataccttggagtgtaattactggatcatatgataactctgttttaatttttgagaaactaccaaaatgttttccacaacagacaagattttacattccctcagcattgaatgaaggttcttatccagtttcctgtttttgctgagacttcttattgtttgtcttttgaatttagttatctcgttggggtgaagtggtgtatcattgtgttttgatttgcatttccctaataatgaatgttattgagcac

SEQ ID NO: 228459 - DNA, 399 bp, Homo sapiens
tggctcagctctgtaggcttccatttaactttgtcaggttctgaggcagggctggcttgagtggtcttgtttccactttggctatgatgaataatgctgctgtgaacattmaggtatacgtttttgtgtggtttcatttcttttaagtatataccttggagtgtaattactggatcatatgataactctgttttaatttttgagaaactaccaaaatgttttccacaacagacaagattttacattccctcagcattgaatgaaggttcttatccagtttcctgtttttgctgagacttcttattgtttgtcttttgaatttagttatctcgttggggtgaagtggtgtatcattgtgttttgatttgcatttccctaataatgaatgttattgagcac

SEQ ID NO: 228460 - DNA, 399 bp, Homo sapiens
tggctcagctctgtaggcttccatttaactttgtcaggttctgaggcagggctggcttgagtggtcttgtttccactttggctatgatgaataatgctgctgtgaacattaaggtatacgtttttgtgtggtttcatttcttttaagtatataycttggagtgtaattactggatcatatgataactctgttttaatttttgagaaactaccaaaatgttttccacaacagacaagattttacattccctcagcattgaatgaaggttcttatccagtttcctgtttttgctgagacttcttattgtttgtcttttgaatttagttatctcgttggggtgaagtggtgtatcattgtgttttgatttgcatttccctaataatgaatgttattgagcac

SEQ ID NO: 228461 - DNA, 656 bp, Homo sapiens
tcggtctcttggtagccttgctcctgggaagctctttcttgaatctagtcaccattccattccaccaggccacatatgtcttctccaggcaacagccaacatcaattgtcagccgtgtaagtgagtttcagatgactgtggccccggctaatgtttgactgtagcacatgtgagaggccccatgcagaaacccctataaccatggagagcagtcatcctgcagaaccatgagtaagttaagcttaggggtggttaattatgcagaaataagtaaacagagcactccaccaggtattaaagattattacaaagattatgtaattaaaacaatacagaacagaccagggttgactacaagatcaatgggacagaataaagttacatatccaatgcctgctgctgaccacagggatttgtcacagatctcatcagttagaaaccctacagcggtttccctggtcaccttccagtcaccactacaccttggctccttttagcactcctccctagcttatcactatatgaaattgctttatctctttgtattgtctgtcacctgccaccataatgtgaatttctagacctccatagcatgyaaagctctagaacagttcttagaacacagaaggtgcttgacaaatattttctgaaagaaa

SEQ ID NO: 228462 - DNA, 605 bp, Homo sapiens
acatataaatatatgataactgcatctatatatacacatacatataagtaagattgaagcggacaagctaaattaattaatttatttatttatytatctatctatctatctatctatctatctatctatctatctatctatctgagatggagtttcactcttgatgcccaggctggagtgtggtggcacagtctcagctcactgcaacctccacctcccaggttccagcaattctcctgcctcaacctctcgagtagctgggattacaggcacctgccactatgcctggctaattttttgtattttttttttagtagagacggggcttcatgatgctggccaggctggtctcgaactcccgatctcaggtgatccacctgccttggcctcccaaagcgctgggattacaggcatgagccacggcacccgacccttaatttatttttaataaagcattcttattttgggtgttctaactttatcagtcccagatccctataatttgggaatagaaataaattatttagcttgtcttgaccattgtccttttatctactcttttgaaaatatgtcttgaaggcatatggtaggaaaggagagtatat

SEQ ID NO: 228463 - DNA, 289 bp, Homo sapiens
acaaacttatttatgaaagaaggcatttttttggattcttctaaattagacatattttaaatgactaaacatatcatttcctcactagaagkccagcagtttaaaaataactaaatatttattagaactagtgtgccgttgtttagtaaaatcagacaaacttaaacagttaaattcctccaattagttggtaataaagagagcattttagacagaatgaattttaaaggcctatgtcattttcatctaagtttttattatggcttaatatacatatatatgaatatat

SEQ ID NO: 228464 - DNA, 631 bp, Homo sapiens
tcccacaataggctgtctgcaagcttgaggagcaaggagagccactccaagtctcaaaactggagaatgtggactctgatgtttgagggcaggaagcatccagcacgcgagaaagatgtaggctgggaggctagacccgtcttgccttttcatgtttttctgcctgctttatattggctggcagctgattagatgatgcccaccagattaagggtgggtctgccttccccagcccactgactcaagtgtttatctcctttggcaacacccycacagacacacccaggatcaatactttgcatccttcaatctaatcaagttgacactcagtattaaccatcacagtgctgcaatgaacatatgtgtagaacagtttattttcatttgagtatatacttagtaaggggattgctaggtcaaatggtagttctgttttaagttgtttgaggagtctccaaactgctttccacagtggctgaactaatttacatagctgccagcattgtgtaagtgttcccttttctccacaaccttatcaatatctgttattttttgactttttaataatagcctttctgactggtgtgagatggtattcattgtggttttgatatgcatttctctgatgata

SEQ ID NO: 228465 - DNA, 362 bp, Homo sapiens
agagccaccctcagagacttagttgataggcccactcacctgcagagtcaggcaccaggccagtccacctaaggactccaktagcaagccaaatgaaagaccccaccagattctatgagtttgattttttagatttcacatttaagtgagataatgtagtatttgcttttcagtggctggcttatttcacttagcataatgtcctccaggtttatttacattattgcaaatgacagtgatatggtttggctatgtgcccttcaaatctcaacttgaattgtatctcccagaattcccacatgtagtgggagggacccagggggaagtaattgaatcatggagcctggtctttctcgtgctgt

SEQ ID NO: 228466 - DNA, 362 bp, Homo sapiens
agagccaccctcagagacttagttgataggcccactcacctgcagagtcaggcaccaggccagtccacctaaggactccatyagcaagccaaatgaaagaccccaccagattctatgagtttgattttttagatttcacatttaagtgagataatgtagtatttgcttttcagtggctggcttatttcacttagcataatgtcctccaggtttatttacattattgcaaatgacagtgatatggtttggctatgtgcccttcaaatctcaacttgaattgtatctcccagaattcccacatgtagtgggagggacccagggggaagtaattgaatcatggagcctggtctttctcgtgctgt

SEQ ID NO: 228467 - DNA, 413 bp, Homo sapiens
cctttttggggaggcacttgagaggattcagacttagarcaatgaattaaatagtccttaacgtccttccaactcatagcttctgtcatctactgtccctaattgaatagggaagccaaataagtagtaacttccttcccttatatcagagatgtaacccttacttttgatgcatcaacatattttagtattacccctgatgaaagtagctgagattgtgttttcatttgtgtgtactgcagtgtgtgttacaggattgtacttagtatttatcttttcagagcagtgccagatgtgcatatttgcagacagaaagcttcatctcttttgaatttgcccttgaaaggacatctgcctagaatcggttttctgctttaaaaatttacatagttgtgccatcaatagcagctgct

SEQ ID NO: 228468 - DNA, 570 bp, Homo sapiens
cagtctataagtggcatattacaagaattcagcattaaactctcatgacaaacacctcaccttggcgcttaagttatgtaacccccctcctctttttgtgccaaatgggggtagtttcagaaagactcatttagtgagatttatctttcccaagcactgattctatactacagtttaagaagaaagcatttgaattttaagttttgatgcaatgtatattaagtgagggtctttaaacaggaacttgaatcagttcaggatatatatatatatcctgatgtacatgtatctgtacatgtatctrggatacatgtatctgtacatgtatctgggatacatgtatctgtacatgtatctgggatacatgtatctgtacatgtatctgggatacatgtacagaacgtgcaggtttgttacctatgtatacacgtgccttggtggtttgctacacccatcaacccatcatctacattaggtatttctcctaatgctatccctcccctagccccccaaccccaacaggccccattttgtgatgttcccctccctgtgtccatgtgttctcattgt

SEQ ID NO: 228469 - DNA, 528 bp, Homo sapiens
  misc_feature (1)...(528): n = A,T,C or G
nnnnnntcttttctccacactctgcaaacatttatcacttgtctctggtaatagccatcctaaagggtgtaggtgatatcgcacagtggttttgatttgcacttccttgatgattaatgatgtggagcacgtttcctatgcctgttggtgatttctatgtattctttggagaaatgtctattcaggtgttttgcctattttaaaaattaggttatttgtgtttccactattgagttgtatgagttctttatatattttggatattaatccctgatcagatatacggtttgcaaatatttttttccgggtctgttggttgctgtttcattttgttgattgtttcctttgctctgcaggaaacagttctttttagtttgatgtagtactatgtattcatttttgcttttgtgacttgagcttctggtgtgataaccaaaaacatccttgccaagacctaatgtccagaaagatttcccmtcttttctaggagttttatagtttttggtcttatgttaagaatttttaatc

SEQ ID NO: 228470 - DNA, 586 bp, Homo sapiens
ttatctatatgacaaactttgacgtgtagccctgagtctaaaataaaagtttttwaaaaatggccattctagaaataaaaatataaaagagttggggggaaaaagtggccacaatcttttccagcttgaatgggaggtggtaagcagtacgggcccatggcagttgctgtcttcacggtaggaactttgagtacttttcatgtaaaacagctctttattgcctaagggcagtagaaattggtgtggacagttaagaatagagggttgagctgtatcagtaaaggaggttttgcaatatcaagtttagagactaaagctcaaatttcagtcagagcaattctagaaaactcttggcacaattgctttatgacattgtattttgttgaaagatgaaggagagagtgaagtgactatctggggaccctgaggaagtccctaagattctgttgacaaaggaatctgagtgcaggaagcacgtggcttgcctacccagctcaagtcttatgaagagtacaggtgttgacagtttctgaagacagagcagaggaggctctggacctgatgtctatttgatggcagaagtgag

SEQ ID NO: 228471 - DNA, 586 bp, Homo sapiens
ttatctatatgacaaactttgacgtgtagccctgagtctaaaataaaagttttttaaaaatggccattctagaaataaaaatataaaagagttggggggaaaaagtggccacaatcttttccagcttgaatgggaggtggtaagcagtacgggcccatggcagttgctgtcttcasggtaggaactttgagtacttttcatgtaaaacagctctttattgcctaagggcagtagaaattggtgtggacagttaagaatagagggttgagctgtatcagtaaaggaggttttgcaatatcaagtttagagactaaagctcaaatttcagtcagagcaattctagaaaactcttggcacaattgctttatgacattgtattttgttgaaagatgaaggagagagtgaagtgactatctggggaccctgaggaagtccctaagattctgttgacaaaggaatctgagtgcaggaagcacgtggcttgcctacccagctcaagtcttatgaagagtacaggtgttgacagtttctgaagacagagcagaggaggctctggacctgatgtctatttgatggcagaagtgag

SEQ ID NO: 228472 - DNA, 586 bp, Homo sapiens
ttatctatatgacaaactttgacgtgtagccctgagtctaaaataaaagttttttaaaaatggccattctagaaataaaaatataaaagagttggggggaaaaagtggccacaatcttttccagcttgaatgggaggtggtaagcagtacgggcccatggcagttgctgtcttcacggtaggaactttgagtacttttcatgtaaaacagctctttattgcctaagggcagtagaaattggtgtggacagttaagaatagagggttgagctgtatcagtaaaggaggttttgcaatatcaagtttagagactaaagctcaaatttcagtcagagcaattctagaaaactcttggcacaattgctttaygacattgtattttgttgaaagatgaaggagagagtgaagtgactatctggggaccctgaggaagtccctaagattctgttgacaaaggaatctgagtgcaggaagcacgtggcttgcctacccagctcaagtcttatgaagagtacaggtgttgacagtttctgaagacagagcagaggaggctctggacctgatgtctatttgatggcagaagtgag

SEQ ID NO: 228473 - DNA, 504 bp, Homo sapiens
tgtgcggggatggtgcagggatggagacggggagggctgtcggctgccagagaacctatagcaaaatgatacattaagctgttttcctaaatgcttcacccatgaaacatgtcgtttatccacaaccctgtactatttcattagaatcgtttactttgggcctggacctgctactagcaagaaaaccacttccgccttcaagttttcaaagtatgcaaataaaaaaatcacttctcttcctctgtctccaaaagaaaatctctattctctcttcattcgtgygattcagcaactagccgccttttcctaggttttcttcaatttgaaaagaaaataaaacacacttgttttgagattttcccacatcataaatgttctcattatgccaaatttgactactactcttatcaaatataaaattggctagagaaatatattcacttttgaagttttgaattcattttttaaataagacccctccacatgtagatttgttcttatgta

SEQ ID NO: 228474 - DNA, 386 bp, Homo sapiens
ggaggctgaagttctctggaggagtcttcactcctgtctggcagttgatgcgagctgttgcgtgggacctcagctattggctggagcargttcacacggcctctccacgtggcctggacatcacagcatggcagcttcagagtagctggacctcttactatgacagaacactacaaagacatgggcctcaaaagaaccgcgtagattctcaataaatatttgcttagttgataactctcattaagatatttcatctgctttttctttgaacaaagtgacattattttattgagtttacctttaaagatttgatttctctggatcaagagctcaccgttcatgactttgagagaagggctggccaggaagccacctaacatagtaac

SEQ ID NO: 228475 - DNA, 386 bp, Homo sapiens
ggaggctgaagttctctggaggagtcttcactcctgtctggcagttgatgcgagctgttgcgtgggacctcagctattggctggagcaggttcacacggcctctccacgtggcctggacatcacagcatggcagcttcagagtagctggacctcttactatgacagaacactacaaagacatgggcctcaaaagaaccrcgtagattctcaataaatatttgcttagttgataactctcattaagatatttcatctgctttttctttgaacaaagtgacattattttattgagtttacctttaaagatttgatttctctggatcaagagctcaccgttcatgactttgagagaagggctggccaggaagccacctaacatagtaac

SEQ ID NO: 228476 - DNA, 386 bp, Homo sapiens
ggaggctgaagttctctggaggagtcttcactcctgtctggcagttgatgcgagctgttgcgtgggacctcagctattggctggagcaggttcacacggcctctccacgtggcctggacatcacagcatggcagcttcagagtagctggacctcttactatgacagaacactacaaagacatgggcctcaaaagaaccgcgtagattctcaataaatatttgcttagttgataactctcattaagatatttcatctgctttttctttgaacaaagtgacattattttattgagtttacctttaaagatttgatttctctggatcaagakctcaccgttcatgactttgagagaagggctggccaggaagccacctaacatagtaac

SEQ ID NO: 228477 - DNA, 519 bp, Homo sapiens
aatgcagattcaggtactacttcacgattgctactgcagtttctaaagcacctttccttcttcctgccgtggctcagcatgccctgtgtttctccttcagcattttcctatggctagcatctgctctgttctattctgactctccctcctgagagctagccagctgtccatgccaggtgatgctttgggaggacacagggcctgaatgtgtttgcatgtgtgtaagtcggtgtgtgtccgggtgtgtttgtggaagcagggtgaggggaagaggagaaagaggagggcgtaaagtggttccagccagcctggtttgcatgaagcatgtttatgcacagttggcaaatttccaacaggtgccattcacgtcagttggtgcaagaggccccttggccccggctgrttgcaccactctgggcagttgtccaaagcagcattatctgtgcctcttgcaatgtcagtggcttcctccagcctgccctgtttgtccttcttagaccctcggacaggcccattcat

SEQ ID NO: 228478 - DNA, 527 bp, Homo sapiens
tgaatttttttcatgtaactcctattcatatcccatagatctagtattgtacagcactgcattctctgaggaagtcccagtccaaactctgatttacatcactttagaaaccacactcacacttttgcagagtgttgagcttaataactacctgccacagattggtaaatttaatccagtggttgttctgtttgtgcttctgttctcatttatgtgtttagggatagtgaggttcctgccttcactaggatccacggatatgagaccatttttgtcatttcctgaagtcacactggcgtttccagaaggcatctggtgctttgctcagccttccatgctgtgcagcacttctgtcctcagtcaaggagatggccatgcttaagccagcaattggctggggtccaggaaacaaagcaaaagcacaatatgtgaatgtgctgattgtgttccctayggctttatctcgagcaaaatacactctacatattttaataataagtataattagcttgttcctggacttcatt

SEQ ID NO: 228479 - DNA, 555 bp, Homo sapiens
tttacagacagggtgtcccttgttgcccaggctggagtgtagtggcatgatcacatctcactgcaaccttgaagwcttgggctcaagtgatcctcctgcctcagcctcccaagtaattaggactacaggcacccacctccaagcctggataatttttaaattttctgtagacgttggctcagggggaaacgttttgctatgttgcccaggcttgtcttgaactcctgatctcaagctatccttctgcctagggctcccaaagtgctgggattgcaggcaagagccactgtgcccagccaaaaaaatattatttctaagaatgcatcttactcaaattatctaatgtagaaaaaatatgcatgtaccaagttattatagtagcaaatgaaagttaggagtcacccaaataattgaaatataggcgtagttatgtaaattacagttaactcacttaatgaaataatacattggtcattacgtgttatatttcacaaactttgatacaacatgagaaatgttcatatagtattaaataaaaagagacatattaaatta

SEQ ID NO: 228480 - DNA, 555 bp, Homo sapiens
tttacagacagggtgtcccttgttgcccaggctggagtgtagtggcatgatcacatctcactgcaaccttgaagtcttgggctcaagtgatcctcctgcctcagcctcccaagtaattaggmctacaggcacccacctccaagcctggataatttttaaattttctgtagacgttggctcagggggaaacgttttgctatgttgcccaggcttgtcttgaactcctgatctcaagctatccttctgcctagggctcccaaagtgctgggattgcaggcaagagccactgtgcccagccaaaaaaatattatttctaagaatgcatcttactcaaattatctaatgtagaaaaaatatgcatgtaccaagttattatagtagcaaatgaaagttaggagtcacccaaataattgaaatataggcgtagttatgtaaattacagttaactcacttaatgaaataatacattggtcattacgtgttatatttcacaaactttgatacaacatgagaaatgttcatatagtattaaataaaaagagacatattaaatta

SEQ ID NO: 228481 - DNA, 555 bp, Homo sapiens
tttacagacagggtgtcccttgttgcccaggctggagtgtagtggcatgatcacatctcactgcaaccttgaagtcttgggctcaagtgatcctcctgcctcagcctcccaagtaattaggactacaggcacccacctccaagcctggataatttttaaattttctgtagacrttggctcagggggaaacgttttgctatgttgcccaggcttgtcttgaactcctgatctcaagctatccttctgcctagggctcccaaagtgctgggattgcaggcaagagccactgtgcccagccaaaaaaatattatttctaagaatgcatcttactcaaattatctaatgtagaaaaaatatgcatgtaccaagttattatagtagcaaatgaaagttaggagtcacccaaataattgaaatataggcgtagttatgtaaattacagttaactcacttaatgaaataatacattggtcattacgtgttatatttcacaaactttgatacaacatgagaaatgttcatatagtattaaataaaaagagacatattaaatta

SEQ ID NO: 228482 - DNA, 487 bp, Homo sapiens
tttactggagatgctggctaatttagttaggcaagaaaaatatagaagggttacaatttggaaaagaaaaaataaagctttaatattcacagatgatgttattgtaagctgaaaacccaaaagaatcaacagaaaaacrtttacacaattaacacaatcaaaatcaacaggcttcatatatgcagacaataattggaagactgagtataagaaaagaccccattttcaatagcaacaaaaagcaagagaaaatggctaagaatatatttatataagaaatgcataagccttagatgaaggaaattttaagatgaaggacatgaaacaagaattgaatacatggaaagacacattaagcttttggataggaaggcatcataaatttaaaaatttccatcagtcaatttataaatatttcctgatcccaaatgggacaatagatgtctagttagcccccatatgcattctcccattcatccttttagcc

SEQ ID NO: 228483 - DNA, 487 bp, Homo sapiens
tttactggagatgctggctaatttagttaggcaagaaaaatatagaagggttacaatttggaaaagaaaaaataaagctttaatattcacagatgatgttattgtaagctgaaaacccaaaagaatcaacagaaaaacatttacacaattaacacaatcaaaatcaacaggcttcatatatgcagacaataattggaagactgagtataagaaaagaccccattttcaatagcaacaaaaagcaagagaaaatggctaagaatatatttatataagaaatgcataagccttagatgaaggaaattttaagatgaaggacatgaracaagaattgaatacatggaaagacacattaagcttttggataggaaggcatcataaatttaaaaatttccatcagtcaatttataaatatttcctgatcccaaatgggacaatagatgtctagttagcccccatatgcattctcccattcatccttttagcc

SEQ ID NO: 228484 - DNA, 628 bp, Homo sapiens
atatgttaagtataagtactctaaatatttagacaaatctttataatagtccccataggataacttaatctcatgtaatccctataagaaacatatctaaatttaatcatatttaatattcctaaatgtggttgaatcatattttcaataagttaattacaagctggcacacacatggagagtgaatatcttagattcttttacttaaaccatgtcttaaactaagaatttaaaaccttgagcytgtcattttcattcattaagccttccagcatagtcaaagatagccggttcatccaacagttctaaaattcctcatcttcataagctcttaatttcatataaacacagctagtaatttacatatggtgtagtgaaaagaatacagaaattgaatccataaatttgtgtttgaaccaaatgtccgtcacttacagttttggctacacagataaatcatttaaaattctctgaggatcttttttacctgcgtctacacttacttttcttccccctcatcctctactcctggtctgctagatccttggatattacatagcacagaggatgataatagggctttggaattaaataacctaaatttaagtcctgcctttcagctgactag

SEQ ID NO: 228485 - DNA, 482 bp, Homo sapiens
aaaaggttgccatctgcaagccaggagggtgccctcactagaacccaagcatgctggcatcctgatctcagacttcacagcctccaaactgtgagaaaataaatctctattgttgaagtctgtggtattttgttctggcagcctgagtagactaataaaactagtgtatttccagattctcctcatcaggaatgtcatgtgtcacaacactaatgggaaataatgttttcgcctaaaagtagatctaccattctatctagcaatcccactagtgggtatttaccccaaggaaaaaaattattatatcaaaaagactcttgcacccatgtgtttattgcagcacaattcataattgcaaagatatggaaccaacctatgtgcatatcaattgattagtggattaaaaagatgtrtgtgtgtgtgtgtgtgtgtgtgtgtgaatatatatatatatctatatatatatataccataaaatacta

SEQ ID NO: 228486 - DNA, 575 bp, Homo sapiens
ataaacagaaacatctcaaccatctgtccaaagttcttccaatataattacatcacactgtggctaatggctggttgttgatccagatatttgaaggagagggtaataccctcctgggatctcacagccatccacggcttcctgcctcattaccacttaccagttttttatcgacaattaggattagtgaagaatccaaagctttcactgggagaaacagtctctgatttagtaagttaaattagcaactgagaatgcctcaaacctcagcctgcatggtttaaagatttctttcttaagataatagtaaataaattcaaccaaaaaagtgcccagggaaaaygttggagaaaaatcttccatgatgacaaatattaatcatcaaactcaagtgtttatgtacttcaagcctcagtcagcctcctccagttattaatattcaaatgtcctttccctctagtctgcatgcaagaagaaagcattcaagtttcagacttttatcgatgagttaagacaagaagatggcagactcttttgttttttcccctggaagtgaaatctactttgtctattca

SEQ ID NO: 228487 - DNA, 566 bp, Homo sapiens
tagttgacccttgaacaacacaggtttgaactgcatgggtccacttatatgtgggttttcttccacctctgccacccctgagatagcaacaccaaccactcctcttccttctcaggatgcagacctttataatgatccactttcacttaatagtaaatatattttctctwctttatgattttcttagtaacactttcttttgtctagcttacattactgtaagaattcagtatataatacatttacaaaatacgtggtaatcgactatgttcttgggtcttgtggtcaacagtaggctattagtaattaagttttgagccaggcatggaggctcacacgtgtattcccagcactttgggaaactgaggtggaagagttgcttgagcccaggagtttgacaccagcctgggcaacacaggaagaccccatctctacagaaaatttaaaaaatagccaggtgtggtggtgcacacctgtaatgccagtaactgggaaggctgaggtaggaggactgcttgagcccaggaggaggctgtagtgagctgtgttcctgccactgcactcca

SEQ ID NO: 228488 - DNA, 562 bp, Homo sapiens
tatttgtagtgtaacttattgtattgttttcttcatctgtgatgagaatgatattaaagtataagaaaagacatttgcctaactatagataaactcataacgttttcttttacaggaataagtggggagatactaagttgtctttgctctgcctttggaatgtaactttcaattttttggttaatgtagctcagacataaatgaaagtgggtgaaataaagacttgtgtgtgcaatgtgatgcaattacaatcatacttcrcttaatgacagggttatgttctgagaaatgcattattagacaactttgtcatgaagtatcctagagtgtgtttacacaaacctagatggtatagcttactacacacctaggctatgtggtatagcttattgcttctagtctacaaacctgcatggcatgttactgtatttcttctgaaaaggagtttagataacctctaaacaaggtatctgattcagatataatcacaattgtgaggtgacattattacagaattttaccgttctctggaaaatagctgatatgcacgtatacagggaac

SEQ ID NO: 228489 - DNA, 588 bp, Homo sapiens
cctgtttaggtccattaaatgtttagagacattggctgctgagagttcaaatcctgggcccttccccagccaaactgtcttctacgttaagaataagacagtgtagaaaagtcttgggatgtcaaaaggtaaaatgaggcacggttaagctcaaaagaatttatttgagcaaataccgattcaggaattggacagctgtggtttgcaggctttttggagggaatgcaaggagaaggcttttatagggtgaaaaagggagtaaagcacagaaaatatttgattggttgcagttatagagttgctttatttggtcgattctgctggaaagtctctatgtaagttaggcttctgattagttaacttggtttcatttttctttaatatagggatttataagaaatagctgaagttaagttttgsttatgtttgcaaattgagcaaggttaaggtcacttatgaggtctaaatggatttgtctggcccagagattcttcaagcctggtctccattataacttactttaacggaaatatatgccagttcctgttgctggtgtattggagcaggctggagctggcttgagtcagc

SEQ ID NO: 228490 - DNA, 478 bp, Homo sapiens
cattaaatgttgataaattaaagccatcttagggccgggcacagtggctcacgcctgtaatcccagcactttgggaggctgaggtaggtggatcacttgaggtcaggagtttgagaccagcctgaccaacatggtgaaaccccatccctaaaagtacaaaaaaaaaattagctgagcatggtggcgtgcacctgtagtcccagctactcgggaggctgaggcaagagaatggctcaaagctaggaggcagagttttcagtgagccgagactgcgccactgcactccagcctgggtgacagagcaagattctgtctcaaaagtaaataaatataattaaaaaaacatctttgaacagaaatactttctctaaagacatattttgggaaacagtgaagaaagacttcaagagaagcagctgataccagagattgagagttcrctatccaggggcactgcacagtttgtccagtttcctag

SEQ ID NO: 228491 - DNA, 475 bp, Homo sapiens
gctatatctagcacatatgtctatatgctagacacattgctggggactacatgattctgaagatgaaaagagcaggtctgaaggaagcacaaggtgacagatttcagggatagctagtgtcgtatgctcacatttcttccgagtatacaaacctgcttttctttgaacctacccatggtggtgccctgtgaatagccgacataatagatcttttcctggcccgttttctgcaaaataaagtttatcactgcaggaaggtcaaacctagccatctcatcataactacaaggggaaaagacaaagttatatgaaaaattataatcagaaacaaacaaaagctccccccsacaccaggtttacaaacaagcccttgagttgtcaactctgacagcttgttaccgtgtccctcacaacactcagaatggatttctttcaaacctatgaagcatgggtgcctctggagtcacaggctgtc

SEQ ID NO: 228492 - DNA, 399 bp, Homo sapiens
gtaagaatcacactagcattttcattttaaataggacwgttctctgaagaaaataagcagaaaagtaaatggaaacagtacagatacatcagctcagataaatccctgcaaaagctataattaggctaagctgatgtatgtgttaatgagaagtggctcagatgattcagagtatggagcctggaattaataaaaaaaaacattatctggaacaaggatatgactttcacaaagaatatgggagggagcagtactatatttacaatagacaccttatctgttcagcatgtatgagaatttaggccattaacaggtaaatgttaggtccacattatggtaggtccacagtatggatttgctgaataagtgcatgaatagtaagtaggtaaatgaagctta

SEQ ID NO: 228493 - DNA, 399 bp, Homo sapiens
gtaagaatcacactagcattttcattttaaataggactgttctctgaagaaaataagcagaaaagtaaatggaaacagtacagatacatcagctcagataaatccctgcaaaagctataattaggctaagctgatgtatgtgttaatgagaagtggctcagatgattcagagtatggagcctggaattaakaaaaaaaaacattatctggaacaaggatatgactttcacaaagaatatgggagggagcagtactatatttacaatagacaccttatctgttcagcatgtatgagaatttaggccattaacaggtaaatgttaggtccacattatggtaggtccacagtatggatttgctgaataagtgcatgaatagtaagtaggtaaatgaagctta

SEQ ID NO: 228494 - DNA, 599 bp, Homo sapiens
gaatgttcttatttgacaaaatatgctctcaaatatttaagaataaaaagaaaaaaagtagacaccatgtctgcaacctaccccaaaggagtgaaaacaaatctatagagaaggagaatgataatgcgaatgtggataagtgttaacttttggagaactggggtgaagggtacacaggaagttctcatattattcttgcaaattttctgtaagtccaagattatttcaaaatttaaaaaagcatttttacccataaaaaccatttccagaaattttgggaatttccagagttctttgyatgtctaatcaattgcagtttatgactcaatgccaacagatgttatattaaagacatatttaaatctctaaaataaaataaccataagggaagatctgttacttaataaatgctttcctgagaatttctaaatgttcttatttgtattaagttctttaggcattggtgcttgtttgtttcatcttttggcagagaaactcctctttcaaataacattttatgcagcttgttttcatataaaactaacccaagcctgagatctaacaacctcttatacccaaagaagactctgatatcttgg

SEQ ID NO: 228495 - DNA, 630 bp, Homo sapiens
cctttctgaaaaggatggaaaaacggcaccctcccctggactcgcacacatttttttctagctcagcaagaaagagtgaggtcccctcagcctctgcgcacatcagggtgacaaaggtggacaatgtctggttcgcctttcaccttcaaggccaattctgggacttacagagtaggtgtcaaaattgtattttaagacaaatgcacttggtactgatgtgcttaatggctccattttagacattttccacaattcacmctcacacctgaggcaatcagtatagaaaaatcttggcagaaaagtgaacaggtgacaggtttgggttacctgtgagtgtttaattgaaggactgtggtttccttactcctttggcttcacacagataattaaaacttgaaagtgctttgaatatttattcatttttttcaccaacagctgatgatcattaaacacacagaaaattcacaataagtatttggtcaagccctttgttcttcctgttcgtacaaacctgcagggtggttatgaagatggatgcgctctgggtatacattggttttcaactctgctgaaggatcagacaccctcccagatggaacagccccacctctggctataaatattataacc

SEQ ID NO: 228496 - DNA, 617 bp, Homo sapiens
ctggagttagatgagaatcttacagttctatgagggaagtcactgcaaaatgactttcatggaattccagaaaaccatgtccaaaaatagcaaaataagatcctttcttgcactgtagtttatgtagggataaaatatacattttgaaatgagacagagtgaccacaggtagagtgaatatggcagctacagagggctaaatgcatcctcaaggtacaccaggcttaaagcatgaaagcaggaggtaatatcccgactctggtgacccaagaggctgttaggcaggtgttggacaccatggcagacagttaagcagtaaggaaaataatcctgtagtgtatgaacctgagctgacttggtgcccacggctgggctgggctacatcaggctcctctggtgtgagtttacatttcaaggtatgacacttgatctcaaaatagtacaaaacacatgagagcaagctgtgtgcataaattggttccagtgcacacaayaaattaaatacagataaaaacatatttattgtaaatagaactggcatcccaagttataaaaatgtagtaatttgattcctgacatgatgttttagcactcttcaccataagacccaccagacc

SEQ ID NO: 228497 - DNA, 600 bp, Homo sapiens
agcatcagtagcatctgctccaaggatggaggaaggcaggatgggaacttcccaggctaggaagggttataaacaagaagactcagaggttcccgatggaaggctcaggattgtcccaagggttcttttcagagttctagcccagtatgtcaagcagcatgcagaaacgaatacctaactactctttatatttgcctcccatgtgcagacacttcagaaaggtgaaggctgaacaaaggcacacagtaattgtgcacagtaattgatctttcggggtggtatgtataaagccctccccaccaaatggagtcagagagtttttattttgatagctcctcagtaatggacagtggaaggaaaaggatacatggaaaagaatacttcagggatgggatttaatttgttttcagactgtgagyaatacaggacagaagagaataacattttttccagagaaatctaagccgtgttcattgtctaatatcgaagacttgcaaaaacacattgaacagaggttaattaagagtataatatctgaatcctacagcactataaatcctccattgtcatggtcaagaaggaatatagccagcacaaagc

SEQ ID NO: 228498 - DNA, 600 bp, Homo sapiens
agcatcagtagcatctgctccaaggatggaggaaggcaggatgggaacttcccaggctaggaagggttataaacaagaagactcagaggttcccgatggaaggctcaggattgtcccaagggttcttttcagagttctagcccagtatgtcaagcagcatgcagaaacgaatacctaactactctttatatttgcctcccatgtgcagacacttcagaaaggtgaaggctgaacaaaggcacacagtaattgtgcacagtaattgatctttcggggtggtatgtataaagccctccccaccaaatggagtcagagagtttttattttgatagctcctcagtaatggacagtggaaggaaaaggatacatggaaaagaatacttcagggatgggatttaatttgttttcagactgtgagtaatacaggacagaagagaataacattttttccagagaaatctaagccgtgttcattgtctaatatcgaagacttgcaaaaacacattgaacagaggttaattragagtataatatctgaatcctacagcactataaatcctccattgtcatggtcaagaaggaatatagccagcacaaagc

SEQ ID NO: 228499 - DNA, 524 bp, Homo sapiens
tttagttctttccctgcctgtggagtctgcatgctggaggattcgtgccctccccaagttctggccaggaggcttctccgcccattcaaattgttacaaagttcagctggggatttccttctccttgtggcgttttccccacacctctggccaccctcctgaaggatccctgtgatgacaggcaggaatggcctgcttggggacccagcaagctcacagggcctttcctgctgcttcctctactcctgtatttcactcagctgtctacgttgactcagctccaggtaagaccagaatattctcctgtaaactagaccttcattttccccagtgggggtgtgtgttcaggggcagaggatccccctttcccacttccacagtatgggcactcacggtatttggggtgtctcctgggtcctgcaggagcaatttgtttcctttacaggayccgtgggtcctcttggatttcctaatttattcctgcagtcgttctggagctaaaattcatgatgtgagcctccaca

SEQ ID NO: 228500 - DNA, 608 bp, Homo sapiens
catcagtacagaaccaagaagacaaaagtgcggggttggtaatcacattacctacccatcaagtagctgagactaaacccaagaatatcaccaatgaaagagatattagagttacagctgctaagtacccactgtttgattctcattttcagaactgctgtcctatgacttttcatcttttgtttaaatcctggcacagtcggagaactcggcacaccattaaacaattcatttcattttcagtttgctctggtatctgacctgctcctcggcctgcattataagtccatccatacttcttcttctagcctcccagatagtcgcctgcctcaagtaactatcacagtcatcttcccactcacttcttccccattggtaaatcttacaaattcaagttgcccatgaaggattcttgtattttatttttattattattatttttttgagactcactctgttgcccaggctggagtgcagtggtgcaatctcgtctcactgcaacctccgcctcctaggttcaagaaattctcgtgcctcggccwcccaacatagctgggattacagatatgtgccaccacacctggctatttttttgtaattttaataga

SEQ ID NO: 228501 - DNA, 547 bp, Homo sapiens
acgtgaagttctgactaattacgagctgggggagggatgaagcagtgagaaaatggtgattttgactgtgaaaagttcaactgaattaaatttaaacttttaaaagaaggaatctacaaatgttagacaactatgtaagggagtatttagttctgagttggtttaaaacccattcttcatccagtacccgtaacaaacaacagaaaaagcatgctgacatttcttagcaaaaactgataaaatgagtctaaccacaatgacatttttccagctggcataatcatgagtcattcctttctctgaggacttaatgtcaccacaaaagcctctaacttccccatatttatcatttggaaatgaaaactgtttacttgtcatgcatgccaaagaatagattaaactgataaagaaaattataagattaataagtgcaatttacttgtcaaatggaggtatttcatcatttcatgaagctgtwccctccagggactccgtgcactggtgtttcgccacagagaccaggctgggaccagtctaaagacagtgg

SEQ ID NO: 228502 - DNA, 580 bp, Homo sapiens
ggaggataatctgtagaggctgcccacatttcttaaatcaagacatggggggttaagtgtaacatggtaacacctaccagacagactaaaatatactattaatcctccaaattaccaaaagrcacacacacacacacacacacacaccatacacactgaaaaagaatgaaagaaaggcaattcctagagtaaatgagagaataaagaatatattgaaaacaaattaaaatcccaaaagttaagctaataatatgtaaaagataaaaagtaatactcgagtaatgcatttagataaaataatgctaataaatgtatacatgataacatgcctattggagaaaagacttgcagaatgaggtacatacaagtgggacacataaagtgaaaatgatgaagataaaccaggaaaatgctaacaaaaagaaacctagagttcaccataaaaatattagacaaggatgaagttacatcagaaagtgataaactagagaaaattgggttattaacacagttacactgagaatgcaatgctttttatgtaccaaataacaagaagaaacaaaaacccataaaacatatg

SEQ ID NO: 228503 - DNA, 598 bp, Homo sapiens
tgccaagtacatgacacatcttctgttcctgcacagtctggtgaggagcatcttctgttatccccactttatggatgcagggtctgtggtcagtgagggcagctgcttgtcctcactgacagtgagtrctggagagggacttgaatccccacccatctctgttccaacaccagcacattcaagaatcacatagaactccaccctctccctctctcttcccctctccttttcctttgtgtctacttaacttgtattattgccatttgcttcttttcccctcagtgaagtgtgagactggtcagtgtttttttttttttttcttttccccctgttcgttcccaggaaacagtgaagtttatataagtctcaatcaaagcagccttccatcaccacgttccatcatctgcccaaacttctgcttcctcttgacatttaggtctggggtggagggcaaaggctgtcaccagagaaaagccagctgctcacagccacaatgtctcacatgctggtctgtcctcagatagcctgccatgtctcagggtctggttctcaacctcaaaagtttccaaagatgacaaccttctcgcagagacagggc

SEQ ID NO: 228504 - DNA, 528 bp, Homo sapiens
ggagcagaagaatcattcagttgaactcggtcaacccataaattatgggacataatgataatactgttttaaaccactacgtttgggttggtttattacataacaataggtcaatggaacaccatggtagcatatgttgaagtgggaaaggaaaaattcatcttcataacccacgtttgctttcagaagcacaaaaaaggggtgcttttctttctaggttatccatatktgttgaaaaatgggattttaagatcatgataggtgctgatcttcagctgacaccgaggaagaataacagtcttttagcaggcccctgtgattttgtgtctgatgctataaatctcaaaattacctgctgccagaatttccctgtatgcctcactacttttgcctttagggtagaaaacattaaagccgtgtaatgatatttccatcttaatggatggtgtcattcttcacatcttcttcctcaatataagtgcctatggctttctgtaagtactaggtggctggaaaaatttcagtatc

SEQ ID NO: 228505 - DNA, 503 bp, Homo sapiens
caacccataaattatgggacataatgataatactgttttaaaccactacgtttgggttggtttattacataacaataggtcaatggaacaccatggtagcatatgttgaagtgggaaaggaaaaattcatcttcataacccacgtttgctttcagaagcacaaaaaaggggtgcttttctttctaggttatccatatttgttgaaaaatgggattttaagatcatgataggtgctgatcttcagctgacaccgaggaagaataacagtcttttagcaggcccctgtgattttgtgtctgatgctataaatctcaaaattacctgctgccagaatttccctgtatgcctcactacttttgcctttagggtagaaaacattaaagccgtgtaatgatatttccatcttaatggatggtgtcattcttcacatctycttcctcaatataagtgcctatggctttctgtaagtactaggtggctggaaaaatttcagtatcatactt

SEQ ID NO: 228506 - DNA, 588 bp, Homo sapiens
ctcttgtcaaaggccactctcctttttagagagccagcatactgtgatagataaatgcatagattctcygacttccgtgttaaaaatctgcctcttgctagatgtggaactgtggcaagagatatatttatctctgcctcagttttctcagctgcacctgcttcataagttgttccaagtctccaaatacttttccaagtccccactgtaaaacctgagggacagaattaggtgagggggtgccctccatggagatcaaaggagggagaacaggagttagatgcaaaagagatttctaaggttttaaagaacgcatattatgaaaagaagagccggtcttaatttcattgttccctattccactgactttttctttgtcctttgttagcacagacaaagacagcaagaaccttgaagaaatagcaagtgagggaaaggaatatgggtgctgcttgacctcagatattctaatgtatttggtgagctctgtgtgtggagcatggaacaacagaagcagctgttctctccagactcattctgtaacttgatggtagaagataccgcaggcaggagaaaaagaaggggaag

SEQ ID NO: 228507 - DNA, 589 bp, Homo sapiens
tctgaaggtggaattactcatctgctttctggagaagagctgtgggtaacattaacttctcagctgctgctgtgcagagccccggttgagccataactggaggctcaggatttgaaacacgctcttgtctaagccattacatactaaatgaatccaaccctgcctccagcatcagaaaggaagaaactcagatttcttcactaaaaattctccttccacattaacatttcatacctttaggggaaaaattgctttgtctttctctttcttcyaaaataagaaaatgcttttttggatattgatatttgaggagaagggcagaggaaaaaaaaaaaagcttttgctgaaagaaaaaaaaaatcaccctttctaaaaatctaacagttcctaaggcctctttccccttatagaataaagggagcaaaagagattcatgacctgtacagcagatcccaggaaactgtttttgctcatggttatctggtcaatagctcaggcagtataattttcaaaaaatggatgttgcaatagtagcaattcaaattaatgagcgtatttttaaactctttaaaaactaaacctgaaagca

SEQ ID NO: 228508 - DNA, 462 bp, Homo sapiens
acttaacctccttttaaaggcccccaaagccttttctgttgggtctccatttatccctatagactcgtctccaaccattttttcttctttgctcttaatgctttagcaacattggatggcttctggccttctgaacccaccatgatcatctgctcctctatggctttacattttcagttccatctgacttgcgtgcccacctataactctataggtttatatttactcaacattatctcggtaagtctgactccttgcccgatgacgagctcaytaagaagggtctggttcatctcccagtttctagccctagcagagtatcctggctcagaggagctactctccaaagtttggggaatcaatcatctattcctctacagcataagccacttaaaaattcccagttctccataaacactttctattggagaacctgctggcaaataatcataaaacaaaatt

SEQ ID NO: 228509 - DNA, 392 bp, Homo sapiens
gttaaaacaaaaacactaaagtgggaatagataaggaaagggtctaaagtgtaaacatgtattacatatagasttagagcctatcttatatttaatcaactagaatctaggcaaatttaacactaataaaaatatttacatgtttttcaaattgcttcaccaaactctttttgtttaaatgtgcccctgagtatattaccaaatgtgttaaatgtgtcacccattaaaaaatggataatgaaggattagctaatgagtcatttgaaggtcctgcttattaatttttatagcttcattacctggaacctaatcatcaactgttatcaatatcctgggagaagtggaaaaataaaataaaaaattctttatttattataggtaagtttctgtag

SEQ ID NO: 228510 - DNA, 557 bp, Homo sapiens
attctttacatcgatgaagcagatttggtcatttcaacaaatatttatgtagcttctactacattataagagctgtgtcaggtgctggaggtgttgaacacaaaaataaatatggtctcttttttccatggtcttacagtctagtagaagagataatggcaggtaaaaacttcctaaaatgccaaagagaagctggtatctccaatatggagataaaagcttcatgctgtgcaactgtagagaatagtggaatacactgttcttgcaaaatataatgaygtgctctgaactgtaaaccacctatgttcattttcatgcctacttatgtggaaccctgaagctcaatcaatggaatggaacagcctctagataacagtttctacagttgctttggtcttttggaacaaaagaataggtcagccaaaaaataacaattgagcctccattctgtgtgcaagactctatggaaagtcctattctgcttagttgatggcagtgaaaatgagacttataagaaatcaagcacatctgcttcttgggtagccttaccagtgtaa

SEQ ID NO: 228511 - DNA, 629 bp, Homo sapiens
tcccaaactttccattgggtaataacgctaccattttttaaatttagcaaaattacgacattgttctcttacttaaaaattaccattaacaaccagggaaaacaggatacaaattttaaaatgaacatttagaaattgcatcacttaataatattattctttaaataatgtcttgttagtgttttacttcagttggtcagcccgattacaatcttagtttaaagatgcaaatttctacctactctgaaatagcactaactctaaaaactaaaaaaaaagtcatgtgtatccatattagaaaattttaaaattctaggagagggtgtgctgtatcaaaaggacattttgtcactgctcacagcctgaagtatcctctcatactttcttaaatttaggtatcacatatctgacttttgatcatatgattccagaaggctgtctgaccactccagttctactcagcacccctctgtgcaaacctctgatgccaaatgaccttggtcaaccactagaagaatccccaaccactccttttcarctgccttcaactactgatggatggtgcctccatacatgactaagtcagacatggtctatttaggataggcatttaaactcaacgcacgggt

SEQ ID NO: 228512 - DNA, 316 bp, Homo sapiens
agtaaggaaacaactactattgagttcttatttttaaaaaagcacaaaacwtgaagcatgtttctataaccttcctataaacttgcttgaggtttgctttttttggtcttctctgcatctcttgacatttgaagtaggatgatatcatgtgagtaaatgctggcaatgtccttgatcaggaatttgaagctttgttgcctagtccctacccaaatacatcctagtcatgtcacctgcctgagacttcattttgccgactgtagaatgggtatgtaatgccccaccataaaagtagactttgcatttcagtcccttt

SEQ ID NO: 228513 - DNA, 615 bp, Homo sapiens
tctttctagtaactactctccatggagtacagtccttatagatgatggtgaaaacacaatgtttatcattgttcctggagccctgaagctaaataactcctatttaaggtattgttactctgaaaaactgcatcagattttaaatgaatttcaaaggtgtaaacctgacctgtccataggttcacattgggactattcagtctttaaatgatttatttraagatctaaagggcttaaatacccaaatatagttaagatcttgataagattgcacagtaatgtgtataatgtggtccctgttttggaataaaaagaaagaaaaaaatttaaatatgtgtatacatttatatgatcatagagaaacataaaaaaggaagccagattatttatttgggtacacaagaaaagttggaatttattggcttctttttaatatatatttggactttcttccctgtaacaaggataaaatagtaagtttgtaatttaaaattatacaataaatatgtaataagaaggaaggatggcagaaaaaaagcaggtagggaaggaaggaaaatgaaagttattcttacagttcacttggacttcatttgctaattcagagacatattt

SEQ ID NO: 228514 - DNA, 453 bp, Homo sapiens
tttctgtgcctcagtttcctcatctacaaagtggaaaaacagcatttatctcatagggttgtttagttaaatactgagttaatagttacacagttacttcatactttaatatcaatatacttaattttaatatacataatatagttaatattttacaagtcctcasaacagtgactgtcatatagtaagcagtatttagatgtttaattttttaaattaactcccatggtgtcaacaaaatcactcacgtgctgaagactttctggatccacattccagtcaagacctatctctctagatactacataccctcaaactgaatgctttgttattggtaccttgagatctagaagctctcgtaatgcttttttctttctgctctagctcaagaagtggcaccacccagttgcccaagccaggaccctggaccttgactttcttctgcctcatctg

SEQ ID NO: 228515 - DNA, 577 bp, Homo sapiens
catagcacttagcagagtaggatcctagaacagggtgacaactaaataagtgtgctgaatgaatggataaacctctactacataagtgtggtgaaataaatacctgcatcaggttcctggtgctctggaacactgaaagctaaaggggcacaagtgatgggactcctgttgggaaactgttttcttagtgaattatcacatataaaacttaccattagatgcttaaaaaaatattaatttctaactagctattaatcccatttgaagagatgcatggtactggtagtactgatggggtggactcaccagtgatatcaggaaagagttgcatggaaatagccagtggttgacttttcttgggctcaacacttgactcatagctttatgaaaaccgtgaccccaacttcttacttcataaaagaaagtatctgtattatttaactacatgagcacctgaatgtacaaaactgtctgttgagaaaagatgtaagttctgtttatgkcggtcagtctaaagtggactccaaaatgtcttgtgcatatttttaaatgatgcttgaaattttagaggtaaata

SEQ ID NO: 228516 - DNA, 485 bp, Homo sapiens
tgagatgtggaccacttctatctccaaatcacaagagtaacttacaaatatctaatgcagcccactataccctcatgacaggcatggagtgctgcagttatgcaagaaaaattaggcatagacttaataacagatataagaaaagacagcagggaagaacgatgaataaaaatgaaagactattcccagagtggcttgaagatgttacataaaaaagccccaacctatgtggtctacagtctatttttgttagtcaataaagtaagtttcaatgtgggaattrccagatatctgtgaaatattacccttctaatacatggcgttggcaatatgcagtctatttgattatatagtaattagacactcaggcccattcttatcatctaaacttagaccatttttcctgctggctagaacctcatctaaaagatgcaactcaaatgtacaattgctgctacttgtcagctgttctgataaagcattag

SEQ ID NO: 228517 - DNA, 398 bp, Homo sapiens
catatatttttagttttaaatgtctatttgtttctttttatagattgtagttttccactgaaygatctttttatctgttttgtcttttcctcttattttcttaaatatattactcatagtaattttttaaattcctgtttgatgatgccaatatccaaatcactttgggaatgattctttgccttttattttccttagtttttagttattcttgcctgttttttttttttttaacataacatgtggacatggacaaaaaattatagaggctctgcatgacattatcattctccaaagacagttttcttctggtagacagagtactggcagatcactttgatcttaaggcttggttttgggtgttgttaaagctgcttgttttggctttgaatttattc

SEQ ID NO: 228518 - DNA, 429 bp, Homo sapiens
tcttgactgccttgctgaggtagaccgccttggtaatgatttggaacgagatttagactggctataagaaaatcgcctgtgtcgagacctgcaaacatccataatgttagagcatatatttcacacaaaataagagatcaggaaataacactttcaggaacttacatactttacataacattagttatatttttactagataagctaaaaaaatttctcattttattatgcatgcttttggttcaaacataagtaacaagtttgtaatatttgttatactagaatatatggccaaaaatttttactttgctagacatatagggatcagttctgaaaaatacactgcatatttggtctgrgttatacagctcttaagaggtacaaaaatctgaagaaaaaaagattaaaaaaatcaattatttacagttc

SEQ ID NO: 228519 - DNA, 612 bp, Homo sapiens
tttatggtgctaaacacccacattaaaaagttagaaaaatattgttaacaatctaacatcacacatagaagaaatagaaaaaacaagagcaaatctactccaaagctagtagcagaaaaacaaaataaccgaaatcagatttaaatagaatgaaactgagatgcaaaaactacacaaaagatcaatgaatccaggagctggtttttagaaagaacaaataacattggtatatcactagctagactaataaattaaaagagagaagattcaaataagcagaatcagaaatgacaaagggaacattaccaccaacccacagaaatacaaaaaaaaaaaaaamaaaactcagtgactactatgaacaatggatacactcttggtaatgctaaacctcccaagatttaaccagaaagaaattaaaaccctgatcagatcaattatgagttccaaaattgaatcaataatgaaaaacctaccaacttgaaaaaattctggatcagagagattcacagcctaattcttccagaagaatacaaaagaaatattaccaatcttattcaaagttttacaaaaaatcaagaaggaggaatttctttctccctcactctatga

SEQ ID NO: 228520 - DNA, 545 bp, Homo sapiens
caacccgcaaattcttacaaaggcctttcactgttcttaatgtgatgggcaaagttcttgcaatgactggaaagccttgttttttcctcactccttctaggcatcatcttcttcttccaggtcctgtaatgccatgtttcctcacacacatgccctgtcttccatcagtctgtaaagctttcttacaaacactctgcctagtcacctccaattcatccttcagattgcaacccaaatagaccttyttcagggaagtctgttctgagccctcagattagaactattccctaatctgttatgagatctgtctgtagtttctgtatataaattccatagattgtttcttttattttttttttttttttaccaatttgaatggttctctgctctttccaacaactgattctaaataagagacattggcagaaaaggaagatttagaaaaatttatttggaattaagaaacatttagatatttgttgtctgtatcttatttttggtgaaaaggtgttccaaaaccattttgcactaaaaaaggaaatact

SEQ ID NO: 228521 - DNA, 545 bp, Homo sapiens
caacccgcaaattcttacaaaggcctttcactgttcttaatgtgatgggcaaagttcttgcaatgactggaaagccttgttttttcctcactccttctaggcatcatcttcttcttccaggtcctgtaatgccatgtttcctcacacacatgccctgtcttccatcagtctgtaaagctttcttacaaacactctgcctagtcacctccaattcatccttcagattgcaacccaaatagaccttcttcagggaagtctgttctgagccctcagattagaactattccctaatctgttatgagatctgtctgtagtttctgtatataaattccatagattgtttcttttattttttttttttttttaccaatttgaatggttctctgctctttccaacaactgattctaaataagagacattggcagaaaaggaagatttagaaaaatttatttggaattaagaaacatttagatatttgttgtcygtatcttatttttggtgaaaaggtgttccaaaaccattttgcactaaaaaaggaaatact

SEQ ID NO: 228522 - DNA, 539 bp, Homo sapiens
aaagtttaaaaggtcataggggatattcagccacagacttctagccttagctaaaagattgtgggtatattccaaaaggcaccaaataaatattttttccactaaaacagtgtttttggtctcttgtttcttatgttagtctaaagtaatagttaatttccttaggagatcttttcttctgtattttacaaagcatttatgttccacacacacgcacacatacaaataccttgggcagagaactaaattcaattctaaagcacagcttgatacaartgtcagagaattaaaaataaaaaaaaaagcagcaattaaaaaaaaaagctacttgctaaaaaatcacacaagacctgaaatgcaaaaaaagggaaaagtatttggaagattgcagagatattcatgctttagaaaaactggatgaagaggcaatttctacctaattgttgtatcgtcaatttgccaatgatgacaaccaatttgcacatttaactaaaaagaaaaaatattaaacaacatctgaatgcaaacgagaagttttg

SEQ ID NO: 228523 - DNA, 490 bp, Homo sapiens
gcatgtggtgttcagtttcattaatatggccagtaactgaaattgcttatggggaatttccaatgaggttatctgcagaaaatctacttacggtagacatttgtttgcatagtaaacatgcacctaaaaattctggtgttcattaaatctmtgcataaacaaattcagttttaacttctgcatcaaaacacctaattcagaaagctccattcacagcatagcctagaagctcagggaggccaaggagtttgcttcagacatgcagtgaggcagtgacagactgaccctatagatgctgcattctaaacctcatatcgtaattatttccccattgctacaaatccacaagtacattgcttgtaggatcacgagaaaaatatggctgaaggtaagttttttcctggattctgaaataatcagagaatattcctaggatttatattctatatttccatttcaaaggctttccttttcagctagcctgtctctc

SEQ ID NO: 228524 - DNA, 529 bp, Homo sapiens
ttgtttgctgtgtgttcctgagaattgatgttcwtctacaaattgtaggactccaagtctctgtgttaagaaatataaaatgaaaatgtgcatttttctcttttttcttaaggattattttgtactagcaaagtgaagtacagcattacacaactgcccaattaattcaattatcatgaatagaaaatctagatattgttatctgactgtcctatgacagcacttttgttttagttatctcagtaattatttggctctgtattttgtttcctttaatgcacacacagtaagacttcaggttgggaagtctctttctttaaattttttgaagacagggataggtcaagtctcatctgatatggatctatgggagcagttccaccatgtaatggtggtgtgtgctcaatggaccaaatgctccatgtcatttggaacaggacctactccaaataatgtgcatgaatttatttggttgtcaccaacagcccttagagcactatattattctcatttttacagtgagaaaact

SEQ ID NO: 228525 - DNA, 494 bp, Homo sapiens
agacaaatgtattacaagtttctattacatacttgcattcaatttggaagtaatttgtggacactaaaagactggatgaaaagaatgtagttccagataacagcagaataccctcatggtgtgtcaaaactttctgacaggagggagtagaaaatgtcagattcttcctctttcatgcaaaaaaattgctcagttcatgaaactgccttargatgcaagtacaaaaattaaaatattaatgaaaatacacaaaacagcagctttcaacaacccccaccagtctcaggaaagaattcataaaataagaatttcactgggtcctgtaatgaggatcaattgggaaaaacaaggttcctattcttattcatttctcctattcttccccgcaaacttcacagtttttacgttctaattctcatatactgcaggcaattttactttagattttggatcaagggtctaaacctgaaaactctctgcttctgcctccaggt

SEQ ID NO: 228526 - DNA, 621 bp, Homo sapiens
ggaggctagtctgtttgttttctgcagttatgaccttgagtgccaagattctaattaatttgtcaatatgcttctgtgcatgtcttaaactatagcagtcagcaaagaaattttgcaatgagcagctctttcttccagcaatccaaacacttttaattttttttactagttatataaacattcacaaataatttcagatagctttttaaaagataagaaaaagagagtaaaaaagaaaataaagatgtgactacatgtattctagcaattacggttaaacttcaaattcaggtcagttttctggatgttaagcgatcaaattaaaaaaataaaacaaaaaaatgcatgaccctctcaacaggaagtaarggggctactagtttttcttattgctgaatcttgaagagttgacataccggacaataatctcaataacatctttagcaagcacagaggaaatttgcacataactgcggcgatcagtaacctgtgataaaagttgagagtgctgaattaaaacactttaatgatggaagttctgtgagagggctaaatgatatagttaggtgtgtagacctctcatgttcaaactggtactgaggagagattttaacatagtcc

SEQ ID NO: 228527 - DNA, 598 bp, Homo sapiens
tggcatgcatcaagggcaatcacagtgttgatgaaatacgctgagcctgggccaaaattcaggctcacacagcccactgattctgtattaggaaaaatccttgtgcagtggaggcagtgtgttaataattacacaggttgggtaaattgcttagataaatgtagagcagtgtcagatattcctatggggaccacctgatttgtwccccgctggaagtcatatgtcctttcttcagtgtttgagaatatgacaagccccagtgaatagaaacaaagagacagagtcctgagtaaacacacatattaatgtcagaaagattcggaagcatcaattcagaatgtagaaggatggtcctcaaacaagattcaaatataaactgccacagtttgggtcagtgaatatttctagggaaatctagcagttcatctgaaaccaaaattcaatcatactgcagtccaataacattgtacagtcagttctgttacaatacttgtgttgaaaatctgaagttgttccaatgtgactgatatattaagaaaaaattagaggacaagccagattttttatacacttatgccagactttttattcatgagaa

SEQ ID NO: 228528 - DNA, 598 bp, Homo sapiens
tggcatgcatcaagggcaatcacagtgttgatgaaatacgctgagcctgggccaaaattcaggctcacacagcccactgattctgtattaggaaaaatccttgtgcagtggaggcagtgtgttaataattacacaggttgggtaaattgcttagataaatgtagagcagtgtcagatattcctatggggaccacctgatttgtaccccgctggaagtcatatgtcctttcttcagtgtttgagaatatgacaagccccagtgaatagaaacaaagagacagagtcctgagtaaacacacatattaatgtcagaaagattcggaagcatcaattcagratgtagaaggatggtcctcaaacaagattcaaatataaactgccacagtttgggtcagtgaatatttctagggaaatctagcagttcatctgaaaccaaaattcaatcatactgcagtccaataacattgtacagtcagttctgttacaatacttgtgttgaaaatctgaagttgttccaatgtgactgatatattaagaaaaaattagaggacaagccagattttttatacacttatgccagactttttattcatgagaa

SEQ ID NO: 228529 - DNA, 562 bp, Homo sapiens
ctagttaatcttctatatgtgcagtatcataagcataataacattgattactatggattaattttaaaataatattgagaacaaatattttcatgctttatgaattagaaaaatttcccataactctattggtagactatagtttgaattttctaagaaaattattttgtttgctaaaaagtgattttcaatgagtatactgtttcataaagaacaaggaattatatcattaaatattacttcctagaatttaatttacctcatggaattataataaaaacatggtagtatattgatttattttgaaagttttcagaaaattaaatcttattttgatagaatgatatttgcaaaamcaataataattggaagacagcaatctctcctaataacatttagtaatttttgtttatcctggcaattttagccaaagtttctgaaataatgtagttgacaaaatggctgctctgaaatgtaaccaaaaaatgacatttacctgtgatgacagtgtatcaagcttttaaatagtgagtcttttgttttagagaagcacaaataagta

SEQ ID NO: 228530 - DNA, 609 bp, Homo sapiens
aaattaaatcttattttgatagaatgatatttgcaaaaacaataataattggaagacagcaatctctcctaataacatttagtaatttttgtttatcctggcaattttagccaaagtttctgaaataatgtagttgacaaaatggctgctctgaaatgtaaccaaaaaatgacatttacctgtgatgacagtgtatcaagcttttaaatagtgagtcttttgttttagagaagcacaaataagtagaatactcactgtgcaatgtgctctaagataagaagtttacataagaattctgaaatacattagaaattgttttaatttttaattttagttttaatggaagtgaaccatctgtctgccaatacctagaatgatcagagggcattaaaataactattaagttgctgwcttgtggtgctgaaatgtagagtgcatatggcaacctgcacctataataacgtttttatttctcttgatttttatcataattccagatgtttatttgctctttcctagtagcctagaaatgtaaaccttcaataataaaaaagcctgttctaggttcttagattatgaaaataatcaataatgagtacaagaaaaatg

SEQ ID NO: 228531 - DNA, 423 bp, Homo sapiens
attgagtgggagcagggaccaaaggggcaactcctgttttttttggcttgttattgttagcatgaaacctctgacctacaagtgagctggagcaggggcaattggaaaggcctgatatttctggccttccacactttaggcataccccttgctctacaagtggagtccaggcagggaaagggtaggacttctgcaacatgaggctagggagaggtgaygagaaaaaccagcaacttgcctttcccagtatgaaatcttaatcccagaatgatagctttggggagagagaccctttgtcttcctggttgtacatgcatctggtagagttttgtaagaactggagtggtgggtagtgatagtggggtaaaacatgtctcaaataccaaaaattttctctagccttaccagaatttagtaggttct

SEQ ID NO: 228532 - DNA, 598 bp, Homo sapiens
atagttctatttaacatgatgcaactatcaccatacttgaccccatacagaacttcttaaattatatttaatttccaaatgagacaataacaaggtaatagttctatttaacatgatgcaactatcctgtgcaccgaaaatgcatgaattccttccccaagatttgacttttaacattaggggttttaattcttcaggattgtgatttttgggagattagttatcagggattttaaacttcagaaattttgatcttttgggattctgatctctcaggatttcaacattggggatttcagcatttggggttttgcctttcagaaacatgatcagagcccagtttttactaattccaggagtgggggtgccctatggggccagaaaggatgaaagtcccagctccatacttggccttctctgagaccacacctatggtactattaggggtgcctccttacagccctgcaagactggatmcctcctcagactttgctggcatgggtggaggtgacggcttaggagtttttgtttttgtttttgtttcacgtggggtttctgtttaaaagtttcctgtcttgctaggctgcctccttcccat

SEQ ID NO: 228533 - DNA, 656 bp, Homo sapiens
atcacttttctctattctatctgcatgttatattcttgtattcaatttagtccataaataagtactcaacaattaaaaaacattgtattgcttttattggctattacttatcctgaatacaagtatacgctttgtattaacttgaactttacattgagtaaataacgttccctacaggtattacttcctctatcttctgcaatatttatgaatagtagccttttcctccccccttttcacttaaaaaatgcttaatttctctcctcctccctgrcatgaatggtttctgattaacttattttgaaaaagaattaagagaggtaagatataaaggaaaacatggttattgaatacccctcctcactggttacagcctaagtggaatccctgataattaattcagtgctttgagtgcttttctaaggatttaattatgcctcacagataaagaaatataaaaaaattatgaataaggtaatacaattttattgaacattaaaaatggagcagatccagaatccttttctttgtagcttagagtagatgcagacagatatacatgtagttggagaaaacagaaaaacagaaatggtacttgagacttacctgaaggactctctgagagttaatattttaagtcagtagggacatatgtg

SEQ ID NO: 228534 - DNA, 524 bp, Homo sapiens
tgataaatgtccatattaaaatgaaatcttcacaatttatgttcctctgccgyagctccagccagtccctccttttggggtccctgacttcccccaacatctcttgtaaggcaaatctgatgttaataaatttccttaacatttacttgtctaaaaaggatcttatttctttttcacataagaagcttagtttggctgtataggaaattcttgcttggaatttcttttcattaaggatgctcaatataggccctaaatctcttctggcttgtagggtttctgctgaaaggtctgctgtttgcctaatggggtttcctttgcaggtgacctgccccttctctctagaagcctttaatatttttttctttcatattgactttggacagtctgatactatgtgtcttgggaatggtcttcttgtatagtattttgcaggggttctctgaatttcctgaatttaaatgccaacctctctagcgaggttggggaaattttcatgtgcaatatcctcaaatatgttttcc

SEQ ID NO: 228535 - DNA, 524 bp, Homo sapiens
tgataaatgtccatattaaaatgaaatcttcacaatttatgttcctctgccgcagctccagccagtccctccttttggggtccctgacttcccccaacatctcttgtaaggcaaatctgatgttaataaatttccttaacatttacttgtctaaaaaggatcttatttctttttcacataagaagcttagtttggctgtataggaaattcttgcttggaatttcttttcattaaggatgctcaatataggccctaaatctcttcyggcttgtagggtttctgctgaaaggtctgctgtttgcctaatggggtttcctttgcaggtgacctgccccttctctctagaagcctttaatatttttttctttcatattgactttggacagtctgatactatgtgtcttgggaatggtcttcttgtatagtattttgcaggggttctctgaatttcctgaatttaaatgccaacctctctagcgaggttggggaaattttcatgtgcaatatcctcaaatatgttttcc

SEQ ID NO: 228536 - DNA, 493 bp, Homo sapiens
gggaaatccttttaaccctcattgtggtacaaacatctcaattttgtttttatacttcttcatagaatggtagccacagagaattatcttcaatagtgtcaaaagaaatcagttattcaaacaaaagtttggaacccaaacaagaccaataatgtatttattggtaatatgagcttccaataatgcccttgaaagctaacacaaggaaaatcatgtcagtgtatttaaagcatcctcctgttcctmttttttttttttttttttttagtttatgttagcacaccctcaggtatattttctttttggcttgccagcaatgttaagttagctggtgtttttatgagatgccacaaacatattttctttgttgtagatatctacaagaagcaagtggcttgaattgtcactttctctgacatattttgctgctttttggtttctgatatcagtttttctaactcatgagttctcagtcagggctgaatgctccttc

SEQ ID NO: 228537 - DNA, 592 bp, Homo sapiens
atgtcatgtgtatcctgtggctctttgtatcctgtcatgttgtaacatatcctattttatcactgatatttcttttcaacaatcagtattgaaaggctcatggattcttgatcactgactatagatgactaaaatgactcatgctgatatggtgcaactcaactcaggggcttcctgccactcttctacccaattcctggccttctccctcaagggaaaaaaatatattcctctccacaaaattttgggttacatgtttaagaaaggcttcatgggaagcaggaaaccagaaggagtttgccaggatagayagaaaatcaacgatgtctttgaatatatttctgcctgccagatttctttctccctgcctaaacattcgacactgcaagatgttattacaacaacatggaaggtaaacttacttcataatatgttgaaaaataatttataactgttctaaattttactcctaaaaatatgctcttggattgtcatgttgcaatacctgtctctggaatgcagtgagttaaaatatcatgaagcactgtgtatcatacaatactaaacaaatagtactttaaagctgcaccac

SEQ ID NO: 228538 - DNA, 442 bp, Homo sapiens
cgatccgcctgcctcggcctctcaaccattttattaaatactgaccttgaatttgaaaaacatatttgaccatcatgaccttacttcctgttattgtttcctgtttgagcctggattctcttccccatatttttaacccatttgagagttcacataaacttaatggacatcagtaatataatggttttatatatatatatatatattatgctaagttttctgaaacctcacttaagctgatgcattttgtataaaaataacacaggtatctcacagtcattttcagtaatagaaaagtttaaacaatkaaaactatggtttgaaagcaaactaaggttaatctgattgtcttgatttgttttcattcaggatacaattttattttgactttaaaattaagggaagaaatgatatttcattgttgtaaaagtattcatgaatt

SEQ ID NO: 228539 - DNA, 565 bp, Homo sapiens
catggaaccacagctcactgcaaacttgacctcccaggctcaagtgatcctcccacctcagcctcccaagtagctgggactacaggtgtgtgccaccatgcttagcaatttttttttttttttttttttttttttggagaaaggaggtctcattatgttgccagggttgttctcaagcaatcytcccgcttatctctcaaagtgctgggattgcagtaataagccatgtgcccatccctctctttattttgaaatcaacttaggcctaaagtgaaagcccatttcactgttatttcagcctaaattaaataacatgccctatgtacttagtcaatgtacatggcaagggtactttataggatattgtacaattgggtcttcttggccaactaaataccagaaaacaacaacaacaaagttttaaatagatgttaatatttcctcaatagaatattaaaagtagatatgaaatatcacagagttttaatcttatcagaataaatgatattattatttgcattgggaaatttatgtttgtattaggatggtcttttgaagtgaagaa

SEQ ID NO: 228540 - DNA, 330 bp, Homo sapiens
tacgaaatttttactttgtagatagatactaattaygcaaaatactgaacagtatcttatatgtactaagccctcaatgacatagccacgattgctattattagtatactggttgctgttatcattttttctggttcttattctactcctattgtggagtagaatctgtgtcttattttacttctagtgcattttcaaaacacagcattatttaaacaaatatatatccatttaatatatttaatataaagtttcaaaattatttaaatcatggtaataaatctttagaaattaagatatttgaacaaatgtctacaaattaccctgaaa

SEQ ID NO: 228541 - DNA, 330 bp, Homo sapiens
tacgaaatttttactttgtagatagatactaattatgcaaaatactgaacagtatcttatatgtactaagccctcaatgacatagccaygattgctattattagtatactggttgctgttatcattttttctggttcttattctactcctattgtggagtagaatctgtgtcttattttacttctagtgcattttcaaaacacagcattatttaaacaaatatatatccatttaatatatttaatataaagtttcaaaattatttaaatcatggtaataaatctttagaaattaagatatttgaacaaatgtctacaaattaccctgaaa

SEQ ID NO: 228542 - DNA, 513 bp, Homo sapiens
ttttgtatttgaacttatgggttaatgctggaattaattaaggttttgggggactattgggaagacataattggttttgaaatgtgaaagggacatgagatttgggaggaaccaggggcagaatgatatggttaggctttgtgtagccacccaaatctcatcatgaattataactgttataatccccataatccccatgtgttaagggagagaccatgtggaggtaattggatcatggagatagttttcctcatgytgttctcaggataatgagtgagttctcatgagatctgatggttttataaatgttttgtagttcctcttgtgttcattctccttcctgccacttgaaaagaaggtgccttgcttccccttcaccttctcccatgattgtaagtttcctaggacctccctagccatgctgaaatttgagtcaattaaacttttatcctttataaattatccaatcctgggcagttctttaaagcagtgtgggaatgaactaataaaatt

SEQ ID NO: 228543 - DNA, 509 bp, Homo sapiens
ttttaaaaagtgccatggaagctttctgatttttcttttactctgatttctgcattcagatttcagtgtttccttttatttctaaggcaattagaagaaacaaactgatgacaaagtcttcatcaagtctgttttagtgttgtctccacgtactagaaccattttttctattaagaccctgccttcaatctggattttatcatacaacagcgtagacaaacagttttaggaaccttgatattaytgaatgacacagattactggaattttatttacagatagcaaggaggtttttccatgtcaatcaaaatttttaaattgcatttcaaagacatgtttttcaaagtcaattcttgcattaccatgattgcttcagaaaagaagcacatactgaaattgaaaaggtaaagagtttaagaaagagataatttacatagctgtggaaatctttaaggacaccaaaaaaaagctcagaaaaatagtgtcactatcagagaggaagtattacc

SEQ ID NO: 228544 - DNA, 385 bp, Homo sapiens
catttttgtctagtatgcatttctttaaatcaaaataaaagatgttaaagctagttattgtttaaactgccactttattaaaatgcaaagaagttgaaattttatacctagacttaagacagaagtttctagtgggtaataaatagaagtgacagagccagtctccaaaggaagtagtggccctgcacctgctaggtcccaggttgcaattctctcctatttaatagcccacagctccagctttttagtatatcctcytcaaattattctaacttgacagtgctctcttgttcctcttgttaatataattgacatagtcatcatctgatacataatttttcactcaacagtgtaagttttctgtatacagctatggtttcttcat

SEQ ID NO: 228545 - DNA, 417 bp, Homo sapiens
attaaacaaaaataggtattttgggaattgttatgatttaaaatatttctttattttgatatgttatasaacatagttttatacttaaaaagatgcataataaaaagaattgcagcaattaatgagttcacctacctaatccatgtacttgcaacacttcgagcatggatgtattgattcctttttcaaaaatcacatcaagggcaaataagaaaatgatgtaatagccataaactcttttttggtgtaatcagagtatacttgtttcatacctggacggtcataaacacagattgagatatattttcagaaaagtattatattttcaatggatttataacaaaatacaaggcattgatatttgtcaagagtaagataatcttagtgtggcagtctatgaaatatattataaagact

SEQ ID NO: 228546 - DNA, 417 bp, Homo sapiens
attaaacaaaaataggtattttgggaattgttatgatttaaaatatttctttattttgatatgttatacaacatagttttatacttaaaaagatgcataataaaaagaattgcagcaattaatgagttcacctacctaatccatgtacttgcaacacttcgagcatggatgtattgattcctttttcaaaaatcacatcaagggcaaataagaaaatgatgtaatagccataaactcttttttggtgtaatcagagtatacttgtttcatamctggacggtcataaacacagattgagatatattttcagaaaagtattatattttcaatggatttataacaaaatacaaggcattgatatttgtcaagagtaagataatcttagtgtggcagtctatgaaatatattataaagact

SEQ ID NO: 228547 - DNA, 565 bp, Homo sapiens
cttaggagaattattttctttattataccaactcacagcaattctaactaactgtctttttttccctcgctgttgtaatacatgtgtgatcaggttatattttgcctgaaaactgatgtgttcttctcggtacttcaatgatcttttactgttgttgttttacttcttctttgatggctctttcccttaggaagtcatataaacatgagccatacactaacttaggcaaagattatcagagggaaactagagaaaaaagactatatacattttttaattttcaagtttcaaagctgtggtccaagtgtaaaacaaaaaatattttagaactgatccaggtcatttcttgctgcttgctgttagatcaaaaattccgtggacttcaaaatgggtttaaagggaggactggactatgtgtgtggtaatcataaagaaactcacagctccactttcayaagtgccaattttccccaggaatgtcatcggagccattgtctataaaccagcagtctctatacaagagctcagtaccttatccttgccaaggctatcttaagtctagatg

SEQ ID NO: 228548 - DNA, 573 bp, Homo sapiens
cacacactcaaatatagtaatacatttaattcattttctctaatcttagaaaaactgctacatcacttagcctttgatatggcactaggcggttatttattctgtgttctaaaagagccattccactccttgtctctctatcaatctcttgtccgtttctctgttctaccatcaaytacatcattcgcaaacacttcaacacttcatcagaaaacaaagaaaacagaaaaactccaagtcactcagttggagcttcacttattattttcttccacttacaaaacaaatttctatcacctattatccttttcatcttcccttgtttcattattggttaatatcttcatctttcctctaagttacacaacttcctgcatagactcttaaatttttctaacttaaacaagcaaaaatacatccaaccctatgtttctctttagtaaggacaccccagttgttatgttgcaaataatttacaggtacaactggaaatattggccctcatagtctaaggggtactctgatgggatttagaatagtttggatttcgtgggctagatgcctgtagcaatt

SEQ ID NO: 228549 - DNA, 610 bp, Homo sapiens
ctagaataggttcttatagttcacttccagaaagttctttcttttggctgactaccatttcagccttttgtggtaacatagaaaggctgccgacccactttgggtcacttgcccaaataagcacgcaggaatgatggcatcccctgtttgctgatggacagccaccaagtcccaagggaagacaaggtcagcagctaagacccccaacaatgggtcccgctcggctctctgggctcctctgcagtgcattcccccaggtaccttatgcctttagcaacacggtccatccccatttcccaaacaagctctgcacgactccgcctccatgcctttgtctatgctctcccttcctcctaggctgcaagggttttctcactggtttccagcctattggagtccaacccatccttcaggattcagtcaaatctcacttcctcaagggaaaccttccctcctttttccagctagagaaaatcattccctccttggtttctattttgkgtttatttcactttgcctgatgtcaaaagtagtactggtttgtgggccaaaaatggatgaatgttggcaatttcatatggttcaacccaaattgtttgtctgtctgctt

SEQ ID NO: 228550 - DNA, 505 bp, Homo sapiens
accacatggcctgctgggtaggcctggcattggtgcagagcaaagggcaatggatctcaggctccactgagggagaccctggaggaaggagcrgggggaggagtgaaagggcccccacacccgggggggccaacgccagcagacctgcctcagaggtcggaaaaccccctgcagcctcaggagcacaagaggggtctgtttctgtggctaatgcaacaggtccttcttggggtgtgaggtctggttgtttcagggcatgcagaacctgagaggggccagctcccacagagaaaggggctgtgtgcaactgtttacaggtacctctcattacagacacaggcagggacctagaatgttagagctggtccagtggttcccaaacctggctgcatctgaaccaccccaggggcatgttaaagatacagacttacaggcccagaatccccaggaggaggggtagttctggagtagttgcgattctgccaaatttgtaaattactgctac

SEQ ID NO: 228551 - DNA, 576 bp, Homo sapiens
ataataagcacttactatgtgctggcactatgctgaatgctacactttgaacactctgaaactgggttataaagttgcatgactccctgaagtaccaattgctaatgggtgatgaaactggaattctcatccacaccagtttaattttatctctcttcatcctcaaggcctgacacattgcttggaacaccgcaattactctgtaaatgtaccatgagagaatgaatatatgaatgactgaatgaatgaatggtggtgccccccagtggctaatgcaaacatttgaagaatgtagaatggaaaggtaaagaargaagagagggagggatagaggaagaaatagaggaaaaatctgaatgaacattataagatttcaaaaagattggctaagaaatctcagatatgcaaagtatattttatttgcaggtgattttcaaacataaagacattttacatccattagagcatttcccacctttaactagtcctttaggagatatacagttgtccctcagtgtccacaggggattggttcgaggaccaactccctcaatgccaaaatctgaggttgctcaa

SEQ ID NO: 228552 - DNA, 428 bp, Homo sapiens
ttacttctgatgttgtacagttttaagaatcttgagtacagtgaagattgagggatttcttatccatgcgataggctgcatgaatcctgtatttatttaggaatgtgggttatgctcatggagttaattagtaaattattgactctacactgcatgtggaaggagataacctttcagcaaactgaggctgaaaagcaactcagtctaacataactgatcaaggtacatgttaacaattgctataagggatacagaataatctaaaatatgtgtcttagttcaagattcccagaagcagatcttgaggtaagagttctagtgtaggtagtttttttgggaggtartgcaagaaaacagcagtgatgaagtggggaagtacgacaaggaaagaaaggaaaccaataaaacaagttattaagtaaatcacc

SEQ ID NO: 228553 - DNA, 579 bp, Homo sapiens
aactccctcatgctaacttttagtagccacaccctccccaagactgactctgacaaccattgtcctgattgagggatgttctatcactagaattttttcactgcaagaattttacataagtggaagcatacaatatgtaatcttttgagattataaagacacagcctaatgtctttaatatttgtctaagcttttggttgtatcaatagtttgttcctttttaatgctaagtggtattatgttgtatggatatactagtttgtttatccatgtagttgaaggatatctgagttattttcaattttttgaacttgcaaataaaagtatatgtttgtcagttcaggttgctataacaaagtaccaaagactacgtggcttaaaaaacaacaacaaaaaacatttttcacagttttggacactgaaggttcaagaaagtgtgccataatgactgggttctggtgagggtcctcttcctagttgcagatttccaacttctctgtttaccctcacargggagaaagagagagctttggtgtcataattccctcataagggcactaatcctatttacaaggattc

SEQ ID NO: 228554 - DNA, 582 bp, Homo sapiens
aaacacaaaatgataatgaagagaattcctgtcagattccagcattgggggggatttcataaacaaaaggatgatgtcaaaaaatctcaagttctcctrcccgtctgttatttcagctgctgttaggacttgggctgtttggttaaggccaacaagataacaggtgcaggggcaatggacagagaatgtcttcagactctcaacacaataatgagctggagtttatgagcattgaaggactctgggaaagaacacaactttcctgagaatgttggatgtattaccccaaagggagtttgttttagcagcactggaactgctaatattgtgggtagaccaaaaatccctggagatttagtgctctgccaatgaagatgaaataggtggacataccaatatcttgagagatttttatgcatgagtgatggttgttttgtaaacctcgaatcctaatttgttgatagaattatagggtttatgatttcatttagcttattggctactttatccacatctagactaatgagcatatacttcacctggtgataattctaaaactggagtggggtggagaaaaaagta

SEQ ID NO: 228555 - DNA, 343 bp, Homo sapiens
caatcccgtttcccacgaaatcctcaaagctatgcaaatatcctcttgcagattctacaaaaagagtgtttcgaaactgctctatgaaaagaaaggttcaactctgtcagtagasggcacacatcacaaacaagtttctgagaatgcttgtgtctacttgttatgggaagatatttcctttttcaacataggcctgaaagcgctccaaatgtccacttccagatactacaaaaggagtgattccaacctgctctatgatagggaatgttcttctctgtgtcctgaatacaaacatcacaaagatgtttctcagaacgctgcagtctgcaatttgtatgaattc

SEQ ID NO: 228556 - DNA, 606 bp, Homo sapiens
tcctccccagtgtgatgatcaaaaacgtctgtagacattgccaaatgttccctgtgagcaaaatctactgactgagaaccactgacttacatggattcttctgattaaactgaattacctgatactcctaaaacacatatttctccctctatgctttttcacatttgttttcccctcttgagcttacagtgttcttggcctcctcctcatcaatcttctctgtttcatagtctttcagttcctcagcatcttttacagccagaggaaatactaacctgtctggttactgatctrcttgtttctatgccttttttgtttaaaaaatggtcaccacttccaaacttttgatttaaagtcccttaaagatccctggagtcttgagtttaaaatttagtttgtactatgcattccacgatgttttacagagtctaccatgtatcagatctcaagctaatcactgaggatatgaagtcaaaggagataaaatccctttctttcaaggagtttatgagatagactctcagggaaataaagggatctgaagatcaactctccatcctccttcagttgaatagatggggaaaccaagagacaaaaggtagatga

SEQ ID NO: 228557 - DNA, 605 bp, Homo sapiens
tatgaccttgggcaagtaattccctttccttgagctctggccttgctcatcctgttttgaaactatgtaatttgagagagaggtgctcagtagctgcccatcggtggtggttctctcttgaaggatacttttaagtgatacggagataataaagatttggtcccaactgccagaagctcattacctgatggaaaagacagawgctcacacagtgaatataacccaaagcagattgataagtactggaattaaaagtagggggcacagaggaaggaggactcattttcagatagaggtgatgatgatgatttgagtgttgttaataatttttgttttgctaacaataatgcagtaaaaggagcctatcctaatcagtgatgccttctctgtgccagtcaccatgctaggcacttaacccgtgttgcctctaatccttatgatgcccctgacaggtggtcatcatcatccctactctacagatgagagtggtcataagaggatacatggagtgcatcacatgtaagctggactttgcagggttcataagatttaaagggccaatcatcaggaagaaagattgcaaggcagaggagggaaactaatgg

SEQ ID NO: 228558 - DNA, 600 bp, Homo sapiens
tgggagcctgggatgtatcaagaattcactgaaactcaggtggctttatgtgtatcacccacaatgaaacatctaaagcacatagacgaaataatgaatgaccatcaaggtcagcatggttcctgaattcatcccagaacatttgtaaccccagtgtcagtctaaagccagtcatgtgactcaaagccactatgcgtggattgtggtcatcctaagggaatgcctccattagcagtgctgaggaagcctttctctccactcctacttttctgcatttgagtatatttgtataattgttattattgctactccaagagtaactcatgtatttaaaatatgtagaaaatttagaaaaccagaaagagtaataatagggggtgggatcaatcatcctatattccattgcccagaaattgctgctgataatattttgtttcatagtgttatttgaacattgagatattgctatagatttagctttggatrttactttttcatttaatattatagcttacacattttccatgaagttgcataatatttataaatatttctgcaataactgcttggcattccattaagcatattaaccatgggcta

SEQ ID NO: 228559 - DNA, 600 bp, Homo sapiens
tgggagcctgggatgtatcaagaattcactgaaactcaggtggctttatgtgtatcacccacaatgaaacatctaaagcacatagacgaaataatgaatgaccatcaaggtcagcatggttcctgaattcatcccagaacatttgtaaccccagtgtcagtctaaagccagtcatgtgactcaaagccactatgcgtggattgtggtcatcctaagggaatgcctccattagcagtgctgaggaagcctttctctccactcctacttttctgcatttgagtatatttgtataattgttattattgctactccaagagtaactcatgtatttaaaatatgtagaaaatttagaaaaccagaaagagtaataatagggggtgggatcaatcatcctatattccattgcccagaaattgctgctgataatattttgtttcatagtgttatttgaacattgagatattgctatagatttagctttggatgttactttttcatttaatattatagcttacacattttccatgaagttgcataatatttataaatatttctgcaataactgcttgscattccattaagcatattaaccatgggcta

SEQ ID NO: 228560 - DNA, 599 bp, Homo sapiens
gtcaacagctgcagtgtatatatatatagatatataacgggtgcctgtatagtgcttcacaaaagtaaatatagatcagcatgattatgtataaatatatgtctatacacatatatgaccttatttctagtggacagtttatataaacatgtaatttttaatttaatcactgtatatacaaaaggatatctattaataatgaagtaacagggcttttacacttagttctcttttcttctttgtttattcttttctccccttccacctttcctcctcccccttccttatcttcttccttcccttctcgctttgtttcttttcttcagctcctgtccttaccttccractacatgtccaatcaatctcccagctgtgttcacttttcctccttaggaattctgacttgccatctccttgcatgctttcttgcagttcatatattgtctgcgttagtccaatactctcctaactagtcttgcaagactaaaagctccctgagaacagagatcatgttggcaagcttattctcttggagcctagcctacctctggacacacctggcactgaatagttactctttgaatgcatggaatgaatgg

SEQ ID NO: 228561 - DNA, 535 bp, Homo sapiens
ctgtctctctgtttttgaaccacattgtttagctatataacacatctctttgtctgttagggttttatctttttgcattaatagttttcctttagctggactttagtttcattttgtcatatttcagaaatagcctctggagtgtttgtttgtttgtttttgaggagtcttgctctgtcacccaggctggagtgcactggtgtagrattttggttcactacaacctcccctcccgggttcaagcgattctcccacctcgcctcccaactagctgggattacagggacctgccatcatgccaggctaatttttgtatttttgtagagatgggatttcaccatgttggctaggctggtcttgaactcctgagctcaggtgatccgccctcctcggcctcccaaaatgctgggattgcaggtgtgagccactgcgcccggccagtccctggatttgggtgaagatcatgagttcagtttgagtttaaaggcgggaaaagtcctgtgtcccagttagaggtagcaggcaggaggaattc

SEQ ID NO: 228562 - DNA, 535 bp, Homo sapiens
ctgtctctctgtttttgaaccacattgtttagctatataacacatctctttgtctgttagggttttatctttttgcattaatagttttcctttagctggactttagtttcattttgtcatatttcagaaatagcctctggagtgtttgtttgtttgtttttgaggagtcttgctctgtcacccaggctggagtgcactggtgtaggattttggttcactacaacctcccctcccgggttcaagcgattctcccacctcgcctcccaactagctgggattacagggacctgccatcatgccaggctaatttttgtatttttgtagagatgggatttcaccatgttggctaggctggtcttgaactcctgagctcaggtgatccgccctcctcrgcctcccaaaatgctgggattgcaggtgtgagccactgcgcccggccagtccctggatttgggtgaagatcatgagttcagtttgagtttaaaggcgggaaaagtcctgtgtcccagttagaggtagcaggcaggaggaattc

SEQ ID NO: 228563 - DNA, 535 bp, Homo sapiens
ctgtctctctgtttttgaaccacattgtttagctatataacacatctctttgtctgttagggttttatctttttgcattaatagttttcctttagctggactttagtttcattttgtcatatttcagaaatagcctctggagtgtttgtttgtttgtttttgaggagtcttgctctgtcacccaggctggagtgcactggtgtaggattttggttcactacaacctcccctcccgggttcaagcgattctcccacctcgcctcccaactagctgggattacagggacctgccatcatgccaggctaatttttgtatttttgtagagatgggatttcaccatgttggctaggctggtcttgaactcctgagctcaggtgatccgccctcctcggcctcccaaaatgctgggattrcaggtgtgagccactgcgcccggccagtccctggatttgggtgaagatcatgagttcagtttgagtttaaaggcgggaaaagtcctgtgtcccagttagaggtagcaggcaggaggaattc

SEQ ID NO: 228564 - DNA, 570 bp, Homo sapiens
cctcttcttaacaatatgcctataattaaccttctccttatccccactcttaccgttatagcgttccttgcactcatcaaaagaaaaagtttaggctatatacaaccacacaaaggacccaacattgtaggtccctatggcctgcttcaaccattcattgatgcaataaaacttttcaccaaagaacctttaccgccctcaacatctactattaccctttatattattgctccaaacctgaccctttctatcgctctcctcttacaaagtcccctccctacggaggttgaattatgctcygaggtcaccccaaccacattttttaatgcagggatagtaggctagggcctctaggcttgtttgagtttttatttgcattaatgaattaaagctccatagggtcttcttgtcttatttgtttatatccgcctcttcatggatacgtcgatttcattgattaaaagagacagctgaacccttgtgtggccattcatacaagcccctgtcgagggaacaagtgattatgctacctttgcacagtcaggataccacagccattgaacatatatc

SEQ ID NO: 228565 - DNA, 591 bp, Homo sapiens
aatcactcttgtcatgtgatgcaccagtttcccctttgccttccgccatgattgtaagttgcctgaggcctcaccataagcagatgccgacatcatgctgtttgtacagcctgcagaaccgycagccaaacaaatctcttttctttataaattacccaccctcaggtatttctttatagcagtccaaatggagtaatacaagtagctttgttctactaagcactgggggttcaaatatgagtaaatacttatttacttggctaacatatacttttctccaataaatttttgctagtcacctattctggaaatattttttcactcactttcttcaacaaatgtgatacctcaaagccccacagttggtaaaggtcatttttaaacagaatgttacattttatatatagataaatattatatatatactttaaatatacaaatatgttttcataataagttataatggatatcttgtcattttaaaatatattaataaatataattgtaaatatttcttagtttagtttcttatatggtaagtcttgataggtataacccaccttaagaaaagtctttggggtcttcaataag

SEQ ID NO: 228566 - DNA, 572 bp, Homo sapiens
gtttcaagttctctaacatccttttattgtgataaaatatgcataacataacatttagcatcctaaccatttttaagtgtagaatttaagtggcaataagaactttcgcattgggccaggtgcagtggctcacacctgtaatcccagcaatttgggaggccaagatgggcagatcgcttgaggtcaggagttcgagaccagcctggccaacatggtaagaccctgtccctgctaaaaatagaaaagttagccagttgtgctggtgtgcacctgtagtcgcagctactcaggaggctgaggcaagagaatagcttgagcctgggagatggaggttgcaktgagccaagatcatgccactgcattgcagcctgagtgaaagagcaagactccatctcagaaaaaaaggactttctcagcgttgtgcaaccaacatcatcctctgacttcaaaactttttcattatcccaaagtgaaattctgtgttcattacacaataattccccattccacattcccccatcccttaataaccactattacttttcttctttatgaatttgactagtctaggt

SEQ ID NO: 228567 - DNA, 567 bp, Homo sapiens
tctactatatttcaggtgcttcatatacatatatctgattctcacaaaaattttaagtgatcagtatcttaatacacaatttataaatgtggaacccaactttttaagtgaatatgttgctcaaagttatgcagctgatcaatgacagagccaygtttttaatccagtgcaaacacacacacacattttccactatgccatgctgaatgagccaagcattttaaaaattatcaaatgtcttcaaactctctgtagcatttgtaaaaatgggacaaaagagaacatataggttccaaaacctctcattatttaaaattcatagtagagatcaaccaactcttctaacctgtggtatgtcatgcctgcagatacctctaggtgtcactagcaagcctaacgcataagtagagaaaacgcagaaaaacaaggagatagaagaaaagaaaaacaaagagagaaataaaacagagcataccaccactaattggctaccagagacccctgttggatagatctactttcatatcaaatgcatttttgaaaatgtgtgtgaaagtctcattcaca

SEQ ID NO: 228568 - DNA, 444 bp, Homo sapiens
acatgtgcaggtgcgtaacataggtaaattggtgtyatgggggtttggtatacatattattttgtcacctaggtactaagcatagtactggatggttacttttttcaggtcctttccttcctctcaccctcctccctcaagtaggacccagtgtgtgttgttcccctctatgtgtccacgtgttctcattatttagctcccacttgtaagtgaggatgtacagtatttgcttttctattcttgcattagtttgctaaggataatggcctccagctccatccatgttactgcaaaggacatgatctcattcctttttatcgctgcatagcattccattgtgtatatgtactatgttttctttttccagtctaccattgatggaaacttagatttattccatgtctttgctattgtgaatagcactgcattgaacatacaagtgca

SEQ ID NO: 228569 - DNA, 609 bp, Homo sapiens
gtgggaactatgaagtacaccaacaaccactcatgggaggcccataagaaggaggaaaagtaaaatggccagaaagaacatatgaagaaatatgggcaaatatttctcaaatttgatttcaaagaactatacacatgcaagaatctcaagaaaaactctagaagagaacagtataaatcttcttgaccttgtaattggcaagagtttcttagatataacatctaacacacaaccaagggcaaaacataaagaaatcatacatcataaaaataaaaacaaattgtacatcaaaggacacgattaaggaagcaaaaagacaacccacagaatggcagaaagtgtttgcaaatcatctgtctgataagggtctagtatccacaatatataaagaacacttacaactcaacaatttaaaaataagtccatgaaaaatggccaaagtatttgagtagacagtttgtttttggagctcccagctaaactgaggttctagtactagagaagctagcaacccgcccctaacrcaatacaacgaagaactagatgtgggtgtttactctgtgcttttcatgtgatacttcttttacctggcaggtgacctgaagcctt

SEQ ID NO: 228570 - DNA, 452 bp, Homo sapiens
ctctgcaggcttactataatatatataattggacttgctttcacttattatgttggtggctcattttatttctcaatctgaaagctctctcctttttcattttggtagtattctcagccatatagtttataacattgcttctttttaaatgtatcctatttaatttcccctagaatatttaaagtatkttgtacaatttctatgtttctatatctcttaacctctcttttatattctctagtacagttctcaattttgcatgtatcagaatcatctggagagcttcttaaaagagattactgatccctgtccttagaatctctgattccacaaatctaggacagagcttaagaatttcatttctaacaagttttcagtgatgctgaaattctgatgtgaggactacactttgagatttactgctctagttcttatatctctgtgctggattc

SEQ ID NO: 228571 - DNA, 452 bp, Homo sapiens
ctctgcaggcttactataatatatataattggacttgctttcacttattatgttggtggctcattttatttctcaatctgaaagctctctcctttttcattttggtagtattctcagccatatagtttataacattgcttctttttaaatgtatcctatttaatttcccctagaatatttaaagtattttrtacaatttctatgtttctatatctcttaacctctcttttatattctctagtacagttctcaattttgcatgtatcagaatcatctggagagcttcttaaaagagattactgatccctgtccttagaatctctgattccacaaatctaggacagagcttaagaatttcatttctaacaagttttcagtgatgctgaaattctgatgtgaggactacactttgagatttactgctctagttcttatatctctgtgctggattc

SEQ ID NO: 228572 - DNA, 586 bp, Homo sapiens
atcactcccaagctgcctgtgtgtgctgcacaaatatcacagcagagcgttcaggtggggatgtgcagtgtgtggtatggyggtcctggtgtctgttcctgtgctgtctgtttcacttgtctgtgctcaggtgcatttcctgcatttcccctgcttggcttcatatcataggggattgacccctgcaaactctgtttcccaggactccctctccttctggcttccagctaggtctgggcaacagtgaacactcacaagagtttgaacagagggagaaaagaaaaacttgagttagttctcattttctctgtttttggtagtgttgttagagaggactgcatgtctcctatggttcccgttcttgctggacatctccccttgacctcacctcctaccatttctaccccaccaaggtaaccagtctctcggactctggaaattccattccctcccttattcctgtagcctaagggtgataacaactttctagttttgctaatttgggggttacctttttatcaactgtttggtatttaagctcctcccacatgtttgtagctagttttctattttaaaaccttactag

SEQ ID NO: 228573 - DNA, 549 bp, Homo sapiens
tgaatattctctatagtatagctataaggtgatatacaaatatctggttattgtcatctgattttccttggcaggagcatctcaggaggtctatccgtttgtctctaacccataccaaggactctatgcaaaatagtcccaagaccaacttcacttctccttggtgctcagtgagaatggttgctgccttttgagccatggcacaccagcagatgtgcatgggcagaaaagcgctgataaatttctatatagacagaaagagcaatgcatgtgttcctctgggcaasatttgatattcactgaaacagctgttatctctcagtcattgcacataaggttaaagtgaataggatattgttagtatagactcaagcagtttttttttttttttgtagcaataggaccacaccacacatgggccattctgccatctatgagactgttcaattttgttcctcacaagaggaaagaaataacttgaatccacagaaaacgttatagactaccctaaatatagcatgcattctgctttccatattccaaagctct

SEQ ID NO: 228574 - DNA, 549 bp, Homo sapiens
tgaatattctctatagtatagctataaggtgatatacaaatatctggttattgtcatctgattttccttggcaggagcatctcaggaggtctatccgtttgtctctaacccataccaaggactctatgcaaaatagtcccaagaccaacttcacttctccttggtgctcagtgagaatggttgctgccttttgagccatggcacaccagcagatgtgcatgggcagaaaagcgctgataaatttctatatagacagaaagagcaatgcatgtgttcctctgggcaacatttgatattcactgaaacagctgttatctctcagycattgcacataaggttaaagtgaataggatattgttagtatagactcaagcagtttttttttttttttgtagcaataggaccacaccacacatgggccattctgccatctatgagactgttcaattttgttcctcacaagaggaaagaaataacttgaatccacagaaaacgttatagactaccctaaatatagcatgcattctgctttccatattccaaagctct

SEQ ID NO: 228575 - DNA, 584 bp, Homo sapiens
gtatatttacaaaagcccccaaagcatcacctggttttatgagttgtatcctatcatctgatgccacagatagggtgtagtrgcgtgaccaaatctgggccaatggtaagggagaaatattgcagggaaagattcaaaatgtcactatacaaaagacatgtaatatgcaagattgggatagaaggcaactacagcaactcagaggcaagaaactgtatcagttcattcattagcactccagaggacacattcatacaaagaagaacaaggaagttaatttcaacacaagacaaagggaaactttctaccactgaaaacagttcaaaagtagaaggtctaatcaggtcctttccaatgaatgtggtcagagacctctacccccagacatgttgagcatcctcctcagggctgaaccaaataactaggtgaggatgcaaaagctctgggggaaatctttttttaaatttttgttgccaatattctttttatttctttgggactttggaagttaggaaagaatttctggagcatttgacaaacattttatacggagatctgcaaacaaggaaatttcactgaagttc

SEQ ID NO: 228576 - DNA, 584 bp, Homo sapiens
gtatatttacaaaagcccccaaagcatcacctggttttatgagttgtatcctatcatctgatgccacagatagggtgtagtggcgtgaccaaatctgggccaatggtaagggagaaatattgcagggaaagattcaaaatgtcactatacaaaagacatgtaatatgcaagattgggatagaaggcaactacagcaactcagaggcaagaaactgtatcagttcattcattagcactccagaggacacattcatacaaagaagaacaaggaagttaatttcaacacaagacaaagggaaactttctaccactgaaaacagttcaaaagtagaaggtctaatcaggtcctttccaatgaatgtggtcagagacctctacccccagacatgttgagcatcctcctcagggctgaaccaaataactaggtgaggatgcaaaagctctgggggawatctttttttaaatttttgttgccaatattctttttatttctttgggactttggaagttaggaaagaatttctggagcatttgacaaacattttatacggagatctgcaaacaaggaaatttcactgaagttc

SEQ ID NO: 228577 - DNA, 453 bp, Homo sapiens
gtatatttatagcattgcagcaaactctgattccgtaaaagcaattctatggtgagcaggtaggagggatagattggacaagtttgtttctcagatggtctgactcaatggaaggatagattttagagaamccagtgtcatcaagaggtagcatattctccaagcagtcctccactagtactttctttctgatgaattttgaaacctgagctcctgggaatctgagattacctttcttgagaatttcttggattgagggttttccagattcacagtcaaatgcagcatcttagcctttaataatcaaatataaccgagtataaattgaccttttctttaaagaaatgtatggataccaacacacactgaaataggaggccttgcttcatatgctctgatgtgagcaacatttgcttctactttgcaagcaatgaatgctttggcttattggca

SEQ ID NO: 228578 - DNA, 427 bp, Homo sapiens
tgttagcttgcttagtgtccttctcagacatcctacacactctttggttgctgttggagacagtttgataccacagtctgtgatcatggacccttctgcccagggaatgcatgacacatttgctgttggagaactgtagttcacaagcccaagactaacaggtctccctaagcttgcatggttccacaagaaagcaggaagtaaagygtggttgagtagaacctgttggtttgcagatctcattcctagtttagagtaaatcagtcacagaagatgctgaaggcagctggtttctcaatctcatctgaaaattgtagtcctatcatcatatattttctacagtaagtagaaatatatatgattgaatctatttccattagttttctcatttaataaattaagtcaacattctctctttcaccctgag

SEQ ID NO: 228579 - DNA, 517 bp, Homo sapiens
cttctgcctacagagctcagagacaggctagacatggatcgaaattcccatgtctataaatgtagggctgaastacaggtaaacaacaggttaactaatattgactttagtaaaacaagtgtcatctcaattgctttctcatatctgtgaactctaaatgatgatataggctacaaccaccaaaatcagaagaatcatttctgacaacagcactcctgaagaaataggatagccatagtaataacaaagcaagtggtttgtattatacctcagggcagagttttgtttgcttttcaaggcaatgggattaataaagaactagaaggattttattccgagtctagttagagcacatctcacattcttgatctgtttgaatatattacggcaactgggaaaataatatagtaatctaaatcataggtactctggatttgtgtggcaggcagaaataagacataggttcagaagaaatgtatgcaaaatagttacaggttctctgtgaatgccagaagat

SEQ ID NO: 228580 - DNA, 517 bp, Homo sapiens
cttctgcctacagagctcagagacaggctagacatggatcgaaattcccatgtctataaatgtagggctgaacyacaggtaaacaacaggttaactaatattgactttagtaaaacaagtgtcatctcaattgctttctcatatctgtgaactctaaatgatgatataggctacaaccaccaaaatcagaagaatcatttctgacaacagcactcctgaagaaataggatagccatagtaataacaaagcaagtggtttgtattatacctcagggcagagttttgtttgcttttcaaggcaatgggattaataaagaactagaaggattttattccgagtctagttagagcacatctcacattcttgatctgtttgaatatattacggcaactgggaaaataatatagtaatctaaatcataggtactctggatttgtgtggcaggcagaaataagacataggttcagaagaaatgtatgcaaaatagttacaggttctctgtgaatgccagaagat

SEQ ID NO: 228581 - DNA, 430 bp, Homo sapiens
ggtagtgaaagttcttggctgggtgttgtggctcacacctataaacccaacactttgggaggctaaggcaggaggatcacttgaggccaggagtttgagatcagcctggacaacataacaagaccctatctatctctacaaaaaaaaaaaaatatatgaaaattagctgggtgatgtgtgcctgtagttcaagctattctggaagctgaggcaggaggatcacttgaggccaggagtttgasatcagcctggacaacataacaagaccctatctatctctacaaaaaaaaaatatatatatgaaaattagctgggtgatgtgtgcctgtagttcaagctattctggaagctgaggcaggaggatcacttgggcccaggaggtcaaggcttcaatgaggcaagatcatgccactacacttcagcctgggcg

SEQ ID NO: 228582 - DNA, 560 bp, Homo sapiens
gctgactccacagatgtagcatcaagctcattgacaaccctcataggaggcggaggtcaaagggaacatgactgaatcagtttgcacatggaatcagaggaaaaacatctttattacaaggcctttcattctttcattcttttaaatgtagaaattaattcactctgatgtaagaaaataaaacagtgatgcatagaatgttacctatctttgtttatcttatatcatcaaacttcatgagtggaagtgagcgagctagtctctatgttaaaatgtttcacttcaaacacaattttcaacttggaaaaaagatagggttgaaaagtgggcattttatataattgaattcctaaaaagaaagactttttgtatacatggaatcatatacctttgaaacaagaataaattcaagtgaagacagtgtcggtcttcttggaaattaacaagtccagaaggggaagaaaggaatgtggtttcacaagtatcacatrattcttaaacagatgctgttataccttttgagggtcaggggtaaattgcaaatgccagtgtaaaacaca

SEQ ID NO: 228583 - DNA, 617 bp, Homo sapiens
gcactgacttcacggaaagacctctaacaatgccaagaagatcttcagactttatcatgttctgatacttgagaccttatcattctctttctttcttaaagtmttttaagaaatttaacaaaaaccacccacctcctaatttttattgccattgtcccacaccattcaagggctagaactaatgcataagttaatatgtcctctttcaattgtatttaattttagtccatcataggtgaggctcttggtggttgtgatattgctttacacatcagaggttatcatcattctgtttatttccagtaagaactcatatctgagcagtgagagatccagttccaaaatcccacctcaagaataagtttttcaggaccacgtctgggacaactgtctttgtttaggcatgctcaattatagagcttgaaagaaaatttgtgaggggaactataaaatagttgagagagagaatgaaaaagaaaaatttaaattaaggacaagtattcaaagtaggtctgagggtaacagggactcgattctactggcccttctgagaagcatacaaaatacctcccagtattatatgtccaataagcatgagagcacccacctactgagag

SEQ ID NO: 228584 - DNA, 610 bp, Homo sapiens
aatctatgttaagctgctgtgagacatgcctggtcactcaagctgtgctgtattccaatagaactttggtgaaaatttcctcatttaaaaagtcttatgtaccatattgtggtaatatccaggtcaatgtgaaagttaaacagcaaaacttattaaaaagtggaaaccttttatggctatttgctggtttgtagcattttaatttttccccttttctttttctaaataggtggcaagatatattgcatccaagctgagaacttaagaaaactacccataatgacatcacaattatatgtgttgcttcaattattagtttactcaatcaccagttcccagaagatattattgaaagggttacattattgaaatgctaaacaaaggtggtacttggtaccatatgtacttgagaaaacaaaatctgactggtaggaaatttttatgcrtgccattcctctttgaacttgacattaggtctgtttgttacacaagaatatatctgagtcctgtctgagataaaggatactactctgaagatgcaaagaatatgtggaccttaagctggccttacaatactcttttcttgttttaacgtattgcaagtcaaatt

SEQ ID NO: 228585 - DNA, 549 bp, Homo sapiens
ttcagtttcatcttataagtttaagtttttgtatgttgtatttttgtttccattatctcagaattttctagtttaccttgtgatttcttccttgattctggttatttaggagtgtgtcatttaatttccatatatttgtgaatttcccaaatttatttttggtattgatttctaatttaatatcattgtggtcaggaaacatggtttatatgattttaatgtgtttaaatttactgaagcttgatttatagtctagcatattgtctattttgaaaatgttacatagtaccagagaagaatgtgtattcttctgctgagtgaagtgctgtatagatatttgttrgatttagttggttcagtgttgttcatgtcatctatatccttgttattctctctagttctatccattattgaagtgaatattaaaatacctaactattgttgaattgtcccttcctcccttcaactcttatagactttatgagttttggggctgtgttgttacgtgtatatttatttataattgttattccttctggatttattgat

SEQ ID NO: 228586 - DNA, 560 bp, Homo sapiens
gtatatttatttataattgttattccttctggatttattgatgctgttaccattataaaatatctttctattgatatttttgtttcaaaatctattttgcctggtattagtataggtcagtttttttataattgctgtgcgcctgctatatttctcttcatcctcttacagtcaacctgtttctatatttgaatctaaagatacaaagtatctttccatcctgagaacagaatattgtcagaaattttttttaatgcataaagtctaaaaaaccctgcccttaatgcatttgcatgtaatgttgttattgatatarttgggtttaggtctgccatttttctttttgtgttttatatgtctcatgtgttttcctcctattttattcctcttttactgacttttttgtgttaagctgaggttttctggtgtaatgttttaataacttgacatttgttttcacttttttattctcttagtcattggtctagggcttaccatatgtttgttatcagaatctacttcagatttatactaacttaattataatgaaatataaaaat

SEQ ID NO: 228587 - DNA, 570 bp, Homo sapiens
tcttatgcagataaaaattaagtcgaaatacatgcctttaagccttacaaattttgcaaaggtaacataagtttaaactataagctcatgataaaactgcaatagaggacaaaggtaagttagcattttttgacattgctttaaaaataaatacggtcatgagatatgtggttcaactctggcctctttcttataataagaattccttggtattactaactcatagactgaaagatatattttcaaagttattatgattttatatttaaagcatatgttctgtgcagtactccatgctgagcacaattaagcatacaaagagatataaggtacagtgcctacctttatagatgcttaaaatcaagttaggaaattaaaatatggaaatataaatgaaaatacatttaaagatattgccatacaacctgaaatattgaaattactcartaaaatttaactcttaattcaatgaattctcacagaaaccatattacacggtgtgattgttacccctgttttgtaaacagaactgctttagtttgggaagtaactttctgaggacttcatagc

SEQ ID NO: 228588 - DNA, 496 bp, Homo sapiens
taaataatccttctcaaatcagtttactataacaatgtactttggtgtttttaattttcttctgaaaaactagaatttgttttttaaataaatgatccatgamcttcctctctcttttcttctttatttttctttcctatatcctttattttatcttcctttttctgcccttcttcccaatatttaccaagtttatactccatgctaaatattattctacactctggagatccagagttgaataaactctagtctctcaggaaatctgtttgggaagatagacaagtgcatattgcagcatggtgtgatgacattatggacagaacagggggctgaggaaagggtaggagaggcactgggccttccaacaaaatgaggagagtaaaggcttgctgctcctagatggcttacatgagaaaagatatgaaaagcacagtcaggtaatttatcttctttctctcccttatagattcatctttttgtgtactccaattct

SEQ ID NO: 228589 - DNA, 576 bp, Homo sapiens
tgtgcatgcttggataagaaacacatgctcttggccacctaggaagtatggagatgcgcccccccacccaccaccaccgccactgagagataagacttccatggggaggggctgattccttctttttgggatccaagatctggtataaaagcaggacccttaatctgggggggggaatctgtttgccttccagctgtccctgcttattagccctagaaaatgcatgctttcctggctctgggctccaccctgaagccagtaatccaattaagaaactggtaaatgaaaaatcttacaactactgggtcttcttctgtcatgtatttatgtgtgttgtgtgtttgtgatataaaaaagaagctktcattggtttaaaaacaatgactgcttaaatcaagcattttgtcagaaaagtaaaaagtctaatggcttttagttcatgtgactttagtactcttcaagaaatgacagttttaaaaattattggtaaaattaaaatgtcttcaaaatttaaacatttggtctaaattactcaggtcagatattaggcttgctaaatgctttaaggtaataaac

SEQ ID NO: 228590 - DNA, 591 bp, Homo sapiens
gggtgcccattggagggacagcagggcccaggtgcactctgcaggaccagggtggcccagcacagcagcagcgactgtgccctggaagcctgaggccctggaacgcaaggcctaatgccattcccgctgcgttcattgttcagcttccctgccctgcccaggcagagatgtggcctgagaaagtgtggggaagaggggcccaggctagacagggaggagcctccattgcttttgccttggaatcctgagctcaaagcacaggctggcacacagcagggctcacgaaatgctgagtgagcagaagagctctgcagccagatgacaacatggcctccaggaaggtgtggcaccrgccccagcctcactttccccatgtgtctgtgaggctcacaggaatggcccaccacacagtgctggagggaagagttgggataactaatgtgtgctctaacccactttacaaatgggagggaacaaagattagaaaatcgctgccatctgctatgtctgaagcctgctcacttcactggcactattctagtgtaaccaatatataatctgagcttaaaaatgtatattttgaattaatat

SEQ ID NO: 228591 - DNA, 385 bp, Homo sapiens
cagccatgcctcagaaccagtatctcatagctttcagtgcagggctaggcatgctctgagcagcatgccttgcgattccctcacaattctgtgtttctattcccctccagttgtgcttattaggtaaaactgcaggctacaccttcctagtggcatttcccggtgggatgggtcagttgaattaaatttttgcctggacaactacagttaaacttwtttttttttttcattaaaaacatacagcacagaacattagtcttacatctttcttagtcttaaaaaatataaatatagagggataatttgtacaggatgtataggtatgtacacctttaatatgcatatgagaaattcagaaccaagtttatgaaacttgaccttaaag

SEQ ID NO: 228592 - DNA, 470 bp, Homo sapiens
gaattcacttgctatcgccagaacagcacagtggggatgcatgaagggggtggtgctaaaccattcatgagaaacctgctgccatgatcgtatggggtcctacgaggccccacctccaacatggggattatatttcaacatgagatttgggtggggaccagatccaaactctatcagccagcctctcccaaagcttccctagagcaggagcccgtgttaaatacttcatatgcgacagacgacagaggaatgggagcagctgcagggcactgggggatgtgcctgatcaacagcaactggtccagaaggygacctggagcctatttgtatactgctggggattaagaacataattccatggaggcttattttgaactctgttctattagtaaattccttggtaattgttccttccatgaactatgtatgccacagcccacccaaaatctttaaaggctgtttggtagttg

SEQ ID NO: 228593 - DNA, 470 bp, Homo sapiens
gaattcacttgctatcgccagaacagcacagtggggatgcatgaagggggtggtgctaaaccattcatgagaaacctgctgccatgatcgtatggggtcctacgaggccccacctccaacatggggattatatttcaacatgagatttgggtggggaccagatccaaactctatcagccagcctctcccaaagcttccctagagcaggagcccgtgttaaatacttcatatgcgacagacgacagaggaatgggagcagctgcagggcactgggggatgtgcctgatcaacagcaactggtccagaaggtracctggagcctatttgtatactgctggggattaagaacataattccatggaggcttattttgaactctgttctattagtaaattccttggtaattgttccttccatgaactatgtatgccacagcccacccaaaatctttaaaggctgtttggtagttg

SEQ ID NO: 228594 - DNA, 538 bp, Homo sapiens
gaattcctcctgcctgctacctctaactgggacacaggacttttcccgcctttaaactcaaactgaactcatgatcttcacccaaatccagggactggccgggcgcagtggctcacacctgtaatcccagcattttgggaggccgaggagggcggatcacctgagctcaggagttcaagaccagcctagccaacatggtgaaatcccatctctacaaaaatacaaaaattagcctggcatgatggcaggtccctgtaatcccagctagttgggaggcgaggtgggagaatcgcttgaacccaggaggggaggttgtagtgaaccaaaatyctacaccagtgcactccagcctggatgacagagcaagactcctcaaaaacaaacaaacaaacactccagaggctatttctgaaatatgacaaaatgaaactaaagtccagctaaaggaaaactattaatgcaaaaggataaaaccctaacagacaaagagatgtgttatatagctaaacaatgtggttcaaaaacagagagacaggca

SEQ ID NO: 228595 - DNA, 538 bp, Homo sapiens
gaattcctcctgcctgctacctctaactgggacacaggacttttcccgcctttaaactcaaactgaactcatgatcttcacccaaatccagggactggccgggcgcagtggctcacacctgtaatcccagcattttgggaggccgaggagggcggatcacctgagctcaggagttcaagaccagcctagccaacatggtgaaatcccatctctacaaaaatacaaaaattagcctggcatgatggcaggtccctgtaatcccagctagttgggaggcgaggtgggagaatcgcttgaacccaggaggggaggttgtagtgaaccaaaattctacaccagtgcactccagcctggatgacagagcaagactcctcaaaaacaaacaaacaaacactccagaggctatttctgaaatatgacaaaatgaaactaaagtccagctaaaggaaaactattaatgcaaaargataaaaccctaacagacaaagagatgtgttatatagctaaacaatgtggttcaaaaacagagagacaggca

SEQ ID NO: 228596 - DNA, 520 bp, Homo sapiens
gagtggtggctcacacttgtgaggccaaggtgggccaatcgcttgaggttagaagtttgagaccagcctgggtaacatggcaaaaacccatstctatacaaaatacaaaaattagctgagcatggtggtgcacacctgtagttccagctaatggggaggctgaggttggaggattactagaactcgggaagttgaggctgcagtgagtcatgagcatgccactccactccactttataacacactgttgtctacataaggctagctacatcccttaatcttaaactcccaccgctttcagacactatcataccccgccccccttccccccgcgaacccccgtgcattctgggactcatggtttggtgagtgttgtccaggaatggctacaaacccacattactatgatatcggacttctacttgtgtagtcatttgttagttaactgtacattttggaaggtttttgagtagagaagtgaaataatccaacgtttgggaagattttcttgtgcaggattg

SEQ ID NO: 228597 - DNA, 579 bp, Homo sapiens
tgggagtgcattcttttcccacggctgttccttactgcgaaaaagaattcaggtatatttctcttattcgcttttgcgagaagagaaatatggactctgttctgcccggtcctgcaggcagtcagactttatggttatctcacttgttccctgaaaattgctgttatcctgttccttttctacatgcccagatttcatattgttcaaacacacatgctctacaawtaatttgtgcagataatgcaatcatcacaggatcctgaggctacatacatcctcagattatgaagatgatgggattaagagattaaagtaaagacaggcataggaaattataagagtattgattggggaagtgataaatgtccatgaaatcttcacaatttatgttcttctgctgtggcttcagctggtccctccatttggggtccctgacttcccacaacagatacttccatgcttcctgcacagcctgcagaaccaggagccaatgaaacttcttttcttgataaattacccagtgtcgagtatttctttataatagtgggtgaatggactaatacactacccatgcttaaa

SEQ ID NO: 228598 - DNA, 555 bp, Homo sapiens
aaatagatcttatcaaaattaatacagagagaaacaggaattttgaatagctcaatagctattaaaattgaattcattattaaaaacctttccctaaagataactccagacccagatggtttcaccaataatttttttcaaactttaataaataaataactgattttatacagttttcagaaataggaaaacaaaagacattttaaaatgtgtaaagccaaatatagttcaaaataatgcaaggaaatcacaagacagaaattacaggctgatctcttccatgaatgtaaattttaattatttttcaaaatattagcaaatcaaayctgtgatttataaaaggtacaaattacaaccaatctgagttaattccagagatacaggattggcttaataatcaaaagacagcaattgtaatttatcacattaatagaatgaaggagaaaaaccatgtgtctatatcaaaagatgtagaaaaagcatttgataaaattcaatatacatttctgataaaatctttacttatcaaaatgaaaataacatttccttaatctg

SEQ ID NO: 228599 - DNA, 564 bp, Homo sapiens
gatttaaacagatacagaggcctccttatttaccttgacaaggctagatagactctccaaattcccattctttatctcataaatggttggctgagctgttttctccactgacawatttagataaaacttaatcaaactttagtcagacttctctccttcacccaggcccctgaactttgacccacactttggtatatagtttattcttaaattataaaaatagtggtgttatctgctactaacaaactacaaaagtgaaaatgtccaaagaactattctacaaataagtaatgtgacatgatcatacttaatgcagaatttattgataaagaaagatacttatgtaaggaaatgaaatatattttcattatttgtgattatttaaattttagtttgctaaattgaaggtaaattccataaacctgtattcactgaatcaattaggttatcaattatggcaacttctttttctaattattatttttataggacattaaaaaattgcacttgtcaaagcttttaatactgaattaagtcatttcataataactgtagacttctgta

SEQ ID NO: 228600 - DNA, 564 bp, Homo sapiens
gatttaaacagatacagaggcctccttatttaccttgacaaggctagatagactctccaaattcccattctttatctcataaatggttggctgagctgttttctccactgacaaatttagataaaacttaatcaaactttagtcagacttctctccttcacccaggcccctgaactttracccacactttggtatatagtttattcttaaattataaaaatagtggtgttatctgctactaacaaactacaaaagtgaaaatgtccaaagaactattctacaaataagtaatgtgacatgatcatacttaatgcagaatttattgataaagaaagatacttatgtaaggaaatgaaatatattttcattatttgtgattatttaaattttagtttgctaaattgaaggtaaattccataaacctgtattcactgaatcaattaggttatcaattatggcaacttctttttctaattattatttttataggacattaaaaaattgcacttgtcaaagcttttaatactgaattaagtcatttcataataactgtagacttctgta

SEQ ID NO: 228601 - DNA, 564 bp, Homo sapiens
gatttaaacagatacagaggcctccttatttaccttgacaaggctagatagactctccaaattcccattctttatctcataaatggttggctgagctgttttctccactgacaaatttagataaaacttaatcaaactttagtcagacttctctccttcacccaggcccctgaactttgacccacactttggtatatagtttattcttaaattataaaaatagtggtgttatctgctactaacaaactacaaaagtgaaaatgtccaaagaactattctacaaataagtaatgtgacatgatcatacttaatgcagaatttattgataaagaaagatacttatgtaaggaaatgaaatatattttcattatttgtgattatttaaattttmgtttgctaaattgaaggtaaattccataaacctgtattcactgaatcaattaggttatcaattatggcaacttctttttctaattattatttttataggacattaaaaaattgcacttgtcaaagcttttaatactgaattaagtcatttcataataactgtagacttctgta

SEQ ID NO: 228602 - DNA, 593 bp, Homo sapiens
tttaaatttaatttactctcaaactgtgatgatactaatgtaattatctttcatattagagctaagattcaaaataaaaggrgtaaccaaaattgccagaaattatgagattcaaatttgtgatcagaggcaaaagcctttcagttctaaggtacttattttaaacaataaagccaaatatcgaggaaattgcattaatgaaaaatatattcactatctgttgtttcttttaaatgaagaattgattcaaatcggcactttggttttgggaacaaggtattggagttagaatctcacctgaatttatatgatgcaagtgatggcagattaattcattgtttttaagtttctatgtccacagctctactgaaatcattctgacaaaaatcattagaaaaatataaattcacttctatagtgatatcctcctaaaatgataacctgacatgtcttatttttgccaagtggcttcatctgaaacagcatattgtaatgtgaaaaggattcagtaatcagaaacagtttagaaatgtcagtgtaggcaacagaagatcacagcaatctatcactgaggttcctttcatgggatatag

SEQ ID NO: 228603 - DNA, 593 bp, Homo sapiens
tttaaatttaatttactctcaaactgtgatgatactaatgtaattatctttcatattagagctaagattcaaaataaaaggggtaaccaaaattgccagaaattatgagattcaaatttgtgatcagaggcaaaagcctttcagttctaaggtacttattttaaacaataaagccaaataycgaggaaattgcattaatgaaaaatatattcactatctgttgtttcttttaaatgaagaattgattcaaatcggcactttggttttgggaacaaggtattggagttagaatctcacctgaatttatatgatgcaagtgatggcagattaattcattgtttttaagtttctatgtccacagctctactgaaatcattctgacaaaaatcattagaaaaatataaattcacttctatagtgatatcctcctaaaatgataacctgacatgtcttatttttgccaagtggcttcatctgaaacagcatattgtaatgtgaaaaggattcagtaatcagaaacagtttagaaatgtcagtgtaggcaacagaagatcacagcaatctatcactgaggttcctttcatgggatatag

SEQ ID NO: 228604 - DNA, 593 bp, Homo sapiens
tttaaatttaatttactctcaaactgtgatgatactaatgtaattatctttcatattagagctaagattcaaaataaaaggggtaaccaaaattgccagaaattatgagattcaaatttgtgatcagaggcaaaagcctttcagttctaaggtacttattttaaacaataaagccaaatatcgaggaaattgcattaatgaaaaatatattcactatctgttgtttcttttaaatgaagaattgattcaaatcggcactttggttttgggaacaaggtattggagttagaatctcacctgaatttatatgatgcaagtgatggcagattaattcattgtttttaagtttctatgtccacagctctactgaaatcattctgacaaaaatcattagaaaaatataaattcayttctatagtgatatcctcctaaaatgataacctgacatgtcttatttttgccaagtggcttcatctgaaacagcatattgtaatgtgaaaaggattcagtaatcagaaacagtttagaaatgtcagtgtaggcaacagaagatcacagcaatctatcactgaggttcctttcatgggatatag

SEQ ID NO: 228605 - DNA, 616 bp, Homo sapiens
tgataaacaggaagctatgtccagcatctaaaacaagaatctggattatactcctgtcaatacttttgtctaaaacgagcacagagaattcaatgatttatatcttagagtgatattgtactattgagggaaatcatattaataggaaaaaaaagtttacctatgagacttttgttattgttaatttgatgaaaatttaccagttccttcattaagattaacacttagaaatcttgcttgtaaaaacaaattaaaacaaaacaaacaaaaacatctctaaaacaccwtaataatcttttataaaataatgatgagttatatgtagttaatttttgccaacgtattagaacatgaggtgttctgtactcctttttaagcaattgataatgtccaaatctcaagctgatttttacatttaaataaaggaagttatttattattacatactcatattcattaatcaaaatatataaaatatttaaaaaatatgtcaatggaaagaaacctttctgttataaacttcatatatgtgtccttctaaaattcacaagatgaaattccaactacccatgtgacattaggaagtggtacctttgagaggtaattgggtcatgag

SEQ ID NO: 228606 - DNA, 616 bp, Homo sapiens
tgataaacaggaagctatgtccagcatctaaaacaagaatctggattatactcctgtcaatacttttgtctaaaacgagcacagagaattcaatgatttatatcttagagtgatattgtactattgagggaaatcatattaataggaaaaaaaagtttacctatgagacttttgttattgttaatttgatgaaaatttaccagttccttcattaagattaacacttagaaatcttgcttgtaaaaacaaattaaaacaaaacaaacaaaaacatctctaaaacaccttaataatcttttataaaataatgatgagttatatgtagttaatttttgccaacgtattagaacatgaggtgttctgtactcctttttaagcaattgataatgtccaaatctcaagctgatttttacatttaaataaaggaagttatttattattamatactcatattcattaatcaaaatatataaaatatttaaaaaatatgtcaatggaaagaaacctttctgttataaacttcatatatgtgtccttctaaaattcacaagatgaaattccaactacccatgtgacattaggaagtggtacctttgagaggtaattgggtcatgag

SEQ ID NO: 228607 - DNA, 469 bp, Homo sapiens
tctgccttctacagtaattactatacaccacttttactttctrtcctcttcaccatttcccccagacacaagactgagtacttcacattttgcaggtactcagttgaatagataaagtcctcagttaaaaatagcaatgccctatcagaaagattactaagtgaatgacggccttctgttccctgattcataaaatggcacaaaggctaattacagaaagcaatgtctagccaagaaggagtagaaggctttaagtcagtgcatacagtgtaccacaattaaagttagaagtatcccagttttgtctggtatcagccctgatctcaacatatatttcactacaaaactcttaatttgcacaattatgcattcatatgttgttttcaatttcttcttggtcataaaaatattgattttgtactgtaactttacacaaggaaaaaaaaaaagaaacaattcaaattgtacc

SEQ ID NO: 228608 - DNA, 469 bp, Homo sapiens
tctgccttctacagtaattactatacaccacttttactttctatcctcttcaccatttcccccagacacaagactgagtacttcacattttgcaggtactcagttgaatagataaagtcctcagttaaaaatagcaatgccctatcagaaagattactaagtgaatgacggccttctgttccctgattcataaaatggcacaaaggctaattacagaaagcaatgtctagccaagaaggagtagaaggctttaagtcagtgcatacagtgyaccacaattaaagttagaagtatcccagttttgtctggtatcagccctgatctcaacatatatttcactacaaaactcttaatttgcacaattatgcattcatatgttgttttcaatttcttcttggtcataaaaatattgattttgtactgtaactttacacaaggaaaaaaaaaaagaaacaattcaaattgtacc

SEQ ID NO: 228609 - DNA, 469 bp, Homo sapiens
tctgccttctacagtaattactatacaccacttttactttctatcctcttcaccatttcccccagacacaagactgagtacttcacattttgcaggtactcagttgaatagataaagtcctcagttaaaaatagcaatgccctatcagaaagattactaagtgaatgacggccttctgttccctgattcataaaatggcacaaaggctaattacagaaagcaatgtctagccaagaaggagtagaaggctttaagtcagtgcatacagtgtaccacaattaaagttagaartatcccagttttgtctggtatcagccctgatctcaacatatatttcactacaaaactcttaatttgcacaattatgcattcatatgttgttttcaatttcttcttggtcataaaaatattgattttgtactgtaactttacacaaggaaaaaaaaaaagaaacaattcaaattgtacc

SEQ ID NO: 228610 - DNA, 332 bp, Homo sapiens
ttgttaagtgcttcacaaatattacctcatttaacccttaaaaattgctatttgtaaaacaagtacttccaggytcaccttcctaacaaataaaacatatattgagtatctcccaaaaaaagtaggtaattaagcagagaatgtcatgaatagaccactgctatattttaatgtttgaatggataatgacccttataatataatgacccatttatccattcaaacactaaaatatagtcgcaacaattctttcaaagtttaaggagacttttttgtttgaaacccttccatgactcctcctagtattcaaaattccataccataataagcct

SEQ ID NO: 228611 - DNA, 423 bp, Homo sapiens
tatacatcatggtgaccacagtaaataacaatatattgtatacttaaaaattgcaaagcaatagattttgaagtgttctcagtattaaaaaaaatgataagtgtgtgaggtaatgcataggtaaaatagcttggttcagttatttcacaatttatacacataccaatacatgttgtataccacaaatatatacataatttttacttaactaaaaattaaatttacaaaaacagaaaagaaattggactcatctttcacayatttaatttaatcttgcaacaaaataacctcataaaaaattgaggactataactaatttattaatccttttataaaatgttcttgcatattgactgaggcattaaagaagcacaaagattacaacgtaccccattctcttatggtcacacagtatttaattag

SEQ ID NO: 228612 - DNA, 567 bp, Homo sapiens
ataccttttaaaatgaatgtcttcagtagattaaaagtaactgaagatttttttcaatgtattttttacttgctcctttgtttatattctaaaagaaatgtacttggaggccatatgttttagaaactccattacacatgtacatttgtttctcgttattcacatcakttatgttctgtaaggttgccataaatactgaataattgctttggtggggcgggagaatatatattacacatattatactttagaaaaacaatagttttcattctatccttctaggctttcagctggggcatttgtaaaaaaagacagattaacaagagaaaaacaaacatgtatatctcatacatacatgggagaaaagacagggcaatcaactctcaaaggggtagctcagcatttaaacttaaataccatcttcagctaaaatatatatatataaaaagagaaggatatctgagaggtaagttatggcaaggtgaccatgaaaaccaaggtgaacaagaataaaagttgataggcagatttacgtcagtgccttctccatagataaaattaccttgt

SEQ ID NO: 228613 - DNA, 571 bp, Homo sapiens
caacccactagctacaacaaatatctaggtacaggaaagtcaaaggtctccaatcaaattcggtccaaacaagactacacaaagacacgatataatcaaactgtccaaaatcaaagacaaagagawggtcctgcaagtagcaagagaaaaaaagcataacacataagaatgtatgtacactgagagtgaaagaatggaaaagatattctatgcaagtggataccaaaagagaacaggagtagctagctatgcgtgtatcaggtaaaataaactttaagtaaaaaactctaaaacaaaacaaagaagggcaatatataatgataaatgtattaattaatcaagatgtaatgattgtaaacatatataaccaacactggagaagctaagtaatagtaatatatctgaagagagaaatagactgtaatacaacaatagtaggagtcttcaatactccactttcaaagatgggcagatcatctggacagaaaatcagtaaggaaacatcggacttgaactatatgctttagagcaagtggcctaacagacatatacagaacattttaacccacag

SEQ ID NO: 228614 - DNA, 571 bp, Homo sapiens
caacccactagctacaacaaatatctaggtacaggaaagtcaaaggtctccaatcaaattcggtccaaacaagactacacaaagacacgatataatcaaactgtccaaaatcaaagacaaagagaaggtcctgcaagtagcaagagaaaaaaagcataacacataagaatgtatgtacactgagagtgaaagaatggaaaagatattctatgcaagtggataccaaaagagaacaggagtagctagctatgcgtgtatcaggtaaaataaactttaagtaaaaaactctaaaacaaaacaaagaagggcaatatataatgataaatgtattaattaatcaagatgtaatgattgtaaacatatataaccaacactggagaagctaagtaatagtaatatatctgaagagagaaatagactgtaatacaacaatagtaggagtcttcaatactccactttcaaagatgggcagatcatctggacagaaaatcagtaaggaaacatcggacttgaactatatgctttagascaagtggcctaacagacatatacagaacattttaacccacag

SEQ ID NO: 228615 - DNA, 507 bp, Homo sapiens
acttgaactatatgctttagagcaagtggcctaacagacatatacagaacattttaacccacagctacagaaaacaaatttctctcaagtgcacatggaacattctccagcatagattatactttagtccacaaaagaagtcttaacaaatttaagaagattgaaatcatattaaayatatttttgaccatagtgttatgaaactaaaaataaatggtaagagaaatttcaaaaaagaatagaactatttgaaaattaaacagcatggtcctaagcaacaaacaggtcaagaataaattatggctggacgtggtggctcacgcctataatcctagcactttgaaggccaaggtgcatggatcacttgaggtcaggagttcgagaccagcctggtcaacatagtggaacctcatctctgctaaaaatacaaaatttttttgtattgcaagtgtgtattgcacacttgtaaccccacctactccgaaggctgaagcaggtgaatcactt

SEQ ID NO: 228616 - DNA, 605 bp, Homo sapiens
gcctggagggggtcaaggcggcagtaggggtggtrtgtcagtgcagccttgagtgtgtgcacagcaggctggcttatgacggtgcctgggctcggccacaactttgctctgcactggagcaggcattgggagtgcggagaggccagagaccaggagcaggcacttacgaacctgcaggggcagggggtttcccaggatcccaagagcacaaggatatctgggtcaggagccacagctgggtggctgccgctgcacctgggaacactgggcagcccctgccagctccacagattgcacatccccagtcaagcctcctccactgcagctggcttccatgtagtagctgttccagatgggccaccactgccaccaacaagatgaacaacaagaatacagcaagaaacacaacttcggatatagcaaaaagaaaaatgggactgaaagaaattacctttctacttgaccccaagatgcactgtcatgtcatttattctgcaaatgcatcagcctggcctatgtctggagaacacacagaggataattctaacaatgtcaaatctaggtaagttctacactgttttgctccgtaactccagaagagtcac

SEQ ID NO: 228617 - DNA, 605 bp, Homo sapiens
gcctggagggggtcaaggcggcagtaggggtggtatgtcagtgcagccttgagtgtgtgcacagcaggctggcttatgacggtgcctgggctcggccacaactttgctctgcactggagcaggcattgggagtgcggagaggccagagaccaggagcaggcacttacgaacctgcaggggcagggggtttcccaggatcccaagagcacaaggatatctgggtcaggagccacagctgggtggctgccgctgcacctgggaacactgrgcagcccctgccagctccacagattgcacatccccagtcaagcctcctccactgcagctggcttccatgtagtagctgttccagatgggccaccactgccaccaacaagatgaacaacaagaatacagcaagaaacacaacttcggatatagcaaaaagaaaaatgggactgaaagaaattacctttctacttgaccccaagatgcactgtcatgtcatttattctgcaaatgcatcagcctggcctatgtctggagaacacacagaggataattctaacaatgtcaaatctaggtaagttctacactgttttgctccgtaactccagaagagtcac

SEQ ID NO: 228618 - DNA, 605 bp, Homo sapiens
gcctggagggggtcaaggcggcagtaggggtggtatgtcagtgcagccttgagtgtgtgcacagcaggctggcttatgacggtgcctgggctcggccacaactttgctctgcactggagcaggcattgggagtgcggagaggccagagaccaggagcaggcacttacgaacctgcaggggcagggggtttcccaggatcccaagagcacaaggatatctgggtcaggagccacagctgggtggctgccgctgcacctgggaacactgggcagcccctgccagctccacagattgcacatccccagtcaagcctcctccactgcagctggcttccatgtagtagctgttccagatgggccaccactgccaccaacaagatgaacaacaagaatacagcaagaaacacaacttcggatatagcaaaaagaaaaatgggactgaaagaaattacctttctacttgaccccaagatgcactgtcatgtcatttattctgcaaatgcatcagcctggcctatgtctggagaacacacagaggataattctaacaatgtcaaatctaggtaagttytacactgttttgctccgtaactccagaagagtcac

SEQ ID NO: 228619 - DNA, 474 bp, Homo sapiens
gaatttactctgtatcttgcggacaatactaatgaaaatgtgattggaaagacccagagcatcaatgttatctcctgccaaggctgacaatcaactttgcccccagtggcatttatttttctacaggcaagttgggacccacatcttagactgccatccataggcagagataatttaaaactccatgttggatattttcatgtaagctctmctattaacattacactctataacacaaaattggcttaggcaaacactttccattaaccaaacctaaacctttaatgctcccaattagctgaagagacttcttgagtcaccatttacttctctctcaagggtccctctattagttctatttctcaaatatttatagtgcagtcccccttttctatttcatttgtcattgaattcagaccctcattatctcttacattttttgttgacctaattgttcactcccaggtgtatcac

SEQ ID NO: 228620 - DNA, 356 bp, Homo sapiens
ttttgttttgttttgtttttccatttaactctttcatgaccacatgggtggcctttggtttgtaacttggatatggatgttgtttgtcaytgcactttgtattttatagcagtagctcattactcatgagaacacgtgaagttcttattgaaaaacagtttttaaaaattcacttaagtctattttgcagaatgtcattttgtgcatattttccaatttaatagttgcatctggccggtaactttggctaaaattatttttggactaaagtatcctgtatatactgtgatacggtctggctgtgttccctcccaaatctcatcttcatttgtagttccagtttcccccatctgttt

SEQ ID NO: 228621 - DNA, 356 bp, Homo sapiens
ttttgttttgttttgtttttccatttaactctttcatgaccacatgggtggcctttggtttgtaacttggatatggatgttgtttgtcattgcactttgtattttatagcagtagctcattactcatgagaacacgtgaagttcttattgaaaaacagtttttaaaaattcayttaagtctattttgcagaatgtcattttgtgcatattttccaatttaatagttgcatctggccggtaactttggctaaaattatttttggactaaagtatcctgtatatactgtgatacggtctggctgtgttccctcccaaatctcatcttcatttgtagttccagtttcccccatctgttt

SEQ ID NO: 228622 - DNA, 356 bp, Homo sapiens
ttttgttttgttttgtttttccatttaactctttcatgaccacatgggtggcctttggtttgtaacttggatatggatgttgtttgtcattgcactttgtattttatagcagtagctcattactcatgagaacacgtgaagttcttattgaaaaacagtttttaaaaattcacttaagtctattttgcagaatgtcattttgtgcatattttccaatttaatagttgcatctggccggtaactttggctaaaattatttttggactaaagtatcctgtatatactgtgatacggtctggctgtgtyccctcccaaatctcatcttcatttgtagttccagtttcccccatctgttt

SEQ ID NO: 228623 - DNA, 356 bp, Homo sapiens
ttttgttttgttttgtttttccatttaactctttcatgaccacatgggtggcctttggtttgtaacttggatatggatgttgtttgtcattgcactttgtattttatagcagtagctcattactcatgagaacacgtgaagttcttattgaaaaacagtttttaaaaattcacttaagtctattttgcagaatgtcattttgtgcatattttccaatttaatagttgcatctggccggtaactttggctaaaattatttttggactaaagtatcctgtatatactgtgatacggtctggctgtgttccctccyaaatctcatcttcatttgtagttccagtttcccccatctgttt

SEQ ID NO: 228624 - DNA, 251 bp, Homo sapiens
ttcttttttttttttttctggttttgaaacagtatctctctgtcacccaggcaggagtrcagtggggcagctacagctcattgcagcttcaacctctcgggtccggtggtcctcccaacatcaccctcccaagtagctggaactataagcatgcacaacaccacccgactaattttcaaattattcgtacagctgagatctgtctatgttgcccaggctggtctcaaaatcctgggctcatgtgattctcc

SEQ ID NO: 228625 - DNA, 564 bp, Homo sapiens
aatctcaactcattggcatgggtagtgatagacaataacattaccctaatttttttttttgtcttttagtcatcctggtgtctgtgccattgctcatacttcttgtacttggatcaaagaaacaagcaagttggaactatttatatattgttttaaagtataagctatttggctctctaaggttaatcttcatggtctatcaaatttgttattttggccttgatttggcaattgaggttcctagttccaaatcaccttataggaactattaatcattctggctttgtgagagaggcatgatgctgygtgctatctagatttttaaaaggttctgcacatctgctctctagtcagaaaatcactatgataatacaacaaaaaggtcaagaatattttgtaatacagttttatatgaagtttactgaataatctctgagtggtaaagagctggatttgcagctttccttaaattggctaacctcttgaaagtaagagaatgaccaaaaggggtgactatgagccggaatatacaaacacaatggccagaccatatatgaaagtaga

SEQ ID NO: 228626 - DNA, 350 bp, Homo sapiens
cagtgctgaatacaagattagataattatgcaagattatacaagatttgatgctgattgatgaaatagttamacttgtatacactagcattgctgttgaaccattttagtatttatattatttagcaaacttataagcatcttggcaaacctttttagatttgtaaaaaatttaattaaaaaatattttaacttttttttgttgttttttttttgagatagagtctggatctgtcacccaggctggagtgtagtggcgtgatcatgactcactgcagcctgtacttcacaggctcaagcgatcctccacttcagtctcttgagtaactgggaccacaggagcacatgact

SEQ ID NO: 228627 - DNA, 525 bp, Homo sapiens
tgaatttatggatggtttataccatgccatcttcaataactgaacctatttataaagcagcttcctttgttacttaattctcatttcaattctgtgatgtaggttcacaaagatgtgtcttagttcattcctgctgctataacaaaatatctgagactgggtaatttataaagaacagaaatgtacttctcacagtwctggaggctgaaagtccaagatcaaggagctggcaagtttgttgccttgtgaaggctgctctctttacctcaagatagcatcttgttgctgcatcccccagaaaagaggaatgtcatgtcctcacatgtccaaaggcagaagggcaaaaagggattagctaattccctccagctcttcataaggttgctaatcccatttatgagagctctacctcaatcaattaatcacccacttagggcctccctgtcaatatactatcacattggtgatttagtttcagcacatgaattttgggggacattcagaccatagcacagtgctttgcta

SEQ ID NO: 228628 - DNA, 457 bp, Homo sapiens
aatgtactttttcaaacaaataactttctggagctgaaatctatgatttcctcattaaacaattcagtacatgaattaaaagaggggcagtgcaagaaatttttggagagcaaatgtataaagatagaaatcatgaaagcaaagaaacttggaggagaaatttgagatgtccaaaatttgaataatatgacttccagaaggagagaaagaaacagatggaagaaaagactacgtattgtgtacagtgtacactgcttgaatgatgatgggtgcrctaaaatctcagaggtcaccgctaaagaacccatctgtgtaaccagaaactatctgtatctccacaactattgaaatgaaaagaaaagaaaagaaaaaggaaatggatggatgtggcagtaagccacaggagaaaaaaagacaggtatcacatttcaaatttgaacactgtagctaaaaagca

SEQ ID NO: 228629 - DNA, 197 bp, Homo sapiens
tgatgatgggtgcgctaaaatctcagaggtcaccgctaaagaacccatctgtgtaaccagaaactatctgtatctccacaactattgaaatgaaaagaaaagaaaagaaaaaggaaayggatggatgtggcagtaagccacaggagaaaaaaagacaggtatcacatttcaaatttgaacactgtagctaaaaagca

SEQ ID NO: 228630 - DNA, 627 bp, Homo sapiens
gacagtaaatttacagtcttgccatgtttctcamttgaaagttaaggtattgatcaggaaagaatgggatcttgaaaggtagattagagaaatctgattggacccagatgaaaccaataatattgaacccacaactcattttgagcctccctcaacctgggacagttgcctcaaaaagggatactcatccttctcaagactcaccacagccattccctgttgccactagatctataaatcaggtcagatctcagcatggtctatgggaataggtacacactatgacccaggaggacagagcccaaacactaaaatactttctagacttcactgatatatatcagtagaaacttggggaacatctgtggaaattgtttctaagggtgttagactatggaagacagcatataacaccagataacctgagttcattgacaacggtatacttactagagagtttgaatttattgtcttactggaggtggctctaacagcttgcctggttgagtgactgaaatgtgggcttaacactggcttacattaggtgagactgagatgctagtgcttccctggcatgatgtgaaggagggaatccaaaggcttagggagatgaaaatgttggactgg

SEQ ID NO: 228631 - DNA, 627 bp, Homo sapiens
gacagtaaatttacagtcttgccatgtttctcaattgaaagttaaggtattgatcaggaaagaatgggatcttgaaaggtagattagagaaatctgattggacccagatgaaaccaataatattgaacccacaactcattttgagcctccctcaacctgggacagttgcctcaaaaagggatactcatccttctcaagactcaccacagccattccctgttgccactagatctataaatcaggtcagatctcagcatggtctatgggaataggtacacactatgacccaggaggacagagcccaaacactaaaatactttctagacttcactgatatatatcagtagaaacytggggaacatctgtggaaattgtttctaagggtgttagactatggaagacagcatataacaccagataacctgagttcattgacaacggtatacttactagagagtttgaatttattgtcttactggaggtggctctaacagcttgcctggttgagtgactgaaatgtgggcttaacactggcttacattaggtgagactgagatgctagtgcttccctggcatgatgtgaaggagggaatccaaaggcttagggagatgaaaatgttggactgg

SEQ ID NO: 228632 - DNA, 588 bp, Homo sapiens
gtatctgtttcaatctttttaaattgcattgttaaacttattaatgacttgtaagagttctttatatattgggtcaagcccttgaaatggactccctgtggcaaaaagagacccagaaaatgttaaaaccagattctacagctttggccaggcaggaggtcagtgacccctcaacactcccctaccttgccaactgccgcaagattttctttcctgtaattaaacagaaaccagttcctgagaaacaatgtttggaagatttccccaccaaccttgacagaccgcttgacatcgtagctgacctcccctctcttattatggtcttgcctttacaactgaccagccttacaaaacattccttcctggtagatgaccaccaacmagagcctggttctgaccagtccacagaggctgtgcatgggatgcctttgtgtcctgtctttcacctcttgacataaaaagccaaattttacttcattttaatgttaaatctctaccccaaagtgaacatggaatgtatttaacatatatgtttactcactgagcatgcgtttagctcctctcataaatattcatagattctcctat

SEQ ID NO: 228633 - DNA, 521 bp, Homo sapiens
caaaacttggcagagggcagttcctgggggcagagggcaattcctctgaggcccccagcaggtggcactctggcagcttggggagggaactgggaaggggtggagaccctgggttctgaagggcaggagtcgagctcctgcagtagaccagtccttttgatgcttggcaaaggccctggccctccaggatgcagctattgtctttagccttgatatgtcatggtcacatttcccaactcaaatattttttgtatctctttattatcctaagccatagcactaattagttgccccrtagaagttagcacccagggaagagctgtttctccataagccatttcacttgggatgaatgtgtcaatgcacagggaagacccgccgctgtaaagcggcatggccagagtctggttctgtggcactgctgctcgtgacacagagtcagcagcaagggcttccccatggggagggcctgtttgcttagcatcattcctagggtcatttgtgtgtgccacgaagagggg

SEQ ID NO: 228634 - DNA, 521 bp, Homo sapiens
caaaacttggcagagggcagttcctgggggcagagggcaattcctctgaggcccccagcaggtggcactctggcagcttggggagggaactgggaaggggtggagaccctgggttctgaagggcaggagtcgagctcctgcagtagaccagtccttttgatgcttggcaaaggccctggccctccaggatgcagctattgtctttagccttgatatgtcatggtcacatttcccaactcaaatattttttgtatctctttattatcctaagccatagcactaattagttgccccayagaagttagcacccagggaagagctgtttctccataagccatttcacttgggatgaatgtgtcaatgcacagggaagacccgccgctgtaaagcggcatggccagagtctggttctgtggcactgctgctcgtgacacagagtcagcagcaagggcttccccatggggagggcctgtttgcttagcatcattcctagggtcatttgtgtgtgccacgaagagggg

SEQ ID NO: 228635 - DNA, 592 bp, Homo sapiens
ttcctctctctgtcttgctcctactcctgccacatgaatcatctcattgccccttgacattctgatatgactgggtggcttcctgagtcctcccagattcagaagccactatgtttccttacagcctgcagaatcatgagattctttatgatcatagagaaaattagtactggaaagtggatgtatgaaatgtcttcaaggccttttccctgttgtcttggcaatcagcactcagcttcttttcattcaagtatctgaagccttgaattttccccctgaaaatggacttgccttcctttaccacattgccaggctgtgacaaagataggtgataaagtagaagcaggttcagaagggggtagcagacagaggttgggagagtttgaagggctttgaagacaggaaaatgaggaaaagtttggatctttgtagagaattgwtaaatacttgcgatcagaaggctgacaggaaaatggtcagtgaaagccagacttaaaaggtctcagataaaaatgaggaacttattgggaacagaagccaaggttacctttgttttgctgtagcaaggaatgtggtggcacggtgaccctgc

SEQ ID NO: 228636 - DNA, 581 bp, Homo sapiens
ttcctctctctgtcttgctcctactcctgccacatgaatcatctcattgccccttgacattctgatatgactgggtggcttcctgagtcctcccagattcagaagccactatgtttccttacagcctgcagaatcatgagattctttatgatcatagagaaaattagtactggaaagtggatgtatgaaatgtcttcaaggccttttccctgttgtcttggcaatcagcactcagcttcttttcattcaagtatctgaagccttgaattttccccctgaaaatggacttgccttcctttaccacattgccaggctgtgacaaagataggtgataaagtagaagcaggttcagaagggggtagcagacagaggttgggagagtttgaagggctttgaagacaggaaaatgaggaaaagtttggatctttgtagagaattgttaaatacttgygatcagaaggctgacaggaaaatggtcagtgaaagccagacttaaaaggtctcagataaaaatgaggaacttattgggaacagaagccaaggttacctttgttttgctgtagcaaggaatgtggtggcac

SEQ ID NO: 228637 - DNA, 587 bp, Homo sapiens
ttcctctctctgtcttgctcctactcctgccacatgaatcatctcattgccccttgacattctgatatgactgggtggcttcctgagtcctcccagattcagaagccactatgtttccttacagcctgcagaatcatgagattctttatgatcatagagaaaattagtactggaaagtggatgtatgaaatgtcttcaaggccttttccctgttgtcttggcaatcagcactcagcttcttttcattcaagtatctgaagccttgaattttccccctgaaaatggacttgccttcctttaccacattgccaggctgtgacaaagataggtgataaagtagaagcaggttcagaagggggtagcagacagaggttgggagagtttgaagggctttgaagacaggaaaatgaggaaaagtttggatctttgtagagaattgttaaatacttgcgatcagaaggctgacaggaaaatggtcagtgaaagccagacttaraaggtctcagataaaaatgaggaacttattgggaacagaagccaaggttacctttgttttgctgtagcaaggaatgtggtggcacggtgac

SEQ ID NO: 228638 - DNA, 433 bp, Homo sapiens
gaattcgctaagaagatataatcaaaaatgtggatgcactaaacaaaagaaatgacagaaatgaaagaagaagtagacacattctcaattatagtcaggcattttaacactcttcacagtaattgacagaatcacccgacagaaaatcagcaagggtatagaggaactgaacagcaccatcaaccaggtaactacaggattttctgtagatggagacaagctggttgtcaaatttacatggaaaagcaaaggctctagaatagctatttttttaaagttttgaaggtaaagaataaagttggaggactcaccctacccaattttaagaggttttatataactactgtaatcaagatagcatgatatggcagaggggcagacatacaaatagatggaagggaatcaagttcmagagtagactaacactaatatg

SEQ ID NO: 228639 - DNA, 423 bp, Homo sapiens
cttgtaataaaattcttaaaagaaattcaaaaattcttcaggcataaataatatatcagaaagaaaatttgatatacaaaagaaaccaaaatacaggaaataaatagataaatataaatttaaattaatcagaatgaaaatttgatctacaaaagaaatcaaaatacaggaaataaatagataaatataaatttaaattaatcagaatgaaaatttgatctacaaaagaaatcaaaatacaggaaataaatagataaatataaattaaattaatattttcttatttttaattgctttgtagcaaaaataatagcaatatattatatgtttatagcatayaaaaatagtaaaagaaatgacaatagcacaaaggatggggaaaaaggaattgagaatatacagtaataaggtcttcatgctaca

SEQ ID NO: 228640 - DNA, 549 bp, Homo sapiens
tgatggattttccaagagagtttttttatatattttgattaaaattattcttaaaatataaatttaagaaaaatatatcaggctaccatgagacttatttcccaaaacagtatgtcagaagacaaagacgcaacawcaagaaagtttcaaggaaagaatattggaacccagagttactgttcatatggaaggggagaaatataaagcattatagaaatgctagtgaagcaaagcaaaatggctgaagagaaggccccaccaactgacccccaccacccaacagtaacaccaaatttcacaactatctatacagaaaagaaccaaaaaccaggtaccagcttgacacagtggagtaaagcctcaagcaggctcttagagtctctgattccaggctttggctctttcatggcctttctggacctgccctgggccagaggggagtccactgcctaaagagtgagtcccaggccaggccgtatatgtcataagctgactaaagagcccttgggccttaagtgaacacaggtggtagcctggtagtactcccca

SEQ ID NO: 228641 - DNA, 574 bp, Homo sapiens
aagctttgatagtcactcatgttagccaagagaggaggatgtctggtatttgggtcatttggttttgcctgygcttagacaaaattttgaagttgtcttgtctcacttgttttttctctcactccattatagtcagagtgccttggtctgttgttgatgttctatgagatcatttgtgtccaacaggcaaacactatgaactagatgtaaatatcaggccagtttccttacgtcaggagctgtttttctctttttcagtggttttattcagatgatggagttgaggtgagaacaagtcctaatgctgttagttgtacttaatatttttgatacttcatacacctaataagaggcacaaacttggaaatattttcctcataactaattttaaagaaaaaatgtgtttctatctaaactaatgaaacagttaattttctgtatgcaagaaatggtgacctttctctcactctctcttcccctggagaacctctagggtgtttctgtttacaataaatacgtagggctttatttatttacttggtcttctctaacactcacaaacattgatttatag

SEQ ID NO: 228642 - DNA, 574 bp, Homo sapiens
aagctttgatagtcactcatgttagccaagagaggaggatgtctggtatttgggtcatttggttttgcctgtgcttagacaaaattttgaagttgtcttgtctcacttgttttttctctcactccattayagtcagagtgccttggtctgttgttgatgttctatgagatcatttgtgtccaacaggcaaacactatgaactagatgtaaatatcaggccagtttccttacgtcaggagctgtttttctctttttcagtggttttattcagatgatggagttgaggtgagaacaagtcctaatgctgttagttgtacttaatatttttgatacttcatacacctaataagaggcacaaacttggaaatattttcctcataactaattttaaagaaaaaatgtgtttctatctaaactaatgaaacagttaattttctgtatgcaagaaatggtgacctttctctcactctctcttcccctggagaacctctagggtgtttctgtttacaataaatacgtagggctttatttatttacttggtcttctctaacactcacaaacattgatttatag

SEQ ID NO: 228643 - DNA, 574 bp, Homo sapiens
aagctttgatagtcactcatgttagccaagagaggaggatgtctggtatttgggtcatttggttttgcctgtgcttagacaaaattttgaagttgtcttgtctcacttgttttttctctcactccattatagtcagagtgccytggtctgttgttgatgttctatgagatcatttgtgtccaacaggcaaacactatgaactagatgtaaatatcaggccagtttccttacgtcaggagctgtttttctctttttcagtggttttattcagatgatggagttgaggtgagaacaagtcctaatgctgttagttgtacttaatatttttgatacttcatacacctaataagaggcacaaacttggaaatattttcctcataactaattttaaagaaaaaatgtgtttctatctaaactaatgaaacagttaattttctgtatgcaagaaatggtgacctttctctcactctctcttcccctggagaacctctagggtgtttctgtttacaataaatacgtagggctttatttatttacttggtcttctctaacactcacaaacattgatttatag

SEQ ID NO: 228644 - DNA, 574 bp, Homo sapiens
aagctttgatagtcactcatgttagccaagagaggaggatgtctggtatttgggtcatttggttttgcctgtgcttagacaaaattttgaagttgtcttgtctcacttgttttttctctcactccattatagtcagagtgccttggtctgttgttgatgttctatgagatcatttgtgtccaacaggcaaacactatgaactagatgtaaatatcaggccagtttccttacgtcaggagctgtttttctctttttcagtggttttattcagatgatggagttgaggtgagaacaartcctaatgctgttagttgtacttaatatttttgatacttcatacacctaataagaggcacaaacttggaaatattttcctcataactaattttaaagaaaaaatgtgtttctatctaaactaatgaaacagttaattttctgtatgcaagaaatggtgacctttctctcactctctcttcccctggagaacctctagggtgtttctgtttacaataaatacgtagggctttatttatttacttggtcttctctaacactcacaaacattgatttatag

SEQ ID NO: 228645 - DNA, 379 bp, Homo sapiens
tgttctcttgccttattaaaataaatatgcaygatatacttctgggaaagggcacagattttagtaatgtttacttaacaaccatcatttgttcattcttttttccaaggaaaagggaaatacccttatttggtgaagcaagcgtgtccccatgggttttccatatgcatctctgttgcccacgaagcgctggactaagcatgcctgggaaaagaaaggggtaggttgggggaagcctgcgtattcatagctctaggagaagcagaccaggaaggccggagtagcatagggaagggatatagagagggcgagaggaagggcagaagcaacaaaagctgtgcacctgcaaggatggaataaggatttctaggaagcccta

SEQ ID NO: 228646 - DNA, 570 bp, Homo sapiens
ttaaactaactcctctccattcttcaggttgcagcttgaatctactttctctagaaagctttccttaaccctcacattgcrttatgaacctctcctatgtgctcccacagaatcgcatgtccattctatcatgctactatcacactattattattgcttatttgtttataatcccccacagtgcataaacattttgcaggaagatactgcatcttgtttatctttacatttccagcacaaaataggatctcctgaatgaatggatggatggatgaaaacattattgttactaagaggcagaagacctgcattcaagtcaacacctcgctatttatccttaatccgaagcaaaccatagactctctgtggaagagaatgtagaagtagaaatgtgatcttctgtctccttaaaaccaggtggctagactaggcaattccttcatggtccttatcagcagtatgatcaatgtctccatatgcaaaatattgcaagatatgttgagttgctctaaaacacgtgcaagacaagcaccctgggctctctgaagaggaggaaagatgaacagtctc

SEQ ID NO: 228647 - DNA, 378 bp, Homo sapiens
tagctcaaaacattctatatgatctcaggtcatgctcaaaattaaccactgggtcagaactcaaattctgtatgaggccagattttaaaataaaatttaggtatttgtcttaaaacaaaaaccaggccactttcaaaacttactccaacaaagacatgatttcttaaagcagtcttgaaacgttcttttattttatgtatgtttyagctttttggttaagtatctgattcttaaaacacaagtacaatttgtagcctgcaaagtttgaaaagtaattctgtttgaatcaaaagagatgttgatttgatgactgcttttgttcaaaacaatcatgtcataatttatatgctgtaatatccatatcttaatactagatct

SEQ ID NO: 228648 - DNA, 593 bp, Homo sapiens
aagcttagtgacctgcttctaatgaacgaactatggcaaaagtgatgaggtgccactttagagattagatcacaaaagaccatgcctctggtcttgctcacactcactctctgcctcttcttcctygctcactggggtgaagcaagctgccatgttgtgagctgctctaagcagaagcccaagtggccagaaactgagagaagccccaactgccagcaagtaactgaggccttcagtccaaaagcatatgaggaaccgaatcttaccaacaacaatgagtgagtttgggagcaaatctctccctggtcaagtagtcaagataactgcagcccagctgacatgttaattgcagcctcccaaaaaactaagcaagaaccacccacctaccccatacccagacccctgacccagtgaaactataataaattttgttgattgaagctacaaagtctggggagtaatttgtttcccagcaatagataattaatatgttatctcttgacactcaattaactagtatctgccagcctagaaaaaattaactcctctcttctttataactaaccatgccctgtactcctgcctctgtcata

SEQ ID NO: 228649 - DNA, 593 bp, Homo sapiens
aagcttagtgacctgcttctaatgaacgaactatggcaaaagtgatgaggtgccactttagagattagatcacaaaagaccatgcctctggtcttgctcacactcactctctgcctcttcttccttgctcactggggtgaagcaagctgccatgttgtgagctgctctaagcagaagcccaagtggccagaaactgagagaagccccaactgccagcaagtaactgaggccttcagtccaaaagcatatgaggaaccgaatcttaccaacaacaatgagtgagtttgggagcaaatctctccctggtcaagtagtcaagataactgcagcccagctgacatgttaattgcagcctcccaaaaaactaagcaagaaccacccacctaccccatacccagacccctgacccagwgaaactataataaattttgttgattgaagctacaaagtctggggagtaatttgtttcccagcaatagataattaatatgttatctcttgacactcaattaactagtatctgccagcctagaaaaaattaactcctctcttctttataactaaccatgccctgtactcctgcctctgtcata

SEQ ID NO: 228650 - DNA, 634 bp, Homo sapiens
atttctggccataaccattggcatctgtattagtccgttctcacattgctatgaagaaatacccaaaactgggtaatttataaaggaaagaggtgtaactggctcacagttccacattgttggggaagcctcagaaaacttgcaatcataatggaagacaaaggagaagcatgcaccttctttacagggtgtcaggacagagtgagtgcaagcaggggaaatgacagatgcttataaaaccatcagaccttgtgagactcactcactatcatgagaacagcatggcggaaatcgcccccatgattcaattatcttcacctggccccccttgatacatggggattatggggattacaattcaaggtgagatttgggtggggacacagagccaagtcatatcagcatcatttggttgtcttttctcattcattttgrgattttttttttgccttttccaacaactttaattctttatactcgatatttgcattctgaatcagatatattatacatatcatctaatttacccatttaaagtatacagtttaattgattttagtaaattcatgaacttgtccctccatcatcacgatcaacattataacatttttgttaccactaaaagagaccctac

SEQ ID NO: 228651 - DNA, 594 bp, Homo sapiens
tactggttccatcagctccatggagaatttcattcataaggacatcggtaagctaaggaagagtgagaaggaatatattttataggttgtgaaatttatcaaaatagatccaccacagtatgtgaatgaatttatttattttgtcattcattcttttaaaaatgtattcagtatttatcaattaatattggccaaggaaaaaggcattttgctggccaaatcaaaaatcaacaagttgcactaaatccaagattcgataatatcataccatgattatttaacaagaaatttatagctttaggaagctggagggggacaaagtgacttaatgagagtacattcaggatgaagcaaaaaaaaatctgtaacttaacctggggagcagcatctagaatatagaaagaccgccaatgaattgaatctatgtcccgtgtatcaagtcattctttttctttcttctttgttttttttaaagaagcagaggtctcaccatgttactcaggctggacttgsaactcctgagatcaagtgaacctcccatttcaggctcccatgtagctaggactacacgcttgcatcaccgcacaaggcatc

SEQ ID NO: 228652 - DNA, 322 bp, Homo sapiens
aaagagaacacatacacgtgcaaaaaaggttttgcaccttattctttttgtccctaaacaatttacttccttctgcccattcttaagaccatattatgacaaaacacaggggaatgaattttcttccacctctcctgttttgtgaaaggaaactgaaacatattcacaaatgtgccaagtctttgactgccaagtttcaccctacagtgaatcttcattgctggttattataaaatccagggtgaaaaaaaatcgaggtagcataactkaagatggaaaagtgaggtttacaaatagactgtggtgccaatactgaggacag

SEQ ID NO: 228653 - DNA, 397 bp, Homo sapiens
tttccctgctctcacttgccctctctctcctgctgccatgtaagacatgcgtgattccccttccaccacaattttacgtttcctgaggcctccccagccaggcagaactatgagtcaattaaacctctttccattataaattacccagacttgggtagtatctttatagcagtgtgagaatgaactaatacaaacagcaattgcacagaggcagatgatcaataaatgtctgctcaaccaatgagcaaatatttctgttctatccacccttcarttccatactgatggaatgtaatttcagccacaagcaaacctatgttttcgttggcattatgtcctctttataggcttgtgaccaatgatctttatgcttcctgaaatattaagaaaaactgct

SEQ ID NO: 228654 - DNA, 430 bp, Homo sapiens
gtgctaatttcacctgcatacatttcaatttaatgttgcaaatgtttcctgaggatctactaacttcaactgaagatatgcagggaaacgaagatgaaaaagaaacaatcctggccctaggagaggagccaccaacacagtgcctaccttagcacatatatggtaagcattcaatgagtcackcatcgtttttatatattcataggatacttacgatacaaagcagagtgcagtaaatgtcaggagagaggtactgatatggtttggctgtgtccccacccaaatcttatcttgaattgtagctcccacaattcccatatgtcatggagggacccagtgggaggtatttgaatcatgggggtgggtctttctcatgctattctcgtgatagtgtttaagtctcacgagatctgatggttttataaagagg

SEQ ID NO: 228655 - DNA, 524 bp, Homo sapiens
ttctcttcctttatcttctggctctgttagcttgggagagaaatctagttccaaatgaacagaatggtctacaagagacctgctggaaatatatgtgtctgctaagggaattgagatggatttttaactcaaatatagttctctgcttcaggcagtcttcaaaaggtataggaaactaccagctctgtttcactagcccttcggtttacttgatctttctcattggttttgaacaaaatacgctcatctttgcatgagctcttattgtgcctttctgagataattaatgaaagggggttgyttttggtcttttgggttgtattttcaccccaacctcaatcagtctctgacgttatccaaataaacatcttgttatatcatgttccaggtatcagggcttttaccatgtgggctttgaatcagcttgacttgaccctggtggtttgccttcaaatccaacagtggggctgagtgttttgcactgtggcacaataaccattatgccacgttcttaggctactgac

SEQ ID NO: 228656 - DNA, 517 bp, Homo sapiens
tgcataaatcagggcaaacaacaacaacaaaaaaccatcaaacatgcagaggaagatgtgaaagaccaatgtttctaacgtaattctcgtcaagctcgtcggtatgtaggaaaaatgtatgtaacactttattctagaaatttccatttaaagccaccgctctgagttccctgacactcctgcatagtctgaccttgcttaggaagactgagaatctgtggagctgctctagaaaaagggtgggcgggggtggataagcagccctcttatccctacttttcccttttactaagaacccaggatggttgaatgcaaggtccrtttttattctgaggatagaaaaaattcagggctttcccaggctatttcacccacactatctatctcatttggttttatctatgtttggttctagattcactaaagatagaaaagccgcatataacccttatctcttccttttgtgtggtgcagtgatgtaaaatcaccctatgggatccaaaagaatttggaattc

SEQ ID NO: 228657 - DNA, 555 bp, Homo sapiens
gatctccagctacatggattgtggttcattgatggtgttaattctttcagggtccacctcagctttccagctcttgggaaggaccctactcaatgaatgaacaagacagtggtagcaaagacacactcttttcagggtgggcttctgcagggagtggtatgacagcctagctgtttctacccaacatggaactcttctattacrtgacagaaatctttgctctacagcatcccagtgggctggcctctgtttggatggcatcacagtctgatggcaccctctgtctaatccagcttctgctctgttcctttcacaggtgtaactctccagtgagctgtttacactcccaactctgtctcagtgtctgcttcctggctaacccaaccttctgcagagtctcatacttcacagataaccaaaataaaacactaatgccaatccactagaatacaataggtatgggtttctttctgaatagtctccagcacctagaatgatcactgacacatagtattggatatggagctcagtaaacaattgttaaatgaatgaatg

SEQ ID NO: 228658 - DNA, 562 bp, Homo sapiens
gctaacacttgagtcaagaaataaaacattgtccatcaatcagcacccagaagtcttccatgtgttctttctcctccaccagagctatgagcctttgtgacattttccttgctgttctttgtacttctaccacctaaactctgttttgcctgttttcaaactgtatataaacagaataacactgtatatttgcctttgcgtctgtttctttctctcaaatttgtgagactcagctctgagttgtgtgtggctgtcgtcctgtcatttcctctgttgtcacttccatggcatttcactgttacttaggcaagcttcatttgttcgttttactgttagtggacagttggatcatttctcgtttggggctgtggtraataacactgccataaacatctcgtacttgagccatcattgatttaagagtctttagaaagtagtggaattgctgggctgtagggtatgcggactttcaactctaccacctgatgccaattttttctttgaagaggctggacaaaatcacattcccaccagccacctccttttaggaagctgaggagct

SEQ ID NO: 228659 - DNA, 601 bp, Homo sapiens
acaacaaattgcatagaattattatcataggttgtaggctcactctttcttaaaacatttgctttctcatttgtcataaagtctcgagttaaaaaaccctgtcaggtactgtgtagagaaattcagtctgtgtgggccctgtgtgagttatacttctgagacccacaatgtgtcaaggaggcatccagcctctcaccacctgtaagtatctgtcctgaagaaacctatttatttttggccatgctacctgttaaccaaatacagacagtctttgaattgaacttttccaagatgcaaaattccatttttgattaaaatgagctaagggaaaatatattgaagagaacagaaagaattctgtcataggcaaatttgagaataacccattgacaattgtaggggtaaaagatatagaaaatggaaagtaaaccacaaaggctaaaaygcaggtacatattttataatgatataacaggactttgcctattattcaacttacagaaaagaaaatcttacttgtatttttgcagcctcttctgtgtcccttgaagcccctatattcttcccattcctcccaaggtacctacaagcctgaatttca

SEQ ID NO: 228660 - DNA, 658 bp, Homo sapiens
tgtgcttcctggtgggatataatatagagtaactttcaggaaatcttgccaggatgttcaatctgactccaataaagcctttagatccaaattctaatatacagagaatacaagagttgcaggaaaatgtttaacaactttacatgggaacaattctacaagagagctggcctgaattctttaaagagctaatgtcataaggaaaagaattgaaggaagtattctgatattataagagatataagacatacartaattaaataaatgtataattcctggtgagatcttggtttgataaattttggggtcttttagggaaatttaaatatagaatggatattagggaattacatttaagtgtgataatagtattgtggttttgtggggatatatctttaatttttaaaaatggatgctaagttatttatgaatgatgtgtcatgatgtcaataacttattttaaatagctcaacaaaaagctatctagatagataaaataaatatggccaattgttaaaaattgcaactatgggttttcattttactatttcttctacttctctgtacatttgagatttttaataatgtaaaaattttgagtttaaaaatatttttaaatttatattctatatgtgacatatattttaatctgtatgtg

SEQ ID NO: 228661 - DNA, 658 bp, Homo sapiens
tgtgcttcctggtgggatataatatagagtaactttcaggaaatcttgccaggatgttcaatctgactccaataaagcctttagatccaaattctaatatacagagaatacaagagttgcaggaaaatgtttaacaactttacatgggaacaattctacaagagagctggcctgaattctttaaagagctaatgtcataaggaaaagaattgaaggaagtattctgatattataagagatataagacatacagtaattaaataaatgtataattcctggtkagatcttggtttgataaattttggggtcttttagggaaatttaaatatagaatggatattagggaattacatttaagtgtgataatagtattgtggttttgtggggatatatctttaatttttaaaaatggatgctaagttatttatgaatgatgtgtcatgatgtcaataacttattttaaatagctcaacaaaaagctatctagatagataaaataaatatggccaattgttaaaaattgcaactatgggttttcattttactatttcttctacttctctgtacatttgagatttttaataatgtaaaaattttgagtttaaaaatatttttaaatttatattctatatgtgacatatattttaatctgtatgtg

SEQ ID NO: 228662 - DNA, 658 bp, Homo sapiens
tgtgcttcctggtgggatataatatagagtaactttcaggaaatcttgccaggatgttcaatctgactccaataaagcctttagatccaaattctaatatacagagaatacaagagttgcaggaaaatgtttaacaactttacatgggaacaattctacaagagagctggcctgaattctttaaagagctaatgtcataaggaaaagaattgaaggaagtattctgatattataagagatataagacatacagtaattaaataaatgtataattcctggtgagatcttggtttgataaattttggggtcttttagggaaatttaaatatagaatggatrttagggaattacatttaagtgtgataatagtattgtggttttgtggggatatatctttaatttttaaaaatggatgctaagttatttatgaatgatgtgtcatgatgtcaataacttattttaaatagctcaacaaaaagctatctagatagataaaataaatatggccaattgttaaaaattgcaactatgggttttcattttactatttcttctacttctctgtacatttgagatttttaataatgtaaaaattttgagtttaaaaatatttttaaatttatattctatatgtgacatatattttaatctgtatgtg

SEQ ID NO: 228663 - DNA, 515 bp, Homo sapiens
ctggggtgagataatatctcattgtagttttgatttgcatttctctgaagatcaatgatgtggagtactttttcatatgcctctttgccatatgtatgtcttcttttgagaaatgttcaaatcttttgcccatttcttgatcagattactagatttttacctatagttatgaatccattgtcagatagatagcttgcaaatattttttctcattctgtgggttgtcccttcacttcgttgacagtatcctttgttgtgcagaagctttttaacttgatgtgatcccatatgtccatttttgctttggttgcctatgcctgtggggtattactcaagaaattttttgctcaaaccaatgtcctggagagtttcccccatgttttcttgtggtagtttcatagtttgaggtyttagatttaagtctttaatccattttgattttacttttgtatatggtgagacataggggtctatttttattcttctgcatatggatatccagttttcctagctcc

SEQ ID NO: 228664 - DNA, 472 bp, Homo sapiens
tttagctattgtacatgggattactttcttgatttctttttctgattcctttctttttttgctgttggcatatagacatgctactgatttctgtgtgttgattttacatcctgaaactttcctgaattttcttatcagttctaataatttttagatggaatcttcaggtttttccaaatataagagcgtatcatctgcaaaccaggataatgtgacttcttcctttccagtttcgatgcactttctttctttcccttgtctaatttctttagttaggactttcagtactacgttgaataacagtgatgaaagtgaacatccttgtctttttttagatcttagaggaaaggctgtcggtttttcccattsagtgcaatactagctgtgggtctgttgtatatggcttttattatgttcaagtatgttccctctctacccaggtttttgaggaagggatgttgaactttatgaa

SEQ ID NO: 228665 - DNA, 495 bp, Homo sapiens
tgtgactcttcaaaaaataaatcttttccatcatatttacaaataaatgaaattcacaactcttatgtaaatactgctattccaaagyacatttccaatgatccaaatggagcacttgatggcatatgtatgtaatccgtgtggtatgtaacccatcttctgacaacactgacatcccgtggcctcctgctagatgttttgatgagaaaggagatgaccttaattaggggaaaaatgcctagattcaaattttagaaagcactttttaaaaaaatttttagaaaattaatagtggggtcctgaccccagtaagatgattttacaactcactaaatggatcacgagtgaatagaaatagctttggagcactattttccaacctttagtgccataaaacataaacctttgccaaagtagttgggcactttttaaaaaaatataggcttttttcccgagcagttttaggttcacagcaaaattaagtggaaggtacag

SEQ ID NO: 228666 - DNA, 395 bp, Homo sapiens
taaaccctcacatttacggtcaactgattttttttttccaaccrtggtgccaaagacaattcaatggagaatgaaaagtattttcaacaaacggtgcttgggcaactggatatccacacacaccaaaagaaagaatgaagttagacctacctcacaccataaatacaagagctaaaatataaaactcttagcagaaaacctaggcagaaactttcttaaccctggactgggcaatggtttcttccacatgacaccaaaaaaacaagcaacaaaagtacatacattgaacatcatcagatacttttatactacaaaggacaccatcaagaaagtaaaaagacagtccacaaaatgggataaaatatttacaaataatatatctcacaagggacttg

SEQ ID NO: 228667 - DNA, 384 bp, Homo sapiens
ggtcaactgattttttttttccaaccgtggtgccaaagacaattcaatggagaatgaaaagtattttcaacaaayggtgcttgggcaactggatatccacacacaccaaaagaaagaatgaagttagacctacctcacaccataaatacaagagctaaaatataaaactcttagcagaaaacctaggcagaaactttcttaaccctggactgggcaatggtttcttccacatgacaccaaaaaaacaagcaacaaaagtacatacattgaacatcatcagatacttttatactacaaaggacaccatcaagaaagtaaaaagacagtccacaaaatgggataaaatatttacaaataatatatctcacaagggacttgtatcta

SEQ ID NO: 228668 - DNA, 413 bp, Homo sapiens
gaattcagagtccagaaataaaccctcacatttacggtcaactgattttttttttccaaccgtggtgccaaagacaattcaatggagaatgaaaagtattttcaacaaacggtgcttggrcaactggatatccacacacaccaaaagaaagaatgaagttagacctacctcacaccataaatacaagagctaaaatataaaactcttagcagaaaacctaggcagaaactttcttaaccctggactgggcaatggtttcttccacatgacaccaaaaaaacaagcaacaaaagtacatacattgaacatcatcagatacttttatactacaaaggacaccatcaagaaagtaaaaagacagtccacaaaatgggataaaatatttacaaataatatatctcacaagggacttg

SEQ ID NO: 228669 - DNA, 514 bp, Homo sapiens
aatttccttttaaattctctctgttcaattctgctttccayttaaatccagttctgttttcataccactacctagtttttacatttaagtaagatctccattataataggataaagcccagctttaaaggccctaccagcttgcttttgccttccaatctaaccagaaaaatttgtatttcctgagggccattattggtttagctctaacatcttataacttttattcaagacagcctataacttttcattgtcttggtgaatctcagaatgctttgttttgcattctgataccccttgatgaagaggaggatctgttcagtctgttggggggctgaggatcttatttttatttgtcactattctttattgaggcagatgagataaacagtaatacccactgtaaggttttaaaagtttgcaaggatctacacatttttctaaaagctaaatttcatccaaattttagactacaaactatatttcagtaaatccacatagtaatagtgactata

SEQ ID NO: 228670 - DNA, 514 bp, Homo sapiens
aatttccttttaaattctctctgttcaattctgctttccatttaaatccagttctgttttcataccactacctagtttttacatttaagtaagatctccattataataggataaagcccagctttaaaggccctaccagcttgcttttgccttccaatctaaccagaaaaatttgtatttcctgagggccattattggtttagctctaacatcttataacttttattcaagacagcctataacttttcattgtcttggtgaatctcagaatgctttgttttgcattctgataccccttgatgaagaggaggatctgttcagtctgttggggggctgaggatcttatttttatttgtcactattctttattgaggcagatgagataaacagtaatacccactgtaaggttttaaaagtttgcaagratctacacatttttctaaaagctaaatttcatccaaattttagactacaaactatatttcagtaaatccacatagtaatagtgactata

SEQ ID NO: 228671 - DNA, 514 bp, Homo sapiens
aatttccttttaaattctctctgttcaattctgctttccatttaaatccagttctgttttcataccactacctagtttttacatttaagtaagatctccattataataggataaagcccagctttaaaggccctaccagcttgcttttgccttccaatctaaccagaaaaatttgtatttcctgagggccattattggtttagctctaacatcttataacttttattcaagacagcctataacttttcattgtcttggtgaatctcagaatgctttgttttgcattctgataccccttgatgaagaggaggatctgttcagtctgttggggggctgaggatcttatttttatttgtcactattctttattgaggcagatgagataaacagtaatacccactgtaaggttttaaaagtttgcaaggatctacacatttttctaaargctaaatttcatccaaattttagactacaaactatatttcagtaaatccacatagtaatagtgactata

SEQ ID NO: 228672 - DNA, 389 bp, Homo sapiens
ctcattcacttgtcttgcccaaccctagtactggctccgtgacatattcactgccattggcactggaggaatgaaggaatctcatggaagtttctgaccaactactactggtgaatgattatgagcaactcataaaacttacctgggcctcagttccttcatctaggaattgagagtcataatgtaaaatagacaatgtcactatggaaattcaatctgtagtataaagtgctttatacagattacttaaatattatgaayttaattttaactagatctaataatacagtaaaagaacaatgaagaaaggtgggtttgctggtcattagcccttacctttgagcattatcttagcacactaaaataaaccctagaaagatttcctgcat

SEQ ID NO: 228673 - DNA, 547 bp, Homo sapiens
ttgtgtgtgtatgttcacacatatttatataacatataacattaaatatgtatatatatgaattatatacatataaatgcagcataaccatgatctttatataaaatgtatttccaattttgtttataaaatgtaatcacacacccatacataattaaagaaatttctaaaatattttaaggtttkcaacattgtgaatgtggatttatttaaaaaaatttacattcttaattttttaaaaataagtaattattaatatgagaaaatataaagtgactataatgactttatcctcttgcattggatactaatttaaaataattaagcttgtcaaagcacatgtaactctgaaaattcatataattcaaaatgaactttcaggattttttttacagtttggcattaatgatgccaattaatggcctccctgactgtaactctgcagtgcccttttattctatgggctcatgaacatgacttgttttggccaaccacatattatcagcaagcatgacacagcagaggcttaagaagtatgtgtatgtgt

SEQ ID NO: 228674 - DNA, 547 bp, Homo sapiens
ttgtgtgtgtatgttcacacatatttatataacatataacattaaatatgtatatatatgaattatatacatataaatgcagcataaccatgatctttatataaaatgtatttccaattttgtttataaaatgtaatcacacacccatacataattaaagaaatttctaaaatattttaaggtttgcaacattgtgaatgtggatttatttaaaaaaatttacattcttaattttttaaaaataagtaattattaatatgagaaaatataaagtgactataatgactttatcctcttgcattggatactaatttaaaataattaagcttgtcaaagcacatgtaactctgaaaattcatataattcaaaatgaactttcaggattttttttacwgtttggcattaatgatgccaattaatggcctccctgactgtaactctgcagtgcccttttattctatgggctcatgaacatgacttgttttggccaaccacatattatcagcaagcatgacacagcagaggcttaagaagtatgtgtatgtgt

SEQ ID NO: 228675 - DNA, 547 bp, Homo sapiens
ttgtgtgtgtatgttcacacatatttatataacatataacattaaatatgtatatatatgaattatatacatataaatgcagcataaccatgatctttatataaaatgtatttccaattttgtttataaaatgtaatcacacacccatacataattaaagaaatttctaaaatattttaaggtttgcaacattgtgaatgtggatttatttaaaaaaatttacattcttaattttttaaaaataagtaattattaatatgagaaaatataaagtgactataatgactttatcctcttgcattggatactaatttaaaataattaagcttgtcaaagcacatgtaactctgaaaattcatataattcaaaatgaactttcaggattttttttacagtttggcattartgatgccaattaatggcctccctgactgtaactctgcagtgcccttttattctatgggctcatgaacatgacttgttttggccaaccacatattatcagcaagcatgacacagcagaggcttaagaagtatgtgtatgtgt

SEQ ID NO: 228676 - DNA, 547 bp, Homo sapiens
ttgtgtgtgtatgttcacacatatttatataacatataacattaaatatgtatatatatgaattatatacatataaatgcagcataaccatgatctttatataaaatgtatttccaattttgtttataaaatgtaatcacacacccatacataattaaagaaatttctaaaatattttaaggtttgcaacattgtgaatgtggatttatttaaaaaaatttacattcttaattttttaaaaataagtaattattaatatgagaaaatataaagtgactataatgactttatcctcttgcattggatactaatttaaaataattaagcttgtcaaagcacatgtaactctgaaaattcatataattcaaaatgaactttcaggattttttttacagtttggcattaatgatgccaattaatggcctccctgactgtaactctgcagtgcccttttattctatgggctcatgaacatgacttgytttggccaaccacatattatcagcaagcatgacacagcagaggcttaagaagtatgtgtatgtgt

SEQ ID NO: 228677 - DNA, 643 bp, Homo sapiens
gaactgcaaaatattgctgagtgtggattgctctgaaatctgaaaacattacttgtgaattgcttctatccaaaatgcagacacgatgctgggtgttggtttacttgtttctgatttctcaaccctcttttctaggcaaaaggtgtccaatctctacagacccacagaatctaacagatgtctctatattcctcctcctagaacctcagaggatccagaatgacagccggtcctcgctgggctgttcctgtccatgtgcctggtcacggtgctggggaacctgctcatcatcctggccgtcagccctgactcccacctccacacccccatgtacrtcttcttctccaacctgtccttgcctgacatcggtttcacctccaccacggtccccaagatgactgtggacatccagtctcacagcagagtcatctcctatgcaggctgcctgactcagatgtctctctttgccatttttggaggcatggaagagagacatgttcctgagtgtgatggcctatgaccggtttgtagccatctgtcaccctctatatcattcagccatcatgaacccgtgtttctgtggctttctagttttgttgtctttttttttttctctcagtcttttagacgtccagctgcgcaa

SEQ ID NO: 228678 - DNA, 643 bp, Homo sapiens
gaactgcaaaatattgctgagtgtggattgctctgaaatctgaaaacattacttgtgaattgcttctatccaaaatgcagacacgatgctgggtgttggtttacttgtttctgatttctcaaccctcttttctaggcaaaaggtgtccaatctctacagacccacagaatctaacagatgtctctatattcctcctcctagaacctcagaggatccagaatgacagccggtcctcgctgggctgttcctgtccatgtgcctggtcacggtgctggggaacctgctcatcatcctggccgtcagccctgactcccacctccacacccccatgtacatcttcttctccaacctgtccttgcctgacatcggtttcacctccaccacggtccccaagatgaytgtggacatccagtctcacagcagagtcatctcctatgcaggctgcctgactcagatgtctctctttgccatttttggaggcatggaagagagacatgttcctgagtgtgatggcctatgaccggtttgtagccatctgtcaccctctatatcattcagccatcatgaacccgtgtttctgtggctttctagttttgttgtctttttttttttctctcagtcttttagacgtccagctgcgcaa

SEQ ID NO: 228679 - DNA, 595 bp, Homo sapiens
ttgtgcttaaattgcttactagtgacacctgaacctatttaacatagattagagatttgtatttcttcttttgtaaattatattctaggttctctaggtgctttgtgctacattgttgatttgcaagagctctttacataaatagtatttactgatattgctttccatatctgtggcatatggtggtagttctaatacttgagaagatggcagttgtttggagcttgtcttttgtaggtggctaagaacagtggattgcaagaatgccactagatatctgcaaaagcaagataagtagctggaagcagtggaggagtttcaggtaacactttacagcagtaaaataattttcgatgagctgcaaagtctctaccagaagagccaactattgcctctcagcagagaggtgccaagaatcccctctgctcygcatctcagctcattgcttcatcttattcctgttcatacttgactgcattgggaaactctcattgactatggaaggcccaaggccttggagggaaagcaggaataatgatgagtatttgctaaatccaaactttaagacaaaggctgtaggtgaacgctgtatttt

SEQ ID NO: 228680 - DNA, 616 bp, Homo sapiens
acaatcaggaaaagataattttccttgttaggaaaagataaacaattcaatttttaaaatgggcaaaggaactgaagaggaagttcacaataaaatgcataaaacacaaatattcacacgaaaaattggtttaacttcacaaataaaaaagaaaacaataatgacattatttttgcttatcacattgacaagcataaaatatacttttaataatcattgttgaggaagtagcagaatgcacagctgatagaagtgtaaattgataatgcatttatgggtggcaataagctgggaatttgaaaaatgtttatgctttttaatccagcaagttccctgcttggcatttctcctgtccagactatcataggtaatcacaaagatttatgtgttagtaatttacgcataatgttcataatttagaaacaataaaaaatgtctctcgacattgaactggtggggtgtacaatgtaatgcaaggaaaaccaggcaactattgtaaagtacagtatagaagtatatgyaataatatggaaaatattctttagtaaattacctgaaaaaaagtttacgcacctacatgattataatgattttctcttggtagtgagattactgt

SEQ ID NO: 228681 - DNA, 541 bp, Homo sapiens
tagctgagtgtctgaaggtcgtgcctggcgtctatgttgtagtcgggttcccagttgattytgactcacagcaagaactgaacattgctgtgttagctgatgagcaaacacaaataattgtcaaagaagacaatgtgttctgacaaaaagccaagtggaatagaaacaaagtggaagtgaggattagttctgcctggggttgggaaggtgtttacagaggatgcaacacttgagtgagaccttgaaagatgaaaagatattgctaagccacccattacactctggacactaaagaagtttttgtttagttttgatggagcaaggtgactgcatgagttgggacctgaaattacctacaacttgctcagcagaactctgggcatgccgaatgcctgtgtgtgtgtatatatgtgtgtagtgtgtgtgtgtattggagggagatgctgagatgtgattctgtggtctgctgtgtctttaaaaggctgcatatttatttcccttttgggagatacatgttctatattaacatattgaaggctct

SEQ ID NO: 228682 - DNA, 211 bp, Homo sapiens
tcaaaagaaaaataatcagcaaaaactgtccctacaaaagacctgatggcagatgtactggataaacattttaaaacacctgtcttaaagatgctcaaagaactacaggaatacgtggaggaagttaagaaagcaatttatgaacaaaatggaaatatcaacaaagagrtagaaaatctaaaacaaaactctggagctgaagagtatagta

SEQ ID NO: 228683 - DNA, 617 bp, Homo sapiens
aaagggcattaatcccacccacaataaaagagccttcatgacctaatcacctctcagaggccccactccttagcactgttgctatggcaattaaattttaacatgagttttgcaggggactaatattcaaaccatagcaccttgttattactaattaagtgtaaaagggcttaagctttccaaccaaaagacagggatttgcagaatggatttttaaaatcatgatccaaatgcatgctgtctatgagaaacttactttagatccaaagaggttgaaagtgaaagaatgaaaaaagatatttcatgtaaatagtgaccaaaagagagcaatcatggctatactaatatgagacaaaatagactttaaacttcaaaagattgcaagagacataaaggatattatatattaataaaagcttcacttcacaagaaaatataacactcttcaaaaagtgttatatattttgaattgaagctcttgtgaaaarcttcaattcgcaagaaaatataaacatttatacatctaacaacagaccatcaaaatatataaagcaaaacttgatagaattgaaagtaaaaacaggcagtcctacaataaaatttggagacatcaatac

SEQ ID NO: 228684 - DNA, 531 bp, Homo sapiens
aggggaatatcttacttgattcaaaggtaggcaygacagtgtagaaaaacaattaggaaagggtaggtatatataaaataggtgaaggctggggaccaatcagaggaaatcacaccaaaacaggaggacacattctcaatccggtctgaggatttaactgtagcttggctgtcaggctttaaactgccttcagcttggaggtggggtttcaccaggacccatcccatctacctgggcatttggctgcctcccgttgctatcataatcaaagctcttcctgtgaaacacagagcactcctgtcaaacacttttatatctgcacactcattttcccctgtttaccttaagaacctgcttataacaaaagctgaacaggagcacttcccaaggcaacttggaaatgtgtcccaggcaactggcctcactttggctcaagtaaactctttaaattacattttatgtctcagcctcttccttttaggtcaacacagttgattactatttcccaaaacccctctgaacagagccttc

SEQ ID NO: 228685 - DNA, 531 bp, Homo sapiens
aggggaatatcttacttgattcaaaggtaggcatgacagtgtagaaaaacaattaggaaagggtaggtatatrtaaaataggtgaaggctggggaccaatcagaggaaatcacaccaaaacaggaggacacattctcaatccggtctgaggatttaactgtagcttggctgtcaggctttaaactgccttcagcttggaggtggggtttcaccaggacccatcccatctacctgggcatttggctgcctcccgttgctatcataatcaaagctcttcctgtgaaacacagagcactcctgtcaaacacttttatatctgcacactcattttcccctgtttaccttaagaacctgcttataacaaaagctgaacaggagcacttcccaaggcaacttggaaatgtgtcccaggcaactggcctcactttggctcaagtaaactctttaaattacattttatgtctcagcctcttccttttaggtcaacacagttgattactatttcccaaaacccctctgaacagagccttc

SEQ ID NO: 228686 - DNA, 531 bp, Homo sapiens
aggggaatatcttacttgattcaaaggtaggcatgacagtgtagaaaaacaattaggaaagggtaggtatatataaaataggtgaaggctggggaccaatcagaggaaatcacaccaaaacaggaggacacattctcaatccggtctgaggatttaactgtagcttggctgtcaggctttaaactgccttcagcttggaggtggggtttcaccaggacccrtcccatctacctgggcatttggctgcctcccgttgctatcataatcaaagctcttcctgtgaaacacagagcactcctgtcaaacacttttatatctgcacactcattttcccctgtttaccttaagaacctgcttataacaaaagctgaacaggagcacttcccaaggcaacttggaaatgtgtcccaggcaactggcctcactttggctcaagtaaactctttaaattacattttatgtctcagcctcttccttttaggtcaacacagttgattactatttcccaaaacccctctgaacagagccttc

SEQ ID NO: 228687 - DNA, 531 bp, Homo sapiens
aggggaatatcttacttgattcaaaggtaggcatgacagtgtagaaaaacaattaggaaagggtaggtatatataaaataggtgaaggctggggaccaatcagaggaaatcacaccaaaacaggaggacacattctcaatccggtctgaggatttaactgtagcttggctgtcaggctttaaactgccttcagcttggaggtggggtttcaccaggacccatcccatctacctgggcatttggctgcctcccgttgctatcataatcaaagctcttcctgtgaaacacagagcactcctgtcaaacacttttatatctgcacactcattttcccctgtttaccttaagaacctgcttataacaaaagctgaacaggagcacttcccaaggcaacttggaaatgtgtyccaggcaactggcctcactttggctcaagtaaactctttaaattacattttatgtctcagcctcttccttttaggtcaacacagttgattactatttcccaaaacccctctgaacagagccttc

SEQ ID NO: 228688 - DNA, 443 bp, Homo sapiens
ttgacacataaaatcaaccatcacagcaaacatacacagacttacacacatgcatataagcacatatacattcagaaaatatttacacacattcacactagacaaagacagacttctggacacacatgcatayagacacagagacacaaacacatttacacacatctacacacatatcatgtacacacgcacacatttccccagaacccatgaccatgttactgtaacagtagccgctcactaccgtggcattttatgacttaactggggccaccatgtgcctttgtttgcctggcaggcctcggcatggcaaggccagagagtgtgagcgaccatcacccacattcacagatgggagggcctaggctgagtgaagctgtaaggaccgagccaagtcccacatccactctgagcttcgtccagtgagtctgaaagtgagaaaa

SEQ ID NO: 228689 - DNA, 443 bp, Homo sapiens
ttgacacataaaatcaaccatcacagcaaacatacacagacttacacacatgcatataagcacatatacattcagaaaatatttacacacattcacactagacaaagacagacttctggacacacatgcatatagacacagagacacaaacacatttacacacatctacacacatatcatgtacacacgcacacatttccccagaacccatgaccatgttactgtaacagtagccgctcactacygtggcattttatgacttaactggggccaccatgtgcctttgtttgcctggcaggcctcggcatggcaaggccagagagtgtgagcgaccatcacccacattcacagatgggagggcctaggctgagtgaagctgtaaggaccgagccaagtcccacatccactctgagcttcgtccagtgagtctgaaagtgagaaaa

SEQ ID NO: 228690 - DNA, 589 bp, Homo sapiens
gtctaaatatatacagtaaaatctgcaacaaatttctgaagcattaagatctgaaccctgcagatatctggtgagcgagttgtgytgcagtggagcagatttttttttttttccttgcagttacacagctgctagaaaacatatttttagatttgcttttaaaggcaagcaaaaacggtttccactttgtggatttccatccatgatgtatccgtcatgatccctcagtccctactgcaaggggtcaaccatctacaacatgttctattccgtgccctccttccttgtaagtgactgcaaggactggcactagatgctcattctagacgaagctatcagaccctgaccaccagtcctatgctttagaggtgctgcatttcatgaaaatcatgcatggaagtttaagcaccctacagatcaggcccctgctatttctgaattgccccatcattggcattggtatgattccttattgttgtttgtgtttttctttggtaactcttcctactctatcaagggtgcgtgaaaaggaacagtttcaaagagtgaaatcagaacaaggcaaagcacgacctttgatgtcacaaga

SEQ ID NO: 228691 - DNA, 546 bp, Homo sapiens
cttcctcttctgccacccctgagacagcaagaccaaccccttctcttcctcaatctattcaatgagaagacaatgaggatgaagacctttataatgatccacttccacttaatgaatattatgattttccctttcttatgattttcttaataacattttcttttcttcaacttactttattgtcagaatacagtatatatttgacacagcaggcatgtgaaaaaaacaaatatagtatataatatgtacaacatacaaaatatgtgttaatcaactgtttatattattggtaaggcttccactcaacagtaggctattagtagttaagtttgggggagccaaaagttatggatttcttactgcatgaggggtcagcaccccaacccccatgttgttcaaggggcaactgtatttgctctatgaatgaatcrcaatataacgtttctgagaaggataagaaatattggaaaatacaacggggcataatgtttaaacacaactagacttactccactagaagaggaggagagggagaggctctgtttc

SEQ ID NO: 228692 - DNA, 428 bp, Homo sapiens
ttatcctggctaggtcaggattggtagttggtatttgctactggcttccagtgggtagaggccagagatgctgctaaacatctgckacggtttggatatggtttgtccccactaaaactcatgttgaaatgtgatcccccacgtggcagtgctgggaggtggggcctagtggaaggtgtttgggttatgggggcagatccctcatgaagggcctcatgctgttctcaatgtagtgagtgatttcttgctctcgcttttaagagattggattcattctatcagtaatgaatttgttcccatgagagtgagttgttaggaaaccagacccccctcagatttctcccttttgcctgggttcacttctcccttgaccttctctgccatgctatgatgcagcacaaaaggccttgccagaagctagggccatg

SEQ ID NO: 228693 - DNA, 486 bp, Homo sapiens
ttgaacgtaagagtttgaggctgcagtgggctaggattgagccactgcactccagcctgggcaacagagcgaggccctgtttcttaaaagaaaagaaaatggaagagatggttgaggcagaatgatagggaaaggagagaacaaatccttggggatctctaagaatctaagggattggggtaaaaaaagaaacagcaaaagaaagagcactgagtagcagaagagttatagaatgcaatgtcttttttcaaataaaaaaaagyaacataataaaaaggggatgagggactaactaaaaattagaggtcaagtaccatgtttgacattgcctcacacataactttacaatgttaatgttagtcctaacgacaggtcctgaggaagtcattatcatcaccatcgtcatccccatcttcatcactccattttatgcaaaagcacctgaggcttaaagaggcgaagttctcaacgttatataaagcatga

SEQ ID NO: 228694 - DNA, 460 bp, Homo sapiens
gtttcaattgaagtcacagtgttgaacagtccctttcatagagcaggtttgaaacactctttttgtagtatctggaagtgtacatttggagcgctctcaggactgcggtgaaaaaggaaatatcttccaataaaagctagatagaagcaatgtcagaaactttttcatgatstatctactcagctaacagagttgaacctttcttttgagagagcagttttgaaacactctttttgtggaatctgcaagtggatatttgtctagctttgaggatttcgttggaaacgggattacatataaaaagcagacagcagcattcccacaaacttctttgcgatgtttgcattcaagtcacagagttgaacattccctttcatagagcaggtttgaaacactctttttgtagtatctggatgtggacatttggagcgctttcaggcctatggtgaaaaaggaaata

SEQ ID NO: 228695 - DNA, 460 bp, Homo sapiens
gtttcaattgaagtcacagtgttgaacagtccctttcatagagcaggtttgaaacactctttttgtagtatctggaagtgtacatttggagcgctctcaggactgcggtgaaaaaggaaatatcttccaataaaagctagatagaagcaatgtcagaaactttttcatgatgtatctactcagctaacagagttgaacctttcttttgagasagcagttttgaaacactctttttgtggaatctgcaagtggatatttgtctagctttgaggatttcgttggaaacgggattacatataaaaagcagacagcagcattcccacaaacttctttgcgatgtttgcattcaagtcacagagttgaacattccctttcatagagcaggtttgaaacactctttttgtagtatctggatgtggacatttggagcgctttcaggcctatggtgaaaaaggaaata

SEQ ID NO: 228696 - DNA, 460 bp, Homo sapiens
gtttcaattgaagtcacagtgttgaacagtccctttcatagagcaggtttgaaacactctttttgtagtatctggaagtgtacatttggagcgctctcaggactgcggtgaaaaaggaaatatcttccaataaaagctagatagaagcaatgtcagaaactttttcatgatgtatctactcagctaacagagttgaacctttcttttgagagagcagttttgaaacactcttttkgtggaatctgcaagtggatatttgtctagctttgaggatttcgttggaaacgggattacatataaaaagcagacagcagcattcccacaaacttctttgcgatgtttgcattcaagtcacagagttgaacattccctttcatagagcaggtttgaaacactctttttgtagtatctggatgtggacatttggagcgctttcaggcctatggtgaaaaaggaaata

SEQ ID NO: 228697 - DNA, 432 bp, Homo sapiens
gatgtttcaattgaagtcacagtgttgaacagtccctttcatagagcaggtttgaaacactctttttgtagtatctggatgtggacatttggagcgytttcaggcctatggtttaaaaggaaatatcttcccctgaaaactagacagaagcattctcagaaacttatttgtgatgtgcgccctcaactaacagtgttgaagcattcttttgatagagcagttttgaaaaactctttttgtggaatctgcaagtggatatttgtctagctttgaggatttcgttggtaacgggattacatataaaaagcagacagcagcattcccagaatcttgtttgtgatgtttgcattcaagtcacagagttgaacattccctttcatagagcaggtttgaaacactctttttgtagtatctggatgtggacatttggag

SEQ ID NO: 228698 - DNA, 432 bp, Homo sapiens
gatgtttcaattgaagtcacagtgttgaacagtccctttcatagagcaggtttgaaacactctttttgtagtatctggatgtggacatttggagcgcttkcaggcctatggtttaaaaggaaatatcttcccctgaaaactagacagaagcattctcagaaacttatttgtgatgtgcgccctcaactaacagtgttgaagcattcttttgatagagcagttttgaaaaactctttttgtggaatctgcaagtggatatttgtctagctttgaggatttcgttggtaacgggattacatataaaaagcagacagcagcattcccagaatcttgtttgtgatgtttgcattcaagtcacagagttgaacattccctttcatagagcaggtttgaaacactctttttgtagtatctggatgtggacatttggag

SEQ ID NO: 228699 - DNA, 458 bp, Homo sapiens
tgtttcaattgaagtcacagtgttgaacagtccctttcatagagcaggtttgaaacactctttttgtagtatctggatgtggacatttggagcgctttcaggcctatggtttaaaaggaaatatcttcccctgaaaactagacagaagcattctcagaaacttatttgtgatgtgcgccctcaactaacagtgttgaagcattcttttgatagagcagttttgaaaaactctttttgtggaatctgcaagtggatatttgtctagctttgaggatttcgttggtaacgggattacatataaaaagcagacagcagcattcccagaatcttgtttgtgatgtttgcattcaagtcacagagttgaacattccctttcakagagcaggtttgaaacactctttttgtagtatctggatgtggacatttggagcgctttcaggcctatggtgaaaaaggaa

SEQ ID NO: 228700 - DNA, 398 bp, Homo sapiens
ttttctgcttctggtttctgatggccttcccaatgccagggtgccaaagtcttcmctaatgttctcttctgccctcagtggatggcccaggtgggatggttgcgtgcacccctttttccagggccacatttctgccctgcttagctgatatttccagtcattcattcaacaagcatgggctgaacccctctcaggccaggccctggctaaatactggagactctgggagaaagaagttgtggttcctacctcccaaagatacatagttagttgagaagacagccacaaaaatcagtgatgaaaatgcagtggtgtcagtgctacgtgaagaaagcacaggggcaccgaccacagactgagattggggaagaagaccaaggaaagtttcctggaggaat

SEQ ID NO: 228701 - DNA, 562 bp, Homo sapiens
tgcagggctgtaaatgcctgcaggcctttgcccttgctctgtgactggtgggcctcctacatcgccagattccagcagaggctgggtcaccaggataccccaacagccaaggttacacagccactaaatgagacagggaagggatgtatgctagagactcctgcatggctgtacatgtgcacctgtgtgtctttgtgccatggtctggatacatgcctttgtgccccgggtctctatgcacaacagtgagaacattttcaggaccattctgctggagccactgcacaaactatgcccagatggctgtgctccartgtaaaatcatcgtgttcttattatcagatgataggctcctatgacagccctgaacagcccccctcactcctaaactcctccatcaatctccatcacatccagggtcaccaatagagtgaggttaagtgggggaagtgaagctgtccttttcaaatagctctagatagtaatactcatttttttcaaagctgaaagtttaatggtttaattttaggcctataaaaatctctttgtgtcaaaaccaccc

SEQ ID NO: 228702 - DNA, 562 bp, Homo sapiens
tgcagggctgtaaatgcctgcaggcctttgcccttgctctgtgactggtgggcctcctacatcgccagattccagcagaggctgggtcaccaggataccccaacagccaaggttacacagccactaaatgagacagggaagggatgtatgctagagactcctgcatggctgtacatgtgcacctgtgtgtctttgtgccatggtctggatacatgcctttgtgccccgggtctctatgcacaacagtgagaacattttcaggaccattctgctggagccactgcacaaactatgcccagatggctgtgctccaatgtaaaatcatcgtgttcttattatcagatgataggctcctatgacagccctgaacagcccccctcactcytaaactcctccatcaatctccatcacatccagggtcaccaatagagtgaggttaagtgggggaagtgaagctgtccttttcaaatagctctagatagtaatactcatttttttcaaagctgaaagtttaatggtttaattttaggcctataaaaatctctttgtgtcaaaaccaccc

SEQ ID NO: 228703 - DNA, 559 bp, Homo sapiens
aaactcctgccacaaccacatcaaatttcttcatttccctratgtttcttccttctatgcctttgctcacattgcctcctttgcttgaagtggcttcctccaatgccttgctgtgttcacatattgtagaagctgcttggcttccactgactttccagtggcgtcgtctatgctattctcctttttctggggaattgattttcactccttccttacccagtttttgtttgtttgtttgtttgtttttttagatagagtttcgctcctgttgtcccagctggagtccattggcgccatctcggctcactggaaccttggcctcctgggttcaagtgattccccctcctcagctccctgaatagctgggattacaggtgcatgccaccacacctggctaattttgtattttcagtagagatggggtttcactatgttggccaggctggtcttgaactcctgacctcaggtgatccacccccctcagcctcccaaagtgttgggattacaggcatgagccactgtgcccagcccttccctatgcagtttttaaacattttaa

SEQ ID NO: 228704 - DNA, 559 bp, Homo sapiens
cttctcttctccacctttatctcaaaaactcctgccacaaccacatcaaatttcttcatttccctgatgtttcttccttctatgcctttgctcacattgcctccttkgcttgaagtggcttcctccaatgccttgctgtgttcacatattgtagaagctgcttggcttccactgactttccagtggcgtcgtctatgctattctcctttttctggggaattgattttcactccttccttacccagtttttgtttgtttgtttgtttgtttttttagatagagtttcgctcctgttgtcccagctggagtccattggcgccatctcggctcactggaaccttggcctcctgggttcaagtgattccccctcctcagctccctgaatagctgggattacaggtgcatgccaccacacctggctaattttgtattttcagtagagatggggtttcactatgttggccaggctggtcttgaactcctgacctcaggtgatccacccccctcagcctcccaaagtgttgggattacaggcatgagccactgtgcccagcccttc

SEQ ID NO: 228705 - DNA, 570 bp, Homo sapiens
agatctgtctccttctcttctccacctttatctcaaaaactcctgccacaaccacatcaaatttcttcatttccctgatgtttcttccttctatgcctttgctcacattgcctcctttgcttgaagtggcttcctccaatgccttgctgtgttcacatattgtagaagctgcttggcttccactgactttccagtggcgtcrtctatgctattctcctttttctggggaattgattttcactccttccttacccagtttttgtttgtttgtttgtttgtttttttagatagagtttcgctcctgttgtcccagctggagtccattggcgccatctcggctcactggaaccttggcctcctgggttcaagtgattccccctcctcagctccctgaatagctgggattacaggtgcatgccaccacacctggctaattttgtattttcagtagagatggggtttcactatgttggccaggctggtcttgaactcctgacctcaggtgatccacccccctcagcctcccaaagtgttgggattacaggcatgagccactgtgcccagcccttc

SEQ ID NO: 228706 - DNA, 559 bp, Homo sapiens
aaactcctgccacaaccacatcaaatttcttcatttccctgatgtttcttccttctatgcctttgctcacattgcctcctttgcttgaagtggcttcctccaatgccttgctgtgttcacatattgtagaagctgcttggcttccactgactttccagtggcgtcgtctatgctattctcctttttctggggaattgattttcactccttccttacccagtttttgtttgtttgtttgtttgtttttttagatagagtttygctcctgttgtcccagctggagtccattggcgccatctcggctcactggaaccttggcctcctgggttcaagtgattccccctcctcagctccctgaatagctgggattacaggtgcatgccaccacacctggctaattttgtattttcagtagagatggggtttcactatgttggccaggctggtcttgaactcctgacctcaggtgatccacccccctcagcctcccaaagtgttgggattacaggcatgagccactgtgcccagcccttccctatgcagtttttaaacattttaa

SEQ ID NO: 228707 - DNA, 559 bp, Homo sapiens
aaactcctgccacaaccacatcaaatttcttcatttccctgatgtttcttccttctatgcctttgctcacattgcctcctttgcttgaagtggcttcctccaatgccttgctgtgttcacatattgtagaagctgcttggcttccactgactttccagtggcgtcgtctatgctattctcctttttctggggaattgattttcactccttccttacccagtttttgtttgtttgtttgtttgtttttttagatagagtttcgctcctgttgtcccagctggagtccattggcgccatctcggctcactggaaccttggcctcctgggttcaagtgattccccctcctcagctccctgaatagctgggattacaggtgcatgccaccacacctggctaattttgtattttcagtagagatggggtttcactatgttggccaggctggtcttgaactcctgacctcaggtgatccacccmcctcagcctcccaaagtgttgggattacaggcatgagccactgtgcccagcccttccctatgcagtttttaaacattttaa

SEQ ID NO: 228708 - DNA, 509 bp, Homo sapiens
tctttctctttcaaaaaccttttcaataactgactgtattacacttttgattagctcttctgtgtggtgaaataacatcaactgcacccatgcattgagtgcctgctgggtatgagatgctgaggattcaaagcagagagagtggaggtttaaaatatatactgaatccccttgaggccaggagttctagaccagcctggccaacacagtgaaaccctgtctctactaaaaatacaaaaattagctgggtgtggtggcacacgccagtaatcccagttactcgggaggctgagacaggagaatcgcttaaacccgggagacggaggttgcagtaagccgagatcatgccactgcactccagcctgggaaatagaatgagactctgtctcaacaatttaatyaattaattaaatatacagtgcatctgaaaccttttgcataccaaaccagggcactgacaagtaagagttgggtgacaagaggtggtgggaagagtttggactttggag

SEQ ID NO: 228709 - DNA, 220 bp, Homo sapiens
ctgttaaaaatacagattctcaaattccatcgcagacctattgaattagaatctctccaagtgaggcctgggaacctgcattttaaataagcccccaccctcacccctgctcttcatttaggctcacgtttggcagtaatctccttcytgaagtctagttccatcactgcactgtattttatccagttccacttccagattcccaactgcacagaacttc

SEQ ID NO: 228710 - DNA, 325 bp, Homo sapiens
tgcttctgtaatctgttgtagatatgttgttttggttgacttatatgaagaaaatccagcctcacacagacacatagyggaaaatgggaagacctcgaagacttcctaaatgggctttggggacccccaaggttcttgtaccacactctgaaaaccaccgctcagaggattacaaaatatatctttcacttttcagagtctacctagagttaatattacaccacttcatgtaaaatgtaattactttgcaactgtatggttcaacttcccattcccattttgtatgttgtagtcatattacacatcctgaaggacaggagcaata

SEQ ID NO: 228711 - DNA, 633 bp, Homo sapiens
aaaaccaagtgctcttaccaggcagcagtttccttccttctcttctggcattatagaatgcackagaagggactttttagatctcagagagttgagcactcttttttggcaaaggagaggactaaggcgaagagatggccagaggttctgccccactgtagtcactgcactagaactcagctcagcattattactccctgactgcagtcctatctatgtaccaccttgtttttttcattgctgtttcccatccctcggtgactagagcaatgaataactcaagttcaaatgtttacccatcctctatttttcacaatgtatggtgggacaggtggcttcagcaaaagaatctcaagctgctgtcttttgtatgttcagatgtctttcaattttgccccttcaaattgaaatcaaaaatgtcatctgccttcagggggttccaagttgaaataaaaaatgttatctgccttcaaggggttccagattgaaataaaaaatgtcatctcccttcagggggttcttgatggacatctttcctttctgtggagtttggaagaaaacaggttgattatttaattgaagtcaagaggatgaaatagatgcccattcaagctctagcctaatcataccatt

SEQ ID NO: 228712 - DNA, 633 bp, Homo sapiens
aaaaccaagtgctcttaccaggcagcagtttccttccttctcttctggcattatagaatgcacgagaagggactttttagatctcagagagttgagcactcttttttggcaaaggagaggactaaggcgaagagatggccagaggttctgccccactgtagtcactgcactagaactcagctcagcattattactccctgactgcagtcctatctatgtaccaccttgtttttttcattgctgtttcccatccctcggtgactagagcaatgaataactcaagttcaaatgtttacccatcctctatttttcacaatgtatggtgggacaggtggcttcagcaaaagaatctcaagctgctgtcttttgtatgttcagatgtctttcaattttgccccttcaaattgaaatcaaaaatgtcatctgccttcagggggttccaarttgaaataaaaaatgttatctgccttcaaggggttccagattgaaataaaaaatgtcatctcccttcagggggttcttgatggacatctttcctttctgtggagtttggaagaaaacaggttgattatttaattgaagtcaagaggatgaaatagatgcccattcaagctctagcctaatcataccatt

SEQ ID NO: 228713 - DNA, 604 bp, Homo sapiens
taatacatatttgtcttttgagcagaataaagattgttctaaatgcagacaacctttaaacatatatatgataaaaacatgggaaaaataactgcagggtagcctagataatagaaaatggcttctcctatttttctaccaagtttttatatatatagataagctagccaatgaaataataagaactttacatccctgcaagtttttctctaggtacwtgctcccaggcaagaaaaagaagacaggtaagaattcagggtgttatgcaaaacgagtaagtcctagagattctactatagtgtagagtgcctatagttaacaagtataggcactattgtacctatacttaaaagttgctaaaagggtagatattatgttaagtattcttatcacacacacatatacacaaaagatcatatacacacacacacatatacaaaaagatctttggtagaaaagactcagaaattaaaaaaaaaaaaaaaaatcctggggaatatacattctgacaatcagcctaaatacgagcgtaaaatatatgtgaacagtgacatcattttcatttcactcatccactctgtccagaaaaacaccaaaatggttc

SEQ ID NO: 228714 - DNA, 524 bp, Homo sapiens
ttaacttctgttggattaagaccctgaagattgggctttaacacctgttgtgttacctgcactcaaacaaaccagggctcctyactcagccctcgggagccttggcattctcacttctaaagcaggaggagtcgtgataactgccttgaggaatttgagcaaagttaaatgacctgaactatttgggcgtgtcttgaccaatgtccgaccttgggaggtgctggatgaatttttatttctctactttaagtcagcctttctaccttgttgctcttctcagctgcctttctctgagcctccttcatcactctgttcatttctgtgagacaaagatcattacaactgccctaatatttcagtgcaagaagcgccgtgacctgacattgctctaccccgcctcctgccacgatcattcttttgtagcaatattccgccagcttcattttgtgcagtgagtggaacaagagtcagaacaccagggcggctgagcctgtcgatcaagcctccacctaacgacagacatg

SEQ ID NO: 228715 - DNA, 524 bp, Homo sapiens
ttaacttctgttggattaagaccctgaagattgggctttaacacctgttgtgttacctgcactcaaacaaaccagggctcctcactcagccctcgggagccttggcattctcacytctaaagcaggaggagtcgtgataactgccttgaggaatttgagcaaagttaaatgacctgaactatttgggcgtgtcttgaccaatgtccgaccttgggaggtgctggatgaatttttatttctctactttaagtcagcctttctaccttgttgctcttctcagctgcctttctctgagcctccttcatcactctgttcatttctgtgagacaaagatcattacaactgccctaatatttcagtgcaagaagcgccgtgacctgacattgctctaccccgcctcctgccacgatcattcttttgtagcaatattccgccagcttcattttgtgcagtgagtggaacaagagtcagaacaccagggcggctgagcctgtcgatcaagcctccacctaacgacagacatg

SEQ ID NO: 228716 - DNA, 560 bp, Homo sapiens
gggagcacggggagaaggtgaccacttgaggacgaaggcagaggttggggtgacgcgtctacaaacgagggtttccccgaacaccagagctaagagcaaggcatkggcgccctcccgctgtggagtctgcagagggagcctggcccggctgacaccgtgggtgcagactcccggcctccaggctgggggacaagaagttcctgttgtggcgacctcaagaaactaacacaaaggggcatttgaattcagttgtccaggaagatacaggtgttgcagggatgggctgccacgtgggcggaggcctggatgggaaggattgtgccaggcatgggttcccgcagtgtgttcccctggctggcagcgtcgcggcacctgggagtcattaggcagcaagggagggaattgcgattctgggcggggctcagctgtgcagattttagcaaggtctccaggtgcttctgctgagggccagagttaagacagagcttaagacagagaacctcaacaggaggcctgaaggaaagcacctgggagtcattaggcagcaagggagggaattg

SEQ ID NO: 228717 - DNA, 556 bp, Homo sapiens
tgaagcccaccctgagctcaggaacagagctgcctccatcgggtgtggagagacagagcctcctccccagccatgcctcctcattggcccatgggagctgctgtgactctgaccctgtacctggctctgtcaactggaatagtcagtgggcagccagcacacctttgggtgccatatgtggtgagatcctatcctgacttgacattttaaaaagttgtctataaaaagagccaaactctgtaaaatattggagagatttattcygagccaaacgtgagtgaccatggcccgtgacacaggcctcaggagacccagagaacatgtggcccaggtggtcagggcacagctaggttttatacattctatggggcataaggcaccaatcaatacatttaagccatacatcagttcagacgggaaaggtggcacaccaggaagcaggggcttccagatcacaggcagattcacagattttctgattggcagttggttgaaagagttcatctaaagacctggaaccaatagaaaggaaatatctgggtaggataaggggttg

SEQ ID NO: 228718 - DNA, 556 bp, Homo sapiens
tgaagcccaccctgagctcaggaacagagctgcctccatcgggtgtggagagacagagcctcctccccagccatgcctcctcattggcccatgggagctgctgtgactctgaccctgtacctggctctgtcaactggaatagtcagtgggcagccagcacacctttgggtgccatatgtggtgagatcctatcctgacttgacattttaaaaagttgtctataaaaagagccaaactctgtaaaatattggagagatttattctgagccaaacgtgagtgaccatggcccgtgacasaggcctcaggagacccagagaacatgtggcccaggtggtcagggcacagctaggttttatacattctatggggcataaggcaccaatcaatacatttaagccatacatcagttcagacgggaaaggtggcacaccaggaagcaggggcttccagatcacaggcagattcacagattttctgattggcagttggttgaaagagttcatctaaagacctggaaccaatagaaaggaaatatctgggtaggataaggggttg

SEQ ID NO: 228719 - DNA, 556 bp, Homo sapiens
tgaagcccaccctgagctcaggaacagagctgcctccatcgggtgtggagagacagagcctcctccccagccatgcctcctcattggcccatgggagctgctgtgactctgaccctgtacctggctctgtcaactggaatagtcagtgggcagccagcacacctttgggtgccatatgtggtgagatcctatcctgacttgacattttaaaaagttgtctataaaaagagccaaactctgtaaaatattggagagatttattctgagccaaacgtgagtgaccatggcccgtgacacaggcctcaggagacccagagaacatgtggcccaggtggtcagggcacagctaggttttatacattctatggggcataaggcaycaatcaatacatttaagccatacatcagttcagacgggaaaggtggcacaccaggaagcaggggcttccagatcacaggcagattcacagattttctgattggcagttggttgaaagagttcatctaaagacctggaaccaatagaaaggaaatatctgggtaggataaggggttg

SEQ ID NO: 228720 - DNA, 556 bp, Homo sapiens
tgaagcccaccctgagctcaggaacagagctgcctccatcgggtgtggagagacagagcctcctccccagccatgcctcctcattggcccatgggagctgctgtgactctgaccctgtacctggctctgtcaactggaatagtcagtgggcagccagcacacctttgggtgccatatgtggtgagatcctatcctgacttgacattttaaaaagttgtctataaaaagagccaaactctgtaaaatattggagagatttattctgagccaaacgtgagtgaccatggcccgtgacacaggcctcaggagacccagagaacatgtggcccaggtggtcagggcacagctaggttttatacattctatggggcataaggcaccaatcaatacatttaagccatacatcagttcagacgggaaaggtggcacaccaggaagcaggggcttccagatcacaggcagattcacagattttctgattggcmgttggttgaaagagttcatctaaagacctggaaccaatagaaaggaaatatctgggtaggataaggggttg

SEQ ID NO: 228721 - DNA, 563 bp, Homo sapiens
tccgggaatcagaaaacatattctttccttgtttcagtcgagtataaccatagatgaagtgtgtaatactcatggaattttccacagaaaaatgtgcgtatattttgcatcaaacagagcacagcaacagaaaaatcaaaggacaaagcttttagtttgcacatagtagagaatgaaaaagatgccagacccttatccttggagaataaaagaagttggcatgcataaaagagagtaggactgcctgacatatgacactcagttgaatttagtttgaatttcagtggagtcctgctgagaaaataagactacatgaattacctagaaaacattaccaggcaatccaccattcactgtgagattgtgtaataagcgatgttcttaaggaagtccatgagcacaagaagatgcttgctttgggagaattccagtgcctttacttcctctttagttcctatcactggccttttattgataagyattagtttgagatttcaaaacccaatctcatgtttcaaggtacagatgtaactgtacatttgatactcaaaagccgaagatga

SEQ ID NO: 228722 - DNA, 415 bp, Homo sapiens
ggggcgtgtatcctttttttactggatgcacctatatactattctgtattttgttttgttttgtcttgtttttgagacggagtctcccactgtctcccaggctggagtgcagtggtgagatctcagctcactgcaacctctgcctccaagcttcaagagattctcctacctcagcctcccgagtagcttggaytacaggtgcccgccaccatgctcagctcatcttcctgtatttttagtagagtcagggtttcactatgttggccaggctggtcttgagcttctgacctcgtgatccgcccgcctaggcctcccaaagtgctaggattacaggcctgagccaccacgcctggcctatttctgtatttttaagaagaacatctaatttaagaagaacaaaatttttaaggaaaac

SEQ ID NO: 228723 - DNA, 415 bp, Homo sapiens
ggggcgtgtatcctttttttactggatgcacctatatactattctgtattttgttttgttttgtcttgtttttgagacggagtctcccactgtctcccaggctggagtgcagtggtgagatctcagctcactgcaacctctgcctccaagcttcaagagattctcctacctcagcctcccgagtagcttggactacaggtgcccgccaccatgctcagctcatcttcctgtatttttagtagagtcagggtttcactatgttggccaggctggtcttgagctyctgacctcgtgatccgcccgcctaggcctcccaaagtgctaggattacaggcctgagccaccacgcctggcctatttctgtatttttaagaagaacatctaatttaagaagaacaaaatttttaaggaaaac

SEQ ID NO: 228724 - DNA, 565 bp, Homo sapiens
gattcctttaaaatctcctgagaggccgggcgcgatggctcatgcctgtaatcccagtactttgggaggtcgaggtgggcagatcacctgaggtcaggagttcaagaccagcctggccaccatggcaaaaccccctctctactaaaaatacaaaaattagccaggtgcagtggcagccacctgtaatcccagcttctcgggagactgaggcaggagaatcgtttgaacccacgaggcggaggttgcagtgagccaagatcgcaccattgcactccagcccgagtgacaagagtgaaactctgtctcataaaaagcagaaaataaataaayaaaatcccctgagataaaatggcaaatgtaggccgaatgaccctgctgcttaggtagattccttgctgattgagtcactttgtaccaccaggaatgggaagtgatatttttggtgtgaaaagaattgattaatgaaatgctacatgatcgtgccattggccttgtgctggtcagaattattttaaatcaatgagttgcatgcaaaagggaaagatgattatcaaacctgctgaat

SEQ ID NO: 228725 - DNA, 375 bp, Homo sapiens
aaatctaagatggctttatcagaaagagttgtcaagaagccgtacttcttaaggaagttgcctttggaaataactgttgttcttgaaacatcgttgatctccctaagacctttgcaagccttagcaagccctgctgcactggagatctttcttttcaggcttgggcactattcccagctcctctgttatgaggcaagagacaacttctmtatgcttcctctcatcacccacatcctaaacattttgaggcgatttcttcatgaaacacgttaagatcatttggtcaggtattttgaatagagatagcaagaactgtcttctgaaaaacagcaggattaataccttctacagagttttgagaggcatcacaaagaa

SEQ ID NO: 228726 - DNA, 580 bp, Homo sapiens
gaattctctatgacccagtcaggaaaagccacaggcacaacataattactgggaaatgctactgaataaatactgcttttgccagtcaggggctgcctgatatggtttgcctcagtgtccccacccaaatctcaccttgaatartaataatcaccaggtgtcaatggtgggaccaggtggggataattgaatcatgggggcagtttccctcatgctgttcttgtaatagtgagtgactactaccaccaagatctgatggttttataaggagctcgcttctttactcagcactcattctttctcctgcagccctgtgaagaggtgccttccgccatgattgtaagtttcctaaggccttgcaagtttcctgaggccttcccagccatggggaactgtgagtcaattcaacctctttcctttataaattacctactcttgggtatgtcttcattagcagtgtgagaacagactaatatactgctactattgcatctcagttgtatcagcacctggtaatgtcacctaagctacttattcctttccatttctaaatttaaaaatcaagctccaaggagaatct

SEQ ID NO: 228727 - DNA, 580 bp, Homo sapiens
gaattctctatgacccagtcaggaaaagccacaggcacaacataattactgggaaatgctactgaataaatactgcttttgccagtcaggggctgcctgatatggtttgcctcagtgtccccacccaaatctcaccttgaatagtaataatcaccaggtgtcaatggtgggaccaggtggggataattgaatcatgggggcagtttccctcatgctgttcttgtaatagtgagtgactactaccaccaagatctgatgsttttataaggagctcgcttctttactcagcactcattctttctcctgcagccctgtgaagaggtgccttccgccatgattgtaagtttcctaaggccttgcaagtttcctgaggccttcccagccatggggaactgtgagtcaattcaacctctttcctttataaattacctactcttgggtatgtcttcattagcagtgtgagaacagactaatatactgctactattgcatctcagttgtatcagcacctggtaatgtcacctaagctacttattcctttccatttctaaatttaaaaatcaagctccaaggagaatct

SEQ ID NO: 228728 - DNA, 566 bp, Homo sapiens
aggttttgctacctgtgggtgcacaggcagcttccatgtccatamaaaggaggggagaaggtcccaggacatagaaaatcagataatccacagtgtgatcttgagataattctatgtacggttgtgtggctgaaatttccccttctcccagataagttaaattcaaacatctgtcactagggagaacaagcatgaggtatggggtgcaggcatgtgagagctgccagacattcagtagaaggaaattcacacaaccccaggtggagacacctggtctaccttggaccacaggggcctggtagagaaggaacagcagcaaggttctaggcagatgatgggaacgtatgattgagcattatcacatgaaaacaccactccaggtacacagcaacagcccctctccctccacacatatccttcccatttggcctcccttaaccacaccagttatgaaataagaattgggagggttggaaacaacagaggtaaaggctaatgggaagagcaccagagtctatcagccagtctcatcatcacctctacaaagttagtacccccaaagcact

SEQ ID NO: 228729 - DNA, 566 bp, Homo sapiens
aggttttgctacctgtgggtgcacaggcagcttccatgtccataaaaaggaggggagaaggtcccaggacatagaaaatcagataatccacagtgtgatcttgagataattctatgtacggttgtgtggctgaaatttccccttctcccagataagttaaattcaaacatctgtcactagggagaacaagcatgaggtatggggtgcaggcatgtgagagctgccagacattcagtagaaggaaattcacacaaccccaggtggagacacctggtctaccttggaccacaggggcctggtagagaaggaacagcagcaaggttctagrcagatgatgggaacgtatgattgagcattatcacatgaaaacaccactccaggtacacagcaacagcccctctccctccacacatatccttcccatttggcctcccttaaccacaccagttatgaaataagaattgggagggttggaaacaacagaggtaaaggctaatgggaagagcaccagagtctatcagccagtctcatcatcacctctacaaagttagtacccccaaagcact

SEQ ID NO: 228730 - DNA, 566 bp, Homo sapiens
aggttttgctacctgtgggtgcacaggcagcttccatgtccataaaaaggaggggagaaggtcccaggacatagaaaatcagataatccacagtgtgatcttgagataattctatgtacggttgtgtggctgaaatttccccttctcccagataagttaaattcaaacatctgtcactagggagaacaagcatgaggtatggggtgcaggcatgtgagagctgccagacattcagtagaaggaaattcacacaaccccaggtggagacacctggtctaccttggaccacaggggcctggtagagaaggaacagcagcaaggttctaggmagatgatgggaacgtatgattgagcattatcacatgaaaacaccactccaggtacacagcaacagcccctctccctccacacatatccttcccatttggcctcccttaaccacaccagttatgaaataagaattgggagggttggaaacaacagaggtaaaggctaatgggaagagcaccagagtctatcagccagtctcatcatcacctctacaaagttagtacccccaaagcact

SEQ ID NO: 228731 - DNA, 566 bp, Homo sapiens
aggttttgctacctgtgggtgcacaggcagcttccatgtccataaaaaggaggggagaaggtcccaggacatagaaaatcagataatccacagtgtgatcttgagataattctatgtacggttgtgtggctgaaatttccccttctcccagataagttaaattcaaacatctgtcactagggagaacaagcatgaggtatggggtgcaggcatgtgagagctgccagacattcagtagaaggaaattcacacaaccccaggtggagacacctggtctaccttggaccacaggggcctggtagagaaggaacagcagcaaggttctaggcagatgatgggaacgtatgattgagcattatcacatgaaaacaccactccaggtacacagcaacagcccctctccctccacacatatccttcccatttggcctcccttaaccacaccagttatgaaataagaattgggagggtwggaaacaacagaggtaaaggctaatgggaagagcaccagagtctatcagccagtctcatcatcacctctacaaagttagtacccccaaagcact

SEQ ID NO: 228732 - DNA, 558 bp, Homo sapiens
ctcctattatactctcacagcacagaacactctgtgaccagatgtgtgggggccawacaccaagcaattctctagcagacagcaactggctgtccacacttcaattcaattctgatactttctatgtggagttagagtcagatttcatagatgaagagctcagtcccacaagactgccccacttcagatgccagtgggaagtcccaagccacccacacttctgactgaacagctatgaaatggggttcccactacccctccttgagtttgattaacttgctaagacagctcccagaattcatagaaatacttgtattgagcagctgttataaaggatacagctcaggaatagccatgtggaaaagatttaaagggcaaaggatgggggtgggggtgggcatagaccttccatgtcctctctgggcgtgccatgctcccagcacttgcatatcttcaccaacctgggaactcatcaaatctcatttaagagcttttatagagcataatctctgttcccctctccccttcctagaggtgggagggtgggaaaattccaac

SEQ ID NO: 228733 - DNA, 569 bp, Homo sapiens
gaattctttccagactgaacttcggggcatcaaagcttttggtgtcccggcagcctctttccttttttttattttatttattttatggatctagaagctttagaagctcactgtgcacccatatgtggcaaaatctcggtccttgttttcttgcagtgtctgtgcaaaaaatcccagcccagagggctggtgactgtgcccctgggatacaactgcaagattccaagtgcttttctttttttctttttctttttttttttgagacggagtctcgctcggtcgcccaggctggagtgcagtggcgccatctcggctcactgcaagctccgcctcctgggttcacgccattctccagcctcagcctcctgagtagctgggactacaggcacccgccaccacatcaggctaatttttgtatttttaatagagacgggtttcactgtggtctcgatctcctgacwtcatgatctgcctgccttggcctcccaaagtgctgggattacaggcatgagcctctgttcccggcctcttcttaaggctattctggctttccttttgtctccagttaa

SEQ ID NO: 228734 - DNA, 403 bp, Homo sapiens
ttggctgttacagcacttcctacrtataattgtgattccctccggagccatctctctgtagattggaagcagttaatttcccttaatctttttttctccccccagccccatactagagacactctcccatgggtagtgcataaatatttgttgcatgacaatttagtctttaatttctcacttttatgacattattgctttgtgatatcttctactttcatgataggatgggtaaattgcagggagaggaactgtaaatacggatgcttaattcttcctgctttcaatttttttctgttaagttaaatgtgctttttgttgctccacctctctgattggagcctcacattgggagcctgaggcagtggaatatcaaaagagggtagccgttgaatgtttattt

SEQ ID NO: 228735 - DNA, 403 bp, Homo sapiens
ttggctgttacagcacttcctacgtataattgtgattccctccggagccatctctctgtagattggaagcagttaatttcccttaatctttttttctycccccagccccatactagagacactctcccatgggtagtgcataaatatttgttgcatgacaatttagtctttaatttctcacttttatgacattattgctttgtgatatcttctactttcatgataggatgggtaaattgcagggagaggaactgtaaatacggatgcttaattcttcctgctttcaatttttttctgttaagttaaatgtgctttttgttgctccacctctctgattggagcctcacattgggagcctgaggcagtggaatatcaaaagagggtagccgttgaatgtttattt

SEQ ID NO: 228736 - DNA, 403 bp, Homo sapiens
ttggctgttacagcacttcctacgtataattgtgattccctccggagccatctctctgtagattggaagcagttaatttcccttaatctttttttctccccccagccccatactagagacactctcccatgggtagtgcataaatatttgttgcatgacaatttagtctttaatttctcacttttatgacattattgctttgtgatatcttctactttcatgataggatgggtaaattgcagggagaggaactgtaaatacggatgcttaattcttcctgctttcaatttttttctsttaagttaaatgtgctttttgttgctccacctctctgattggagcctcacattgggagcctgaggcagtggaatatcaaaagagggtagccgttgaatgtttattt

SEQ ID NO: 228737 - DNA, 627 bp, Homo sapiens
aactgcattttctaatgctgaatgattcttgcattgctggaataaatcctactrctttacgaggtttgtgttttttgttcatatgctactgaaaccaaatataattagaaatttattacataataaatgttccttctcaattcagtgtggaaaagatggggttttcaataaatatatggtgtggggaaagtggataagatatggaaaaatactaaattggattcatcttttaaatatatatcaaggtactctacacatgtgtcaacaatttaatgtacactatgatacaagaagataaagataaaagaagaaaatatttatacatttctttacaactaaaaagcctttctaaaccaagtctcaaaatctggaagccaagaattaaaaaaaaaaaaaaaaaagactgatcaagtagactgcataaaaatggaaaaatgcaacatggcaaaagacaccacaaacaactgtacagacaaatgacaaattgagataaagcatttgaaattcgtagcagaagcaatactctaaaagcccctccataccatccctaatactttaaaagccgctagaaattgagaagaaaaaaaaaaaacctgaaagaaaaactattgttcacagaaaagaaaa

SEQ ID NO: 228738 - DNA, 615 bp, Homo sapiens
taatgtcaaaagaagactctatatttaacattcatgtaattcatagatggtatcagctgttcatgaagatacacagttttgagagtctaaagcaaattatttttaaattaagcaattagtgtttcagtttttccagtgtaggtgtacatacaaagagaatcttaaaacatagctgagaacattctgaactaaagctttttcactgaaataaaccacttcctttacaaagcccacataattttaagcagaaagccaattaattctggttacctgtataagtataaaattctcctaattgtctaaataaaaatactcagtgatgaataaattagtgaaaaaatattttcawtgaaaattatatttaaaagggaaaaccaaaaaagatgcattaaatatgactgttaacaatctactaaaaaggattaaaagatgcattttaagtgcattattgaaaagttcatatagatttagtagtattcataatatctcatatttctttgtaacataaacttttcaaattaatcacaggatttatttccaggataaggataaaatctcataatacatttgacctaagcaggaaaaaaaaaaaaagaggttgcatctcctcataaa

SEQ ID NO: 228739 - DNA, 301 bp, Homo sapiens
actcacttttgcaatcacttgtggacatgtgcagagcagcgaaaaatttgagtcatccaacatgcaatttcacagaaggtgaygtcggcctttttgatacagctctcatactgtaaacaaatgtccttttcatggtctacttagtgtcgcattttttccagttttgtactttttgttggtaattttgtactttttgttggtaatttttaaaatggcctgtaagtgtagtgcttagtattctaaacacaagaaggctaggatgtgcctaacaaataaaagatattagataaggcatgacttc

SEQ ID NO: 228740 - DNA, 528 bp, Homo sapiens
tatctgtgatgagaaattcagaaytttaaactgttaatgtagtccattttaatcaatcatatcctttatcattggtagcttttctgtcccatttaaaccatcttttccttccctgaataaacaaaaatattctatgatttcttctagaagatgtattgtctttttagatggggacttacaatttatttagaattgagttttgtgtatgatgtgaggtaggggtcaagatgtggatatccattaggctatctgtttattgaaaaggtcatctcagctaggcatggtgagtcatgtctgtaatcccaggcagttggatcacttgagtccaggagttcaagaccagcctgggcaatgtagtgagaccccatctcaaaaaaagaaaaagaaaaggtcatctcttccttcctcattgctctgaagtgccacctttgtcataaacatattatgctggtttatttcaagggagttttctgatttgatataaatgggtacatggcatgaaattgacttctctttgatttagattcc

SEQ ID NO: 228741 - DNA, 528 bp, Homo sapiens
tatctgtgatgagaaattcagaattttaaactgttaatgtagtccattttaatcaatcatatcctttatcattggtagcttttctgtcccatttaaaccatcttttccttccctgaataaacaaaaatattctatgatttcttctagaagatgtattgtctttttagatggggacttacaatttatttagaattgagttttgtgtatgatgtgaggtaggggtcaagatgtggatatccattaggctatctgtttattgraaaggtcatctcagctaggcatggtgagtcatgtctgtaatcccaggcagttggatcacttgagtccaggagttcaagaccagcctgggcaatgtagtgagaccccatctcaaaaaaagaaaaagaaaaggtcatctcttccttcctcattgctctgaagtgccacctttgtcataaacatattatgctggtttatttcaagggagttttctgatttgatataaatgggtacatggcatgaaattgacttctctttgatttagattcc

SEQ ID NO: 228742 - DNA, 528 bp, Homo sapiens
tatctgtgatgagaaattcagaattttaaactgttaatgtagtccattttaatcaatcatatcctttatcattggtagcttttctgtcccatttaaaccatcttttccttccctgaataaacaaaaatattctatgatttcttctagaagatgtattgtctttttagatggggacttacaatttatttagaattgagttttgtgtatgatgtgaggtaggggtcaagatgtggatatccattaggctatctgtttattgaaaaggtcatctcagctaggcatggtgagtcatgtctgtaatcccaggcagttggatcacttgagtccaggagttcaagaccagcctgggcaatgtagtgagaccccatctcaaaaaaagaaaaagaaaaggtcatctcttccttcctcattgctctgaagtgccacctttgtcataaacatattatgctggtttatttcaagggagttttctgatttgatataaatkggtacatggcatgaaattgacttctctttgatttagattcc

SEQ ID NO: 228743 - DNA, 567 bp, Homo sapiens
tgctgctgcagccccccgcccaggcagagtggcccccacgagtccttgtgggaaacatccattcatgcctggcatgcattacatttgcagtcacatgcctcatctttcttagaataaaatgactcaatttaaaactaaaagcagaatcccagcactttgggagacggaggcaggaggatgacttgaagtaaggaattcaacaccagcctggccaaccaacatggtgaaaccccatctctaccaaaaatacaaaaattagctgggtgtggctgtgggcacctgtaatcctagctactcaggaggctgaggcaggagaattgcttgaacccgggaggcggaggccgcagtgagccgagatcgcatcactgcactccagcctggctaacagagcgagactccatcttaaawaaataaataaataaataaataaataaataaataaatcttgacgcacaagccctggaaaaactgatttttagttaaaaataatttataactcagttttgactttgaccactaaaacataattttaccaataatcaaaaaaggattaaagtcacgcattag

SEQ ID NO: 228744 - DNA, 239 bp, Homo sapiens
gaattcacagtgatgatctcagacaccataatatccagaggtactttctgagtcatcaaggagagattaaattatgctcattcagggtctcccatcgaatgcagttattactttctcattcgttggaaattggttaactggatatttgatttaccagtatacctcagtttttccattaaagctgagtacagagatttactgtaaaataatatyactgaaaataacgacctcaatcctcc

SEQ ID NO: 228745 - DNA, 608 bp, Homo sapiens
ttactttcattgcagataaatgtggcgatactataaaaattgaaagccccgggtaccttacatctcctggttatcctcattcttatcacccaagtgaaaaatgcgaatggctgattcaggctccggacccataccagagaattatgatcaacttcaaccctcacttcgatttggaggacagagactgcaagtaagtgggaatgtttttgaacagggcaccacagcaccatctagtggtcacgcctgtctacgggggggaagtcrgtgtgtacaatgtagattataaatggatccaggagggattccaatctcagccagattatatgtcaatggtatggaaattgaagtacgttaagtgatttctgagttccccaaaccaggaagattatagttaaatgtgtaagctcttatactccttcctgttagcacttttggtttgggaactcttgttaagaaatgtatacagtatgtatgtttcttttttctttctttttttttttttcctggagaggggaagaactagaaactcaaaaatctcacttgtatttttacgaaatacagtggatcactaatatacatcgcatccacagatagtgtgattggagatc

SEQ ID NO: 228746 - DNA, 436 bp, Homo sapiens
tgtggcgatactataaaaattgaaagccccgggtaccttacatctcctggttatcctcattcttatcacccaagtgaaaaatgcgaatggctgattcaggctccggacccataccagagaattatgatcaacttcaaccctcacttcgatttggaggacagagactgcaagtaagtgggaatgtttttgaacagggcaccacagcaccatctagtggtcacgcctgtctacgggggggaagtcggtgtgtacaatgtakattataaatggatccaggagggattccaatctcagccagattatatgtcaatggtatggaaattgaagtacgttaagtgatttctgagttccccaaaccaggaagattatagttaaatgtgtaagctcttatactccttcctgttagcacttttggtttgggaactcttgttaagaa

SEQ ID NO: 228747 - DNA, 536 bp, Homo sapiens
cgatgccttagcacatttgcttattgtgaaacatctttgaaacccaagtaaacagttttcttttgtagagtatagggatggttaagtcattagaccagctacatagtcctggtagaaaaaaaaawattttttatttagatttttattgttttatgtataattaggtaaaaaacatcatttcataatcttaacaatacagtatacagtcacaacttctcatgtgaatagcaccaagactgacccagttcatgagttaattctggatcatactttgcaaaatggtgaagtttttgcagtggctgtcaaaggtggatacttcgttaggaaaattaaatgtgtaagttgtgcctccatagttttaacatgcaacattctgtgtctatgccagcactgaatgaggtttcattacaaataagcatcagaaccataatactataaccccttaattcttttattgaacaagatgtggtgtaaatcagtcgatcaacagaccagtggagcgtctgtctgcagggctaacacagaactaggatttt

SEQ ID NO: 228748 - DNA, 614 bp, Homo sapiens
ctatgccagcactgaatgaggtttcattacaaataagcatcagaaccataatactataaccccttaattcttttattgaacaagatgtggtgtaaatcagtcgatcaacagaccagtggagcgtctgtctgcagggctaacacagaactaggattttttcccagctatatatatgcatgattttattattagattgagaggattctagagaatgctctgaccgaagaaggtgttgagggagaggaaggaatgttgatttcttttttgccagcaaaatcctgcacacttgtgaagtgtcaaagcataattaaawatagaaaagaaataaagaagtgaccagtggagagttttcggaaacacatgttcattgcacattgaaaatggttttcagtatgtacatcgaactagttagatcttactccactaaagttttcttcagtggtaaggcagacatcttgaatctcataaaagtttatatctgtataataaacaagaatgtcattgatatggtagttagaatttatgaaacttctccagtttcccagcaatgcacacaatcagcatgataatttataatggtttgtgacaaatactgctgagcaaagaggtgtatg

SEQ ID NO: 228749 - DNA, 234 bp, Homo sapiens
gagcaacacacactggggcttgtcaggtgtggtgggggttgggagagcrtcaagaagaatagctaatggatgctgggcttaacagctagatgatgggttgatctgtgcagcaaactacctatgtaacaaacctgcacatcctgcacatgtaacccagaacacaaaataaaagttgaagaaaaaaataaataattatggaaacaaaaactgagataattcatcataagaagatct

SEQ ID NO: 228750 - DNA, 558 bp, Homo sapiens
agatcttgtgcgtaactattttttccctggttcatactgaatcctttttgctgagaagtcacttgctcatggggcttgtcttatygtctttttgaagacaggaccttgctgagtgggattgctaaacggagcacagtgctaaaaatctcctgggttaaatgtcaccatactcccatcagggcctggagcacttgctctcagaatttacaaacattaactcatgttggcgctctgtgttgcccaaggagagcatctctacaatttatgaaattctattttactgccagaagtcagcaaagagaaaaagaaagaaagagaggcagaaagagaaaattccacagtcatatttcaaacaccaagggatagatttttttcttaagaatataagatttacaagctccaaacaggagtgaaatagtttgcagaagctctcacagcaaatgaactggtagagttcagattcaaatcctgatctggtgccaagggcaaagcaggtggtctttaatcctaccaggcttctctctgtgagaaggggacatgcttactgtggcctcagca

SEQ ID NO: 228751 - DNA, 556 bp, Homo sapiens
aggcaggggtccaacaggaaatgggggagaaaccagccacgcggccagtcccacacccttctccccagggcccctcggaggaaggatgcagagccgccagccagtcctaccccgggtcccatatttaccagtaactcaatctcaaaacaaacaattccagagaaactaaggctaaaataaaagtctttgtcagcaaaggcattccttaactgcctgtatgcacaaggtggagtccaggagggcgcagcttttgccaggtgtgtggggcccgggcacagctgggcactggcccacgggaggggctcagcacatctttgctacactgatgaacgcaaaagcaaaataagcacagtttacaaactcaggagtccagaagaagcaggctgcttaaacattcagaaaacagtcccataaatctgacrcctgtgccgagacacggtgcccaggttcagtgtggcgctatggcccctcccagggccctgtcgggggtccttcaagcccttgttccctgatgtacaaagccctggcctgtccccccacatgctgtgttctgggg

SEQ ID NO: 228752 - DNA, 568 bp, Homo sapiens
gaattctatatccagaaaaatatcttaagagggaaataaagttattttcaaataaaagagaactgagaaatttgttgccagcagccttgcactataagaaatgctaaaggatgttctgcagcctgcaggaaaattataacagatcaaacttggatctgcaggaaataacaaaaakcattatgtcctcatccttgtccaggttacctgacatgcttctgatacttggaggcagcattttgagggctgtataaaagagtttggttacaaaggataaactaaaatattttgatgtaatgaagcaatatcatatggtataaggatagagagagtgtttgctcccttttttcacattgtttagaatttttcctgaagtggaagccccatccctaggggaagcagggagaacacatcaagggaacaccctatgggatagtagaatctgaacaacagcccttgagccctagatcttccctctgtcatagtctacccaaaagagaaggaaccagaaaaacaattctggtaatatgagaaaacaagattctttaacgcccccaaaagattacactaa

SEQ ID NO: 228753 - DNA, 539 bp, Homo sapiens
cataagtatgttatgtacagggaaaaaaacacagtagggtttggtactatctgcagtttcaggaagcctctgggagtcttgcaatgtatcctaaggaacaagtaagcagggattactatagatccgaaagaagtgaaagcaggatctcaaacttatatttgcacacccaaattcatagcagtattagtcacaatagccaaaggggggctattgtatccattgacagatgaatgaataaatgaaatgtggtgtatccatacaatgaaatattattcagccttaaaaaaggaggaaatsctgacacatgctgcaatgtgaagacattatgctaagtaaaatatgccacccagcaaaagacaaacactatgtgttaggaagattagggatggggtctgggtttcactatgtgattctatttatatgagatgtctaaaatagtcaaattcatagaatcagaaagtagaatggtggtcaccaggagctggagggagggggaaattggggtttgttgttttttattttttatttatgtatgtatt

SEQ ID NO: 228754 - DNA, 539 bp, Homo sapiens
cataagtatgttatgtacagggaaaaaaacacagtagggtttggtactatctgcagtttcaggaagcctctgggagtcttgcaatgtatcctaaggaacaagtaagcagggattactatagatccgaaagaagtgaaagcaggatctcaaacttatatttgcacacccaaattcatagcagtattagtcacaatagccaaaggggggctattgtatccattgacagatgaatgaataaatgaaatgtggtgtatccatacaatgaaatattattcagccttaaaaaaggaggaaatgctgacacatgctgcaatgtgaagacattatgctaagtaaaatatgccacccagcaaaagacaaayactatgtgttaggaagattagggatggggtctgggtttcactatgtgattctatttatatgagatgtctaaaatagtcaaattcatagaatcagaaagtagaatggtggtcaccaggagctggagggagggggaaattggggtttgttgttttttattttttatttatgtatgtatt

SEQ ID NO: 228755 - DNA, 406 bp, Homo sapiens
atctgatggttttataaggggttcttccccctttgctctctactctctcctgccgccacgtgaagaaggtccttatttctcctttgcctcctgccatgactgtaagtttcctgaggtctacccagttatgaggaactgtgagtcaattaaacatctttcctttataaattatccagtcttgagtactactttacagcagggtgagaatggactactgcagttactgtggtaactggggaagaaaataacagcctgcactaggatggagataggtggaatagaaagaaaagrttccagagctctcaaggaagtagcaatgattgaacatgattgaatggatcagaaagtaaagaagagggacaggaccatgtttctggcttggacaatggagagtataaaagtgtca

SEQ ID NO: 228756 - DNA, 559 bp, Homo sapiens
aggggttcttccccctttgctctctactctctcctgccgccacgtgaagaaggtccttatttctcctttgcctcctgccatgactgtaagtttcctgaggtctacccagttatgaggaactgtgagtcaattaaacatctttcctttataaattatccagtcttgagtactactttacagcagggtgagaatggactactgcagttactgtggtaactggggaagaaaataacagcctgcactaggatggagataggtggaatagaaagaaaagattccagagctctcaaggaagtagcaatgatygaacatgattgaatggatcagaaagtaaagaagagggacaggaccatgtttctggcttggacaatggagagtataaaagtgtcatttaatctaaccagtaaatgaggagtagatataagtagtggtgggagagtggaagggaggagcagagagagggaggaacaggaccgcaaggatggagctcagtcttgtataaccatgtttacagtgcctggagagtttccaaatagagatgtctggaaacttttgaata

SEQ ID NO: 228757 - DNA, 556 bp, Homo sapiens
taaggggttcttccccctttgctctctactctctcctgccgccacgtgaagaaggtccttatttctcctttgcctcctgccatgactgtaagtttcctgaggtctacccagttatgaggaactgtgagtcaattaaacatctttcctttataaattatccagtcttgagtactactttacagcagggtgagaatggactactgcagttactgtggtaactggggaagaaaataacagcctgcactaggatggagataggtggaatagaaagaaaagattccagagctctcaaggaagtagcaatgattgaacatgattgaatggatcagaaagtaaagaagagggrcaggaccatgtttctggcttggacaatggagagtataaaagtgtcatttaatctaaccagtaaatgaggagtagatataagtagtggtgggagagtggaagggaggagcagagagagggaggaacaggaccgcaaggatggagctcagtcttgtataaccatgtttacagtgcctggagagtttccaaatagagatgtctggaaactttt

SEQ ID NO: 228758 - DNA, 553 bp, Homo sapiens
gtatccctctgtagctggccattggtgggggttgaaggccactgcagcctcagcccaagatcaggaggtcaggagctccatggtgagcacaggaagtctgtctttggatatcgctagaccgtatgtcccaggggttgacttggggggatcctggaactcgttaacggccccatcctctttcctccactaagtcctgctcctgccactgtagcaacgatgcaccagggcaccaggcaaaacatctggggacttagtggaagagcaaaaggactctcttctttgctgttttgttcatttcttcagaatcatgtttagctcctgaagaagagggtggagyttagaaagatttggagctgagtccaggctccatcagtggccagcagcatgaccttgaacaagtcctgcacctccttgaggcttgacttcctcacttgcacaattcctaaaccaactcgtagagacatgaggcttagatgccatcgtgtgtgtgaagtatctgaaagtgaacctgctagctggttgagaccaaggtgaaacacctttaccaaagctt

SEQ ID NO: 228759 - DNA, 553 bp, Homo sapiens
gtatccctctgtagctggccattggtgggggttgaaggccactgcagcctcagcccaagatcaggaggtcaggagctccatggtgagcacaggaagtctgtctttggatatcgctagaccgtatgtcccaggggttgacttggggggatcctggaactcgttaacggccccatcctctttcctccactaagtcctgctcctgccactgtagcaacgatgcaccagggcaccaggcaaaacatctggggacttagtggaagagcaaaaggactctcttctttgctgttttgttcatttcttcagaatcatgtttagctcctgaagaagagggtggagtttagaaagatttggagctgagtccaggctccaycagtggccagcagcatgaccttgaacaagtcctgcacctccttgaggcttgacttcctcacttgcacaattcctaaaccaactcgtagagacatgaggcttagatgccatcgtgtgtgtgaagtatctgaaagtgaacctgctagctggttgagaccaaggtgaaacacctttaccaaagctt

SEQ ID NO: 228760 - DNA, 443 bp, Homo sapiens
ttctctctccttgatagaggctggtgctgctctcctcatttaacagataataaaattacgatgtctcaggtgataaacaaaactaatggcacaagtagaaaggagtttggaccatttaactgccagttgaccaattttactataaaataaaattccactttggaggatagcatcctgactcaaaagcatttgtatgagttgatatctctcttttatgcaagtatgattggtgtcaggtcaagcaaataaacagtcaaaacatactgttgtttcttctgactttattgaaaaaagttattttgctaataaagattttcttatttttccataattccaagkttatgcacttgaataaaggaaatgcatttgtttgattgcccttaaaatattcaaggtttaaaccctctcgtggaaaacacttgccatttgaatctacagacagt

SEQ ID NO: 228761 - DNA, 533 bp, Homo sapiens
tcacaacaaaactgagctaagaaaatgttggctttctaagggaaagggggaagggcttataccttatatggagctgcaggatctagcttaaattcactgtcatgaactaagacatgtacaattaaactggatactgagggtgctggatcaagggaatggaatgtaatgcatattacagcaaagactgcaagagacagtgctaatactttgcaaggatagcccataggaaacttggagcaagagatggtccacattaagtgacttataaattctgaaattgttatagtagatggggaagaaagaaagaagcagaccaaaaagttgggtttgcaaaactagacaatattatataaagccagaacatccacaaactgacaaaaatggatactttttattagagaaatgagaaatgtactaatagtggggartagtagttattgaaaagcttagtggtagctctcctccacaggccagcaatcacagcaggcgataccatttcagaattaggttcattgacagcaagggtatgatgg

SEQ ID NO: 228762 - DNA, 463 bp, Homo sapiens
caatcttttcaaatatattcaaatgtattttatgggtaaaaatatgatttattttggtgaatatataagtcagataagtcagtatcaatgcatgagacagaattcacaccagtaattgggtatctccttttaatatttttctttttctttttataaaawgttattgtatatctgggtttgggtttctttgctcttactgtgcttaggtttagctaaacttcttgggtctctaaataaatgtgttttttaaaaataatatttggaaaatttttacgcattatatcttcaaataattctctttttcttatggttccagttgcatatatattagaccatttgctgtgcttccacaggtccctgagcctttaatcacttttcttcagtatttttcactctctattcttcactttgaacaatgtctattgatgttttagagttcactcatctctaatagtgtcaacag

SEQ ID NO: 228763 - DNA, 463 bp, Homo sapiens
caatcttttcaaatatattcaaatgtattttatgggtaaaaatatgatttattttggtgaatatataagtcagataagtcagtatcaatgcatgagacagaattcacaccagtaattgggtatctccttttaatatttttctttttctttttataaaaagttattgtatatctgggtttgggtttctttgctcttactgtgcttaggtttagctaaacttcttgggtctctaaataaatgtgttttttaaaaataatatttggaaaatttttacgcattatatcttcaaataattctctttttcttatggttccagttgcatrtatattagaccatttgctgtgcttccacaggtccctgagcctttaatcacttttcttcagtatttttcactctctattcttcactttgaacaatgtctattgatgttttagagttcactcatctctaatagtgtcaacag

SEQ ID NO: 228764 - DNA, 554 bp, Homo sapiens
cactccttttctctagagtctacgcattgcttccatgatttcagrtgtgcatttctgatcatgtcatttccccaaaattaacattattgtaaacaaaacccatttgcataatttggtcattaaatgctttttatctgggagagtaaatagtaattgcagtccccaaggtaaagtcttatatgggtaaccggcaaaaatggtgtcctttgtttcttctataaacagagaaattgcatatagctaaaaagagtaagtttcttaagaaactcaggctaattttttatgcagctcaattttggcaaaatgtaatatatcttaataagtgttctttttatcagccatttatcataaatttatttagaacactaaattttcttgatatatgatttttagggtataacttatgtaacatggttatatattcatcattactattcattccctttaaaggaatgaataaataaagactgaactttaattctttcttttctctgccaatgtgttcttgaaccagaagtttctacctccaaaatcaattcttaaattcaggcttt

SEQ ID NO: 228765 - DNA, 493 bp, Homo sapiens
  misc_feature (1)...(493): n = A,T,C or G
gaggtggatagtgagtgtgttaggcagtttttgtgtttatataaagaaatacctgagactgagtaatttataaataaaagaggtttaattggttcacagttctgcaggctgcacaagtatggcaccaacatcttggcttctgttgagacctcaggaagcttacaatcatggtggaaggcgmagggaagcagcatatgtattagcctgttttcatcctgctgataaagacatatcagagactgggtaatttaccaaagaaagaggtttgttggactcgtggttccagatagctgggaaggccttacaatcatggcggaaggtaaaaggcacatctcacatggcagcagacaagagaagaacttgtgcagggaaactcctctttttaaaactatcagatctcatgagtcttattcactatcacaagagcagcatgggaaagacctgctcctatgattcaattacctcccaacaggtccctcccacaacacattgn

SEQ ID NO: 228766 - DNA, 630 bp, Homo sapiens
tgaatcctgcagtttgattaactgccccatgattgatgtgttttatagcccagagttcacaaaaagttacatacaactatgtctataaaactactcttgcttctaggacttttctaaggttgtgaggctagacatggcaaatagtagagttagaactttattcctttacattgtatgttttaatctaccatttttcctttgcgttaatgactgtttttaaaattgtatcaagtctttatctcagtgttaaagattgaattttatctcctttaaaatccaaatgttaggccaggcttctggtggctcatgtctgtaatcccagcactttgggaggctgaggcggatggatcacctgaggtcaggagtttgagaccatcctgaccaacctggtgaaaccctgtctctactaaaaatacaaaaattagctgggcatggtggcgggcgcctgtaatcccagctactcgggaggctgaagcaggagaatcacttgaacttgggaggtggagtttgcagttagccaagattgtgccattgtactccagcctgggtgacagakcaagactctatctcaggaaaaaaaaaaagaaaaagaaaaagaaaaagaaaaaaaatccatatgttgaaatccta

SEQ ID NO: 228767 - DNA, 586 bp, Homo sapiens
accataattaaaaagtcaaaaaacgacagatattggcatggatgtgttgaaaaaggaatgcttatatgcttctggtggaaatgtaaattagtacaacttctatggaaaaaaaaaatggtatggacattttgcaaagaactaaaactaaatctaccattcaatctggcagtcacattactgggtatctactgaaaagaaaagaagtcactctatgaaaaagacacctgcatgcatatgttagtcacgtcacaacacacaattgtaaatatatggaatcaacctgataagtggaaaaagaaaatgtgattwtatatatatatgcatacacacacacacacacacacacaccatggaatactactactactgctactacacacacacacacaaacaccatggactactactcagccataaaaaagtataaaacaatatttttgcagcaacttgtatggaactgaagaatattattctaagtgaaataactcagatatctaaaaacaaataccacatgttctcacttgtaagtgggagctaagctatcagtccacaaaaacatacagagtggtaaaatgaacatcaaaga

SEQ ID NO: 228768 - DNA, 700 bp, Homo sapiens
aaggaagaagtaaatactgaagcatatgagacaactctcaaaaattatactatgccattggtttttactatagcctaaaatcctaattaagaaagaagaaacaaaatgtcgtttggaaaaaagtgacagttgaaacaacaggaatcattaagaatamttgaaataacacatcaaagaagataatagaagataatcatgaagggaatgctagcaaatgtcaagttttcacagttaaactaaaatctacatatttgttgagtattgattatgtgctaggtactgtaataaatgttttacatgaaacatttatttagtattcacaataataccatggagtaagtaccatcatttccaccattttacagatgaagaaaatgagatacaataacttgtactctttttacatagttaaaaagtaatagagtgatgatttgaagcaaggaaacctaatctggaaaaaaaatactttattacactattatgctaaagaaaactactaaacaaagaaaaatgggaaggaatccgggtacttgttctggttacccccaaacttaggggaataaatgaatgatacttactttgcttataaatctgcaatttagacaggattcagtggggatagattgtctttgtttcactcatcatcaactggagcaacttgaaaaccaaagactggaattcattcgcttgctccctcata

SEQ ID NO: 228769 - DNA, 700 bp, Homo sapiens
aaggaagaagtaaatactgaagcatatgagacaactctcaaaaattatactatgccattggtttttactatagcctaaaatcctaattaagaaagaagaaacaaaatgtcgtttggaaaaaagtgacagttgaaacaacaggaatcattaagaataattgaaataacacatcaaagaagataatagaagataatcatgaagggaatgctagcaaatgtcaagttttcacagttaaactaaaatctacatatttgttgagtattgattatgtgctaggtactgtaataaatgttttacatgaaacatttatttagtattcacaataataccatggagtaagtaccatcatttccaccattttacagatgaagaaaatgagatacaataacttgtactctttttacatagttaaaaagtaatagagtgatgatttgaagcaaggaaacctaatctggaaaaaaaatactttattacactattatgctaaagaaaactactaaacaaagaaaaatgggaaggaatccgggtacttgttctggtyacccccaaacttaggggaataaatgaatgatacttactttgcttataaatctgcaatttagacaggattcagtggggatagattgtctttgtttcactcatcatcaactggagcaacttgaaaaccaaagactggaattcattcgcttgctccctcata

SEQ ID NO: 228770 - DNA, 403 bp, Homo sapiens
gcattcatatgctacttaaacttacattttattcaatgggacatgtataaatatstgctttctttaaacataattttgaaaatttcaaagagtctgtataagatctccttatcaaaaattattaatgattttaaaaatatgtttctaagacattgcctgatcatgatgaaataaatggagcagcagaggcaattccaagatccacagacaagagccccaatgaaacatgagtccacactccacgttcactaagagaaagagtgagtgggaaaacaggagtcagaatgggggcctggaagagatatgatgtctgagtttggcaaagagaattggcagaataatggtcagggtacccagaccgatgatcagggtccagaatttcaaagcctgcagcactgtcact

SEQ ID NO: 228771 - DNA, 546 bp, Homo sapiens
tacttaccatctgcaggatattaatcaagctaccgtgatgcacctctctaacggtcaatcagcagtttcacagactttctttatccccacctattgccagattcctctgaactctgctcacctgccaagatttcctatcatcttttttgatccatcaccaattttctcctctggacctgtgggtgtacataatcctaagttatggccgttgccagtcagcttgatgccaatgaagcctcaagtgacagtgctgcaggctttgaaattctggaccctgatcatcggtctgggtaccctgaccattattctgccaatwctctttgccaaactcagacatcatatctcttccaggcccccattctgactcctgttttcccactcactctttctcttagtgaacgtggagtgtggactcatgttttattggggctcttgtctgtggatcttggaattgcctctgctgctccatttatttcatcatgatcaggcaatgtcttagaaacatatttttaaaatcattaataatttttgataaggagatcttat

SEQ ID NO: 228772 - DNA, 543 bp, Homo sapiens
tacttaccatctgcaggatattaatcaagctaccgtgatgcacctctctaacggtcaatcagcagtttcacagactttctttatccccacctattgccagattcctctgaactctgctcacctgccaagatttcctatcatcttttttgatccatcaccaattttctcctctggacctgtgggtgtacataatcctaagttatggccgttgccagtcagcttgatgccaatgaagcctcaagtgacagtgctgcaggctttgaaattctggaccctgatcatcggtctgggtaccctgaccattattctgccaatactctttgccaaactcagacatcatatctcttccaggcccccattctgactcctgttttcccactcactctttctcttagtgaacgtggagtgtggactcatgtttyattggggctcttgtctgtggatcttggaattgcctctgctgctccatttatttcatcatgatcaggcaatgtcttagaaacatatttttaaaatcattaataatttttgataaggagatct

SEQ ID NO: 228773 - DNA, 597 bp, Homo sapiens
gttttgctatcttgttcctctataattccttgtattgacaatttatgttttcttttttgttgttgttgatctgtgttactagaggcttatcaactgtaataattttaaagacaccatttggtttcactggttatttctattgttttctgtttcctaatccatttatttctgcatctgattatatccatccttgtacttactttgagtttaacttgctcatcttcttatacttaaaatgaaagtttaaccattgattacaaatatttcttcttttccaatgtaaatattaagactatgattgtccctttatagtctgttttagctttattcyaaaatgttgatatgttatgcttttcattatcattcagtttgaaatactttctaatttctcttttgatttatttttaagtacactattaatgctcaaataattagggatttttccaggtatgtttttaaattgattaataatttaattctgttatggctagagaatatattatgtattatttcaatcctctttaaatgtgctaagtcttgttttatggcataacatatggtctgtctttgtgagcttaaacagaatgtgtattcttg

SEQ ID NO: 228774 - DNA, 502 bp, Homo sapiens
tacttttttcttacattcttgactataatagctatgttaaagttgtttttctgcttatcccattgttttgtcatttttcaatctgtttctgttgactcattttgttcctatatattggtaatatttttcggccttcttcacatatatagtagttttttgttgtattattttcatgttaagttgctgaatgtatggattttttggtgcttttataatagagaataatttctctgacaactacatgcagttccttccatgcaatccttatatcataagtgatggtttcagagcmtgtcctcgtatggtgtgttgaagaaatattcataaattttgtgtggttaaatcttgggaatcatagaatgtgcaatgcaaagtggttgttgtggtgtggtaagaagtcttcattatagaagctaaaataaggaaacttgttggggctagattatgaatccttcaaaggttgttgtttcttttattgttgggagtaaaaagtctgtgactt

SEQ ID NO: 228775 - DNA, 502 bp, Homo sapiens
tacttttttcttacattcttgactataatagctatgttaaagttgtttttctgcttatcccattgttttgtcatttttcaatctgtttctgttgactcattttgttcctatatattggtaatatttttcggccttcttcacatatatagtagttttttgttgtattattttcatgttaagttgctgaatgtatggattttttggtgcttttataatagagaataatttctctgacaactacatgcagttccttccatgcaatccttatatcataagtgatggtttcagagcatgtcctygtatggtgtgttgaagaaatattcataaattttgtgtggttaaatcttgggaatcatagaatgtgcaatgcaaagtggttgttgtggtgtggtaagaagtcttcattatagaagctaaaataaggaaacttgttggggctagattatgaatccttcaaaggttgttgtttcttttattgttgggagtaaaaagtctgtgactt

SEQ ID NO: 228776 - DNA, 576 bp, Homo sapiens
gctatatttaagagatatcacgggtactcagagcaggtttttagacccaaatasggtttaacaccacctaaatgatgcagtaaagcattgctcttgtaaaactagagcatggaaatactgtattattttctatcttctgtagaacttgaagaaatgtcagagcaaggacattaaatgtagcctttggtaaaagctaaagcattactaagtcccctcattaaaacataaaaatccaagctctcttttcaagccagatgaaaataaaaaattgctaatgtattttagagggttcagagtgatcaaaatgcataaaagaaacttttaaaacacaggtattaaaaagaataaagattttcatagatatttcaaaagaagagaaaacttgaaaaaaatccattaagtaacacaaaatatttggctgtggtctgtgttatactaatacctcaaaacaattttcaaaaggcatttatctatatgatatatattcctaatactataaattaatgtttttgagttttaccttaacaaatatagaataaccttaagaatttcaaaatttaaaacaaatgtctacct

SEQ ID NO: 228777 - DNA, 576 bp, Homo sapiens
gctatatttaagagatatcacgggtactcagagcaggtttttagacccaaatagggtttaacaccacctaaatgatgcagtaaagcattgctcttgtaaaactagakcatggaaatactgtattattttctatcttctgtagaacttgaagaaatgtcagagcaaggacattaaatgtagcctttggtaaaagctaaagcattactaagtcccctcattaaaacataaaaatccaagctctcttttcaagccagatgaaaataaaaaattgctaatgtattttagagggttcagagtgatcaaaatgcataaaagaaacttttaaaacacaggtattaaaaagaataaagattttcatagatatttcaaaagaagagaaaacttgaaaaaaatccattaagtaacacaaaatatttggctgtggtctgtgttatactaatacctcaaaacaattttcaaaaggcatttatctatatgatatatattcctaatactataaattaatgtttttgagttttaccttaacaaatatagaataaccttaagaatttcaaaatttaaaacaaatgtctacct

SEQ ID NO: 228778 - DNA, 576 bp, Homo sapiens
gctatatttaagagatatcacgggtactcagagcaggtttttagacccaaatagggtttaacaccacctaaatgatgcagtaaagcattgctcttgtaaaactagagcatggaaatactgtattattttctatcttctgtagaacttgaagaaatgtcagagcaaggacattaaatgtagcctttggtaaaagctaaagcattactaagtcccctcattaaaacataaaaatccaagctctcttttcaagccagatgaaaataaaaaattgctaatgtattttagagggttcagagtgatcaaaatgcataaaagaaacttttaaaacacaggtattaaaaagaataaagattttcatagatatttcaaaagaagagaaaacttgaaaaaaatccattaagtaacacaaaakatttggctgtggtctgtgttatactaatacctcaaaacaattttcaaaaggcatttatctatatgatatatattcctaatactataaattaatgtttttgagttttaccttaacaaatatagaataaccttaagaatttcaaaatttaaaacaaatgtctacct

SEQ ID NO: 228779 - DNA, 576 bp, Homo sapiens
gctatatttaagagatatcacgggtactcagagcaggtttttagacccaaatagggtttaacaccacctaaatgatgcagtaaagcattgctcttgtaaaactagagcatggaaatactgtattattttctatcttctgtagaacttgaagaaatgtcagagcaaggacattaaatgtagcctttggtaaaagctaaagcattactaagtcccctcattaaaacataaaaatccaagctctcttttcaagccagatgaaaataaaaaattgctaatgtattttagagggttcagagtgatcaaaatgcataaaagaaacttttaaaacacaggtattaaaaagaataaagattttcatagatatttcaaaagaagagaaaacttgaaaaaaatccattaagtaacacaaaatwtttggctgtggtctgtgttatactaatacctcaaaacaattttcaaaaggcatttatctatatgatatatattcctaatactataaattaatgtttttgagttttaccttaacaaatatagaataaccttaagaatttcaaaatttaaaacaaatgtctacct

SEQ ID NO: 228780 - DNA, 409 bp, Homo sapiens
atatattacataaaaaggttttcttaatcaaaggatatgattgtgtgatacaattgctgacccacagtacaggacctggctcctaatgtttaaagatatctggttaccatgactataattaccataattttacacctaktaattttttctgtagaattaatttccataacttatgacttgaaacaaagacatcagccttgttccatagtttccaagagcagaattattataaacctcataaatgccaaatgttattattttttcttttttgctctctctgaatcctccaaactggtttcctcttgttaaaattcaaacagctgtgaaatggtcaggcgatttcaagacgaaagtaaatgtgaagtgaccttcatccatgctgaacaaatagaatattataaacatactt

SEQ ID NO: 228781 - DNA, 616 bp, Homo sapiens
tatcaacataaaatttttaaggaagcctcggcctaaaaattatgaatagatctataaaccaagattcattttgattgtgagttatagaaactttaactaaaagaagagaaaagcgggaggaagtgaatgaaggaatgtattgattcatgtttctaggatactggagattgacctttaagcacagctgagtctagggtccgaaataatattcagtatcagattattcctatatattattttcttttcttttcttttctttttctggttctgcttttctctgtattggctttagcttcaggtaggttcattactcatgaaaatccagwtcctccccagcagcccaagagcttcttccttttaattcagcaacagagtagatactcttcatgccccgtcaacaaccccttggcactaattgttcccaaccatgctggtggcttcttataacaataatctgcagtctccctgcttggggactttctctgggtgcaagagagagggcatgctgaaagtctggagtagttaatgccccctggaacagccctcaagtttaagagttgttcttcaccattgtccagaagttctcaatgagaatgaagcccagattcccagagca

SEQ ID NO: 228782 - DNA, 616 bp, Homo sapiens
tatcaacataaaatttttaaggaagcctcggcctaaaaattatgaatagatctataaaccaagattcattttgattgtgagttatagaaactttaactaaaagaagagaaaagcgggaggaagtgaatgaaggaatgtattgattcatgtttctaggatactggagattgacctttaagcacagctgagtctagggtccgaaataatattcagtatcagattattcctatatattattttcttttcttttcttttctttttctggttctgcttttctctgtattggctttagcttcaggtaggttcattactcatgaaaatccagttcctccccagcagcccaagagcttcttccttttaattcagyaacagagtagatactcttcatgccccgtcaacaaccccttggcactaattgttcccaaccatgctggtggcttcttataacaataatctgcagtctccctgcttggggactttctctgggtgcaagagagagggcatgctgaaagtctggagtagttaatgccccctggaacagccctcaagtttaagagttgttcttcaccattgtccagaagttctcaatgagaatgaagcccagattcccagagca

SEQ ID NO: 228783 - DNA, 616 bp, Homo sapiens
tatcaacataaaatttttaaggaagcctcggcctaaaaattatgaatagatctataaaccaagattcattttgattgtgagttatagaaactttaactaaaagaagagaaaagcgggaggaagtgaatgaaggaatgtattgattcatgtttctaggatactggagattgacctttaagcacagctgagtctagggtccgaaataatattcagtatcagattattcctatatattattttcttttcttttcttttctttttctggttctgcttttctctgtattggctttagcttcaggtaggttcattactcatgaaaatccagttcctccccagcagcccaagagcttcttccttttaattcagcaacagagtagatactcttcatgccccgtcaacaaccccttggcactaattgttcccaaccatgcyggtggcttcttataacaataatctgcagtctccctgcttggggactttctctgggtgcaagagagagggcatgctgaaagtctggagtagttaatgccccctggaacagccctcaagtttaagagttgttcttcaccattgtccagaagttctcaatgagaatgaagcccagattcccagagca

SEQ ID NO: 228784 - DNA, 616 bp, Homo sapiens
tatcaacataaaatttttaaggaagcctcggcctaaaaattatgaatagatctataaaccaagattcattttgattgtgagttatagaaactttaactaaaagaagagaaaagcgggaggaagtgaatgaaggaatgtattgattcatgtttctaggatactggagattgacctttaagcacagctgagtctagggtccgaaataatattcagtatcagattattcctatatattattttcttttcttttcttttctttttctggttctgcttttctctgtattggctttagcttcaggtaggttcattactcatgaaaatccagttcctccccagcagcccaagagcttcttccttttaattcagcaacagagtagatactcttcatgccccgtcaacaaccccttggcactaattgttcccaaccatgctggtggcttcttataacaataatctgcagtctccctgcttggggactttctctgggtgcaagagagagggcatgctgaaagtctggagkagttaatgccccctggaacagccctcaagtttaagagttgttcttcaccattgtccagaagttctcaatgagaatgaagcccagattcccagagca

SEQ ID NO: 228785 - DNA, 502 bp, Homo sapiens
ccttcttcaagttgataccctgcctcactaagcattttcagaagctgatgacaatcatgaacactggctatctctaggctttgtctcccctccctttgtcatctcaccttctgatatgattgctarcaagcaatgagaaggctgaaattatctcacagaaaaccagagaagcaattcatactttaaaaaatatatgcatatgaatgcattttacatgtattactccatgttatgatagtaataattgtgaaaataatgatagcaactatgtattaagtgtttctatgctagaaacgggactgagtatatatttatagatagacaatgatatgataattatatgaaatatgtatatataaatatgtgtgtatattcaattgctttaactacatatttatgttgttacacataaagcaatttcatcacatactttatattttatgaattcctgaaacatcctaaaaagatgagatttttattcgcatgaatttaccaaagaaaa

SEQ ID NO: 228786 - DNA, 601 bp, Homo sapiens
atgacagaaagttacaggaagtatttttaaaaactaatgtgttgagtctcaataacataagttttaaaaataatttaacagccttagttaccctaagtctgcttttcaacaataaccaaaaaaaaatcttccatgcagtgtgcccttgctcccatttcatatgcatgattgattttaaaggctgctttgcagaagaactccagaatccagctgctaagacttatattacattgttttcaaacataagaaaaaactcactgatccttaacatacctctgaaaaaactatacttctccatctaaccaatggagaaactaagggataagaaataaagtactgcaacataacaaattgaaaccaaaattaaaattagggttttgttgttgttgttgttgttgttgtttgtttgtttgttttgagacggagtctcgctctgcygccagactggagtgcagtggcacaatcctggcttactgcaatctctgacttcctggttcaagcgattctctgtggtttcctctatcagtgtgtcatcttaggtcattttacctctgttagtttaatcagctttttaactgcttactgtattaagatgttttga

SEQ ID NO: 228787 - DNA, 471 bp, Homo sapiens
gaaaaaaacaataaaaataacaataccacaattttaaaaattcaaaatttaaaatacaatatagatttctgttctgtataacttccttctttttggaattatctcacaacttccaggtgcttcatcctccccagatgccaatctctatcccctcaactccactccactggactccctgatccygactttctgttctcatagtctaaaaactgccttcagtcagaaagctggatgtcttagtttattttctgttgcttataacaggatactggaaactgggtaatttatgaagagaaggaatttgtttttttacagttacagaggatgtgaagtccaaggtcagggagtacatctggtagtcatcttgctgatggcaactctctgcagagtcccgaaactgcacagggcatcacatggtgaggggctgagtgtgctagctcaagtctcacttctttttataaagccatcagc

SEQ ID NO: 228788 - DNA, 319 bp, Homo sapiens
tacttataaggaaaagattttaccatggtttgaacaactacttccattaattgtaaatctaatytgttcaagtaggccatggccagacagacagtggggattgtgcatatttgatgacatcatagagcactgcagtccaacttcatttaaatatgtagaatattttcggtggccaatgctactaaatatgcgagataacaaccctgaagtcaggcaagctgctgcttatggcctgggtgtcatggcacagtttggtggagatgattatcgttctttatgttcagaagctgttccactgctggtaaaagttattaagtgt

SEQ ID NO: 228789 - DNA, 609 bp, Homo sapiens
aaggctggctatataccattggtactggcttcgattcaggcagctgtgcttattactggctacatcttgggcaagttggttagccacaccaaacctcaattttccactctgtaaaatgaggataataatacctacctcacagagttatcaagagactaaaactagatagcattcatgacagcatgtggcagacagtattattgcccccaaatcctttctgccttcccygtgggaggattatatatcctcactcattgtcaagagatctgcagtgctgctctatgggaggaggatactcccctaccccattggtgccaggcttggccatgtgacttgccttggccaatggaatataagctacacgtgccacatccaagcatgactttaagagccactatatggttctcctagtacccctttctctctgtcataagaatggcatgttccatataggggctgatcctgcagcctgggtccaggaatgaagacacctagaacagagctccagtagcaagaaagaaaccattactggggttgcctgttgcaacagcataatgtagagagaaggccaactggtatacagtgcctgtcacaaagcaagggtttagt

SEQ ID NO: 228790 - DNA, 568 bp, Homo sapiens
aattactgtttatacatcaaaattataaacaatccaaataataggagattggctaaaaactatagaatcttcacatgattgaattttatgctgctattaaaaataaagtttcctaaaactttgtaaaaacataggataatgtttatgcctaatscttagtgcaaaaagcaagatacaaaactctatgtgcatggtatttttaatatggtgaaaactggaaagaaatacaacaataattagctagaaaaggctacatattgtataattccaattatacagattctggaaaaggcaaatctatggagactgtaaaaaaaaaaaaaaaatcagtagtgggtgggagagatgagtaggtaattcacagaggagtttcagggcagtaaaactactttgcatggcgctataatgttgcatacatgttgttatacatttgtccaaacccacagaatatataaccaagagtgagccctaatgtaaattgtggactttgggtgataatgatgtgtcactgtaggtttatcaactgtaacaaatgtattcctctagtgcttgatgttgatagtggggg

SEQ ID NO: 228791 - DNA, 616 bp, Homo sapiens
atcatataccatggtatgaggtccttgttaagagaaattatccagaactcagaaataaaggaaaagataactgcagtccttttcagagccacactagagcactgtctaataggtctaccttaagactatttaattctctagggcaatataccttcgtctgtttgctaatgatggctgattagggcccaaactctgtgttaaggyacacatttttgtttggtaaagttgcaaattactcctattcattagaaaaaaaaaacactcccccaaattctacttgtattgccatgtagaaaattattaaattattcaattttgtctccaacttagcaaaaggatttccattttgcctttcctggtggactacagtacctgatcatcttttagccctatttgtcaccttgcaagttccctcattagtgggttaaataagtcattgacaaatgttcattctactcttaaaagacagtcatattttttgaactttttaaaaagtatattttgatatcatacaggcctggtgtctatttggtcagtatgcagaaaagagcagcctgaatgttgtccttagcaaatctgcttgtaaggttggcccatggctggcacatctgggaac

SEQ ID NO: 228792 - DNA, 616 bp, Homo sapiens
atcatataccatggtatgaggtccttgttaagagaaattatccagaactcagaaataaaggaaaagataactgcagtccttttcagagccacactagagcactgtctaataggtctaccttaagactatttaattctctagggcaatataccttcgtctgtttgctaatgatggctgattagggcccaaactctgtgttaaggtacacatttttgtttggtaaagttgcaaattactcctattcattagaaaaaaaaaacactcccccaaattctacttgtattgccatgtagaaaattattaaattattcaattttgtctccaacttagcaaaaggatttccattttgcctttcctggtggactacagtacctgatcatcttttagccctatttgtcaccttgcaagttccctcattagtgggttaaataagtcattgacaaatgttcattctactcttaaaagacagtcatattttttgaactttttaaaaagtatattttgatatcatacaggcctggtgtctatttggtcagtrtgcagaaaagagcagcctgaatgttgtccttagcaaatctgcttgtaaggttggcccatggctggcacatctgggaac

SEQ ID NO: 228793 - DNA, 598 bp, Homo sapiens
gaattctgtgtgattcacattgtttttttgattgtttgtttagtttttgtttttttgtttttgtaaatgagctagaagataagctcatctacacaatggtcaatatatacaaaaatgaaagggtttcagtcaatatgaaatgggtatgagtttgcagagcacaatggtagaaaacatagaatcttaaaaaaatatgttaggcggcatttccagkgggcacattttattaggtggaatcaaatgtattctacttccctctgtcttttcaagtaggaagggcctcatttctgcaagtgggatcaagactggagtcaagggactaatttttctgataataccacctcagacactgaccagatgagtaccacttcacttcaacctttctttaaaaccacaatgtacacattaccaattaaagtgccttatgtagctttaatcatagctaccaacagtgtatcagcatagtaggtggcgaagatggaatattatttgtacagtgaaataataaaggaaaatgaaactttaccctttcaaatggtaacacatcagaaatcactttatactcaaaacacaactcaaaagcacatttcaaaacctt

SEQ ID NO: 228794 - DNA, 585 bp, Homo sapiens
aattattgctctgagcagctgaccctttccatgtgaaacagctgcacccagtcccaaaaccatgaatggccaccttccaaggcctggctcccccgttcctgctgtgcttgacactggtagcgtccctcctaccgaggcagctaaagaaagacagtttcttttggcactctatccatctggagtattctgaagctttcatttcattagaggaaacttctcctcaaaacctctcagtctctgacctagtggcaaggaggcctcatgccctctcaccttggccccatttcaaagcacattcccagaatggagagctgggaacaagggcayagaaaggggtggagaggaggtgaagcaaaggcctgctttggtcctggtgtccttcatgttggtatgcaaggcagtccgtctctgtggtggggaaaaaaaatgaagaggtcaggttttagaaggaatttgccagagatgattggtaagagcaataaatatttcccctgccagacccttgtcttttttcagagaagtcaagatttctcaggaggaccatgtaaagcaaagaacaaagatttttttcttaaataagaattc

SEQ ID NO: 228795 - DNA, 525 bp, Homo sapiens
attctgaaaagtttaaaacaatgtttccctagcagaggtggtttgagatgcagatgttggcttcttgtggcagacttttcctcattttatctgtcctacccctctgggggtaggggtgattcttttcatcccgaattagaatttccaacactgcacacttaactagcctggcagccaacgtggaaaactccccaaggcctttgaagcagctcctctgctccatggcttactcacagcaggctgcgtgttggctcctgggagaaggaaccagaatctggaggctcacttggcatcacctctcctttgcaatgaaaraaccagagaccagacaatgaggatgaagcagagggggagagtccagaggacagtgctctccttttcagtattgacaaaatatacgtcctatctggggacctgaaactatggtcactatttatggttggctttccagaagtcctcatttacttagacatttcagtgaggaatttcttcagaattgtttatctcctcaccacaggaattcct

SEQ ID NO: 228796 - DNA, 589 bp, Homo sapiens
gtgcatgaaacatctaaataaagttggaaaagaaagagtgagcagaggagggaattgagaaggagtgagaaacagcaatgtaagaaaggaatgggttagatttggtcatgaatatatattaaataccatctttagaaagcaaggctgtgaaaaaaaatccataaaggcttggtattgtttctatcagattgtacagaygctggaccccagaacagggcccacctggtcccattcttcctgtagtgcgcagcacacccactagtatgtgtctgtagggttaggagccatggctgggggcaaggaggtaggcagtgtaaaagctgttaaagaggaaggtggctttgttcaattcgctgacatcttgcgtaaagtcggcattggctggatgtctagaagatgatttttgtctaaaataaatctccggtacataccagggggtgggactgaacgagctagctaaaaacagcagtggagtatagatctttctgaaccgtgcctgagatgcaattactagtcttaaaggttcagtgctctgccttttggggaaaagaaattgtaaaccagccaaagccacaaacaaattgagctc

SEQ ID NO: 228797 - DNA, 589 bp, Homo sapiens
gtgcatgaaacatctaaataaagttggaaaagaaagagtgagcagaggagggaattgagaaggagtgagaaacagcaatgtaagaaaggaatgggttagatttggtcatgaatatatattaaataccatctttagaaagcaaggctgtgaaaaaaaatccataaaggcttggtattgtttctatcagattgtacagacgctggaccccagaacagggcccacctggtcccattcttcctstagtgcgcagcacacccactagtatgtgtctgtagggttaggagccatggctgggggcaaggaggtaggcagtgtaaaagctgttaaagaggaaggtggctttgttcaattcgctgacatcttgcgtaaagtcggcattggctggatgtctagaagatgatttttgtctaaaataaatctccggtacataccagggggtgggactgaacgagctagctaaaaacagcagtggagtatagatctttctgaaccgtgcctgagatgcaattactagtcttaaaggttcagtgctctgccttttggggaaaagaaattgtaaaccagccaaagccacaaacaaattgagctc

SEQ ID NO: 228798 - DNA, 589 bp, Homo sapiens
gtgcatgaaacatctaaataaagttggaaaagaaagagtgagcagaggagggaattgagaaggagtgagaaacagcaatgtaagaaaggaatgggttagatttggtcatgaatatatattaaataccatctttagaaagcaaggctgtgaaaaaaaatccataaaggcttggtattgtttctatcagattgtacagacgctggaccccagaacagggcccacctggtcccattcttcctgtagtgcgcagcacacccactagtatgtgtctgtagggttaggagccatggctgggggcaaggaggtaggcagtgtaaaagctgttaaagaggaaggtggctttgttcaattygctgacatcttgcgtaaagtcggcattggctggatgtctagaagatgatttttgtctaaaataaatctccggtacataccagggggtgggactgaacgagctagctaaaaacagcagtggagtatagatctttctgaaccgtgcctgagatgcaattactagtcttaaaggttcagtgctctgccttttggggaaaagaaattgtaaaccagccaaagccacaaacaaattgagctc

SEQ ID NO: 228799 - DNA, 486 bp, Homo sapiens
tggctgcagcaatgagcctgaatgagagcccacgaagattcgggtctctcggacaactataaaaattgtgaagatgccaaaaataagcctagtccttccaaccatatgtaatcagcatattgaaatcattttgcttaatataatgtaccccttgcctttaattgtccagccatcccatgcrtgtgcacacatatgcctatgcattctcccagctagattagcaaaagcaggcactgttgcttccagtgagtatcatggctctctgtaaatttctgctcattacctaagcaaacaactgactcaaaacttctcaagaaagatttggtaacattgggcaaatactgtgaccccccacacaatccattttaatcttttctctatccctaaaatatcacatggacacaaaccaggtatttcctcttttgggctaagttaaattacttctaaaatgaggataccatcttaacacaaactgcattcaagctt

SEQ ID NO: 228800 - DNA, 486 bp, Homo sapiens
tggctgcagcaatgagcctgaatgagagcccacgaagattcgggtctctcggacaactataaaaattgtgaagatgccaaaaataagcctagtccttccaaccatatgtaatcagcatattgaaatcattttgcttaatataatgtaccccttgcctttaattgtccagccatcccatgcatgtgcacacatatgcctatgcattctcccagctagattagcaaaagcaggcactgttgcttccagtgagtatcatggctctctgtaaatttctgctcattacctaagcaaacaactgactcaaaacttctcaagaaagatttggtaacattgggcaaatactgtgaccccccacacaatccattttaatcttttctctatccctaaaayatcacatggacacaaaccaggtatttcctcttttgggctaagttaaattacttctaaaatgaggataccatcttaacacaaactgcattcaagctt

SEQ ID NO: 228801 - DNA, 486 bp, Homo sapiens
tggctgcagcaatgagcctgaatgagagcccacgaagattcgggtctctcggacaactataaaaattgtgaagatgccaaaaataagcctagtccttccaaccatatgtaatcagcatattgaaatcattttgcttaatataatgtaccccttgcctttaattgtccagccatcccatgcatgtgcacacatatgcctatgcattctcccagctagattagcaaaagcaggcactgttgcttccagtgagtatcatggctctctgtaaatttctgctcattacctaagcaaacaactgactcaaaacttctcaagaaagatttggtaacattgggcaaatactgtgaccccccacacaatccattttaatcttttctctatccctaaaatatcacatggacacaaaccaggtatttcctcttttsggctaagttaaattacttctaaaatgaggataccatcttaacacaaactgcattcaagctt

SEQ ID NO: 228802 - DNA, 423 bp, Homo sapiens
ggtaactgttttcatggcatatctccttctatccctttactttcartatatgcctattcttaaagtttaaaaatgggtctcttgtaggcagcatctagttggatcttgttgttgatccactcagccattctgtatcttttgattggagagtttaacccatgtaccagcaaggttattattgatagtaaaagacttactcctgccattttgctaattgttttctggttactttgtagataatttgttctcttcttcctctattgttgtctacctttgtagtttggtggtttagttttctgctttgtggttacaatattgttttttaaatattcaacatgaatacactttcttgtttggataacgtgtaaaacgtctgcaaggagggatagataataagttttcccttcagactgcactgctttg

SEQ ID NO: 228803 - DNA, 423 bp, Homo sapiens
ggtaactgttttcatggcatatctccttctatccctttactttcaatatatgcctattcttaaagtttaaaaatgggtctcttgtaggcagcatctagttggatcttgttgttgatccactcagccattctrtatcttttgattggagagtttaacccatgtaccagcaaggttattattgatagtaaaagacttactcctgccattttgctaattgttttctggttactttgtagataatttgttctcttcttcctctattgttgtctacctttgtagtttggtggtttagttttctgctttgtggttacaatattgttttttaaatattcaacatgaatacactttcttgtttggataacgtgtaaaacgtctgcaaggagggatagataataagttttcccttcagactgcactgctttg

SEQ ID NO: 228804 - DNA, 423 bp, Homo sapiens
ggtaactgttttcatggcatatctccttctatccctttactttcaatatatgcctattcttaaagtttaaaaatgggtctcttgtaggcagcatctagttggatcttgttgttgatccactcagccattctgtatcttttgattggasagtttaacccatgtaccagcaaggttattattgatagtaaaagacttactcctgccattttgctaattgttttctggttactttgtagataatttgttctcttcttcctctattgttgtctacctttgtagtttggtggtttagttttctgctttgtggttacaatattgttttttaaatattcaacatgaatacactttcttgtttggataacgtgtaaaacgtctgcaaggagggatagataataagttttcccttcagactgcactgctttg

SEQ ID NO: 228805 - DNA, 423 bp, Homo sapiens
ggtaactgttttcatggcatatctccttctatccctttactttcaatatatgcctattcttaaagtttaaaaatgggtctcttgtaggcagcatctagttggatcttgttgttgatccactcagccattctgtatcttttgattggagagtttaacccatgtaccagcaaggttattattgatagtaaaagacttactcctgccattttgctaattgttttctggttactttgtagataatttgttctcttcttcctctattgttgtctacctttgtrgtttggtggtttagttttctgctttgtggttacaatattgttttttaaatattcaacatgaatacactttcttgtttggataacgtgtaaaacgtctgcaaggagggatagataataagttttcccttcagactgcactgctttg

SEQ ID NO: 228806 - DNA, 543 bp, Homo sapiens
tgccacttctttgttggatctctttgggcacctcactgaatttttctgagctaggtcctctgcaccttgcttgtctatcatcaaagagtcactgtgagactataataatataagaggaaagaaatcgtaattattaaggcatatgctgaaccacatacctccattggcaacattaaacttcactccaaactctccccctggtcctccagggcagtggctggctgttagaatgattccaccagctgccttgatcttcctgataatgcaggagaccgcaggtgtcgacaagatgccattctgtccaataatcagtcgtccaatctaaaccatccaaaaaaaaaaatcaatccagttscttgggattaaagccatttcaacaggaaagtgccccaggctctgttaacatacagccaataacttgataaaagaaacagagtaggctttagattaggggaggcagggtagggggagcactgacattgtctctcctatctaatgtctctaagaccatttggtgcacctgcatctagtagtcaattatta

SEQ ID NO: 228807 - DNA, 543 bp, Homo sapiens
tgccacttctttgttggatctctttgggcacctcactgaatttttctgagctaggtcctctgcaccttgcttgtctatcatcaaagagtcactgtgagactataataatataagaggaaagaaatcgtaattattaaggcatatgctgaaccacatacctccattggcaacattaaacttcactccaaactctccccctggtcctccagggcagtggctggctgttagaatgattccaccagctgccttgatcttcctgataatgcaggagaccgcaggtgtcgacaagatgccattctgtccaataatcagtcgtccaatctaaaccatccaaaaaaaaaaatcaatccagttccttgggattaaagscatttcaacaggaaagtgccccaggctctgttaacatacagccaataacttgataaaagaaacagagtaggctttagattaggggaggcagggtagggggagcactgacattgtctctcctatctaatgtctctaagaccatttggtgcacctgcatctagtagtcaattatta

SEQ ID NO: 228808 - DNA, 543 bp, Homo sapiens
tgccacttctttgttggatctctttgggcacctcactgaatttttctgagctaggtcctctgcaccttgcttgtctatcatcaaagagtcactgtgagactataataatataagaggaaagaaatcgtaattattaaggcatatgctgaaccacatacctccattggcaacattaaacttcactccaaactctccccctggtcctccagggcagtggctggctgttagaatgattccaccagctgccttgatcttcctgataatgcaggagaccgcaggtgtcgacaagatgccattctgtccaataatcagtcgtccaatctaaaccatccaaaaaaaaaaatcaatccagttccttgggattaaagccatttcaacaggaaagtgccccaggctctgttaacatacagccaatmacttgataaaagaaacagagtaggctttagattaggggaggcagggtagggggagcactgacattgtctctcctatctaatgtctctaagaccatttggtgcacctgcatctagtagtcaattatta

SEQ ID NO: 228809 - DNA, 609 bp, Homo sapiens
gtataacaaattacactcttttacagaaaataataaaatatccaagtctctcaccaaattttcaaaaaagaggaaaagtgtaagcttccagatgaaagtttctatagctttccccaaatttagtaccaccatgaaaaagaaattcttcactcattcaaggcatacgactagaaaactaatttccatggcatcaaattaatttcctcctttggagataaaaccatgagatcttttccaaagcattaaaatcgccaagaaaaaaaaaaaaargaaaaaaaagaccattaccagcattttaaaactgagtaagagaatgaagtaaacaaaaaagggaaagaaaaagcttcaaaagttcatttttctcctaatttcttgaactctctattccagaagtacctaatgtttttcttaaaagagaggctttcaatttttccctatgtctaaaggctgctttaagtagcttaagaccaaggacaggagagtgaaaacgaagagggttttggctctcctcggtgggggtggaattgcagctactgcttagggatattttccagtggtcagctcttcaaactccagtgagtctcataaacagggtgcaccagccaatcc

SEQ ID NO: 228810 - DNA, 609 bp, Homo sapiens
gtataacaaattacactcttttacagaaaataataaaatatccaagtctctcaccaaattttcaaaaaagaggaaaagtgtaagcttccagatgaaagtttctatagctttccccaaatttagtaccaccatgaaaaagaaattcttcactcattcaaggcatacgactagaaaactaatttccatggcatcaaattaatttcctcctttggagataaaaccatgagatcttttccaaagcattaaaatcgccaagaaaaaaaaaaaaaagaaaaaaaagaccattaccagcattttaaaactgagtaagagaatgaagtaaacaaaaaagggaaagaaaaagcttcaaaagttcatttttctcctaatttcttgaactctctattccagaagtacctaatgtttttcttaaaagagaggctttcaatttttccctatgtctaaaggctgctttaagtagcttaagaccaaggacaggaragtgaaaacgaagagggttttggctctcctcggtgggggtggaattgcagctactgcttagggatattttccagtggtcagctcttcaaactccagtgagtctcataaacagggtgcaccagccaatcc

SEQ ID NO: 228811 - DNA, 567 bp, Homo sapiens
cccaatagtaagaattctactcaggacatctgatcttcattgaaamggattctaatccaacttcagtcctcatagcaaggaagtactatttcagaaagtccctagattctcagatgcattggcaagcaccatacactgaagaattcacagaagattttagtcacttgctcactcatccacttgaagtaagaaaaatcaatcactgcatgtttattgttctataataaagcaaatgttagaaataaaagttagaaatgtcaaacacactaaattgttacataataaactaatcaagacacaacttttattcaggacatggatatttctgaaatgaaaataaaagaagagaattgacttaaaatgtttataaatacgaatattatgacagaaccaaagctatttatgagcattatttttaaaagcttgtttaagtatcatgcacttgtctgtgtgacattttgtaaagcggagaaaaattaaggagaaaggaattgtagaacactaacaggaagaggacagatactgaggaatggctcatggtataagtgagattatcagagactctct

SEQ ID NO: 228812 - DNA, 567 bp, Homo sapiens
cccaatagtaagaattctactcaggacatctgatcttcattgaaaaggattctaatccaacttcagtcctcatagcaaggaagtactatttcagaaagtccctagattctcagatgcattggcaagmaccatacactgaagaattcacagaagattttagtcacttgctcactcatccacttgaagtaagaaaaatcaatcactgcatgtttattgttctataataaagcaaatgttagaaataaaagttagaaatgtcaaacacactaaattgttacataataaactaatcaagacacaacttttattcaggacatggatatttctgaaatgaaaataaaagaagagaattgacttaaaatgtttataaatacgaatattatgacagaaccaaagctatttatgagcattatttttaaaagcttgtttaagtatcatgcacttgtctgtgtgacattttgtaaagcggagaaaaattaaggagaaaggaattgtagaacactaacaggaagaggacagatactgaggaatggctcatggtataagtgagattatcagagactctct

SEQ ID NO: 228813 - DNA, 567 bp, Homo sapiens
cccaatagtaagaattctactcaggacatctgatcttcattgaaaaggattctaatccaacttcagtcctcatagcaaggaagtactatttcagaaagtccctagattctcagatgcattggcaagcaccatacactgaagaattcacagaagattttagtcacttgctcactcatccacttgaagtaagaaaaatcaatcactgcatgtttattgttctataataaagcaaatgttagaaataaaagttagaaatgtcaaacacactaaattgttacataataaactaatcaagacacaacttttattcaggacatggatatttctgaaatgaaaayaaaagaagagaattgacttaaaatgtttataaatacgaatattatgacagaaccaaagctatttatgagcattatttttaaaagcttgtttaagtatcatgcacttgtctgtgtgacattttgtaaagcggagaaaaattaaggagaaaggaattgtagaacactaacaggaagaggacagatactgaggaatggctcatggtataagtgagattatcagagactctct

SEQ ID NO: 228814 - DNA, 567 bp, Homo sapiens
cccaatagtaagaattctactcaggacatctgatcttcattgaaaaggattctaatccaacttcagtcctcatagcaaggaagtactatttcagaaagtccctagattctcagatgcattggcaagcaccatacactgaagaattcacagaagattttagtcacttgctcactcatccacttgaagtaagaaaaatcaatcactgcatgtttattgttctataataaagcaaatgttagaaataaaagttagaaatgtcaaacacactaaattgttacataataaactaatcaagacacaacttttattcaggacatggatatttctgaaatgaaaataaaagaagagaattgacttaaaatgtttataaatacgaatattatgacagaaccaaagctatttatgagcattatttttaaaagcttgtttaagtatyatgcacttgtctgtgtgacattttgtaaagcggagaaaaattaaggagaaaggaattgtagaacactaacaggaagaggacagatactgaggaatggctcatggtataagtgagattatcagagactctct

SEQ ID NO: 228815 - DNA, 604 bp, Homo sapiens
ataccaaattaattccccagctgttcacatgcatataagcagctgctgctgttactgcctaatacttatggcagtctgtcagcacctctaatctctgccatagcagacaagccactcacctaaggcctctgctgtacytccaaagaaagaatttctcaagtagagactgagtggaactagactgccagctgtgagcctcagagctcctggctgcctgttgctgagtctatcagctgctgagcctttctcaccaaaaaaaaaaaaaaaaaaaaaaaaaaaaaaaaaaaaaaaatgagcttaataaaataaccctgcacagaaattttctgaaattaagataacattcaatggaaaacagaatttaatctacagaaatacacttcacagatgttttaggaacagaacctagagaaaatgaaagtcaaaatttaataaaagaatttgtcaggaacttcaaggtaaagactccatgtattttttggcaactataaaacactaagaaggctttttaaatattaaaaagccatttaaacacttcaaattaagattcctcaatatacttcagatttctgtactgagttaccctctcgagtgtttggaagtc

SEQ ID NO: 228816 - DNA, 281 bp, Homo sapiens
aaatctttttaaatgcacttagatctttcttatatcagaatcaagcatatttgtcaattayttaatgtttattattaataactaaaatgatttgttattaataggaatagcttttttaaagtaccttgatctttgtgtttctaagatttgtcctagtccatttatggatctgaaataaataataaatgaggaagacaaagtttaaaagtaaaaattaactttttaaaaaagtatacaaagtatattgtttctaaaacgggaaataagcatacccaaataca

SEQ ID NO: 228817 - DNA, 566 bp, Homo sapiens
tgttatcatggctttgtaatcttagttttgaagacaggcaaatgtactagtcaaatatgccaaactaacttattaagagcattccaaacaacattttggatccaaatctttttaaatgcacttagatctttcttatatcagaatcaagcatatttgtcaattacttaatgtttattattaataactaaaatgatttgttattaataggaatagcttttttaaagtaccttgatctttgtgtttctaagatttgtcctagtccatttatggatctgaaataaataataaatgaggaagacaaagtttaaaagtaaaaattaactttttaaaaaagtatacaaagtatattgtttctaaaaygggaaataagcatacccaaatacatctggaaccagaaaaaaattaaaaacagaaaaacaaaacttgctttaaaaaataattatgattttccttcaaacaataaatcacatatattccactcatacatcaataaaacatatatgcaaaaattcacacaactgtcagattaagggctactttgtggttaataaaaagacgcttcactt

SEQ ID NO: 228818 - DNA, 391 bp, Homo sapiens
aggagtgaatgaataaagccaagttaaaggagamctgggtaccagatactgtgctaggttcctttgcatgtatcctttcattctgctggagctaaagattttctgcctcctctccataaaacgcacccaaactccaaaaccaggaaattctccatagaaaataggagtgaagagagaaaagactaacaggataaaacccaaagcaggaagaaagttctatctcccatttctctcaaggaatttttggacccaccaaggctactgtcctgaaatatcctgctgcttctccttccccaaatattgtccacttactgagagtaaggctgacttgccgcaggcttataaagtgtttggtcacagtaagacaactgtgagtaataacacacattgt

SEQ ID NO: 228819 - DNA, 489 bp, Homo sapiens
ctatgtgtcagcactgtgcaaagtttaccaacattgtctcatgtaatactcaaagcaaacttatgataggcattatgccttttacagaggaggctttaaaagggtaaataagctccctaagaagacaatgagaaacagaccaaggattagaacccaagcagattccaaggtctgtgatcttcaacactasgcaacaatacctaccctccacatggagacattatatttttttatagtaaagtttaaggacattactattaaaataagatgaaatatgtggaaaaaatatgaatttctttcttccacaatcattaatcatggcaaataatctcctaatgagccttacctttattgattcaatttataatatatactatatgaactgagatgacagattgaaaatctagtcagtagaacttataaatactaagaatagtaattttgagccatcacgctcaaagcattgtacacattaaagataaccaataa

SEQ ID NO: 228820 - DNA, 601 bp, Homo sapiens
tactcaaagcaaacttatgataggcattatgccttttacagaggaggctttaaaagggtaaataagctccctaagaagacaatgagaaacagaccaaggattagaacccaagcagattccaaggtctgtgatcttcaacactaggcaacaatacctaccctccacatggagacattatatttttttatagtaaagtttaaggacattactattaaaataagatgaaatatgtggaaaaaatatgaatttctttcttccacaatcattaatcatggcaaataatctcctaatgagccttacctttattgattcaatttataatatatactatatgaactgagatgacagattsaaaatctagtcagtagaacttataaatactaagaatagtaattttgagccatcacgctcaaagcattgtacacattaaagataaccaataataatagctaccgaatgtctctctgtatagggcttttattagttcaggtcttacaaaataattcaaaacaaagtccctgaactataacttcatttgaaaagtccatctttgttttcaaaaggaatgggagtctccagaacagtcagcaaaatgactgtt

SEQ ID NO: 228821 - DNA, 561 bp, Homo sapiens
gtctgttttattaatgagaatgatatctgccaaagcaacttgcctaaaatagcaaacaaaaagaaatgttaagaaattttaaataatatacacgcatgcagattaatacatcaaaagagaaatgttaacaaattaaaaataaataaaaacacctcatgtagatcaatatatcagttaaggattatatagtgytctataggagtgattcagtttactcctaatccgctaatttttcaatgtgaatgaattgtattcattactatgcaagttcagatttcacattacccatttgcaaagtatttactaagttctgttacttgctactcttgtgctacaaagataagtctcaaaaagtttacaatcaaaaggatgattttaaactcataattttctttgtgaagaaaagcataaaattcagatatccaatatggtaaaaagaagaagagtttacctactaaaatactgtaatatttaccaaaattttcaaagaaatagaataacttcacttaatactaaaaactgtattaaacaggttttttaaaactatacttcagagctggg

SEQ ID NO: 228822 - DNA, 561 bp, Homo sapiens
gtctgttttattaatgagaatgatatctgccaaagcaacttgcctaaaatagcaaacaaaaagaaatgttaagaaattttaaataatatacacgcatgcagattaatacatcaaaagagaaatgttaacaaattaaaaataaataaaaacacctcatgtagatcaatatatcagttaaggattatatagtgctctataggagtgattcagtttactcctaatccgctaatttttcaatgtgaatgaattgtattcattactatgcaagttcagatttcacattacccatttgcaaagtatttactaagttctgttacttgctactcttgtgctacaaagataagtctcaaaaagtttacaatcaaaaggatgattttaaactcataattttctttgtgaagaaaagcataaaattcagatatccaatatggtaaaaagaagaagagtttacctactaaaatactgtaatatttacmaaaattttcaaagaaatagaataacttcacttaatactaaaaactgtattaaacaggttttttaaaactatacttcagagctggg

SEQ ID NO: 228823 - DNA, 576 bp, Homo sapiens
tatgtctattaaattgctcacagtgtttatataatatcggtgaagggaagtaaaattgaggttagtgaaagatactccacgttttaycctaatacttttctactgtttgaattttttatagttataatacattcaggtataatacataatttatatataaatactatatatatacacatacacacacatatatatatatgtgtgtctatatatattttaataagaaacaaggtctttctctctcacccaggctggagtgcagtgcagtgatcatagctcactgtaacctcaaactcctaggcttgcgtgatcctcccacctcagcctcctgagtagctgggactactggtgcatgccaccatgcccagctaagttttaaaatttttgtagaaacagggtcttgctatgttgcccaggttgaccttgaactcctggcctcaagagatcctttcccctcagcctcccaaagtgcttgtattacaggcatgagccactgtgcacagcctacttatattatttaaaaaacaattaatcaaataagttggttaggattagtttcagtggcataaacagaaa

SEQ ID NO: 228824 - DNA, 576 bp, Homo sapiens
tatgtctattaaattgctcacagtgtttatataatatcggtgaagggaagtaaaattgaggttagtgaaagatactccacgttttaccctaatacttttctactgtttgaattttttatagttataatacattcaggtataatacataatttatatataaatactatatatatayacatacacacacatatatatatatgtgtgtctatatatattttaataagaaacaaggtctttctctctcacccaggctggagtgcagtgcagtgatcatagctcactgtaacctcaaactcctaggcttgcgtgatcctcccacctcagcctcctgagtagctgggactactggtgcatgccaccatgcccagctaagttttaaaatttttgtagaaacagggtcttgctatgttgcccaggttgaccttgaactcctggcctcaagagatcctttcccctcagcctcccaaagtgcttgtattacaggcatgagccactgtgcacagcctacttatattatttaaaaaacaattaatcaaataagttggttaggattagtttcagtggcataaacagaaa

SEQ ID NO: 228825 - DNA, 576 bp, Homo sapiens
tatgtctattaaattgctcacagtgtttatataatatcggtgaagggaagtaaaattgaggttagtgaaagatactccacgttttaccctaatacttttctactgtttgaattttttatagttataatacattcaggtataatacataatttatatataaatactatatatatacacatacacacacatatatatatatgtgtgtstatatatattttaataagaaacaaggtctttctctctcacccaggctggagtgcagtgcagtgatcatagctcactgtaacctcaaactcctaggcttgcgtgatcctcccacctcagcctcctgagtagctgggactactggtgcatgccaccatgcccagctaagttttaaaatttttgtagaaacagggtcttgctatgttgcccaggttgaccttgaactcctggcctcaagagatcctttcccctcagcctcccaaagtgcttgtattacaggcatgagccactgtgcacagcctacttatattatttaaaaaacaattaatcaaataagttggttaggattagtttcagtggcataaacagaaa

SEQ ID NO: 228826 - DNA, 616 bp, Homo sapiens
acccatcaagtaaaatgaacataattttaaagyctttgtgaaatcttttatgccacataaaatcagcctgtgtacaatgctacacaaatgtcaataaccatatatcagagccaaaccagtttcataattcatggggagatgatcattaggggtatctgaatagtttggaacctcagagcaagcaggtaataattttatttaacaagcttgattaggtctatagaagaaacattttttccttctaaaagttcagcaaattctattttgaggaaaacaaaactgaaataaaatcatggcaatgatacttctacttcaggcaaaatcttgttcaattcaactgcagacccactctgcaattatggaagtcacagaacttgacaagtattgtatcaaaaatcattccatgccaaaagatcaagtttaatatttttttcataattcatcttggcctgaggctacaacaagtcctattgttatatactctgcctctagagaatgaggctgctaacagaccttggaatggtgcctggcacaaaggctcaagaaatatttgttgaatgaattgtaattaacacctcctgttgtggggatacataaaagatgttacatgaaaaat

SEQ ID NO: 228827 - DNA, 616 bp, Homo sapiens
acccatcaagtaaaatgaacataattttaaagcctttgtgaaatcttttatgccacataaaatcagcctgtgtacaatgctacacaaatgtcaataaccatatatcagagccaaaccagtttcataattcatggggagatgatcattaggggtatctgaawagtttggaacctcagagcaagcaggtaataattttatttaacaagcttgattaggtctatagaagaaacattttttccttctaaaagttcagcaaattctattttgaggaaaacaaaactgaaataaaatcatggcaatgatacttctacttcaggcaaaatcttgttcaattcaactgcagacccactctgcaattatggaagtcacagaacttgacaagtattgtatcaaaaatcattccatgccaaaagatcaagtttaatatttttttcataattcatcttggcctgaggctacaacaagtcctattgttatatactctgcctctagagaatgaggctgctaacagaccttggaatggtgcctggcacaaaggctcaagaaatatttgttgaatgaattgtaattaacacctcctgttgtggggatacataaaagatgttacatgaaaaat

SEQ ID NO: 228828 - DNA, 616 bp, Homo sapiens
acccatcaagtaaaatgaacataattttaaagcctttgtgaaatcttttatgccacataaaatcagcctgtgtacaatgctacacaaatgtcaataaccatatatcagagccaaaccagtttcataattcatggggagatgatcattaggggtatctgaatagtttggaacctcagagcaagcaggtaataattttatttaacaagcttgattaggtctatagaagaaacattttttccttctaaaagttcagcaaattctattttgaggaaaacaaaactgaaataaaatcatggcaaygatacttctacttcaggcaaaatcttgttcaattcaactgcagacccactctgcaattatggaagtcacagaacttgacaagtattgtatcaaaaatcattccatgccaaaagatcaagtttaatatttttttcataattcatcttggcctgaggctacaacaagtcctattgttatatactctgcctctagagaatgaggctgctaacagaccttggaatggtgcctggcacaaaggctcaagaaatatttgttgaatgaattgtaattaacacctcctgttgtggggatacataaaagatgttacatgaaaaat

SEQ ID NO: 228829 - DNA, 573 bp, Homo sapiens
tcacagaacttgacaagtattgtatcaaaaatcattccatgccaaaagatcaagtttaatatttttttcataattcatcttggcctgaggctacaacaagtcctattgttatatactctgcctctagagaatgaggctgctaacagaccttggaatggtgcctggcacaaaggctcaagaaatatttgttgaatgaattgtaattaacacctyctgttgtggggatacataaaagatgttacatgaaaaatgccatctaacatgcagcaacaaatctcttcccattaagcagtaaatctacttaacaatgatatatttttggcaaggcatctgcctctgaatgatcctatagtactgaaaattctttttaaactgaaatatttttcaagatattatattattgaccttatgaaagcttttttaacatatgaaattggggttatttggctatgagtttgtgaggcataaaaatgatatgacagaagaattacagatttgtttttgcatttccatgcctaaatgtaactaatacaatgttagtttcacaaggtaatgtgcaatgttttaaatgca

SEQ ID NO: 228830 - DNA, 544 bp, Homo sapiens
catgcagcaacaaatctcttcccattaagcagtaaatctacttaacaatgatatatttttggcaaggcatctgcctctgaatgatcctatagtactgaaaattctttttaaactgaaatatttttcaagatattatattattgaccttatgaaagcttttttaacatatgaaattggggttatytggctatgagtttgtgaggcataaaaatgatatgacagaagaattacagatttgtttttgcatttccatgcctaaatgtaactaatacaatgttagtttcacaaggtaatgtgcaatgttttaaatgcatttacctctccaaaatattagaattcttcactcaaagctaacagtggtagactaacgttttactacttccaggcagtcagaaagtatcaaatataaaaataaatgaaaatcaccccaaatgagagcctgccaatatttacagctgtattaaaattatatgtaatcatatacaattatagcagaagagataaatgtcctcttctatgcccataggaaagctatacaaatatt

SEQ ID NO: 228831 - DNA, 589 bp, Homo sapiens
catgcagcaacaaatctcttcccattaagcagtaaatctacttaacaatgatatatttttggcaaggcatctgcctctgaatgatcctatagtactgaaaattctttttaaactgaaatatttttcaagatattatattattgaccttatgaaagcttttttaacatatgaaattggggttatttggctatgagtttgtgaggcataaaaatgatatgacagaagaattacagatttgtttttgcatttccatgcctaaatgtaactaatacaatgttagtttcacaaggtaatgtgcaatgttttaaatgcatttacctctccaaaatattagaattcttcactcaaagctaacagtggtagactaacgttttactacttccaggcagtcagaaagtatcaaatataaaaataaatgaaaatcaccccaaatgagagcctgccaatatttacagctgtattaaaattatatgtaatcatatacaattatagcagaagagataaatgtcctcttctatgcccataggaaagctatacaaayatttaaaaaaataagtgcatcttaacatttattttctttagatatcag

SEQ ID NO: 228832 - DNA, 505 bp, Homo sapiens
accttatgaaagcttttttaacatatgaaattggggttatttggctatgagtttgtgaggcataaaaatgatatgacagaagaattacagatttgtttttgcatttccatgcctaaatgtaactaatacaatgttagtttcacaaggtaatgtgcaatgttttaaatgcatttacctctccaaaatattagaattcttcactcaaagctaacagtggtagactaacgttttactacttccaggcagtcagaaagtatcaaatataaaaataaatgaaaatcaccccaaatgagagcctgccaatatttacagctgtattaaaattatatgtaatcatatacaattatagcagaagagataaatgtcctcttctatgcccataggaaagctatacaaatatttaaaaaaataagtgcatcttaacatttattttctttagayatcagccctgcatttccctcatgtgacttcctaccttcccaaatcaaactctgcaaaaagtata

SEQ ID NO: 228833 - DNA, 566 bp, Homo sapiens
atgtcagtagcccgggtgtcaagtcctcagaatagagagctgtcattttaagttgtccaattctttgcctatgattaaaaaatgaatatttcagatcaatgggtgacaatcccattagagtgataccccatgatatcaattaccacttcagtttcaatttggctggctggccacagggtaccatttctcagctttacttgtcatgggctgrctctgtgaagcatgacattcttaaattgctgcccattatccaagtgtcattacttgtactgcctcagaattctctgaatcacaagcagctactgaggtcaagctttgcaaccagaggaattggacaagttggaaaattctttatatcaaggcaaagttatttatctggcatccgacttagaaaatttaaagtttccattatcctgacagtgtgtcagttttgtgtaggtatactgatttaataatttaagaggttttatcaaggtagcagaaggttaaacgtttactgtgtttgcattattcagaatgttgctttgtttttttggcctccgtcatgctgataatagattctattt

SEQ ID NO: 228834 - DNA, 566 bp, Homo sapiens
atgtcagtagcccgggtgtcaagtcctcagaatagagagctgtcattttaagttgtccaattctttgcctatgattaaaaaatgaatatttcagatcaatgggtgacaatcccattagagtgataccccatgatatcaattaccacttcagtttcaatttggctggctggccacagggtaccatttctcagctttacttgtcatgggctggctctgtgaagcatgacattcttaaattgctgcccattatccaagtgtcattacttgtactgcctcagaattctctgaatcacaagcagctactgaggtcaagctttgcaaccagaggaattggacaagttggaaaattctttatatcaaggcaaagttatttatctggcatccgacttagaaaatttaaagtttccattatcctgacagtgtgtcagtttygtgtaggtatactgatttaataatttaagaggttttatcaaggtagcagaaggttaaacgtttactgtgtttgcattattcagaatgttgctttgtttttttggcctccgtcatgctgataatagattctattt

SEQ ID NO: 228835 - DNA, 566 bp, Homo sapiens
atgtcagtagcccgggtgtcaagtcctcagaatagagagctgtcattttaagttgtccaattctttgcctatgattaaaaaatgaatatttcagatcaatgggtgacaatcccattagagtgataccccatgatatcaattaccacttcagtttcaatttggctggctggccacagggtaccatttctcagctttacttgtcatgggctggctctgtgaagcatgacattcttaaattgctgcccattatccaagtgtcattacttgtactgcctcagaattctctgaatcacaagcagctactgaggtcaagctttgcaaccagaggaattggacaagttggaaaattctttatatcaaggcaaagttatttatctggcatccgacttagaaaatttaaagtttccattatcctgacagtgtgtcagttttgtgtaggtatactgatttaataatttaagaggttttatcaaggtagcagaaggttaaacgtttactgtgtttgcattattcagaatgttgctttgtttttttggcctccrtcatgctgataatagattctattt

SEQ ID NO: 228836 - DNA, 613 bp, Homo sapiens
gtggtatttcacctgggaagttgagaaacatcattttactgtatgtaacaacatacttttaaagatcttactaaatgcattttataaattaaacctcatttaaatgcattctaggaccttagaagttaacaaaaacattcatagcaggatgtcttttacacttgatcttagccaaaagaccaagaagcgatgcaagatgccttttaatggagagagtcttcttactaatcctatgtgtatatcctgattttcttcaatatgtactttttaaattttaagttccagggtacatgctcacgatgtgcaggtttgttacataggtaaacgsgtgccatggtggtttcctgcacctattaacccatcacctaggtcttcaatattttttaaaaactcatttccagtgtgtgtttaatagtaatttaacaagaaaaataagatctcagatgctttatcaagctcagcttcttctatggaacagaaaaacttagcaatattggggttgaatccttgtgaagagctatacataccaaactctatcctaaccccatatgcttattacaaattataattccaaattttatcaccaaatcaaactcagagtaatagaaaagaa

SEQ ID NO: 228837 - DNA, 613 bp, Homo sapiens
gtggtatttcacctgggaagttgagaaacatcattttactgtatgtaacaacatacttttaaagatcttactaaatgcattttataaattaaacctcatttaaatgcattctaggaccttagaagttaacaaaaacattcatagcaggatgtcttttacacttgatcttagccaaaagaccaagaagcgatgcaagatgccttttaatggagagagtcttcttactaatcctatgtgtatatcctgattttcttcaatatgtactttttaaattttaagttccagggtacatgctcacgatgtgcaggtttgttacataggtaaacgggtgccatggtggtttcctgcacctattaacccatcacctaggtcttcaatattttttaaaaactcatttccagtgtgtgtttaatagtaatttaacaagaaaaataagatctcagatgctttatcaagctcagcttcttctatggaacagaaaaacttascaatattggggttgaatccttgtgaagagctatacataccaaactctatcctaaccccatatgcttattacaaattataattccaaattttatcaccaaatcaaactcagagtaatagaaaagaa

SEQ ID NO: 228838 - DNA, 613 bp, Homo sapiens
gtggtatttcacctgggaagttgagaaacatcattttactgtatgtaacaacatacttttaaagatcttactaaatgcattttataaattaaacctcatttaaatgcattctaggaccttagaagttaacaaaaacattcatagcaggatgtcttttacacttgatcttagccaaaagaccaagaagcgatgcaagatgccttttaatggagagagtcttcttactaatcctatgtgtatatcctgattttcttcaatatgtactttttaaattttaagttccagggtacatgctcacgatgtgcaggtttgttacataggtaaacgggtgccatggtggtttcctgcacctattaacccatcacctaggtcttcaatattttttaaaaactcatttccagtgtgtgtttaatagtaatttaacaagaaaaataagatctcagatgctttatcaagctcagcttcttctatggaacagaaaaacttagcaatattggggttgaatccttgtgaagagctatayataccaaactctatcctaaccccatatgcttattacaaattataattccaaattttatcaccaaatcaaactcagagtaatagaaaagaa

SEQ ID NO: 228839 - DNA, 595 bp, Homo sapiens
ccttttaatggagagagtcttcttactaatcctatgtgtatatcctgattttcttcaatatgtactttttaaattttaagttccagggtacatgctcacgatgtgcaggtttgttacataggtaaacgggtgccatggtggtttcctgcacctattaacccatcacctaggtcttcaatattttttaaaaactcatttccagtgtgtgtttaatagtaatttaacaagaaaaataagatctcagatgctttatcaagctcagcttcttctatggaacagaaaaacttagcaatattggggttgaatccttgtgaagagctatacataccaaactctatcctaaccccatatgcttattacaaattataattccaaattttatcaccaaatcaaactcagagtaatagaaaagaaatatttaacacaaactaataattaaaacacaaatttcacctattgttcaggatatctttttgagaaaggtttttgttaaagaaaatttcagatacaaacataaagaaaattaaacaatyaatccccatattcccagctctcaataatgagccactcatagcaatctttcaacttactttta

SEQ ID NO: 228840 - DNA, 535 bp, Homo sapiens
caaagatttcatcattaaactaaagtgtgaaaagaacaacaatgcaaggaattaaagttataatatgaatgaacaacaataagcttaaccataaagattttactaaaaaacaaaagaggcagggtgtggtggctcacgcctgtaatcccagcactttgggaggccgaggctggcggatcacctgaagtcaggggttcaagaccagtcaggccaacatggcgaaaccccgtctctactaaaaatccaaaaattagccaggtacgatggtgcacgcctgtaktcccagctactcgggaggctgaggcaggagaatcacttgaacccaggaggtaaagattgcagtgagccgagatcatgccactgcactccatgcactccagtctgggcaacaaagtgagactctgtctcagaaaaaaaaaaaaaaaacaaaaaaaaaaaccaagaaagataaaagaaaactgttttttaacttaccatcaaggtaaatatcactccctaattcagcatcaacccaaaacatagaagccactgcacg

SEQ ID NO: 228841 - DNA, 535 bp, Homo sapiens
caaagatttcatcattaaactaaagtgtgaaaagaacaacaatgcaaggaattaaagttataatatgaatgaacaacaataagcttaaccataaagattttactaaaaaacaaaagaggcagggtgtggtggctcacgcctgtaatcccagcactttgggaggccgaggctggcggatcacctgaagtcaggggttcaagaccagtcaggccaacatggcgaaaccccgtctctactaaaaatccaaaaattagccaggtacgatggtgcacgcctgtagtcccagctactcgggaggctgaggcaggagaatcacttgaacccaggaggtaaagrttgcagtgagccgagatcatgccactgcactccatgcactccagtctgggcaacaaagtgagactctgtctcagaaaaaaaaaaaaaaaacaaaaaaaaaaaccaagaaagataaaagaaaactgttttttaacttaccatcaaggtaaatatcactccctaattcagcatcaacccaaaacatagaagccactgcacg

SEQ ID NO: 228842 - DNA, 535 bp, Homo sapiens
caaagatttcatcattaaactaaagtgtgaaaagaacaacaatgcaaggaattaaagttataatatgaatgaacaacaataagcttaaccataaagattttactaaaaaacaaaagaggcagggtgtggtggctcacgcctgtaatcccagcactttgggaggccgaggctggcggatcacctgaagtcaggggttcaagaccagtcaggccaacatggcgaaaccccgtctctactaaaaatccaaaaattagccaggtacgatggtgcacgcctgtagtcccagctactcgggaggctgaggcaggagaatcacttgaacccaggaggtaaagattgcagtgagccgagatcwtgccactgcactccatgcactccagtctgggcaacaaagtgagactctgtctcagaaaaaaaaaaaaaaaacaaaaaaaaaaaccaagaaagataaaagaaaactgttttttaacttaccatcaaggtaaatatcactccctaattcagcatcaacccaaaacatagaagccactgcacg

SEQ ID NO: 228843 - DNA, 538 bp, Homo sapiens
catgttttaatttgccctgataaaattaacaggtaaacacatatatcttcttatggaaattatagtgatagaagctttaactatttatagcaaaagggaattatagtgatagaaccttttactatttatacccattccatttccatctctcgttatttcctttaaaaaagaccaattctaaccacatataaacaaaacatcattcttctaccgatgycataataatttaattaacagatattatcaaacaatttgagcagtatggctttgtgcacatcagacttatttttattttctcacctctttaatatgataatcattcaatcataaatagtgaattatcactctaaaggaaaaggaaaacaaaacatagataattccaaaatcacttgcccaaaaaaaatttacttgtaatctgtgtagaactagaagtaaaattatatactctatggcattactaattattcctcacactatttatttaggactgtataaaacctgggtcttaggaaaaatttttcctaaataataaattaaa

SEQ ID NO: 228844 - DNA, 483 bp, Homo sapiens
tggtttcctgatacctattgatttttttcccaaaaacktaatagttttccaatttgactcaaataggatttgtgagtaacaggggctgaatcaatgtccgttcttttcaaggaaattactttaccatgacaattatttaacttagaactggagagtgtcagtctccaaaatgggaaacaactgaattgccaataagaattctgttcactttcttggctaaaacatgattttaattaatgagggggaaaattaaatctactgtatcactactccaaacaataagtcatttaaaaaagcatgaattttttcactcagtaaaatatctaacatacataaatcattttgtaatttttaaaaattcattgatttttagtctaataaatagtttacaaatcctactgttaatatttgcctcttaagttgaaatgtaagagtatattaatgctttattctaaaactggtatttatctttgatataatact

SEQ ID NO: 228845 - DNA, 317 bp, Homo sapiens
taatggtttcctgatacctattgatttttttcccaaaaacgtaatagttttccaatttgactcaaatagsatttgtgagtaacaggggctgaatcaatgtccgttcttttcaaggaaattactttaccatgacaattatttaacttagaactggagagtgtcagtctccaaaatgggaaacaactgaattgccaataagaattctgttcactttcttggctaaaacatgattttaattaatgagggggaaaattaaatctactgtatcactactccaaacaataagtcatttaaaaaagcatgaattttttcactca

SEQ ID NO: 228846 - DNA, 317 bp, Homo sapiens
taatggtttcctgatacctattgatttttttcccaaaaacgtaatagttttccaatttgactcaaataggatttgtgagtaacaggggctgaatcaatgtccgttcttttcaaggaaattactttaccatgacaattatttaacttagaactggagagtgtcagtctccaaaaygggaaacaactgaattgccaataagaattctgttcactttcttggctaaaacatgattttaattaatgagggggaaaattaaatctactgtatcactactccaaacaataagtcatttaaaaaagcatgaattttttcactca

SEQ ID NO: 228847 - DNA, 317 bp, Homo sapiens
taatggtttcctgatacctattgatttttttcccaaaaacgtaatagttttccaatttgactcaaataggatttgtgagtaacaggggctgaatcaatgtccgttcttttcaaggaaattactttaccatgacaattatttaacttagaactggagagtgtcagtctccaaaatgggaaacaactgaattgccaataagaattytgttcactttcttggctaaaacatgattttaattaatgagggggaaaattaaatctactgtatcactactccaaacaataagtcatttaaaaaagcatgaattttttcactca

SEQ ID NO: 228848 - DNA, 461 bp, Homo sapiens
ttttttcccaaaaacgtaatagttttccaatttgactcaaataggatttgtgagtaacaggggctgaatcaatgtccgttcttttcaaggaaattactttaccatgacaattatttaacttagaactggagagtgtcagtctccaaaatgggaaacaactgaattgccaataagaattctgttcactttcttggctaaaacatrattttaattaatgagggggaaaattaaatctactgtatcactactccaaacaataagtcatttaaaaaagcatgaattttttcactcagtaaaatatctaacatacataaatcattttgtaatttttaaaaattcattgatttttagtctaataaatagtttacaaatcctactgttaatatttgcctcttaagttgaaatgtaagagtatattaatgctttattctaaaactggtatttatctttgatataatact

SEQ ID NO: 228849 - DNA, 477 bp, Homo sapiens
agatgattacttttcaactttcttctttgtattttttaggtatttaaatttttttacaatgaatgttccatctttacccaaacaataaaatctttattgtaaagaaagttagaagcaagaaacattaacattttttataactacaatttgtataaaagctttctctgtgatctttagtttttctttcttcctctgaaaagctgaatmgtgtttaattaaactctcaaaagtatcaagtttttgtctataaaatggcaaaactggctatgatgaaataaactgatatttgctatttctaataaaagcatacaatatattctttcttaccagattcaaataatatttaacgccaacatattagtccaagtcctatcatcagtcagatttatcagaaaggtatgaaaacccatgcctactataaggaccaaaatagcctaattcaatactactttgaaaacatggggatgatgttactac

SEQ ID NO: 228850 - DNA, 477 bp, Homo sapiens
agatgattacttttcaactttcttctttgtattttttaggtatttaaatttttttacaatgaatgttccatctttacccaaacaataaaatctttattgtaaagaaagttagaagcaagaaacattaacattttttataactacaatttgtataaaagctttctctgtgatctttagtttttctttcttcctctgaaaagctgaatagtgtttaattaaactctcaaaagtatcaagtttttgtctataaaatggcaaaactggctatgatgaaataaactgatatttgctatttctaataaaagcatacaatatattctttcttaccagattcaaataatatttaaygccaacatattagtccaagtcctatcatcagtcagatttatcagaaaggtatgaaaacccatgcctactataaggaccaaaatagcctaattcaatactactttgaaaacatggggatgatgttactac

SEQ ID NO: 228851 - DNA, 477 bp, Homo sapiens
agatgattacttttcaactttcttctttgtattttttaggtatttaaatttttttacaatgaatgttccatctttacccaaacaataaaatctttattgtaaagaaagttagaagcaagaaacattaacattttttataactacaatttgtataaaagctttctctgtgatctttagtttttctttcttcctctgaaaagctgaatagtgtttaattaaactctcaaaagtatcaagtttttgtctataaaatggcaaaactggctatgatgaaataaactgatatttgctatttctaataaaagcatacaatatattctttcttaccagattcaaataatatttaacgccaacatattagtccaagtcctatcatcagtcagatttatcagaaaggtatgaaaacccatgcctactataaggaccmaaatagcctaattcaatactactttgaaaacatggggatgatgttactac

SEQ ID NO: 228852 - DNA, 391 bp, Homo sapiens
aggagtgaatgaataaagccaagttaaaggagacctgggtaccagatactgtgctaggttcctttgcatgtatcctttcattctgctggagctaaagattttctgcctcctctccataaaacgcacccaaactccaaaaccaggaaattctccatagaaaataggagtgaagagagaaaagactaacaggataaaacccaaagcaggaagaaagttctatctcccatttctctcaakgaatttttggacccaccaaggctactgtcctgaaatatcctgctgcttctccttccccaaatattgtccacttactgagagtaaggctgacttgccgcaggcttataaagtgtttggtcacagtaagacaactgtgagtaataacacacattgt

SEQ ID NO: 228853 - DNA, 564 bp, Homo sapiens
aagaataaatgtaatcagtgtgcaataggttatttaataagatgatgaaaaaaacagtctgttattagaaatctcaggatttttgcctaaaaagcacttttctctttagtttattaaaaycagaaatcgaatataactggaatataactggcttcccatcctgttcataaaacctagctcttttactttttacaactgaaaaaaatagtacattttaaaagaaatcgtctaatagatattgttttttggctagaagtgagctttgattacaattcatacttatgaagaaaaactcctataaagataacagaagtattgtgtctagagctatttttttttactacagtttaatatttgagttgagaagttaagcacacttattttcacagataaaatacatgaggataaagaccatatgtttactttctttttaaaatattgagttttaactgcattgcagataataaacattaaacaaagttaactaataacagaagcattttcaaatatttttcatgagttgcaatagagtccatacaaaactgcctttctaattcctaaaaa

SEQ ID NO: 228854 - DNA, 564 bp, Homo sapiens
aagaataaatgtaatcagtgtgcaataggttatttaataagatgatgaaaaaaacagtctgttattagaaatctcaggatttttgcctaaaaagcacttttctctttagtttattaaaatcagaaatcgaatataactggaatataactggcttcccatcctgttcataaaacctagctcttttactttttacaactgaaaaaaatagtacattttaaaagaaatcgtctaatagatattgttttttggctagaagtgagctttgattacaattcatacttatgaagaaaaactcctataaagataacagaagtattgtgtctagagctatttttttttactacagtttaatatttgagttgagaagttaagcacacttattttcacagataaaatacatgaggataaagaccatatgtttacyttctttttaaaatattgagttttaactgcattgcagataataaacattaaacaaagttaactaataacagaagcattttcaaatatttttcatgagttgcaatagagtccatacaaaactgcctttctaattcctaaaaa

SEQ ID NO: 228855 - DNA, 644 bp, Homo sapiens
agaagcattttcaaatatttttcatgagttgcaatagagtccatacaaaactgcctttctaattcctaaaaaagacattttttggccaggcatggtgcctcacgcctgtaatcccagcaactttgggaggccgaggcgggtggatcataaggccaggagctcaagaccatcctggccaacatggtgaaaccctgtctctactaaaaatacaaaaattatctgggcatggtggcgcatgcctgtagtcccagctactcgrgaggctgaggcaggagaatcactttaacccgggagacagaggtggcagtgagctgagattgcaccactgcactccagcctggcaagagagagactccatctcaaaaaaaataaaataaaataaaaaataaacgttttttcatatgtctagatttttacttctggagtcatttatttcatgtaaaaatgtagtttaattctgttaataagaattccaaagttatacaaaataaaattttattaaaactaatttcagtatctcaacccatataaatcttaacagaaattaatctaatttttctaaagctatccacatcaatacaataccttgcattttcatttttaaatatggaatatcaattcaccagaggaataaacagtcacac

SEQ ID NO: 228856 - DNA, 644 bp, Homo sapiens
agaagcattttcaaatatttttcatgagttgcaatagagtccatacaaaactgcctttctaattcctaaaaaagacattttttggccaggcatggtgcctcacgcctgtaatcccagcaactttgggaggccgaggcgggtggatcataaggccaggagctcaagaccatcctggccaacatggtgaaaccctgtctctactaaaaatacaaaaattatctgggcatggtggcgcatgcctgtagtcccagctactcgggaggctgaggcaggagaatcactttaacccgggagacagaggtggcagtgagctgagattgcaccactgcactccagcctggcaagagagagactccatctcaaaaaaaataaaataaaataaaaaataaacgttttttcatatgtcyagatttttacttctggagtcatttatttcatgtaaaaatgtagtttaattctgttaataagaattccaaagttatacaaaataaaattttattaaaactaatttcagtatctcaacccatataaatcttaacagaaattaatctaatttttctaaagctatccacatcaatacaataccttgcattttcatttttaaatatggaatatcaattcaccagaggaataaacagtcacac

SEQ ID NO: 228857 - DNA, 639 bp, Homo sapiens
atatattattttagtatagaatatcctagaggataagattaaagcatcctttgaaacctgttgcaaaatactttatgtagacataaaattttataaatatttacaaacactcctacaagttgaaacagtttcttcaacctagcctaaccttccctaaaattgacacacaatcttttatttatagtgaccttttatttcaacattaacgagacgcaacttcaggctgactatatggctacttatagtatgctttaaacaatctataaaagkttttatgaaatggggaatagagccaggtagtgtcaacaatgaacagaatgttcagttaagataaattcataaagctataccaactttatccagcaggtggcatatgaaacccaatatgtcaatctccagtagaaaaaaaagtcttgtgaaccgtacacactaaaattcatagaggaaaaaaagaaaatcctaactgcatagtattgtagttcaattgtatgactatatcatttctttatctttttttttgttggacatttggtttgtttccagtgttttactattacagtgctgctaaaaacttttacatgtaggctatacatgtcttctgaaataaagttttctagtatataactagatcttcctaca

SEQ ID NO: 228858 - DNA, 622 bp, Homo sapiens
ctgctctgctccacctaggaggactcctactacaatgcaaagactcaagtttcaccttaattaggtctttcccaggccaggtattagtgaccttgggaaaaaagtttaagcttctcagcttcagatcttcctctgaatattagcactgtggtaattggcacagtggtacctaaccctttgagggtccaggattgttttaatggtgagtgatttacaaactgagtttaaaagagcaaggaggatccaatttygcaaaatttcattaactctgcttaagaaaacagtatattatattagcttagatcaggagttgggaatctatagcctgctaccatttattgtgtagcctgcaaatggtttttacatttttaatacattggaaaaaaaattaaagaagattattatttcgtgatgtgaaaattatacatgttgaaaggaaaactttagagtttaattgagtaaagaatgatctgtgaattaggcagcccccagaaccagagtagggttggttacagctgagcatttgccttatttgaacctggtttgaagagttggctgcctgtggttggctgaagttcagctgctgtgattggctgagactcactacttgttacaagagtag

SEQ ID NO: 228859 - DNA, 582 bp, Homo sapiens
cttcagatcttcctctgaatattagcactgtggtaattggcacagtggtacctaaccctttgagggtccaggattgttttaatggtgagtgatttacaaactgagtttaaaagagcaaggaggatccaatttcgcaaaatttcattaactctgcttaagaaaacagtatattatattagcttagatcaggagttgggaatctatagcctgctaccatttattgtgtagcctgcaaatggtttttacatttttaatacattggaaaaaaaattaaagaagattattatttcgtgatgtgaaaattatacatgttgaaaggaaaactttagagtttaattgagtaaagaatgatctgtgaattaggcagcccccagaaccagagtagggttggttacagctgagcatttgccttatttgaacctggtttgaagagttgsctgcctgtggttggctgaagttcagctgctgtgattggctgagactcactacttgttacaagagtaggttacatatcaagttttacatatcaagttgaaatatagttttttatgtactgggaaacctttagggtaaacttaaatt

SEQ ID NO: 228860 - DNA, 391 bp, Homo sapiens
aggagtgaatgaataaagccaagttaaaggagacctgggtaccagatactgtgctaggttcctttgcatgtatcctttcattctgctggagctaaagattttctgcctcctctccataaaacgcacccaaactccaaaaccaggaaattctccatagaaaataggagtgaagagagaaaagactaacaggataaaacccaaagcaggaagaaagttctatctcccatttctctcaaggaatttttggacccaccaaggctactgtcctgaaatatcctgctgcttctccttccccaaatattgtccacttactgagagtaaggctgacttgcmgcaggcttataaagtgtttggtcacagtaagacaactgtgagtaataacacacattgt

SEQ ID NO: 228861 - DNA, 370 bp, Homo sapiens
tttgagtggcacagtgatgcctagtgcatgatcatgtttgtctgctcaaacataaaagggaaactggtgggtttgaggatgcccagcagcacgacagctgccaatgtaaatgagcggtgtagagagagagggggcgggaggggactacaaacttcagaatatgagctgatcgtttataagttaaaaaaaaaaaaaaaaaagtcaaaagggagcccaggatggtgcaggaaaaaggagaagggaagatttccttgcagctaatcaggagagttcataagggctgattacatgtgtggaagccttmagttcttttttttaaaaatgtgaaagtttgcatgtatgtatgtatgtatagcttcgtgtattacca

SEQ ID NO: 228862 - DNA, 536 bp, Homo sapiens
ggttagtgtgtaattatacctagcagtttcttaggatcctttgtatttctgtgatattggctatgatgtttcatctttcatttctgattttatgctatattgaaaacatgaggcatagcaggtagggggcactggtcaggacttggggtataaactggcagatgttaaggtgggtgattctggttaactcagaaactccaaagtcccgtgtggaagaattaactgcctgtacttgcctagtaatgtatatccttggtcaaaaaaagatccagctgagaatgttggatgaagggaccaaatcaatattcatcattatgttgaaaacaagtcagattggctgyggtcttttgacagcaggtcagtggctaagtctatttgaacaaagttagggcaggttcaagagagaatcctgagatcggtattctttgttccatacaaccttgcctttcagtttcttctccccatgcctccaggatgtccctgcacagcccgtagggccccctccttcagtaccttgccttatgaaggggagaaaa

SEQ ID NO: 228863 - DNA, 390 bp, Homo sapiens
atcctacctatatatgtctcagkagctttccagagtttcctttgagtgcttctaaattttgcataaatggtatgctgtcccttgtctctttttaaaacccgtaagccattttcccttcttttcctggaaaattaaaggaacaaggaccaggaaataacaatgtattagctaaggttctgttgattgaaagcaacagaacctaattctggctagcttaaaccatgctaggatttaatgaagaatactgcagaatcttagatatcttatgactgggaaagaggaggttcaggtagttcctaggatgtcagcaacaggtagctgtcaattaactgcccccacaccacccactgctgccgtcatcaatatagcacaccacaatggctcccagcc

SEQ ID NO: 228864 - DNA, 613 bp, Homo sapiens
ttctctctgtcccaccaagaaaatatgatcttgatacagatgttcattgtgtcaaggcaaccatggcaaccatgatctagatacactgttcaagttttatgctgatcctacctatatatgtctcaggagctttccagagtttcctttgagtgcttctaaattttgcataaatggtatgctgtcccttgtctctttttaaaaccmgtaagccattttcccttcttttcctggaaaattaaaggaacaaggaccaggaaataacaatgtattagctaaggttctgttgattgaaagcaacagaacctaattctggctagcttaaaccatgctaggatttaatgaagaatactgcagaatcttagatatcttatgactgggaaagaggaggttcaggtagttcctaggatgtcagcaacaggtagctgtcaattaactgcccccacaccacccactgctgccgtcatcaatatagcacaccacaatggctcccagcctctgtacgtctgggttccggtgttcaaattctagagacagcaagagaaatcccattgagtcagggatccttccctgggtcaccctccctgcctacggtcagaaatgcaggattatgtag

SEQ ID NO: 228865 - DNA, 588 bp, Homo sapiens
ggttcatggttacattgtcaaagctggcaaagcattcaagacctgatttctcagaccgagtgtatgtgtgaatataatatactcatttgcacaaatataaaccctctgtcttaactgtgttctgcaaaaggcgtgataaatactttcaagttatatgtacttatcagtagaactaatggaatacacacagtatattttatggggaatttcagagaaggaaggaaaagtcaaccttttatytggcatcaggatagtagtaaaacattctacttgtgcatcagatagatttttatgacctaacctggacaagtaacttaactcttggtgcctcatgtttgaaagagggataacactctacagggtcattctaagaattacatattgccaaaacacatgaaaagattctcaaccttgttagtaatcaaggaaatgcaaatgaagatcacaatgaagtcttcttttgtactcaattgattggtgaaaaatgcatgcctgataatattgacatacagaccaatgagatctcttataatttgctgggaaaatgtatcaatttgtacaaacattttgaaaaataattgtgcattt

SEQ ID NO: 228866 - DNA, 588 bp, Homo sapiens
ggttcatggttacattgtcaaagctggcaaagcattcaagacctgatttctcagaccgagtgtatgtgtgaatataatatactcatttgcacaaatataaaccctctgtcttaactgtgttctgcaaaaggcgtgataaatactttcaagttatatgtacttatcagtagaactaatggaatacacacagtatattttatggggaatttcagagaaggaaggaaaagtcaaccttttatttggcatcaggatagtagtaaaacattctacttgtgcatcagatagatttttatgacctaacctggacaagtaacttaactcttggtgcctcatgtttkaaagagggataacactctacagggtcattctaagaattacatattgccaaaacacatgaaaagattctcaaccttgttagtaatcaaggaaatgcaaatgaagatcacaatgaagtcttcttttgtactcaattgattggtgaaaaatgcatgcctgataatattgacatacagaccaatgagatctcttataatttgctgggaaaatgtatcaatttgtacaaacattttgaaaaataattgtgcattt

SEQ ID NO: 228867 - DNA, 573 bp, Homo sapiens
gactgtagttaacaatgaagtattgtgtatttcaaaattgctaagacaataaatttcaaatgttctcaccacaaaaaagataggttttgaggtgatgaatctattaattctctggatttaattattccacaatgtatacatatatcataacatcacatyatacctccgtaaatacatacaattttaatttgtcaattaacatttttttaaaagaatagtgtggccagtcggggaggtagtttttttttttcctctagtctctactcagtctccaagatcccatttcccataaagttcctgtcacccaggtggagtgcagtggcacaatcatggctcactgcaccctctccctcttgggctcaagcgatcctcctgcctacaggtacatgccaccacgcccagctaatttttgtagtttttgtagacatggggtttcaccatgttgcctaggctggtctcgaactcctcagctcaatcaatctgcccactttagcctcccacagtgctgggattacaggtgtgagccaccaagcccaacccataaagttcctaactttttatctccctgggagt

SEQ ID NO: 228868 - DNA, 573 bp, Homo sapiens
gactgtagttaacaatgaagtattgtgtatttcaaaattgctaagacaataaatttcaaatgttctcaccacaaaaaagataggttttgaggtgatgaatctattaattctctggatttaattattccacaatgtatacatatatcataacatcacatcatacctccgtaaatacatacaattttaatttgtcaattaacatttttttaaaagaatagtgtggccagtcggggaggtagtttttttttttcctctagtctctactcagtctccaagatcccattycccataaagttcctgtcacccaggtggagtgcagtggcacaatcatggctcactgcaccctctccctcttgggctcaagcgatcctcctgcctacaggtacatgccaccacgcccagctaatttttgtagtttttgtagacatggggtttcaccatgttgcctaggctggtctcgaactcctcagctcaatcaatctgcccactttagcctcccacagtgctgggattacaggtgtgagccaccaagcccaacccataaagttcctaactttttatctccctgggagt

SEQ ID NO: 228869 - DNA, 573 bp, Homo sapiens
gactgtagttaacaatgaagtattgtgtatttcaaaattgctaagacaataaatttcaaatgttctcaccacaaaaaagataggttttgaggtgatgaatctattaattctctggatttaattattccacaatgtatacatatatcataacatcacatcatacctccgtaaatacatacaattttaatttgtcaattaacatttttttaaaagaatagtgtggccagtcggggaggtagtttttttttttcctctagtctctactcagtctccaagatcccatttcccataaagttcctgtcacccaggtggagtgcagtggcacaatcatggctcactgcaccctctccctcttgggctcaagcgatcctccygcctacaggtacatgccaccacgcccagctaatttttgtagtttttgtagacatggggtttcaccatgttgcctaggctggtctcgaactcctcagctcaatcaatctgcccactttagcctcccacagtgctgggattacaggtgtgagccaccaagcccaacccataaagttcctaactttttatctccctgggagt

SEQ ID NO: 228870 - DNA, 573 bp, Homo sapiens
gactgtagttaacaatgaagtattgtgtatttcaaaattgctaagacaataaatttcaaatgttctcaccacaaaaaagataggttttgaggtgatgaatctattaattctctggatttaattattccacaatgtatacatatatcataacatcacatcatacctccgtaaatacatacaattttaatttgtcaattaacatttttttaaaagaatagtgtggccagtcggggaggtagtttttttttttcctctagtctctactcagtctccaagatcccatttcccataaagttcctgtcacccaggtggagtgcagtggcacaatcatggctcactgcaccctctccctcttgggctcaagcgatcctcctgcctacaggtacatgccaccacgcccagctaatttttgtagtttttgtagacatggggtttcaccatgttgcctaggctggtctcgaactcctcagctcaatcaatctgcccactttagcctcccacagtgctgggattacaggtgtgagccaccaagcccaacccataaarttcctaactttttatctccctgggagt

SEQ ID NO: 228871 - DNA, 551 bp, Homo sapiens
tggagagtcatgattctcattcctccccagccttccggaaaaatgctcagaaatttctttccacattgacacctgattacagtctaaatagtaaccttattctgaytgttaatgtaaccttctcgtaatttctacaaaaatactttagtttttctagctgtgttttcatgtaatcactgaaattatttttaattggttttaagcattcattgattccatatacaccacctgcaaaaaagttacataggtgatcgctaacaatactagaattcgccccatccaaaggaaacattagagtagaaaaagaaaaaggatttgagaatccagtatgaaattcagttaatcattacttccctgttactcaactaccttaacattgtcaggtttacctgaacataaacttcattttcttagttgttcttagaacgaagggatatgtttattgaaatcagtaattaagaatattttgggacagttatgatttacttagccagtgaagcagtttctattcccaaatccaggcaaagagaacaataagattaaacgtagcc

SEQ ID NO: 228872 - DNA, 526 bp, Homo sapiens
ggggtcattatggaaaagggctgaagcataagaatgtaggcccaatactgagatagaaagaggattctctgagatgacttaggcagggtgatggtggtggaggtgggtgtaagaagccctctgctgcctcagtccgagcatggarttcaattggtcaagagcagagccaatcaccatttaggcccccttgttagccttaatttattcctcaggtatggagaatactcctcaagatgcattcagagtgtaagctccctcttcctcagcagaggactgccctgcaggtttgcagttctgtcatttggaaactccctgatgtgtcccttggctcttcccattcttttgcttcaacacattttaagactcaggcacccttaactgcagaaacagcatgaaaaacacgttggcttcaggaaaaattatgccaagtggagtctctactgtgctctgtgtatcagatgtaaagcttaaaacagtgtaagagtttttacagagtgtattcatatcacaccagttttgggtccat

SEQ ID NO: 228873 - DNA, 506 bp, Homo sapiens
aaaagggctgaagcataagaatgtaggcccaatactgagatagaaagaggattctctgagatgacttaggcagggtgatggtggtggaggtgggtgtaagaagccctctgctgcctcagtccgagcatggaattcaaytggtcaagagcagagccaatcaccatttaggcccccttgttagccttaatttattcctcaggtatggagaatactcctcaagatgcattcagagtgtaagctccctcttcctcagcagaggactgccctgcaggtttgcagttctgtcatttggaaactccctgatgtgtcccttggctcttcccattcttttgcttcaacacattttaagactcaggcacccttaactgcagaaacagcatgaaaaacacgttggcttcaggaaaaattatgccaagtggagtctctactgtgctctgtgtatcagatgtaaagcttaaaacagtgtaagagtttttacagagtgtattcatatcacaccagttttg

SEQ ID NO: 228874 - DNA, 526 bp, Homo sapiens
ggggtcattatggaaaagggctgaagcataagaatgtaggcccaatactgagatagaaagaggattctctgagatgacttaggcagggtgatggtggtggaggtgggtgtaagaagccctctgctgcctcagtccgagcatggaattcaattggtcaagagcagagccaatcaccatttaggcccccttgttagccttaatttattcctcaggtatggagaakactcctcaagatgcattcagagtgtaagctccctcttcctcagcagaggactgccctgcaggtttgcagttctgtcatttggaaactccctgatgtgtcccttggctcttcccattcttttgcttcaacacattttaagactcaggcacccttaactgcagaaacagcatgaaaaacacgttggcttcaggaaaaattatgccaagtggagtctctactgtgctctgtgtatcagatgtaaagcttaaaacagtgtaagagtttttacagagtgtattcatatcacaccagttttgggtccat

SEQ ID NO: 228875 - DNA, 526 bp, Homo sapiens
ggggtcattatggaaaagggctgaagcataagaatgtaggcccaatactgagatagaaagaggattctctgagatgacttaggcagggtgatggtggtggaggtgggtgtaagaagccctctgctgcctcagtccgagcatggaattcaattggtcaagagcagagccaatcaccatttaggcccccttgttagccttaatttattcctcaggtatggagaatactcctcaagatgcattcagagtgyaagctccctcttcctcagcagaggactgccctgcaggtttgcagttctgtcatttggaaactccctgatgtgtcccttggctcttcccattcttttgcttcaacacattttaagactcaggcacccttaactgcagaaacagcatgaaaaacacgttggcttcaggaaaaattatgccaagtggagtctctactgtgctctgtgtatcagatgtaaagcttaaaacagtgtaagagtttttacagagtgtattcatatcacaccagttttgggtccat

SEQ ID NO: 228876 - DNA, 517 bp, Homo sapiens
ggtcattatggaaaagggctgaagcataagaatgtaggcccaatactgagatagaaagaggattctctgagatgacttaggcagggtgatggtggtggaggtgggtgtaagaagccctctgctgcctcagtccgagcatggaattcaattggtcaagagcagagccaatcaccatttaggcccccttgttagccttaatttattcctcaggtatggagaatactcctcaagatgcattcagagtgtaagctmcctcttcctcagcagaggactgccctgcaggtttgcagttctgtcatttggaaactccctgatgtgtcccttggctcttcccattcttttgcttcaacacattttaagactcaggcacccttaactgcagaaacagcatgaaaaacacgttggcttcaggaaaaattatgccaagtggagtctctactgtgctctgtgtatcagatgtaaagcttaaaacagtgtaagagtttttacagagtgtattcatatcacaccagttttg

SEQ ID NO: 228877 - DNA, 514 bp, Homo sapiens
cattatggaaaagggctgaagcataagaatgtaggcccaatactgagatagaaagaggattctctgagatgacttaggcagggtgatggtggtggaggtgggtgtaagaagccctctgctgcctcagtccgagcatggaattcaattggtcaagagcagagccaatcaccatttaggcccccttgttagccttaatttattcctcaggtatggagaatactcctcaagatgcattcagagtgtaagctccctcttcytcagcagaggactgccctgcaggtttgcagttctgtcatttggaaactccctgatgtgtcccttggctcttcccattcttttgcttcaacacattttaagactcaggcacccttaactgcagaaacagcatgaaaaacacgttggcttcaggaaaaattatgccaagtggagtctctactgtgctctgtgtatcagatgtaaagcttaaaacagtgtaagagtttttacagagtgtattcatatcacaccagttttg

SEQ ID NO: 228878 - DNA, 526 bp, Homo sapiens
ggggtcattatggaaaagggctgaagcataagaatgtaggcccaatactgagatagaaagaggattctctgagatgacttaggcagggtgatggtggtggaggtgggtgtaagaagccctctgctgcctcagtccgagcatggaattcaattggtcaagagcagagccaatcaccatttaggcccccttgttagccttaatttattcctcaggtatggagaatactcctcaagatgcattcagagtgtaagctccctcttcckcagcagaggactgccctgcaggtttgcagttctgtcatttggaaactccctgatgtgtcccttggctcttcccattcttttgcttcaacacattttaagactcaggcacccttaactgcagaaacagcatgaaaaacacgttggcttcaggaaaaattatgccaagtggagtctctactgtgctctgtgtatcagatgtaaagcttaaaacagtgtaagagtttttacagagtgtattcatatcacaccagttttgggtccat

SEQ ID NO: 228879 - DNA, 579 bp, Homo sapiens
cctttattgcttttatgtcaccacatctagaattaggtcttctgcttccaagaaagtcagctgcctcattaccatgtagcatagttagattccccatttcatctagaaaataaacatttattgagggctggccaagtgyggtggctcacgcctgtaatccccgcattttgggaggccaaggtggatggatcatttgaggtcaggagttcgagaccagcctggccaacatggtgaaaccctgtttctactaaaaatacaaaaattagccagaaatcccttgaacccaggagacggaggttgcagcgagccaagatcgcaccactgcactccagcctgggcggaagagagagattccgtctcaaaaaataaaataaataaataaataaattcacaaaaatatttattgagggcccacttggtttttagcactgaaataggagccgaacatagagcagtgaatgaataggccaagtccctgctcttcttggccttacattttgggggaggagacagattagtaattattaggagaattattagtaattattaggagaaagcaggaaatttctgctttcatgg

SEQ ID NO: 228880 - DNA, 631 bp, Homo sapiens
agtgctcatctggaggcctatgaaagtgttattgaaagtattttaaatcttagtatcttatatttatcatttatagggtatagtagattaagaaatacttcacgtattttgaaagattgggctggaaacatacccgaagaagcattctttttatctctcatgtacatgtggacattatacattttaattaagtgttattatatgagccaaattccctcctcatgggtgttagtaggagttgacctcgaaggagggaggatttggttgtggatttatgactcacatctgcgaaaggagtaagggcgaataagaacaggaaactctctgataagcaattttactatgttttcatttttatctgaaactctgtaatccaagactggggtaacttttcatattttttaaaaatacttttttataggctggagtgatcttgtgtaagcaaggataaatcatagaygttagagagacgtttgtctctgtgcttgttggtgcaaattccatgaaaaagagccaaggcagggggtgggggtggttgtcaggaaaccaagggatgagatgtttttctttttcaaagatgacacctatgatgccaactagtgagcatgggcgaacagagcggaaaggaatt

SEQ ID NO: 228881 - DNA, 385 bp, Homo sapiens
cctggctaaatttttttgttttttatttttagtaaagatgaaatcttactatgttgccyaggctgatctcaaactcctgggctcaagtgatagacccacctccatctcccaaagtgctgagattacagccaccgcgcccccggccaagatataaagtttaaggacacatatcaaacatactagagaggttgctgatgggatagggaggatgagtgtgagcatcacagacaagggaaaaagcaaaatgagacagcggctttgcccagatggacaatgaaaatgtgctatgagttaaagagcatgatttttaaaaggagagaaatcttttagtcattggtcttctctttgttctggcttaatgaatctgctgcaaaggcaaatagct

SEQ ID NO: 228882 - DNA, 385 bp, Homo sapiens
cctggctaaatttttttgttttttatttttagtaaagatgaaatcttactatgttgcctaggctgatctcaaactcctgggctcaagtgatagacccacctccatctcccaaagtgctgagattacagccaccgcgcccccggccaagatataaagtttaaggacacatrtcaaacatactagagaggttgctgatgggatagggaggatgagtgtgagcatcacagacaagggaaaaagcaaaatgagacagcggctttgcccagatggacaatgaaaatgtgctatgagttaaagagcatgatttttaaaaggagagaaatcttttagtcattggtcttctctttgttctggcttaatgaatctgctgcaaaggcaaatagct

SEQ ID NO: 228883 - DNA, 357 bp, Homo sapiens
caaaagcataacctttgatccttataagcacaaagcaattttgattttatcatgtcaacatgccttagaaaaatggtaaggtccaggggttttgtttctttgtttttttcttgttgtcattttgttttgttttcctttggtttgttagttttgaaggccttcactttttggtttgctgtttaaaattattttcttcyggagccaattttattaacccagtgaaatataatttcaaggacattgtgtcttacccacaccctccaaggtatgttttatataataaggcaatgttgttaaaatcaggataattttatttttaaaaaatgtatatatctagcatctctcaaaagaaaatcc

SEQ ID NO: 228884 - DNA, 357 bp, Homo sapiens
caaaagcataacctttgatccttataagcacaaagcaattttgattttatcatgtcaacatgccttagaaaaatggtaaggtccaggggttttgtttctttgtttttttcttgttgtcattttgttttgttttcctttggtttgttagttttgaaggccttcactttttggtttgctgtttaaaattattttcttccggagccaatttyattaacccagtgaaatataatttcaaggacattgtgtcttacccacaccctccaaggtatgttttatataataaggcaatgttgttaaaatcaggataattttatttttaaaaaatgtatatatctagcatctctcaaaagaaaatcc

SEQ ID NO: 228885 - DNA, 357 bp, Homo sapiens
caaaagcataacctttgatccttataagcacaaagcaattttgattttatcatgtcaacatgccttagaaaaatggtaaggtccaggggttttgtttctttgtttttttcttgttgtcattttgttttgttttcctttggtttgttagttttgaaggccttcactttttggtttgctgtttaaaattattttcttccggagccaattttattaacccagtgaaatataatttcaaggacattgtgtcttacccacaccctccaaggtatgttttatataataaggcaatgttgttaaaatcaggataattttatttttaaaaaaygtatatatctagcatctctcaaaagaaaatcc

SEQ ID NO: 228886 - DNA, 623 bp, Homo sapiens
actttaaagaaacagcagtttaaaaagacaaagagggacattatataatgaaaaaaggccttgtccaacaggaaagtatcacaatcctaaacatatgcacctaacactggagctcccaaatttataaaagaattactaatagacctaaaaaattagacagacagcaacacaataatagtgagggattttaatactccactgacagcactggacaggtcatcaagacagaaagtcaacaaagaaacagtggatttaaactataccttggaacaaatggagttaaaagatatatacagaatattccatscaacaaccacagaatatacgttctgttcaacagcacatgaactttctgtaagatagaccatatgatagccaacaaaatgagcctcaataaattttaagaaaattaaaattatatcaagcactttctcagaccacagtggaataaaactggaaatcaactccaaaaggaaccttcaaaaccatgcagatacatggaataacctgctcctggatgatctttgggtcaaagatgaaatcaagatggaaatgtaaaaattcctcaaactgaatgacaatagtgacacaacctatcaacctctgggatacagcaaaggtgg

SEQ ID NO: 228887 - DNA, 623 bp, Homo sapiens
actttaaagaaacagcagtttaaaaagacaaagagggacattatataatgaaaaaaggccttgtccaacaggaaagtatcacaatcctaaacatatgcacctaacactggagctcccaaatttataaaagaattactaatagacctaaaaaattagacagacagcaacacaataatagtgagggattttaatactccactgacagcactggacaggtcatcaagacagaaagtcaacaaagaaacagtggatttaaactataccttggaacaaatggagttaaaagatatatacagaatattccatccaacaaccacagaatatacgttctgttcaacagcacatgaactttctgtaagatagaccatatgatagccaacaaaatgagcctcaataaattttaagaaaattaaaattatatcaagcactttctcagaccacagtggaataaaactggaaatcaactccaaaaggaaccttcaaaaccatgcagatacatggaataacctgctcctgratgatctttgggtcaaagatgaaatcaagatggaaatgtaaaaattcctcaaactgaatgacaatagtgacacaacctatcaacctctgggatacagcaaaggtgg

SEQ ID NO: 228888 - DNA, 623 bp, Homo sapiens
actttaaagaaacagcagtttaaaaagacaaagagggacattatataatgaaaaaaggccttgtccaacaggaaagtatcacaatcctaaacatatgcacctaacactggagctcccaaatttataaaagaattactaatagacctaaaaaattagacagacagcaacacaataatagtgagggattttaatactccactgacagcactggacaggtcatcaagacagaaagtcaacaaagaaacagtggatttaaactataccttggaacaaatggagttaaaagatatatacagaatattccatccaacaaccacagaatatacgttctgttcaacagcacatgaactttctgtaagatagaccatatgatagccaacaaaatgagcctcaataaattttaagaaaattaaaattatatcaagcactttctcagaccacagtggaataaaactggaaatcaactccaaaaggaaccttcaaaaccatgcagatacatggaataacctgctcctggatgatcwttgggtcaaagatgaaatcaagatggaaatgtaaaaattcctcaaactgaatgacaatagtgacacaacctatcaacctctgggatacagcaaaggtgg

SEQ ID NO: 228889 - DNA, 513 bp, Homo sapiens
gtgctgggacatttgagccttttctgaaaatttgagtcagggagagcatcttgrggaggtgggaaggaaggtagaaggagcaaagcaacacccccctgaagcctgggaatattgtcagaaccttaaatataattcagctcaccattctgggtaaggacagactctaccaatgaaaatgggtgattaccagctgtgaaacacaaaaacatacttttacggttacacattcctttacaaacaaccgtgtacatttcagcctcctgccccaccatttcttttctccaggcgggaaggctgcatgttgaggtggtcatagaatgttgagtatcatactttcctacctcgcttttatttgcgcgggtttaaatgcgccttaacagaacccgtgcaaaggcttgccaactgtctggctgcaccggatgagtagagcatcttccttggtggcaggtgggtgcgaggaggagggggctgggcttttctccggacgggtgtttgcccagaagaccatcatcc

SEQ ID NO: 228890 - DNA, 513 bp, Homo sapiens
gtgctgggacatttgagccttttctgaaaatttgagtcagggagagcatcttgaggaggtgggaaggaaggtagaaggagcaaagcaacacccccctgaagcctgggaatattgtcagaaccttaaatataattcagctcaccattctgggtaaggacagactctaccaatgaaaatgggtgattaccagctgtgaaacacaaaaacatacttttacggttacacattcctttacaaacaaccgtgtacatttcagcctcctgccccaccatttcttttctccaggmgggaaggctgcatgttgaggtggtcatagaatgttgagtatcatactttcctacctcgcttttatttgcgcgggtttaaatgcgccttaacagaacccgtgcaaaggcttgccaactgtctggctgcaccggatgagtagagcatcttccttggtggcaggtgggtgcgaggaggagggggctgggcttttctccggacgggtgtttgcccagaagaccatcatcc

SEQ ID NO: 228891 - DNA, 513 bp, Homo sapiens
gtgctgggacatttgagccttttctgaaaatttgagtcagggagagcatcttgaggaggtgggaaggaaggtagaaggagcaaagcaacacccccctgaagcctgggaatattgtcagaaccttaaatataattcagctcaccattctgggtaaggacagactctaccaatgaaaatgggtgattaccagctgtgaaacacaaaaacatacttttacggttacacattcctttacaaacaaccgtgtacatttcagcctcctgccccaccatttcttttctccaggcgggaaggctgcatgtygaggtggtcatagaatgttgagtatcatactttcctacctcgcttttatttgcgcgggtttaaatgcgccttaacagaacccgtgcaaaggcttgccaactgtctggctgcaccggatgagtagagcatcttccttggtggcaggtgggtgcgaggaggagggggctgggcttttctccggacgggtgtttgcccagaagaccatcatcc

SEQ ID NO: 228892 - DNA, 513 bp, Homo sapiens
gtgctgggacatttgagccttttctgaaaatttgagtcagggagagcatcttgaggaggtgggaaggaaggtagaaggagcaaagcaacacccccctgaagcctgggaatattgtcagaaccttaaatataattcagctcaccattctgggtaaggacagactctaccaatgaaaatgggtgattaccagctgtgaaacacaaaaacatacttttacggttacacattcctttacaaacaaccgtgtacatttcagcctcctgccccaccatttcttttctccaggcgggaaggctgcatgttgaggtggtcatagaatgttgagtatcatactttcctacctcgcttttatttgcgcgggtttaaatgcgccttaacagaacccgtgcaaaggcttgccaactgtctggctgcaccggatgagtagagcatcttccttggtggcaggtgggtgcgaggaggaggggsctgggcttttctccggacgggtgtttgcccagaagaccatcatcc

SEQ ID NO: 228893 - DNA, 583 bp, Homo sapiens
gttagattcaggttcaacttctttttttaaagactatttcataggcaataatgtgtattcacatcccatcattagtgatggtgagatgatcgcaaggttagggcgatcactgcctatctcctctgttatattcccccttgggtcaagccagtagtctgtgacgtgaactttgtaccatgtgtatattcagttatattctgtatcaatatttacttgattgttttagcatttattaatgatccttgcttgagttgattatttcattaggggtttcaaaatggtgaatttctaattctctaattctatmtacatgttttagctggcatttttctataagcagaccattttcttcacaactgggttatttggctaccctgaaacatagttccttccgggaaggcagaacatatgtttatttctgtcttttaaaaattactggtgtttggagtgaagatttggtgagttaactacctccacaggtgacaaatgaattttgttttgtctcacttttgcttttttgaatatcactgtggatgcttggatttttatatttaatttgaatggattagggaataaatgagaa

SEQ ID NO: 228894 - DNA, 583 bp, Homo sapiens
gttagattcaggttcaacttctttttttaaagactatttcataggcaataatgtgtattcacatcccatcattagtgatggtgagatgatcgcaaggttagggcgatcactgcctatctcctctgttatattcccccttgggtcaagccagtagtctgtgacgtgaactttgtaccatgtgtatattcagttatattctgtatcaatatttacttgattgttttagcatttattaatgatccttgcttgagttgattatttcattaggggtttcaaaatggtgaatttctaattctctaattctatatacatgttttagctggcatttttctataagcagaccattttcttcacaactgggttatttggctaccctgaaacatagttccttccgggaaggcagaacatatgtttatttctgtcttttaaaaattactggtgtttggagtgaagattwggtgagttaactacctccacaggtgacaaatgaattttgttttgtctcacttttgcttttttgaatatcactgtggatgcttggatttttatatttaatttgaatggattagggaataaatgagaa

SEQ ID NO: 228895 - DNA, 583 bp, Homo sapiens
gttagattcaggttcaacttctttttttaaagactatttcataggcaataatgtgtattcacatcccatcattagtgatggtgagatgatcgcaaggttagggcgatcactgcctatctcctctgttatattcccccttgggtcaagccagtagtctgtgacgtgaactttgtaccatgtgtatattcagttatattctgtatcaatatttacttgattgttttagcatttattaatgatccttgcttgagttgattatttcattaggggtttcaaaatggtgaatttctaattctctaattctatatacatgttttagctggcatttttctataagcagaccattttcttcacaactgggttatttggctaccctgaaacatagttccttccgggaaggcagaacatatgtttatttctgtcttttaaaaattactggtgtttggagtgaagatttggtgagttaactacctccacaggtgacaaatgaattttgttttgtctcacttttgcttttttgaatatcactgtggmtgcttggatttttatatttaatttgaatggattagggaataaatgagaa

SEQ ID NO: 228896 - DNA, 613 bp, Homo sapiens
agagttttacaacaaatatttaatrtctatgacatgtaaaaaggttttccaaatcaagaaaattcaaacaattcaatacaaatatcatcaataataacacatgaacaggtggccaaccttattaataaccagagaaatataaattaaaacaatccatcaacttgtaaaaaagatgaaattacccagagttggtgtaggtgatggaaaattgtcatgtttgtatactgttcatagaagttaaattgacataactttttggtcaggcaatttggaagtatatatctaaattaatagagtagttttctaataacctgggaatctcttaatctaagaatctttactgtagatttttctagaacaaatgtacaaacatctatgtacaagggtactcactgcagcattttgctaaggaaaaactcagaaaaaatctatatgttcaacagagaacaggtacataatttatgacacaactgcacaatatacaccactaaaataaaggatataaatttatatgtagtatgaaaaagatgtgaatgatagcttgttggtgaaaaacagcaatgactggaatattgtgtgtaacgtaatcctgcttttctgtatataatgtagg

SEQ ID NO: 228897 - DNA, 613 bp, Homo sapiens
agagttttacaacaaatatttaatatctatgacatgtaaaaaggttttccaaatcaagaaaattcaaacaattcaatacaaatatcatcaatamtaacacatgaacaggtggccaaccttattaataaccagagaaatataaattaaaacaatccatcaacttgtaaaaaagatgaaattacccagagttggtgtaggtgatggaaaattgtcatgtttgtatactgttcatagaagttaaattgacataactttttggtcaggcaatttggaagtatatatctaaattaatagagtagttttctaataacctgggaatctcttaatctaagaatctttactgtagatttttctagaacaaatgtacaaacatctatgtacaagggtactcactgcagcattttgctaaggaaaaactcagaaaaaatctatatgttcaacagagaacaggtacataatttatgacacaactgcacaatatacaccactaaaataaaggatataaatttatatgtagtatgaaaaagatgtgaatgatagcttgttggtgaaaaacagcaatgactggaatattgtgtgtaacgtaatcctgcttttctgtatataatgtagg

SEQ ID NO: 228898 - DNA, 613 bp, Homo sapiens
agagttttacaacaaatatttaatatctatgacatgtaaaaaggttttccaaatcaagaaaattcaaacaattcaatacaaatatcatcaataataacacatgaacaggtggccaaccttattaataaccagagaaatayaaattaaaacaatccatcaacttgtaaaaaagatgaaattacccagagttggtgtaggtgatggaaaattgtcatgtttgtatactgttcatagaagttaaattgacataactttttggtcaggcaatttggaagtatatatctaaattaatagagtagttttctaataacctgggaatctcttaatctaagaatctttactgtagatttttctagaacaaatgtacaaacatctatgtacaagggtactcactgcagcattttgctaaggaaaaactcagaaaaaatctatatgttcaacagagaacaggtacataatttatgacacaactgcacaatatacaccactaaaataaaggatataaatttatatgtagtatgaaaaagatgtgaatgatagcttgttggtgaaaaacagcaatgactggaatattgtgtgtaacgtaatcctgcttttctgtatataatgtagg

SEQ ID NO: 228899 - DNA, 584 bp, Homo sapiens
agttaaatagctaggatgtttccaacatctcacctttaaaacaatagtgctatgaatgtcataaatgtttgtatatgtaaatatgtgggataaatccctatcagtagaatttcaaaaggtatacgcaatcagtattttcatacatatttaaaattttccatccatacaaaggttgctaacatatttatttaaaattttaaaaataattttatatgcctcttgtaaccagtaataggatgcmaagtttttttttaaggtaacattgctcctcttcccccattgtctctgtcatctatagtactccctgaggtagttcatgttattgcaagggtgtgtatcatcacaaacatattgcttccacatacatatatcagcatacatatatatatatatatatgtatagcatatatatatatgagcacatattaatatatgcccatgcacatacaagcatgtttttgttaatttttactgaaatggaatcatactacatacttatgaacaaattgcttctttcaccttatatcacttataattgttattctacaaatcagtacatataaaaaatacatatttacatatgt

SEQ ID NO: 228900 - DNA, 422 bp, Homo sapiens
gcgagaacacacttatcgtcaagggcatggtgctaraccattcatgagggactcgcccccatgatccaaacacctctcactgggccccaccgctaacactgaggattacatttcaatatgagatttggaggagacaaacatctaaaccatatcagccacttggctcatgagcccattggacaatgacaggaatggctgggggaaagccactcattgacatccacagaactggtcatcctattattaaaatcctcctctgcctaggtcaccattttgtgagtgtccataagggacacacatatcttcacaattttccatgtcttaccttagaagccccatcaccctctctttcacatctcctccagtacttatcccccagatgataggaccatgtccagcaatacctcttctctctggtattg

SEQ ID NO: 228901 - DNA, 391 bp, Homo sapiens
gcgagaacacacttatcgtcaagggcatggtgctagaccattcatgagggactcgcccccatgayccaaacacctctcactgggccccaccgctaacactgaggattacatttcaatatgagatttggaggagacaaacatctaaaccatatcagccacttggctcatgagcccattggacaatgacaggaatggctgggggaaagccactcattgacatccacagaactggtcatcctattattaaaatcctcctctgcctaggtcaccattttgtgagtgtccataagggacacacatatcttcacaattttccatgtcttaccttagaagccccatcaccctctctttcacatctcctccagtacttatcccccagatgataggacca

SEQ ID NO: 228902 - DNA, 422 bp, Homo sapiens
gcgagaacacacttatcgtcaagggcatggtgctagaccattcatgagggactcgcccccatgatccaaacacctctcactgggccccaccgctaacactgargattacatttcaatatgagatttggaggagacaaacatctaaaccatatcagccacttggctcatgagcccattggacaatgacaggaatggctgggggaaagccactcattgacatccacagaactggtcatcctattattaaaatcctcctctgcctaggtcaccattttgtgagtgtccataagggacacacatatcttcacaattttccatgtcttaccttagaagccccatcaccctctctttcacatctcctccagtacttatcccccagatgataggaccatgtccagcaatacctcttctctctggtattg

SEQ ID NO: 228903 - DNA, 317 bp, Homo sapiens
tctcactgggccccaccgctaacactgaggrttacatttcaatatgagatttggaggagacaaacatctaaaccatatcagccacttggctcatgagcccattggacaatgacaggaatggctgggggaaagccactcattgacatccacagaactggtcatcctattattaaaatcctcctctgcctaggtcaccattttgtgagtgtccataagggacacacatatcttcacaattttccatgtcttaccttagaagccccatcaccctctctttcacatctcctccagtacttatcccccagatgataggacca

SEQ ID NO: 228904 - DNA, 436 bp, Homo sapiens
gcgagaacacacttatcgtcaagggcatggtgctagaccattcatgagggactcgcccccatgatccaaacacctctcactgggccccaccgctaacactgaggattacatttcaatatgagatttggaggagacaaacatctaaamcatatcagccacttggctcatgagcccattggacaatgacaggaatggctgggggaaagccactcattgacatccacagaactggtcatcctattattaaaatcctcctctgcctaggtcaccattttgtgagtgtccataagggacacacatatcttcacaattttccatgtcttaccttagaagccccatcaccctctctttcacatctcctccagtacttatcccccagatgataggaccatgtccagcaatacctcttctctctggtattgatgggttaatgagc

SEQ ID NO: 228905 - DNA, 391 bp, Homo sapiens
gcgagaacacacttatcgtcaagggcatggtgctagaccattcatgagggactcgcccccatgatccaaacacctctcactgggccccaccgctaacactgaggattacatttcaatatgagatttggaggagacaaacatctaaaccatatcagccacttggctcatgagcccattggacaatgacaggaatggctgggggaaagccactcattgacatccacagaactggtcatcctrttattaaaatcctcctctgcctaggtcaccattttgtgagtgtccataagggacacacatatcttcacaattttccatgtcttaccttagaagccccatcaccctctctttcacatctcctccagtacttatcccccagatgataggacca

SEQ ID NO: 228906 - DNA, 430 bp, Homo sapiens
atgtaaactcagagcgagaacacacttatcgtcaagggcatggtgctagaccattcatgagggactcgcccccatgatccaaacacctctcactgggccccaccgctaacactgaggattacatttcaatatgagatttggaggagacaaacatctaaaccatatcagccacttggctcatgagcccattggacaatgacaggaatggctgggggaaagccactcattgacatccacagaactggtcatcctattattaaaatcctcctctgcctaggtcaccatttkgtgagtgtccataagggacacacatatcttcacaattttccatgtcttaccttagaagccccatcaccctctctttcacatctcctccagtacttatcccccagatgataggaccatgtccagcaatacctcttctctctgg

SEQ ID NO: 228907 - DNA, 436 bp, Homo sapiens
gcgagaacacacttatcgtcaagggcatggtgctagaccattcatgagggactcgcccccatgatccaaacacctctcactgggccccaccgctaacactgaggattacatttcaatatgagatttggaggagacaaacatctaaaccatatcagccacttggctcatgagcccattggacaatgacaggaatggctgggggaaagccactcattgacatccacagaactggtcatcctattattaaaatcctcctctgcctaggtcaccattttgtgagtgtccataagggacacamatatcttcacaattttccatgtcttaccttagaagccccatcaccctctctttcacatctcctccagtacttatcccccagatgataggaccatgtccagcaatacctcttctctctggtattgatgggttaatgagc

SEQ ID NO: 228908 - DNA, 566 bp, Homo sapiens
tttttgtggactgctatcccagtctstcaccactatacaatcttcataattttccctttaaatggctgagagaaaattttgaacaaaagctacaaacatttttcagattcttgattctccagacttattacttgagggcagtgactaaattatattcagttctatatcagaaggttcttccatattgccagtttcatggtagatactcaataaaataagttgaatgactacataaattttagcaagagcatatggaaaataatttatcatgactttgggtaatactataggtgtaattattgtcctttctctttcctgacttgattaatagcaccactatccattaagttattaaaggtagaaagctgagattattcttgactccttttctcactggtccagtattagttatttattgcagtgtaagaaattaccatgaaacttagtggcttagttggggcttgatgggggctggaggatccactgcaagatggctcagtcacttggctggcaaggtggtgctggctgttagcctcccatctgatcctcctctttccgctcctgcc

SEQ ID NO: 228909 - DNA, 566 bp, Homo sapiens
tttttgtggactgctatcccagtctgtcaccactatacaatcttcataattttccctttaaatggctgagagaaaattttgaacaaaagctacaaacatttttcagattcttgattctccagacttattacttgagggcagtgactaaattatattcagttctatatcagaaggttcttccatattgccrgtttcatggtagatactcaataaaataagttgaatgactacataaattttagcaagagcatatggaaaataatttatcatgactttgggtaatactataggtgtaattattgtcctttctctttcctgacttgattaatagcaccactatccattaagttattaaaggtagaaagctgagattattcttgactccttttctcactggtccagtattagttatttattgcagtgtaagaaattaccatgaaacttagtggcttagttggggcttgatgggggctggaggatccactgcaagatggctcagtcacttggctggcaaggtggtgctggctgttagcctcccatctgatcctcctctttccgctcctgcc

SEQ ID NO: 228910 - DNA, 566 bp, Homo sapiens
tttttgtggactgctatcccagtctgtcaccactatacaatcttcataattttccctttaaatggctgagagaaaattttgaacaaaagctacaaacatttttcagattcttgattctccagacttattacttgagggcagtgactaaattatattcagttctatatcagaaggttcttccatattgccagtttcatggtagatactcaataaaatragttgaatgactacataaattttagcaagagcatatggaaaataatttatcatgactttgggtaatactataggtgtaattattgtcctttctctttcctgacttgattaatagcaccactatccattaagttattaaaggtagaaagctgagattattcttgactccttttctcactggtccagtattagttatttattgcagtgtaagaaattaccatgaaacttagtggcttagttggggcttgatgggggctggaggatccactgcaagatggctcagtcacttggctggcaaggtggtgctggctgttagcctcccatctgatcctcctctttccgctcctgcc

SEQ ID NO: 228911 - DNA, 516 bp, Homo sapiens
accaactatttgttaggactgagttcctcattcctacacatccctgaccctgacacagggcttggcacatggaggtcactctgcatgcatcaactgmccccccgtcccctgggcccaaagatgccaggtctgtgggctgggccttgccaagcttccctgagggctgcagctccaaacgtggcaaagggcccctctccttggaaagggctgagctcctgcaggaggaaggaaatttggccttgaatctgtgccaggcagccaggcctggatggggtgggggaaagtccggagaaacaagcacttggttttcttagtagaactgtggtctcaggaggacctgaacccctggaaggctgacctgacccaagctgggatgaggtcgccctgcaattaccacctcttccgtggccaacaggacttctccctgctgagtcccaaaacctgctgccccacccccccatgcccagcctcggtgcctcggccacactcttgcactcttgcgtccctccttggttg

SEQ ID NO: 228912 - DNA, 547 bp, Homo sapiens
ttgaaccagcccccagttccctgggagaatgtctcagatccctaggcaaaggcacaaagatctggtgtgtttactgctgtaagagacagccccaaacctcggcagtttctcccaacatagaaacccacagagcgatgctgtgatccaggtcctgcctgctccatggtaccacccttctctggttcagcagacagagagggagagagcgtgaggaccacacatgaggggttttatggctgaccagaagcagaacacagcacttcctctcacctcccattgaccagactccagtacacacaggaccgcctgagaaacatgtgcaccgggggaagagagcgtggttggaacaccagccatctctcatgcaatatttatctaaattctaaaataattgagcattgaatccaactggaactccctgtaggtgaggggttaaagacatttaatggtgtcaccrggcatttgtccattattcacttactcaagaaacatttattagggcatcatgttatttgaaatataatgcctaaaatatcaaaactaatga

SEQ ID NO: 228913 - DNA, 480 bp, Homo sapiens
ctcacaatatactctacgctttctgaggggagacmctgtgtctactcagcatttgccctggtgctgggcacatagccggtgctcaaatgcttgtggaacacatggattaaagttcactcagacacagttagtgccagagcccctcccacaggtctcactaagcatgacattacacttacacatcataaaggtctttttgtgagaagagatggacacaatgactacacaaaagtttaaaacacataaacgaaaattaaaagagagttcacggcctagaagaaaatatttgcaaagtcaacacaagattaaatccttaatatttaaagaattcctacaaatcaatattaaaagatgcatagcacaatagataaataacaagattatgctgaacacatggaaagggttctttgataactgtttgaccaactctgcattttgttgaaggcctgaatgtttagcttacaaaataaaataacgtgg

SEQ ID NO: 228914 - DNA, 526 bp, Homo sapiens
cagcacttgcatgaccaaatggcctcatgcagtttttgaattattatgactattttactccaaaaagggatatttctcagttttccatataagagagtcatatgagcagaaaagcagatttagcaaacttttttttgtaaagggacagataggaattgtttcggcttcacagaccacacaatctctgttgcaacaactcacccctgccattgacagcagtgaaaagcagccatggataatawggaaatcagtgaatgcagctatgtctcaataaaactctattcatagaaatggggggtggacattaaaagaaaaattaataccaatctttctcaaactcatctaaaaaaatagaaaaggggtgaacacttcctaactcattctatgaggccagcaaggccctagtatccagaatatataaagaactctttcaactaaacaacaaaaagacaacccaaataaaatagggcaaagacttgaatagatatttcttcaaagaaaatgtaaaaatgaccaacaagcacat

SEQ ID NO: 228915 - DNA, 526 bp, Homo sapiens
cagcacttgcatgaccaaatggcctcatgcagtttttgaattattatgactattttactccaaaaagggatatttctcagttttccatataagagagtcatatgagcagaaaagcagatttagcaaacttttttttgtaaagggacagataggaattgtttcggcttcacagaccacacaatctctgttgcaacaactcacccctgccattgacagcagtgaaaagcagccatggataatatggaaatcagtgaatgcagctatgtctcaataaaactctattcatagaaatggggggtggacattaaaagaaaaattaataccaatctttctcaaactcatctaaaaaaatagaaaaggggtgaacacttcctaactcattctatgaggccagcaaggscctagtatccagaatatataaagaactctttcaactaaacaacaaaaagacaacccaaataaaatagggcaaagacttgaatagatatttcttcaaagaaaatgtaaaaatgaccaacaagcacat

SEQ ID NO: 228916 - DNA, 575 bp, Homo sapiens
acagtttagttacatggatatgttgtgtagtggtgaagtctgggcttttagtgtaaccatcacccaaatagtgtacatttaccaaggttttcttgttgctcagaatctcgtacaggaatatgcttctgaagaattcagtcacaccactccctttctgccaccatctgctcaatgctggggacactgatgagggcgctttccaggtcttcagagatgcatggtggtgacagaggcagcacttctgccaagggccaggcactgtgttcccagtaccagagttcccatagactcttaatgcccccaatatctttaaggcagtagatcctgttagcgtcatgtgttagagggtgaaggctgtgctttctcctggtggtggcactttggtttaccttggtcttggcagaatctggagagctgatttacctctggctcttggtctttcccctccgagcttcttcctgccatcttagggagggctaggatgatggagacttttcattgtttcagtatcccccrtgggataacaagttaattaataatataacaaatgttgatgaatagatgctgtgtttaca

SEQ ID NO: 228917 - DNA, 602 bp, Homo sapiens
aaatttaatacattctcaaattcttttaggaacagggtggaaatattcataagtaaattaataaaatatgaaaaaaaaacctgagaaaataagccagatatgtttatgctagaaactttctggaggttttaagaatttatctagacagagaggtggcaggagggagagcgctggaaaaatagctaatgcatgctgagcttaatatctaggtgataggttgataggtgcagcaaatcaccatggcacgtgtttacctatgtaacaaacctgcacatcctgcacatgtaccctggaacttaaaataaaacaaaataaaataataattgaaaaacatttgacatatctgataggcttccccaaatcaaatttcagcttcaaaattrtctttgctggcctgtaactttggggggctacagaaggcccctgaagcatccaaaagaggtaaacagggctatttgacttgttaagttacttgggaaggattgtcaaaataaaagataatatttaaccttcttcaggttatattttagtgtatgtcatcagtatgttccaaaaatatatgggatttctaaaattctactatgtctgagtatatgctcata

SEQ ID NO: 228918 - DNA, 559 bp, Homo sapiens
accaaacagcttcccatatgatattctccaaaaaggagtatttctatcatatcattctctaacaaagaatggatatagtctaacttttttcccatataagtggaaaaatgatatttactattttcatattaatttcattattatgagtgagtttgagctccttcgtttatwaactatgtttttttgatttctttttctctgcactgtgtttttagactctttatgcatttttctcttattggattgtccaactttttcttcttgtaaagagagagctttacattaattttctgttttccatggtatgctgtaaatttttaaatcatggttgatcatgtgctttatacacacacacacacacacacacacacacacacacacacacacacaaagtttctggtcttatatttggtgatagtggttatggccactatgactacatatatatatatatatatatatataaatatatatgtaaaaatatatatatgtaaaatatatatgtgtattatatatatatgtttacacccccatatgacatttcttttttatagttgag

SEQ ID NO: 228919 - DNA, 541 bp, Homo sapiens
tatggaatctcaagggactctgaatagccaaaacaatctttcaaaaaggggtgaagttgaaggcctcatacttcctgattttgaaacttactgcaaagatacagtaatcaaaacagtatggtactggcataaagacatacacatcaaccaatggaatagaatagaggtcttagaaatacagttacgtggctgggcctggtgcctcacacctgtaatcccagcactttgggaggctgaggtgggggggatcacctgaaatcaggagttcaagacaagcctggccaacatggcaaaacccygtctttactaagaatacaaaaattagttgggcgtgatggcatgtgcctgtaatcgcagctactcaggaggctgaggcaggacaatcacttgaacctgggaggcagaggttgcagtgagctgagatctcatgactgcactccagcctgggcaacagagtgagactctgtctcaaaaaggtaagaaagaaaaaaagaaagaaagagagagagagagagagagaaagaaagaaagagatacagtt

SEQ ID NO: 228920 - DNA, 609 bp, Homo sapiens
atttttacaacactccagtgccgtgtcatttctgattaacttgggaatctgattgtgtgggaagctagggaaacaccttcccctcaatggatatgaatatgagtatgaatatggatggcagttgttttatcactttagaaacagcaccatatttcgagcagttctttcatacttgctaactccatttgctcatccrgtcaacatttatgtggttgtatgggtttgagacaccaggaagaataagacgagatgactgccttagttcagtgggagctgggtaaggatggggatagagacaagcacaataaaaatgttagcacaatgtggtaagtactggactacagacaatggcagagtattatgaaatgtggcacatgtgattgcttttaagaaaattgttttcctcattgatgcacattgaattgcttgtgaattctggtatctggccactgtgatcaggtataatcattagaatcacattatttacttttactggcttgggcatacatgtacacatgagctggtacacacacatacacacacactgtattaatccattttcacactgctgataaagacatacttgagactaggcaatttacaaaagaa

SEQ ID NO: 228921 - DNA, 576 bp, Homo sapiens
gttttcctcattgatgcacattgaattgcttgtgaattctggtatctggccactgtgatcaggtataatcattagaatcacattatttacttttactggcttgggcatacatgtacacatgagctggtacacacacatacacacacactgtattaatccattttcacactgctgataaagacatacttgagactaggcaatttacaaaagaaaggtttattggacttacagttccacgtggctgaggaggcctcacaatcgtggtggaaggtgaaaggcacgtctcacatggtggcagacaagagaagagagaagcttgttcaggggaactcctgtttttaaaaccattagatctcatragacttactcactatcatgagaacagcatgggaaagacttgcccccatgattcaattacctccccctgggtccctcccacaacacatgggaattcaagatgagatttgggtggggacacagccaaagaatatcacacacatatccactagtacagagagagaacagtagaaaagtcatgtgtgcagaagaaaggacagaaagaagagctgcaattaa

SEQ ID NO: 228922 - DNA, 576 bp, Homo sapiens
gttttcctcattgatgcacattgaattgcttgtgaattctggtatctggccactgtgatcaggtataatcattagaatcacattatttacttttactggcttgggcatacatgtacacatgagctggtacacacacatacacacacactgtattaatccattttcacactgctgataaagacatacttgagactaggcaatttacaaaagaaaggtttattggacttacagttccacgtggctgaggaggcctcacaatcgtggtggaaggtgaaaggcacgtctcacatggtggcagacaagagaagagagaagcttgttcaggggaactcctgtttttaaaaccattagatctcatgagacttactcactatcatgagaacagcatgggaaagacttgccccsatgattcaattacctccccctgggtccctcccacaacacatgggaattcaagatgagatttgggtggggacacagccaaagaatatcacacacatatccactagtacagagagagaacagtagaaaagtcatgtgtgcagaagaaaggacagaaagaagagctgcaattaa

SEQ ID NO: 228923 - DNA, 546 bp, Homo sapiens
taagaacccctttaaaaccagagatctcattctctcatagttaaacacctgtaggtggagccccaggttccttgytgatgtaactggaaaacagaatcaatgacagcagaaccatcaatactgatatggtttggctctgtgtccccacccaaatctcatctcaaattgggagggacagacctccagggagggaactggtgagaagtgattgatcatggggttggtttcctccatgctgttctcatgatagtgagggagttctcatgagatctgatggtttaaaagtggcagtttccccgagctctctctctcctgctgtcttgtgaagaagggacctgcttccccttctccttccaccatgattgtaagtttcctgaggcctcctcagccatgcagaactgtgagctaattaaccctcttttgcttataaattacccagtttcaggtagtatctttatagcagtgtgaaaacggactaatacaaatacaatcatctacaagtcacctgcacactgctggaatttcagaaaccccagggcagtgcat

SEQ ID NO: 228924 - DNA, 634 bp, Homo sapiens
atcccaaactttttccttacacacagctgaaatacaaggctgtgctgctggagtcctcacacaggagccaagcccatgacctgttgyctttctatcaaaacaacttgacctcacagttctaggctggccctcatgtctgtgtggggcagcagccaccactttaatacttctagaggccctcaaaatcacaagctatgctccacttaccctctacagttctcacaatcttcaagcattaatatccttctcatacctttcacatttattgtctgcccctcaactcctccagctctattcactctttgttaaaactccaacagtaactattacccatgggcctgatttcagcccagcttctcacttagcacccaacacaagtcctgaatcacatgactgtatttctttaatacacatagcatcttccccttttcctcatatttctactcttccaattccaaacacagaccacacttagttaatctatggcaattcttctaaactcaatcaattttcaccagctaaagctggatatgctgtcatgtcccatacctctattatcgaagctgctgcacttcctccctccactacttcccaacaagccgaactgattgctttaactcatgtgctctctctc

SEQ ID NO: 228925 - DNA, 463 bp, Homo sapiens
ctggtatccaaatcgaggcttttctcactgtttcaacggactcaagatagtgtttgrtctgttatggatatgcctacgtaacagtttcccacaattcttctataggtgtccttcgctattggagcctcagaaaaccccttttaaagccacatctctctcccgcttagcattgtgaatgcttcctgaaagagtctattctctcagcagctggtgatatttgatttgactaacaccctgggacctatcaccagacttaaagatgatgcctaattaactgcttacattaaagagctggcactttctgcatttggttcacacttccagcctcaatcatgttttcgttacagtaataatatttacatgattagcaaatagtcaattcatactctggtgtggacctaagctgtgtttgggacttcccaaagcagatgtccttgacaggtgtaaagatataggctttttt

SEQ ID NO: 228926 - DNA, 561 bp, Homo sapiens
ttgcaagcatctgtctcatgtttcactaactatgtgttttagaattttaagttaawttagtttgacaaacatgtgttaaggctttattacgtaacaggtgccaagatacctgccagcctaggatgctaaattcattgtaggtgctggggctgcacaagatggagctcttctggggtttacaaattagcagctgacaataccatgaccaaaaacctgcaatacaaagctgacttgataaaggcctatcatggacttgtgaggtgctaaaggagcatgaggatggataagataataatagctgagaggtttggaaaagtgtcagggaacagacaaaattgaaattgcgccttagaaactggggaagatgtcaaaaggacaggaagaggagcagtatctgaagtaggggctttggagcaaaggcacagaggtgggacaggacctgcaaagaatgcacaggaaaagaagagactgttggaaaagaaggaaggaagcactgggcattacccaccacaatgtggaaccaactttcacaaaggaaatgtttgataattattagaattc

SEQ ID NO: 228927 - DNA, 380 bp, Homo sapiens
acatttcgctcctaacatcctccctcaaaataaagcacatgcttaaaaraaaaaatcacctaagcagactttttccaagaagcacatatagtactttttattcaaggcaacatgcagacctgttaaacattttttttttaatttttttaagtttgcagtcttctctgaagacttcaataaagcaaagggagctcatatgcctcacccagtctgcctgacttaaagtagtgtgaggcaagaatcatccacatgtagagttaaacaatgaaattttccaagtatatacatgctgtgagaatcaataacctcttctcaaaccagcaaattggtttcaagtattcggttcactggttacatccaacagccacaataagaggcca

SEQ ID NO: 228928 - DNA, 636 bp, Homo sapiens
ggcaggagatggggagattgaatgtgaatcatttgtgggttcatgagacaatttctcttcctccttttttcatgtgacaaatccatcagtttagttgaatagtaaagaaggaaggagaaacaaggttaaagacaaggatggagttcagtttgtggcctttcgcatgggtagtaattctctgcctcatttagtagaggcaagaaaggtactctgttaagaattataaatttaaatattttgagctataattaatacacattaacttatttatttaaaagctaataactcattaggtttaaaataatcctctaatcactaataaattcaatttaaatattaagatctattattaataaaacaaatatggtgaccaaattagcataggataaatatcatggactcttgtcgtccttaattaacttggtcaaataatttcattctctgggctctatttcagcatctctagcatggaaataatgtaggttatatcacattcgattatagtgaagattaaattaaataatgtacataaaatgcttagcacagtatctaataaatgctctatawgtataaactattagcataaagtaacttttaaacagataaattatgtatgtatatgtatgcttaataaat

SEQ ID NO: 228929 - DNA, 539 bp, Homo sapiens
aagaactattatctgaaatatacaaaaaactcttaaaactcaaccataagaaaataaacaacctaactaaaaaattgtctagagaggtagagcaagatctacaaatagaaggctccaccaattgacctctaaaggaacacaaaatttaacaacaatctccacaaaaaaagcaccttcataagaacaaaatcaggtgagcaatcacagtacctggcttgaacttcatatcattgaaagaggcactgaagaggataggaaagacagtcttgaactgccaatgccacccctcccacaccccctggcagcagccgtgtagcacaaaaagagaatatgtgtgttggaggagggagagcacagtaatttagggaatttacattggaattcagtgctgccctgttacagtgggaagcaacactgggaagaactcagctgacgtccacagagggaacgtttagaccacccctagcyagaaaaaaattgtccatctcaatggtcaaaactcaagttccagcaagcctcaccatcgcaggctaaagtgt

SEQ ID NO: 228930 - DNA, 559 bp, Homo sapiens
aaaacaatgaagcaggcctacaaaatctagaaagtagcatcaaaagggcaaatctaagagttactggccttaaaagggaggtagagagtgagatatgggtaaaaagttcattcagagataataacaaaaaacttcccaaaactagagaaagatatcaatattcaagtacaggaaggttatagaacactaagcagatttaacccaaaaaagattaccttaagtcatttaataatcaaacttccaaaggtcaaggacaaagaaaggatcctaaaagcagcaagagaagagaaacaaataacatacaatggacctccaatatgkctggcagcagacttttcagtggaaaccttacaggccaggagagagtagcatgacatattttaagtgctgaaggaaaaaaaagttctatgttaccctagaatagtttatccagcaaaaatacctttccatcatgaaggagaaataaagactttcccagacaaaaaaaaaacctcagggattccatcaacaccagacctgtcccacaagaaatgctaaggggagttcttccgtcagaaag

SEQ ID NO: 228931 - DNA, 580 bp, Homo sapiens
tcagttgtctcctcctgctcatctagtgatttctatgcctcctctgtagagagagcatagcaaggtggttaagagtctgggcttccagggttcaaatcctggtcctgctgccttctggctgctgtcttgggcaagtatatttaatctttctgtgcctcagttgccttatctggacaagtgggctaatagtatctaccytcacagcattgttgtgacaaataaatgatgtactacttggacagtgcctggaaaaatgcttgcaagtattagccattacaaggtcaacgtaattatgctgcttatagggtaagatgactgatggcaactcgccaggcacaatcagagccgagaaggggttggacctcttgttggtgctgtgcccacaatatttcacagccttgtttttaaaagataagttgtctccatgatcactcctcttttctaagcatagcgtgggatttcaaatgataaaatttcagcaggctgccttctcaggggatgccaagaaacatgagctgttagacttgggttacagtaaatcaccttcctttaagttctggttctggttggccagacagct

SEQ ID NO: 228932 - DNA, 654 bp, Homo sapiens
tgatctatgcttcagttcctcatttccatttgaggcctcattagcccagccttcactgtccatatttatatcagaatttttgtcacaactatttaaccagtctctaagaagtttcaaattttccctcattttcctgtcttcttttgagccctccaaactcttccaacctctgcccattacccagttccaaaactgcttccacattttcaggtatctttatagcaacaccccactcattggtaacaattttctccattagtccattttcattgctgtaaaggaacatctgagtctggataatttgcaaagaaaagaggtttattttagctcacagttctgtgggctgtataggaagtgtggtgctggcatctgcttctagtgaggacctcagggagcttgcaatcatggtggaaggtgatggggaagttgatctatcacgtggcaagagaggaagcaagagagattggggaggtggttgccagactactttaaacmaccagcttttgcatgaactaccagagcaagaactcactcactaccattgggaggccatcaagccattcatgagggatccacccccatgacccaaatacctcccacttctccctgcttcaatcaaaagcaggactcagaacaaacacctcccagacccac

SEQ ID NO: 228933 - DNA, 485 bp, Homo sapiens
tttgctcattttttaaaaaattcctatttctttgtctttgtctaattgggttaatgtgaaagccttgtttttgagcggtgaagttctttcttctacttggtctagtctttgttgaaacctttgagtgcattttgtatttctctaagtgtgatttttatttccagaagttgtgattgtattttctttatgatatctatttctctggagaattttccatccatatcctgtattttttaaaagtttctttacattgtttttcacctttctctggtgcctccttgagtagcttaataatcaatcttctgcattctttatctggcaattcagagatttcttcttggtttggatccatggctggrgagctagtgtgatcttttgtggatgttatagacccctgttttgtcatattaccagaattacttttctgtttccttctcatttgggtagactatttcagtggaaaggtctgcaactaaaagcctgct

SEQ ID NO: 228934 - DNA, 444 bp, Homo sapiens
atattaccagaattacttttctgtttccttctcatttgggtagactatttcagtggaaaggtctgcaactaaaagcctgctgctcagattcttttgtttcacagggtgatcccttgatgtggtgctctccttctcctagggatggggctttctgagaacaggactgcagtaattgttattgctcttcagggtctagctaccccgcagggctatcaggctccaggctgstactagggaatgtacaaagagtcctgtgattgattcgtcttcaggtctcctagccatggatacctgaatctgcactgacagaggtagcaggggagtgaagtagactctgtgagagtccttggttatatatatgtttagtgtgctggctttctcaaatgctggctgtgctagcagtgaagttgtcatgtggacacactcaggacctctggttagcca

SEQ ID NO: 228935 - DNA, 475 bp, Homo sapiens
ctgctgtaatactgtcaaggtctcctgggatagttgctgtgttttacttgtaagggctgtacattttattggtggatgaagtgattcatccacatgccaaatacaagcaaagttctttagcatgacagatattacacaaaaagagaaaacacttggaataracggcaacatacaggtgcagcttcctttggagcttttcaaatccggaaaatattgagttagggaaaaaagagtttagtgcactcagtttgtagttcaacccgtttactagattatccttttctataccaaataatattgaataatcaatctgcatagcaccaaatggcttcagagaataatggaaacatatgtgggtcacctgtggagtaacactttttttatgtagcatcttagaattagaattgtcccaacttgctttgtgagagcaggaagcactcaataaatacttggtgaaatgaatccaggtcagact

SEQ ID NO: 228936 - DNA, 475 bp, Homo sapiens
ctgctgtaatactgtcaaggtctcctgggatagttgctgtgttttacttgtaagggctgtacattttattggtggatgaagtgattcatccacatgccaaatacaagcaaagttctttagcatgacagatattacacaaaaagagaaaacacttggaataaayggcaacatacaggtgcagcttcctttggagcttttcaaatccggaaaatattgagttagggaaaaaagagtttagtgcactcagtttgtagttcaacccgtttactagattatccttttctataccaaataatattgaataatcaatctgcatagcaccaaatggcttcagagaataatggaaacatatgtgggtcacctgtggagtaacactttttttatgtagcatcttagaattagaattgtcccaacttgctttgtgagagcaggaagcactcaataaatacttggtgaaatgaatccaggtcagact

SEQ ID NO: 228937 - DNA, 569 bp, Homo sapiens
taaatgaacaaatttttgaagaaaagtgggacatttatacaaactcaaagtaactttccacaaaacaaaatgatttcaaaggggaaaaattaactttatgggacagaaacgtgacagataacatcttaagcaagcaaattgaatatcaccagtaatgggataaatctaaatcataaaccayttggtaagatacaatgagaagaacactgtatccatcctgtgatatttgggccaaaatgcagaacctgaatctaataatgaggaaacattagacaaacagaaattgaagatccatttatacaacaacgggcatgtaattcttaagtgtcaaggccgataaagttaagaaaagggtgaacaattgcttcatattgaaggagacatatgacaactaaatgcaatatacaattcttatttttgaataacagatttattgaaataaaacttaagtcgcagaaaagtcaccctttcgaagtatacaatttaaaatttattgacatatttgcagagatatgcaggaatccacaccatctaattttagaatattctcatccctccaaaaagaattc

SEQ ID NO: 228938 - DNA, 564 bp, Homo sapiens
atgaattcataccaatataaatgaacaaatttttgaagaaaagtgggacatttatacaaactcaaagtaactttccacaaaacaaaatgatttcaaaggggaaaaattaactttatgggacagaaacgtgacagataacatcttaagcaagcaaattgaatatcaccagtaatgggataaatctaaatcataaaccatttggtaagatacaatgagaagaacactgtatccatcctgtgatatttgggccaaaatgcagaacctgaatctaataatgaggaaacattakacaaacagaaattgaagatccatttatacaacaacgggcatgtaattcttaagtgtcaaggccgataaagttaagaaaagggtgaacaattgcttcatattgaaggagacatatgacaactaaatgcaatatacaattcttatttttgaataacagatttattgaaataaaacttaagtcgcagaaaagtcaccctttcgaagtatacaatttaaaatttattgacatatttgcagagatatgcaggaatccacaccatctaattttagaatatt

SEQ ID NO: 228939 - DNA, 562 bp, Homo sapiens
gaattcataccaatataaatgaacaaatttttgaagaaaagtgggacatttatacaaactcaaagtaactttccacaaaacaaaatgatttcaaaggggaaaaattaactttatgggacagaaacgtgacagataacatcttaagcaagcaaattgaatatcaccagtaatgggataaatctaaatcataaaccatttggtaagatacaatgagaagaacactgtatccatcctgtgatatttgggccaaaatgcagaacctgaatctaataatgaggaaacattagacaaacagaaattgaagatccatttatacaacaacgggcatgtaattcttaagtgtcaaggccgataaagttaagaaaagggtgaacaattgcttcatattgaaggagacatatgacaactaaatgcaatatacaattcttakttttgaataacagatttattgaaataaaacttaagtcgcagaaaagtcaccctttcgaagtatacaatttaaaatttattgacatatttgcagagatatgcaggaatccacaccatctaattttagaatatt

SEQ ID NO: 228940 - DNA, 434 bp, Homo sapiens
gtcacagcctccccaaccctctatcacacaccctgttttgtwtttcttatagaccttttcaatttctgaagtgatcccattcgtttttcgtgtttattttctattttctcttttagaatgtgagctcagttagaaccaagaccctctctgtcttcaccaatcaatcctcagcacctagaaaaatgtcaagcagataatgcagagtcaataaatatcagtagaattagttagttaattctatctaggacaggtgtgcagtggcatgaacagggtttctctctatgctctaaagcagtggtgagatttcaagactccagggtggcttggtagatacttttgaatatctaaccgttgtaggtgccatcccctgttcttctatcccattaaagatctgagaatcattctctgagccataggagttggctcctggcacc

SEQ ID NO: 228941 - DNA, 434 bp, Homo sapiens
gtcacagcctccccaaccctctatcacacaccctgttttgtttttcttatagaccttttcaatttctgaagtgatcccattcgtttttcgtgtttattttctattttctcttttagaatgtgagctcarttagaaccaagaccctctctgtcttcaccaatcaatcctcagcacctagaaaaatgtcaagcagataatgcagagtcaataaatatcagtagaattagttagttaattctatctaggacaggtgtgcagtggcatgaacagggtttctctctatgctctaaagcagtggtgagatttcaagactccagggtggcttggtagatacttttgaatatctaaccgttgtaggtgccatcccctgttcttctatcccattaaagatctgagaatcattctctgagccataggagttggctcctggcacc

SEQ ID NO: 228942 - DNA, 254 bp, Homo sapiens
ctgtgtctatatatatgcatgcatggatatgcataygtatgtgcatttctgcacatgtgtgcgtatgcctgtatgtgcctggctatgtgcacacacatgtgaatgtctgagcagctccagagggagggccaccaccctgcatggtggacattagtttgagcctgtgaggaccagtgtcccccaaagcccctcaactacagcccagcccaacccaacccggagcagatcacaggccccagagacatctccaaccc

SEQ ID NO: 228943 - DNA, 616 bp, Homo sapiens
ctcttaggtttggtcctcccattctttaagcaaatttgttcttctctgaaaatttcctaggctctctgtttgtctctttaagcctcagagcctcaaacactggagagaacttgctgcatgcgagcttattctaatacttaatattttctggggcctcagggtgagggttgcctcacagtccctgtgtatagaagttctaatctagagcatgcaatcttgtgcactaagtaaaagcagctatactaaaaaataaaaaaaaaaaattaaaaacaagccaacaaaaccccaaaccccacctagagttgttaaatacagaacttttcagcagccaagtgaccctgtcagcccttagctagaatttcatgcctcccaggaacagggtaattgaaaggaacaatgctgatggcttgggctagtcacagctggaaggttgctgcctttacactaagactctgttctgcctccttctgtggaaaatgaaagaggacttgttaatggagcaaaaccttgcaaagcatgtgtggtgctgtgggatttgtgatggaagtacaagtgggasaaggaatggacaaacagcagggtgacctgagtcaacatagcagacaccatgggcccc

SEQ ID NO: 228944 - DNA, 579 bp, Homo sapiens
tcattctcctgtctcttaacttcttgcttctctgattatatttttatctagccaattggattttcygcctagcatgacttttccaacaacaacctgtttgctccccaggtagataactgataaatgtttatatcctaaaaatctccagtgcaatatgtccttggagggaaaacaccctctgaggcatatcagtaaggtactggatcttgatgtccccaagaaatggtactacgaaagttgcccacttcaaagaagatgtgatttttatttatagagtggaaaaatcatgaatgggtctctttgacaaaagttaaataacgagaattattgtattattagtaataacttttcatcaaggtcccccggagaaaatagtaataatagtaacaacaataataaaggtgaaaagtccatgttgcctttgttaaatagaagcatctctgatcacagcattggaactggaactggaaaggaccatgcagaccagttctccttcaaaagaattcataatttccagtaggaaccattgtcatcatcctcaatactgctaccatttcttgagcacttgctatggaccag

SEQ ID NO: 228945 - DNA, 586 bp, Homo sapiens
cccacagcaggttagaaggaaggaagaggtcaggagtggtgttagagactggcagcaagacartgagggaaaaggtgaaaatggaaacagaaatgaaaacccagaaagcattgcaggctgcagggagttcgcatgcaggcttcatagtggaaaaaaaagtagaactgtgatcagatctcagcagcttctgagcatttacagctgtttttcatggggccggagccaattttttaaaaggaaaaatctgaatctctgagaaaatggttaatgtcggtcattgtactccaagcaggcagcaaagaatgcaatgcatttttaaaagacatacagccctaaaagaatgaatgagaattgactcgattctgcttttagggaatctttgagggagaggaggtaattcgtctttagcatctttcacgcaggccccgctggtctttgccggtctacaaagacctcctcctgccctccacaagagggcgccagaattcctaggacaggacccggtctgtggtcaagagacccgatgaaactcgacatgaccactagaggggggcagtgaggtccttaaactgcattctgagattcc

SEQ ID NO: 228946 - DNA, 586 bp, Homo sapiens
cccacagcaggttagaaggaaggaagaggtcaggagtggtgttagagactggcagcaagacaakgagggaaaaggtgaaaatggaaacagaaatgaaaacccagaaagcattgcaggctgcagggagttcgcatgcaggcttcatagtggaaaaaaaagtagaactgtgatcagatctcagcagcttctgagcatttacagctgtttttcatggggccggagccaattttttaaaaggaaaaatctgaatctctgagaaaatggttaatgtcggtcattgtactccaagcaggcagcaaagaatgcaatgcatttttaaaagacatacagccctaaaagaatgaatgagaattgactcgattctgcttttagggaatctttgagggagaggaggtaattcgtctttagcatctttcacgcaggccccgctggtctttgccggtctacaaagacctcctcctgccctccacaagagggcgccagaattcctaggacaggacccggtctgtggtcaagagacccgatgaaactcgacatgaccactagaggggggcagtgaggtccttaaactgcattctgagattcc

SEQ ID NO: 228947 - DNA, 586 bp, Homo sapiens
cccacagcaggttagaaggaaggaagaggtcaggagtggtgttagagactggcagcaagacaatgagggaaaaggtgaaaatggaaacagaaatgaaaacccagaaagcattgcaggctgcagggagttcgcatgcaggcttcatagtggaaaaaaaagtagaactgtgatcagatctcagcagcttctgagcatttacagctgtttttcatggggccggagccaattttttaaaaggaaaaatctgaatctctgagaaaatggttaatgtcggtcattgtactccaagcaggcagcaaagaatgcaatgcatttttaaaagacatacagccctaaaagaatgaatgagaattgactcgattctgcttttagggaatctttgagggagaggaggtaattcgtctttagcatctttcacgcaggccccgctggtctttgccggtctacaaagacctcctcctgccctccacaagagggcgccagaattcctaggacaggacccggtcygtggtcaagagacccgatgaaactcgacatgaccactagaggggggcagtgaggtccttaaactgcattctgagattcc

SEQ ID NO: 228948 - DNA, 623 bp, Homo sapiens
gtagacgtgtctatctctactgtgaactatgtacttagcataaaatacctttaaaataacttgatagcagctcagctgtctctggaaatatacccagttgagccttttaattataagatgtttgttgttcccccggtatttgaacaattgcttttctaatttctgaacctacctgtagctatattttttgaactcttaggatatgctaggctctgcactatctgatttaaacctgacaaagtctccatgaagtaggtatgactgttatacccattttactgttaagaaaaaaaaagggaaattaagtaacccataatgctaacttttctgcctcagtgcctccctgttataacaggctgtgggcttttttttttttttcttcctctctctctctctctctctttttttggttgagacggtgtttcactctgtcgcccaggctggagtgcaatagagcgatcttggctcactgcaacctccgcctcccaggttcaagcaattctcctgcctcagccccccgagtagctgggattacagtcaygcgccaccacgcccagctaattttgtatttttagtagagacggggtttcaccatgttggtcaggctagtctcaaactcctga

SEQ ID NO: 228949 - DNA, 548 bp, Homo sapiens
aatttttctttaaaaaagtaacaaatgaacctaacttcttatcagtttgattgcttgccataaaaaaagtattctaagtaaatttaaattgcggtattttcactcagtgggaaagactctagtgtaaaacaatacaaaaacaaaatctacaaataaatcctaatatgcattcagtagtcttatggatggtaagaatatggggtattgtaatcctagcattgtgggaggccaaagcaggcagatcacttgagtccaagagatcgagaccagcctgggcaacatggcaaaaccccatctctacaaaaaaatacaaaaatcagccaggcatggtggcgtgccttagtcccaggtactcagggtgggtacgctggggatgggcatgctgagggaggtcaagtctgcaatgagccattatcatgccactgcactccagcctgggcrgcagagtccccttccttacaaaccctttaggtagacataggagcttctggaactctatttatctctttgcactgtgtcctggaagagtcagactcaatattgcagct

SEQ ID NO: 228950 - DNA, 594 bp, Homo sapiens
tgtgtggcggcagcaatttgtgtttttgtaagtctcttggtgattcagatgtatgctagagtttaggaaccactgacttaggggatgccagtctctgatgtttaactcagaaggaagttgttggcttcctaaatccagtatactatgattcagctgaagacccatagttgatgtaggcattttagaaacagaatatattttcatttttcttgatgtaagagagagctgtcaggacctggcaaattcatttcttgtcttaaaatacatatatgtcaaaaaactacaggacatccttatgaaataattccaaatgatttttaatctctccatgttaactttaaccttttccattttgtttctatcctatgttgggaatggctgattkcttctcaaacatctccaggtgtgctttccattaccaagctgtgcattacaggtggctgcaaacaggaccatcccagtggactccttccttctctccctcctcatgctataaatggcatgcctagacccaagagaccacttataaggcttgaagttgccgtcaaacctagaggaatttttatagtttgacaccccaattccaaattttat

SEQ ID NO: 228951 - DNA, 594 bp, Homo sapiens
tgtgtggcggcagcaatttgtgtttttgtaagtctcttggtgattcagatgtatgctagagtttaggaaccactgacttaggggatgccagtctctgatgtttaactcagaaggaagttgttggcttcctaaatccagtatactatgattcagctgaagacccatagttgatgtaggcattttagaaacagaatatattttcatttttcttgatgtaagagagagctgtcaggacctggcaaattcatttcttgtcttaaaatacatatatgtcaaaaaactacaggacatccttatgaaataattccaaatgatttttaatctctccatgttaactttaaccttttccattttgtttctatcctatgttgggaatggctgatttcttctcaaacatctccaggtgtgctttccattaccaagctgtgcattacaggtggctgcaaacaggaccatcccagtggactccttccttctytccctcctcatgctataaatggcatgcctagacccaagagaccacttataaggcttgaagttgccgtcaaacctagaggaatttttatagtttgacaccccaattccaaattttat

SEQ ID NO: 228952 - DNA, 561 bp, Homo sapiens
tcccctccctgtctccttgctatgctttgtaaaattttttcctagaatgatgatctatttctactaaccatatgtaaagcacgactttgatctttgccatatcctaagcataattgctaattactgaattagtcttttctcatttgaacaaaggtcattttaatttgcatttttttctataagtaattagattacattttttcttaaaataygtttatagttacttatgtttctataaattctgttcaggcaccacgtccattttttttctgtcataattttattaattttgagacagagtctggctctgtcacccaaggtggagtgcagtggcacaatcacagttcactgtagccttgaccttctggattcaagagatcctcccatttgtgcctcccaaagtgctgggattacaggtatgagccaccatgcctgacccagtattttatttttaatagatatatgtgcttccttatctcttaaggacatcactgtttgtgggtcatattggttttaaatatttttctcagattttttttcctggtattttggttgttcaga

SEQ ID NO: 228953 - DNA, 564 bp, Homo sapiens
gaaaaataatctgtcatatttagcctcaaaacactcattgctgtataatgagcaccaaagaaatgttagctaatcattcaggagacaatgcgtgaagtagttaaaaatatcatctagaggatcctagttctgtagcagaaccttgcacgctaatctccttgggtctcagtttccatctctagcagaggaataaaaatcaggrccaaatgagacaacgcagagcctgaacacaggaaatacataggtagtatttaacaataatttttgaacagcctacatgtatgcaaggagttgagggaatagagcaccccttcccatccactccaactgtatccatctaatatgttgagacattgcctccatcactccaattgcaaataagctcttagtcctctgaaattcggtagtattttgtctatatctctaacgtatgttgtagttaactatgtatgtatacatgaagattaaatgagttaatatgtgtgaagcagctggagtggtgcctggctcctcgtacacacccaaggagtgttagatattatcattatttttcttcacagagag

SEQ ID NO: 228954 - DNA, 593 bp, Homo sapiens
gttgagccttgcttctggtatttgctattataatgaatcatcttgatatacctttttatttggtgtatatctgattgtttccttagataaagaagtagaattattaggtcaaatgatataaacattgttttataccaactgccctccaggaagattatactaaagtgtacttataccaataaggtaggagaattttccctatactccatatgttgtcatttaaaaatattattgttttaaaaacacacctgttttgacagctgatgagcaggtcccatttcatttgtttgccatttgtattcttctggtttgaawtgcctttccaaatttttgtttctaattcccttgtggtatttaataataataatttatttattatatataaatataaatatcatgtattcttttattatactaatgaataatgatataataatacttttgataataatggcagccacaatttagtaagcctttactatgctaattttcatgtattttcttttataatccttgcaatcctctgaaatatatttgattattatccctattaatataatagaagtctgaaattaaatgaccccccaaagtca

SEQ ID NO: 228955 - DNA, 577 bp, Homo sapiens
ttgaattttatttttccatttataatatagttcaagacagtcaaggactctctgaatcataccagtttatttagtgattgagttatatcttaatggccccagggaatttatctcatgttgtaataagagaggataaagcatttaggtcggttactgggtatgtgcatcaaagaagagagrtgcaattgcaagaacacggtgtttaaactgccatagactgtctgggaaatttagaaaggctcttatataaagcttataaggtgaattgaatccagtgatgctaacttctatggattctagaaaaagagaatttatcaaggattgatcatgcttaaaaaggaaaatgaatgctcgatatatttttttatccgctatgctttcttcattaagctgatgatatagagtaatttcatatcctcctaaaatgaccacaagtgttcagtgttcttaatttctttttttcttaatctctttggtaggcaccagtctaatatgtttgatatttatcattgaactgcatacactttatacaatatattactttgataacatacacatttaaaatttttttctagtt

SEQ ID NO: 228956 - DNA, 490 bp, Homo sapiens
ataataataatggctgagacttattgaayagttaatatatgcgtttcaggatcaaacaggataatttatgggatggcttgaaatatagcatctcgcatatatttagtgataaataaacattagttcttactgtgcttcttagcttttgtttacaaacaacctacttgataaagttaaaaatgagcttaccttggtattcaggacacaataaagtctctctttacctctcacattttatcacctttattttacctcttttaaagtgacttattgacttcagattggagccctcctgcatgttcacactatgacactcttgtttctgtatcgagctacacagacactctctccctcaatttctactcccggaattggatccattctgagtacttctccgccttaatctggtgcttcctgttcctgttgttttatttcctggctttacctgacccatggtgtctgcacctttagtggtcctgactttccttgt

SEQ ID NO: 228957 - DNA, 446 bp, Homo sapiens
tttaaaacacctcttaagcttctcaaattgtacgagtaggaattaggctgtaaacctgaaatgaaagcagaaaggggctgttggcccttgactttggagagggrtgagtgtgtgtttgtgtggaggaaaaccggaagatacagctgaagttgagcctgatctgctcaactgcatctctttccactttaccgagttcacacggcacttcccttggtatcaggagaagccctgtgaatgttaacagaggcttatgcttcccaagcccccatgtgtgggatgccatacttcttcttcttcagtgacctgaaaggacatgtgcttaggattgtaggtcagtaaggcatacgagcctgggtctctgaatccctgtgtggagcagagcctccccagaaacaggtgtattaattctgaacaaaatataaatgtgtattgcctaacttcttgtt

SEQ ID NO: 228958 - DNA, 564 bp, Homo sapiens
gtttcgttgataatgcattagagttgtggacacagcataaatattaggcagaaatgttaggcatatagcatatgttaggcagaaattatgttctgcctaacataaatacagatggttacaaatagaaatattcacagawgtgtatatatagattggatcatacacacacatgtattttcttgctttgtcagctgagagggtctagaagcaacaaaccccagtagcaatgaatacatatagtgcccagatcttggtttctaataccattctcaataaaagaaaacagggatccttggagaaatggctgatcctaggactaggacagaaaatatacaagacaagcctggagcatcttgtagtacaaacaagtaagaaagtgctcaaaaacaaaacaaaatgacgggagtatgtccatgaatcttaaagtcaactgaaaactcccagtggccaaaactggaacaatttgagcaaaaataagtaaataaagtgatgttggcttatagcacaatgtataaaataaatatccacatgtccattctaatatgaataaatgatgggataata

SEQ ID NO: 228959 - DNA, 471 bp, Homo sapiens
atagtatcttttgagctttattcctacttgtcatcagtttttttaacttcatcttcaccattcttgatttttctattagcattatttgctgaccagcagagtactaactagaatacactattgcaggatgtaaataataaaacttacatgggttaggtatttcattttgatttctatacactaaaattcatacaataaaattctgagacaaacctgatatccgtttctttacagaaaacctttttggcttgttaatgtattttttattcttgaaagaaaaatacattcaagttttctgtgttcatttatagttaattaattttgcctagaattcagctgccatttagayctatagttttgcctctttctttaaactaggcctataattcatttagcattgcttttgctataaatattcagctttctccctctgagatccatctcatatcctagactggcacccctgaaaca

SEQ ID NO: 228960 - DNA, 601 bp, Homo sapiens
aaattaccaacacaagaaggagtgagtggatatcactacagacyccacagacattaaaagaataataaaggaacaccatcaacaaccctatggatgtaaattaaacttagtcaaaattgaacagttcctcaaaaacctacccaatatgaaataaagttttgcccactgtgatgtgcaaagcagaatgaaggaaggaaaatgtttggtagaaagaggcactggtaggaagagaataatgatgtggcaggaggctgagttacagtgggaagggaacgatggtgcagaaactcatgtgaacagtgtggcacatcaagatatcaaccaataaatattcatgaacatggattcaaagtgtagtcctaagacaaaaagaaaatttttatctaaaataacgtagagtctcttgtgccttttcctgatttgttacagctttctaaattgcttatatcatgctagaggcataattcttaatttaatgaattccatcattctggaaagtaagagtttttaatgctgaaatagagtagatcatttgggaacaagttcagaatacaaaacaaattttaacttctttctgagacaagcatatcaataaaattct

SEQ ID NO: 228961 - DNA, 601 bp, Homo sapiens
aaattaccaacacaagaaggagtgagtggatatcactacagactccacagacattaaaagaataataaaggaacaccatcaacaaccctatggatgtaaattaaacttagtcaaaattgaacagttcctcaaaaacctacccaatatgaaataaagttttgcccactgtgatgtgcaaagcagaatgaaggaaggaaaatgtttggtagaaagaggcactggtaggaagagaataatgatgtggcaggaggctgagttacastgggaagggaacgatggtgcagaaactcatgtgaacagtgtggcacatcaagatatcaaccaataaatattcatgaacatggattcaaagtgtagtcctaagacaaaaagaaaatttttatctaaaataacgtagagtctcttgtgccttttcctgatttgttacagctttctaaattgcttatatcatgctagaggcataattcttaatttaatgaattccatcattctggaaagtaagagtttttaatgctgaaatagagtagatcatttgggaacaagttcagaatacaaaacaaattttaacttctttctgagacaagcatatcaataaaattct

SEQ ID NO: 228962 - DNA, 601 bp, Homo sapiens
aaattaccaacacaagaaggagtgagtggatatcactacagactccacagacattaaaagaataataaaggaacaccatcaacaaccctatggatgtaaattaaacttagtcaaaattgaacagttcctcaaaaacctacccaatatgaaataaagttttgcccactgtgatgtgcaaagcagaatgaaggaaggaaaatgtttggtagaaagaggcactggtaggaagagaataatgatgtggcaggaggctgagttacagtgggaagggaacgatggtgcagaaactcatgtgaacagtgtggcacatcaagatatcaaccaataaatattcatgaacatggattcaaagtgtagtcctaagacaaaaagaaaatttttatctaaaataacgtagagtctcttgtgccttttcctgatttgttacagctttctaaattgcttatatcatgctagaggcawaattcttaatttaatgaattccatcattctggaaagtaagagtttttaatgctgaaatagagtagatcatttgggaacaagttcagaatacaaaacaaattttaacttctttctgagacaagcatatcaataaaattct

SEQ ID NO: 228963 - DNA, 410 bp, Homo sapiens
gaattcactctccgcctggatgctgctccagccttggatgcaccctgggacctcattaaaaccacctacctttgcctcacctttcccaccttagctggtgcttttattaacaggaaattaaaatatctttcctctatctaactcatatagggatatttctgcctccaaaatcttatgcaatgggacttccttcagcaagctcttctgatgagactttgattatgatcttatctaaatacacagccagttgsatgctgcatgaaattgaacataattgaacaaaataactggtgaatgtagaccaaaatggcaggggtgattggctatgcagacagcatcttacccaaatggtacatggtctcattttctactctcagtagagaggcttttttgtcctcctttgaaagtgc

SEQ ID NO: 228964 - DNA, 525 bp, Homo sapiens
aggattaattccagtttcccattgtattttcactgactttcaatggagaccctgtacccagctagaatgctggatgtttgggtgatcattagtgctaatcatagctatttccttcttcactggcttcctccctctaggaacatggtgggactgtattttctggctcttttgagcttgggcaaagacatgtgactaattctggccaattacttayggacagaaacaatgtgtgtcatttcattccagagaataaaggctacattagcatcttagatcctgttggaggagtgccccagctaaggaacagaggaaaagcagcaggacaagaaatgaaattttgttgtttttaggcactgatatttggggctgtttgttatcaccatataacataggctatgctgactggtatgataaggaagttcagttcttcagaactattttcagacttacttccagaattgttttctgacactaggcagagttagttacatttaatgagcagaggagaggccaggagaaggaatt

SEQ ID NO: 228965 - DNA, 525 bp, Homo sapiens
aggattaattccagtttcccattgtattttcactgactttcaatggagaccctgtacccagctagaatgctggatgtttgggtgatcattagtgctaatcatagctatttccttcttcactggcttcctccctctaggaacatggtgggactgtattttctggctcttttgagcttgggcaaagacatgtgactaattctggccaattacttatrgacagaaacaatgtgtgtcatttcattccagagaataaaggctacattagcatcttagatcctgttggaggagtgccccagctaaggaacagaggaaaagcagcaggacaagaaatgaaattttgttgtttttaggcactgatatttggggctgtttgttatcaccatataacataggctatgctgactggtatgataaggaagttcagttcttcagaactattttcagacttacttccagaattgttttctgacactaggcagagttagttacatttaatgagcagaggagaggccaggagaaggaatt

SEQ ID NO: 228966 - DNA, 564 bp, Homo sapiens
tatttatagtcttataaatagaccggtaggtgggtggccctgtgagacagtgctgggcagtgaaggatgagtggaggttgttaggtggggcttccagaaagctccagaaagcasaggagtttgacttggctggcaggatctcttttcccctttgcctttcctcccactggccacctagaataaggcatagcaattggtgctgctgcagccatttgcaagtaaccaggatggagaagcctagagaaatcctgaggacccctggatgcttcctgcagacttccttatgactcaagaggaaaactgtgctcaagccactgtcattgggggtttctttcagatgcaactgagcacaagccttcaggagaagggcacccctgcttgtcatgcatcacacccatcaggtgccgcgtcatggggaggacagggcctatcatgaagaccttggcccacagcaaggtgaccaggagcccctggccagtcccgcagcggaggaggaggaaggaggtctgttgacctcaggaggagccacctgggtctccatcaggaagagtgggcaggagccca

SEQ ID NO: 228967 - DNA, 564 bp, Homo sapiens
tatttatagtcttataaatagaccggtaggtgggtggccctgtgagacagtgctgggcagtgaaggatgagtggaggttgttaggtggggcttccagaaagctccagaaagcagaggagtttgacttggctggcaggatctcttttcccctttgcctttcctcccrctggccacctagaataaggcatagcaattggtgctgctgcagccatttgcaagtaaccaggatggagaagcctagagaaatcctgaggacccctggatgcttcctgcagacttccttatgactcaagaggaaaactgtgctcaagccactgtcattgggggtttctttcagatgcaactgagcacaagccttcaggagaagggcacccctgcttgtcatgcatcacacccatcaggtgccgcgtcatggggaggacagggcctatcatgaagaccttggcccacagcaaggtgaccaggagcccctggccagtcccgcagcggaggaggaggaaggaggtctgttgacctcaggaggagccacctgggtctccatcaggaagagtgggcaggagccca

SEQ ID NO: 228968 - DNA, 564 bp, Homo sapiens
tatttatagtcttataaatagaccggtaggtgggtggccctgtgagacagtgctgggcagtgaaggatgagtggaggttgttaggtggggcttccagaaagctccagaaagcagaggagtttgacttggctggcaggatctcttttcccctttgcctttcctcccactggccacctagaataaggcatagcaattggtgctgctgcagccatttgcaagtaaccaggatggagaagcctagagaaatcctgaggacccctggatgcttcctgcagacttccttatgactcargaggaaaactgtgctcaagccactgtcattgggggtttctttcagatgcaactgagcacaagccttcaggagaagggcacccctgcttgtcatgcatcacacccatcaggtgccgcgtcatggggaggacagggcctatcatgaagaccttggcccacagcaaggtgaccaggagcccctggccagtcccgcagcggaggaggaggaaggaggtctgttgacctcaggaggagccacctgggtctccatcaggaagagtgggcaggagccca

SEQ ID NO: 228969 - DNA, 609 bp, Homo sapiens
taactaataagtgtggatagtcatttcattcatcaaaattaagatgattatataagctttatttttaagaaacataaggaatcaggtattaccaggatagtagcataaactactttttaagggtcattaaaaatgaggagaatgcagcaactcttcatcacaaacttcacccctagtttaatatttatttttattcagggatgtgtagatgtgccttcttaatttacaatctatcaaaattttttcattctgtaccttcttcggtaaggaaggacatataacaccaaacaaaatagagaattacacaatttggatacatttttaaaackgaagttgataagtaacatggtaatgtgaagcatggaattcattcttctcagcaagcaggcattgtgctgacttttcacctttctagttttagggcaactttggaaaaacaataaaaagctttactgaagcaaataagttttagagtccagtaaaaatattaaacataactaccaatggaaggaaatgcatttgtgcagtgaatatgttctcctgacagacagaacatcaggtcaaagccctggactgaggtattccaccttctcattttgcctcatgcgt

SEQ ID NO: 228970 - DNA, 310 bp, Homo sapiens
gattcccctacaaatttgttaaatttattctaattttatcctccccttttctctccctccccctccacctcctcaaatccaaatgtcactggaaatggagcrcattgtgactgatttgaaatgtaaaatgctccagacttttagcgttacctggaaaatcttcctcaaaaataatatttttgaaaatttttagtttgaagcagaaaagttctgatatgctggactagcttctcacatctgaagggatccatttaaaagataacgagggcaaatatgtaaaataaattcctagggaaggcaagctgtgtct

SEQ ID NO: 228971 - DNA, 622 bp, Homo sapiens
gccctcctcaacagggtcactccatcctaatctctggaggggccaaatcctggaaactaaggtcacagccctgaagtgcaaaacgctctgcagattgtggagaaaggaagcacataaaggcttccccccaaaaaggaagaakaaaataaaattttcttttcattcttgtccatgagtttactggtccaaacataagagctctgaagttggggtggcccttcaaagatagcccacattgaggcaagaaagccactctggatcagtcattttctgtgtgctgtctctcctcactccttaggaatgtaatcttgggcaagttggctgtctttggtagaagataatgtcaaggaagggagttacctgagagccttcggcagtgatactccaaaattatagatgtgtgatatatttataaactaattttagtgcaatgagtttcaaactcttctgtgcatcagaatcacctggattgtttgctaaaaagcagagtgctgagctgcaccttcagagtttctgaatcagtaggtccggagtgggactgaaatgtgtatttctattgtattgccactggtgcaataaaagcttcagtcctgcatgatggataaggtggtgccctatggca

SEQ ID NO: 228972 - DNA, 622 bp, Homo sapiens
gccctcctcaacagggtcactccatcctaatctctggaggggccaaatcctggaaactaaggtcacagccctgaagtgcaaaacgctctgcagattgtggagaaaggaagcacataaaggcttccccccaaaaaggaagaataaaataaaattttcttttcattcttgtccatgagtttactggtccaaacataagagctctgaagttggggtggcccttcaaagatagcccacattgaggcaagaaagccactctggatcagtcattttctgtgtgctgtctctcctcactccttaggaatgtaatcttgggcaagttggctgtctttggtagaagrtaatgtcaaggaagggagttacctgagagccttcggcagtgatactccaaaattatagatgtgtgatatatttataaactaattttagtgcaatgagtttcaaactcttctgtgcatcagaatcacctggattgtttgctaaaaagcagagtgctgagctgcaccttcagagtttctgaatcagtaggtccggagtgggactgaaatgtgtatttctattgtattgccactggtgcaataaaagcttcagtcctgcatgatggataaggtggtgccctatggca

SEQ ID NO: 228973 - DNA, 576 bp, Homo sapiens
ttcttttcattcttgtccatgagtttactggtccaaacataagagctctgaagttggggtggcccttcaaagatagcccacattgaggcaagaaagccactctggatcagtcattttctgtgtgctgtctctcctcactccttaggaatgtaatcttgggcaagttggctgtctttggtagaagataatgtcaaggaagggagttacctgagagccttcggcagtgatactccaaaattatagatgtgtgatatatttataaactaattttagtgcaatgagtttcaaactcttctgtgcatcagaatcacctggattgtttgctaaaaagcagagtgctgagctgcaccttcagagtttctgaatcagtaggtccggagtgggactgaaatgtgtatttctattgtattgccactggtgcaataaaagcttcagtcctgcrtgatggataaggtggtgccctatggcatcccccggagtgcccaagagtgacttttagaggatggtgtcattttgttgcaaataaagaatctcagaggtaggtcttctttgcagcagataaagctagtgttattc

SEQ ID NO: 228974 - DNA, 542 bp, Homo sapiens
gggctacaatcatccatggtaaagagaaactcagggggctcctgaggattagcagctctcatctctcacccacctatggcttatctctgaaatggggcaaggtttggagaagtgatgaacacagctacaactaatttagaacagagctttaagacaaaagcayttgatgcaagacatttggctcaatggagtttagaatctacttggtagtcatgatttctgatcaagaaaaccacagaagagggacatcttgtcagaacacaacatcctatgtgtaagtttgctgttataagtgagaggtcagaaaaaacaccaatgataaaatgacatttgaacagaagccctgaaagaggggagaaagaaagccattggaattactaatgtgtatgggagaaggcatttaggtagagagaataaaattactaaaataattgtcactagttgcaatgccctgtgacttccaactttcttcaataaaagaaacacataacttaaaataatacatatcaaaatctaacaaatggaagacttgacagaaaaaa

SEQ ID NO: 228975 - DNA, 575 bp, Homo sapiens
attaagaaatacaccattgaagtaaaaataaagtattttaagattcagattgtaatgtaaaaacaaacatcagagctttaaatagkcatgtttcacaaagtttcaagaaaagacagacctacaaaacactatctggaattaatttataataaaatctttgaatcctgctccctttttgcagatcatattttgaaattcttgtttaaagctatgttttattcctctaaggaagtctaatttacttttaatatttgtcctctagaatctatttgtttgaaagagacaaaaatttatgttcccattatcagtattttattttcaaagactgtgtctattaagtcgtcagatttttatatacctatgtaactgtgctctttaaaatgccatccgcttgctttatgttgagttcaataaactatttatgcatgccctggggaaaaattcttatataaactcatctctttaacaatgtgtaggtgatttctgtaagccatttggatatatcattgtttaaataatttctggtgttgaacttcttttagatctatgatagaagagctcaacttaaaaaattt

SEQ ID NO: 228976 - DNA, 575 bp, Homo sapiens
attaagaaatacaccattgaagtaaaaataaagtattttaagattcagattgtaatgtaaaaacaaacatcagagctttaaataggcatgtttcacaaagtttcaagaaaagacagacctacaaaacactatctggaattaatttataataaaatctttgaatcctgctccctttttgcagatcatattttgaaattcttgtttaaagctatgttttattcctytaaggaagtctaatttacttttaatatttgtcctctagaatctatttgtttgaaagagacaaaaatttatgttcccattatcagtattttattttcaaagactgtgtctattaagtcgtcagatttttatatacctatgtaactgtgctctttaaaatgccatccgcttgctttatgttgagttcaataaactatttatgcatgccctggggaaaaattcttatataaactcatctctttaacaatgtgtaggtgatttctgtaagccatttggatatatcattgtttaaataatttctggtgttgaacttcttttagatctatgatagaagagctcaacttaaaaaattt

SEQ ID NO: 228977 - DNA, 570 bp, Homo sapiens
atggacactgaaactgaagcaattggtgaaagaagaattggtaccatatagaagcatttagaaaaatggaaataaaaagagagaaattataaagtgtttctataaagttataccaagtgtgcctgcccctcctgcctcctcctccacctctggacccctgagacaccaagatcagccctcctctgcctcctcctcttcagcctactcaagatgagggtgatgacatttatgaggaaccccttccacctaatgaataataaatacatttttcttccttatgattttgttttctctaacttactttattatacaaatacaatttgcaatgcataaaacttacaaaatgggtgttaatcaacttcattttgttgataaggcttctgatcaacagttggtaattagtagttaaaatttggagaagtgaaaagttatatgcttaattttgactttgcagggggcggagkttcaagcttcctaatcctatcattgctcaagggtcaactgtatttgttgaaagaaaagtagccattcatttatttattcattcaaactggatttattgagtgttga

SEQ ID NO: 228978 - DNA, 570 bp, Homo sapiens
atggacactgaaactgaagcaattggtgaaagaagaattggtaccatatagaagcatttagaaaaatggaaataaaaagagagaaattataaagtgtttctataaagttataccaagtgtgcctgcccctcctgcctcctcctccacctctggacccctgagacaccaagatcagccctcctctgcctcctcctcttcagcctactcaagatgagggtgatgacatttatgaggaaccccttccacctaatgaataataaatacatttttcttccttatgattttgttttctctaacttactttattatacaaatacaatttgcaatgcataaaacttacaaaatgggtgttaatcaacttcattttgttgataaggcttctgatcaacagttggtaattagtagttaaaatttggagaagtgaaaagttatatgcttaattttgactttgcagggggcggagtttcaagcttcctaatcctatsattgctcaagggtcaactgtatttgttgaaagaaaagtagccattcatttatttattcattcaaactggatttattgagtgttga

SEQ ID NO: 228979 - DNA, 551 bp, Homo sapiens
agatctggtaaacttggaggaagtaattgctatggctaaattgccgcagatattagaaaaatgtaatttggagtgaaactgcttttgggacttgttctgcttctgccaatttctatttgtgtgacttggacacattgtttaacctctctgcrcatgattttctcgccagtggagcgtccagctgttgtgataatttgtatggggacaaggtgcacacttcaggagagcccattgctgtgtcctctccaatccggtccttggcccttggttcttactcggagggtttcctgtctgtgagaggcgatctcacagggcttctctctctgctgacattccttttctattacagtctctagggaaagaaaagcttaccaaatacattctgtatatttatgtttcattcttaaacctgtggctttcttaaatcttggttttggtttatttgaggtctggaaaaggataaaatggaacttgggatactggtgagaatgcagatggggagaaaaaaattataattcacacagctatatcctttaatatacaaccttgcc

SEQ ID NO: 228980 - DNA, 626 bp, Homo sapiens
atgcctctctctctgtctctctctgtctctctgtctctctgtctctctctctcrtgtgtgtgtgtgtgtgtgtgtgtgtgtgtgtgtgtgtgtatgtgtatgtgtttctatttaattgtgggcagctaagctgatcaggccttggagagagccacacactttgtctttttttctgagggacattttgtccagttgaaatgagttagtgagtgcttctccttaagttttacctttactcagagtctggtggtggatttattctctgcagcttgtgcacctactctgaatatcacttcaatggttgcaaactggcaatgaatggatgcattagtcagggttctttgttgccacgagccaaaactgaatctggctgattaagcagaaatagtgtctattaaaagaatattgggtaactcacaaattttttggcatggaaaaaccaagcttcaggctatgtttccaggaatgatgccaacacctttcctgcagagttcacctgatgaagcattactgacgctgccaccaccccatggagcaatgtcagtaggcaccatgaccaccacttctcgcttgaagctaggtctgtcccagggaattgtaatcaccgctggcctcataattggatg

SEQ ID NO: 228981 - DNA, 626 bp, Homo sapiens
atgcctctctctctgtctctctctgtctctctgtctctctgtctctctctctcatgtgtgtgtgtgtgtgtgtgtgtgtgtgtgtgtgtgtgtatgtgtatgtgtttctatttaattgtgggcagctaagctgatcaggccttggagagagccacacactttgtctttttttctgmgggacattttgtccagttgaaatgagttagtgagtgcttctccttaagttttacctttactcagagtctggtggtggatttattctctgcagcttgtgcacctactctgaatatcacttcaatggttgcaaactggcaatgaatggatgcattagtcagggttctttgttgccacgagccaaaactgaatctggctgattaagcagaaatagtgtctattaaaagaatattgggtaactcacaaattttttggcatggaaaaaccaagcttcaggctatgtttccaggaatgatgccaacacctttcctgcagagttcacctgatgaagcattactgacgctgccaccaccccatggagcaatgtcagtaggcaccatgaccaccacttctcgcttgaagctaggtctgtcccagggaattgtaatcaccgctggcctcataattggatg

SEQ ID NO: 228982 - DNA, 626 bp, Homo sapiens
atgcctctctctctgtctctctctgtctctctgtctctctgtctctctctctcatgtgtgtgtgtgtgtgtgtgtgtgtgtgtgtgtgtgtgtatgtgtatgtgtttctatttaattgtgggcagctaagctgatcaggccttggagagagccacacactttgtctttttttctgagggacattttgtccagttgaaatgagttagtgagtgcttctccttaagttttacctttactcagagtctgstggtggatttattctctgcagcttgtgcacctactctgaatatcacttcaatggttgcaaactggcaatgaatggatgcattagtcagggttctttgttgccacgagccaaaactgaatctggctgattaagcagaaatagtgtctattaaaagaatattgggtaactcacaaattttttggcatggaaaaaccaagcttcaggctatgtttccaggaatgatgccaacacctttcctgcagagttcacctgatgaagcattactgacgctgccaccaccccatggagcaatgtcagtaggcaccatgaccaccacttctcgcttgaagctaggtctgtcccagggaattgtaatcaccgctggcctcataattggatg

SEQ ID NO: 228983 - DNA, 688 bp, Homo sapiens
ggtgggactcatcttcaaaacaatgtcaggacacaaagcagaaaagaaaaaaaatcaattacaaaattctgggatctcactctatgaggttgcttattcaagttttgactccactctccaattgacttgattctgattcctttgcaaagtcttctggcaattgctttttctatcccacccagcatttttaagagtaaggaacttactccatcttacccagtgctggatattcatgagactcattcttaaattcaaatactccaaattattttactctgaattatcaagtggacttcaacaatcacactaaatgtttttaaggatagcacttttgatgtcaaagtattataaaggttcaagcatttaaaawtcttattttttggctgtgtacggtagcttgtgactataaccccagcactttgggaggctggggcaggcagatcacttgagctcaggagtttgagaccagcctgggaaatatggcaaaaccctgtctctacaaaaaaatacaaaaattagctgggtgtggtggtgcacggctgtggtcccagctacttgggaggccaaggtgggaagattgcttgagtccagaaggttgaggccacagtgagctgagatagtgcctgtattctagcattggtgacaaagtgagacccagtctcaaaataaaataaaataaaaatcttat

SEQ ID NO: 228984 - DNA, 604 bp, Homo sapiens
tctgcccctgccaatcagtgtgaacatagcttaatttgttgatctagactctttctgctcagttgctgaacctttaaaaacataagctctagagagttagatttccagtgcataaaatacttgatgcactattgcttttcatactrtatgggaataaaataaaacagccaaccctttatatgtctgccattctttaccaactctcactgagctattacacacccagacaaccccttgtctactttgatgatttccttggcacagcaaaccgggaattaaacatgttttttgtaccaaagatgttgattacaacaaaaatatgccttttttgtcataaaataatagatacttgcaaaaataacactttatgtttttgttatgtaatataaatgaaacataaggatttcaagaaatgaacaaagacatagatatttttcaccttttgtgaagtataaattaaagcactttctaatacattatttgtttatttaaatatgtataagcatgcaacaccacagtttactacctcagttagagcaaatttagcatatttgatgtgttacttaggattaagaactccaaattgccaatagtcatgtatttt

SEQ ID NO: 228985 - DNA, 604 bp, Homo sapiens
tctgcccctgccaatcagtgtgaacatagcttaatttgttgatctagactctttctgctcagttgctgaacctttaaaaacataagctctagagagttagatttccagtgcataaaatacttgatgcactattgcttttcatactgtatgggaataaaataaaacagccaaccctttatatgtctgccattctttaccaactctcaytgagctattacacacccagacaaccccttgtctactttgatgatttccttggcacagcaaaccgggaattaaacatgttttttgtaccaaagatgttgattacaacaaaaatatgccttttttgtcataaaataatagatacttgcaaaaataacactttatgtttttgttatgtaatataaatgaaacataaggatttcaagaaatgaacaaagacatagatatttttcaccttttgtgaagtataaattaaagcactttctaatacattatttgtttatttaaatatgtataagcatgcaacaccacagtttactacctcagttagagcaaatttagcatatttgatgtgttacttaggattaagaactccaaattgccaatagtcatgtatttt

SEQ ID NO: 228986 - DNA, 604 bp, Homo sapiens
tctgcccctgccaatcagtgtgaacatagcttaatttgttgatctagactctttctgctcagttgctgaacctttaaaaacataagctctagagagttagatttccagtgcataaaatacttgatgcactattgcttttcatactgtatgggaataaaataaaacagccaaccctttatatgtctgccattctttaccaactctcactgagctattacacacccagacaaccccttgtctactttgatgatttccttggcacagcaaaccgggaattaaacatgttttttgtaccaaagatgttgattacaacaaaaatatgccttttttgtcataaaataatagatacttgcaaaaataacactttatrtttttgttatgtaatataaatgaaacataaggatttcaagaaatgaacaaagacatagatatttttcaccttttgtgaagtataaattaaagcactttctaatacattatttgtttatttaaatatgtataagcatgcaacaccacagtttactacctcagttagagcaaatttagcatatttgatgtgttacttaggattaagaactccaaattgccaatagtcatgtatttt

SEQ ID NO: 228987 - DNA, 595 bp, Homo sapiens
ctgtcaagagtggagccaggtggagatgactgaatcatagaggtgattttccctatactgttcttgtgatagtgagaaagtctcactagatctgatggttttataaatgggagttcctctgcacaaactcttgcctgccaccaatatggtattttttttatacattggataaaaataaacaattttttagagacaggatcttgctatgttgcccaggctgccatgaaacacccaggctgaagcaattcttctgcctcagatgcctatgtagctgatactataggtgcatgccactgtgcctggcaaaataaaccatttttgataataagttaactgaaatcgatttgaagcaaattcttaccagattttaaacgggcatcattgaacttttaaaataattattctgytaatgtagccaactgttaagtagaaatcatgtcacttatatgtgggtataagaaaatttatgagtggaattattccccccaaatatattaatatcttgaagccttcactcccaggtcctcagcatgtaactgtatttggagatggggcctttatgattaagtcaaaatcacctgacacggtggggagg

SEQ ID NO: 228988 - DNA, 579 bp, Homo sapiens
atctatcttagcactctgcattctgcccttgaaaaggtgttagctaaaataataatgatactaattaagatgttagttatgttatagctggacagggttgagaaaagagaatgggtcaagaatgtttggtgtgcttctttctgatttaaactgcatctaaaattgagaacacrttcatgacatgttcatctcacacactactacgtgaaatgatggcagagctagacacaaagtagtgaactaataaaccccacctacattgtgcagatgcttctgttcacctcaatttttaaaattataaataaaaatccagctcacaatgttaagtagcacaacactggataattctgagagtaaaatgatgagtcagaactaaaattttgattcagaaatgtggaggccattggcaaccttagtaagatcagtttcttttttaattatttaattgactcatcataattgtacatatttataaggtacatgtgtcattttgatacatgtatatgttgtgtaatgatcaaatcagggcaattggtatacgtatcacctcaagcatttattatttctttgtgttaggaa

SEQ ID NO: 228989 - DNA, 579 bp, Homo sapiens
atctatcttagcactctgcattctgcccttgaaaaggtgttagctaaaataataatgatactaattaagatgttagttatgttatagctggacagggttgagaaaagagaatgggtcaagaatgtttggtgtgcttctttctgatttaaactgcatctaaaattgagaacacattcatgacatgttcatctcacacactactacgtgaaatgatggcagagctagacacaaagtagtgaactaataaaccccacctacattgtgcagatgcttctgttcacctcaatttttaaaattataaataaaaatccagctcacaatgttaagtagcacracactggataattctgagagtaaaatgatgagtcagaactaaaattttgattcagaaatgtggaggccattggcaaccttagtaagatcagtttcttttttaattatttaattgactcatcataattgtacatatttataaggtacatgtgtcattttgatacatgtatatgttgtgtaatgatcaaatcagggcaattggtatacgtatcacctcaagcatttattatttctttgtgttaggaa

SEQ ID NO: 228990 - DNA, 373 bp, Homo sapiens
taaacaaatggtgatgggaaaattggatagtcacatgtagaataacgaaaccggactcctatctctcaccacatacaaaaatcaactcaacaaatgggttaaagacttagacgtatgacccccaaatacaaaaatactacaagcaaacctagggagaactcttatagacattgagctaaggaaagaatttatgacaaaaccttcaaatgcacaggtagtaaaaacaaaaataaacaaatgagwctcaactacagaacttctgctcagcaaaattcaaaataactggactgaaaacacaacctgaaaaatgggcaaaaatatctgtaaactattcatccaacacggaagtaatatccagaatatagaaggaaac

SEQ ID NO: 228991 - DNA, 547 bp, Homo sapiens
ttatttgcccttaacttgccccctttttcttcgttttacattctaataatagcaattattgtcttatgtccaaatccaagaaagagagagaaagatgaatccaggaacaatccctcacaaaggtacaggaacatttccatattgtgtaaggtggaacatttctaggatgccttcctaggattttctatagcagaagccttccctcaaatggtagcctacacaaggctctctctccacgccagctacacaggaagaaaactaaaaaagagatagcaagaaawctcataagatcataagaaaggttctcaatctgataagaaagttcctttcccttggccctttggttcaatactaactgtgtgcccttgaatctgatatacacatgccactcgcagtgctcaggactagcacagatgttgtgttgaggcagaagggtgggtaatgtgcttcttttccatcagtgggtggatatctttttggtcatggaactccttaaacatggaatatagctttggatttgatccccccaaaatgcctttctgcattt

SEQ ID NO: 228992 - DNA, 618 bp, Homo sapiens
cacacatcccatgctcacactctatatgcatcagcaaatgcttatgacacaatcactataaaaaaccagatatatacacttacaatacatgaaggccctcagactcagaaatgtgttcttttcccaagtgccaacaggtatgtgagtgtgtgaaatgcaatgtccctacccataaagaaacataaaacaaatttaaataagctraggtgaaaaacaattcacttctttaatcttttatccttatagtgtttaaagtgacctcaaagcaaagcataattatgggcatatactcaatatagacacaaataaaactgataagtgcttgagggaaattatattctgctagctagaataagaataatggttttcctatttggtgttttttaaaagtgctttctttcctctgattaaaattaatttaagatgaatagatgtatttggaatttattaatgagtgaatatcatatatataattctgttgatattgtttggttctgtgcctccacgtaaatcttatcttgtattgtaatcttcacctgcggagggagggacctgtaatccccacctgtcaaaggaaggaggtgattggatcatggggggcagcttccctcatgctgt

SEQ ID NO: 228993 - DNA, 474 bp, Homo sapiens
attaatatcttacaccagcatggtgcatttgccacactaatcaaccaatattgatacacagtgtttaactaatgtctacactttacccatattttcttagcttttacttaatgttcttttactgtttcagaatcctgtccaggatattatcttgtgtgtagtcatagcattagtcagcattctccagagattcagaatcaatgggacatactaaagagattatattagtttgttctcactctgctataaagaaatacctgaactgggtaatttataaagaaaagaggtttaattggctcacagttctgcaggctgtacaggaagcatggcagcgtctgcctctggggaggcctcaggraacttttcttcatggtggaaggcaaagcaggagcaggtgtctgcagaagcaggacaagcagagggagtagagatgccacacactttgaaacaaccagatctcatgagaactcactc

SEQ ID NO: 228994 - DNA, 474 bp, Homo sapiens
attaatatcttacaccagcatggtgcatttgccacactaatcaaccaatattgatacacagtgtttaactaatgtctacactttacccatattttcttagcttttacttaatgttcttttactgtttcagaatcctgtccaggatattatcttgtgtgtagtcatagcattagtcagcattctccagagattcagaatcaatgggacatactaaagagattatattagtttgttctcactctgctataaagaaatacctgaactgggtaatttataaagaaaagaggtttaattggctcacagttctgcaggctgtacaggaagcatggcagcgtctgcctctggggaggcctcaggaaacttttcytcatggtggaaggcaaagcaggagcaggtgtctgcagaagcaggacaagcagagggagtagagatgccacacactttgaaacaaccagatctcatgagaactcactc

SEQ ID NO: 228995 - DNA, 474 bp, Homo sapiens
attaatatcttacaccagcatggtgcatttgccacactaatcaaccaatattgatacacagtgtttaactaatgtctacactttacccatattttcttagcttttacttaatgttcttttactgtttcagaatcctgtccaggatattatcttgtgtgtagtcatagcattagtcagcattctccagagattcagaatcaatgggacatactaaagagattatattagtttgttctcactctgctataaagaaatacctgaactgggtaatttataaagaaaagaggtttaattggctcacagttctgcaggctgtacaggaagcatggcagcgtctgcctctggggaggcctcaggaaacttttcttcatggtggaaggcaaagcaggagcaggtgtctgcagaagcaggacaagcagagggagtrgagatgccacacactttgaaacaaccagatctcatgagaactcactc

SEQ ID NO: 228996 - DNA, 544 bp, Homo sapiens
tgcagagtaagagttaattgatattgagatgtgagattagctggggaattttaggatgataggtatgttttattatttgattgtagaagaaattgcatgggtatttacattcatcaaaactcatcaaactgtaccttaaaatgtgctcatttattgtgtaaattatacctcaataatattgatttttaaaagtaaaatatggaccaatttttcaagatttttaaactcagacaacagagaaatgcccaaaactgtgaggagaaataattctagaaaatgttcaaataaaccgaaatttaatagttaaaacgggagtatgtcagagagacaatcattacggcattattatctgccatcataatgcagtagtagtatgtaacaagcagtgtggccgtgtaacttgagtacaaatttctggttccttttgttcatagttatccggccacgtaaatgtcttcaccaaatgattctgcacagaagtgatgtgtacagcttctaccttgttgctttacagaaaatarcttgtctgaccttccctgagttc

SEQ ID NO: 228997 - DNA, 606 bp, Homo sapiens
gaaaaaaatatgaatacactcatgaaaaaatgattagttattagaaaaatgcaaattaaacaatttttcatccattaaaatgtctaaaattacaaactattacaatattaagcatkgttcacgaagtggagcaactggaggtttcataacatttctggtaacatataaaattataccaccattttagaaaggtctctagaagttccttacacagctaaccacatattaaccccatagctcaacaatttcagtcacaggtgtttatccaagagtaatgaaaacgtaagtccacaaaaagactttttcaaaagtatttctgacagctttagtgtaatagtcaaaagctggatcaccacaagtgttgataaacagaagaatgaataaataaattatggtatgtcatttcaaagcatgatatttggcataaaaacaagagtgggcatggcctatgcctcaaaaacattatgctaaacaaaagaacccagactaaagaatttaggctttataattcaatttatataaaatatatcctttatgatttcatctatatgaagaataagcaaaatcagaaattagagcaatagttaccaatggcttatggagatt

SEQ ID NO: 228998 - DNA, 606 bp, Homo sapiens
gaaaaaaatatgaatacactcatgaaaaaatgattagttattagaaaaatgcaaattaaacaatttttcatccattaaaatgtctaaaattacaaactattacaatattaagcatggttcacgaagtggagcaactggaggtttcataacatttctgrtaacatataaaattataccaccattttagaaaggtctctagaagttccttacacagctaaccacatattaaccccatagctcaacaatttcagtcacaggtgtttatccaagagtaatgaaaacgtaagtccacaaaaagactttttcaaaagtatttctgacagctttagtgtaatagtcaaaagctggatcaccacaagtgttgataaacagaagaatgaataaataaattatggtatgtcatttcaaagcatgatatttggcataaaaacaagagtgggcatggcctatgcctcaaaaacattatgctaaacaaaagaacccagactaaagaatttaggctttataattcaatttatataaaatatatcctttatgatttcatctatatgaagaataagcaaaatcagaaattagagcaatagttaccaatggcttatggagatt

SEQ ID NO: 228999 - DNA, 606 bp, Homo sapiens
gaaaaaaatatgaatacactcatgaaaaaatgattagttattagaaaaatgcaaattaaacaatttttcatccattaaaatgtctaaaattacaaactattacaatattaagcatggttcacgaagtggagcaactggaggtttcataacatttctggtaacatataaaattataccaccattttagaaaggtctctagaagttccttacacagctaaccacatattaaccccatagctcaacaatttcagtcacaggtgtttatccaagagtaatgaaaacgtaagtccacaaaaagactttttcaaaagtatttctgayagctttagtgtaatagtcaaaagctggatcaccacaagtgttgataaacagaagaatgaataaataaattatggtatgtcatttcaaagcatgatatttggcataaaaacaagagtgggcatggcctatgcctcaaaaacattatgctaaacaaaagaacccagactaaagaatttaggctttataattcaatttatataaaatatatcctttatgatttcatctatatgaagaataagcaaaatcagaaattagagcaatagttaccaatggcttatggagatt

SEQ ID NO: 229000 - DNA, 606 bp, Homo sapiens
gaaaaaaatatgaatacactcatgaaaaaatgattagttattagaaaaatgcaaattaaacaatttttcatccattaaaatgtctaaaattacaaactattacaatattaagcatggttcacgaagtggagcaactggaggtttcataacatttctggtaacatataaaattataccaccattttagaaaggtctctagaagttccttacacagctaaccacatattaaccccatagctcaacaatttcagtcacaggtgtttatccaagagtaatgaaaacgtaagtccacaaaaagactttttcaaaagtatttctgacagctttagtgtaatagtcaaaagctggatcaccacaagtgttgataaacagaagaatgaataaataaattatggtatgtcatttcaaagcatgatatttggcataaaaacaagagtgggcatggcctatgcctcaaaaacattatgctaaacaaaagaacccagactaaagaatttaggctttataattcaatttatataaaatatatcctttwtgatttcatctatatgaagaataagcaaaatcagaaattagagcaatagttaccaatggcttatggagatt

SEQ ID NO: 229001 - DNA, 557 bp, Homo sapiens
gactgaacacatccagaggaaactaatggtcatttctttagtcagtaaccttacatgttttatttgttcataactaaagctcccgcagtgcctgtcacctgagaaaaccaatctctaagacattctataagagtttgtagttttctttcagggaatcccagctatgtcacagaacattgaaaatgtatctgttgcatgttcccttgtgaatttgttatcaattaaagagtttggtgtaaatgttaagggttaaacttgccattaaaggctttctctcatgagacattcaaccagaagatagcctgagcacacatcagatctggtttcctggagatgcatctcttagtacattgtaaaggaccttttaaaamtaattgccttgttgaacattatctttaaaaattttagaatgtcataagtaaattaaacgttatatttagtgttattttatttatttgagtttataatacttacccccaactaattctggcaaatcagatcaatgaaaagaaattaagagaaaacacatatgccacaaatgagcaagtctggaattc

SEQ ID NO: 229002 - DNA, 616 bp, Homo sapiens
aatattataggtacatgaaagtcaacatgaaaaattagaatgcagttattcactgacaaaatataagatcaaattaaatgggcttaggaaaaaccctcttgcaattgaataatgttgaagtcaaggtcaaattttaaaggaatgcatgattgtattacaccttacattttttttatcaacagcatggagaggacattttaattgactcagaaaatacattactattgaattatatataagtgtaaaagaaagtcacttaacctggtaatcagtagggaaaaaaacatacatgaagcagcattacatttatgcacataataaatataggcaaaatgtggaagagaaaattgtgagcaaaatgaaagatggccttgtctgaagaggacagaaagcctcacagagggacatatcttccctttgagcctgtgcatgtcctccacatacttcccttcctcacatttaagttaaaaggtgattttcagataaggattgtgattttcctggtctgaaaaccatacatggcttttagggsctctgaatccttgttagagttagatgataatacaatctgggcaacatttacactaattagcttgttttatacaaatgcaccagg

SEQ ID NO: 229003 - DNA, 511 bp, Homo sapiens
ttaaaacatcacttcagtatttaaacaatgcttacaatgtgaaatgaaaactcaaattatctaggtaatccctactggataaggagaaaaggctttgcttgaaatgccggccaatcagaatgaaacaaaacaattttttttggctacaaatattttaatagcctcacttttgcccttataaatacacaaatacactttctgagaataaaactgcacttaaaagtattttttcattaaaaattaagttatcagctttccacaagtttgtcaatccctgttacctatcrtaagttaccttttaacaagctctttatggacataaccactcacctatcacaccattcaatttattgacctcattttgcttaaaagtaaagcatcctacacatgttggtattttttttattttaaattatagaccaaagaagtgaaatgaaaataaagttttataatttttgactattaaagtgttgatacgttgatgttcaggagacaaatatatgtcagagat

SEQ ID NO: 229004 - DNA, 606 bp, Homo sapiens
tttttgcgtttttttttgctcttcaggaatgagtctcgctgttgctcattctgtggatccctgctgcgtttataagctgtaacgctcagcgctaaggtctgcaggttcagtcctaaaaccagtgagaccagcgacccaccagaaaaaactagcaactgcagacgcgacgcctttaagagctgtaacactcatcgcgaaggtttgcagcttcactcctgaagccagggagaccacgaactcaccagaagaaataaactccggacacatttgagcatctgaaggaacaaactccgaacacaccatcttttaagaactgtaacactcactgcgagggtccaagggtctgcagcttcatttttgaagtcaccaagaccaagaaccacaaattctggacacaacatcatttcctgtgggatcatattctggaatcacagaggtaatttattccaaygcaaatcagaattgcaatctatgtaacaatattacctacacttttaattgttcacctcccttctatttgagcacctttagagacaggaactcagaatactcactccacttgcatatcaccatctacatgccgcttacatgctgaaaattttatat

SEQ ID NO: 229005 - DNA, 622 bp, Homo sapiens
tcattctttatgtactacctttactttgagccacccagaaagtgaatattcttttctaattttcacaggatatctgaaatctagtagacagccatcgtcatttttcacaagattacttgtgaatcagaaaaaaagaatttatagtttctattcaagagctcttttcattaacttttcttaatctaatttaaaaatatttattattcactaataataagaattacctttcctagtatagcaggataaaatattcatgatagcacaattcaaaaatayaaaaaataaaaaagttcctcttcaagttctagcatggatctaaattaacaagtttaggggagcataccattgtgaattaataccattttagattcttttgaacataagtttgcaaacctatgttcaaatgatccagtttttcttagacacgtgttccttttcagatttcttctcctcctatgtttaccatcatgacacacctggtgcatatttgagaaatgtgtaatggccttgtggaaatgtctgagtcttatgttggacagctctgtgcagattctcatgctatcctcaaggcctgctgtaggtgaatggtctgaactagacctcaactcagaagtatggcagg

SEQ ID NO: 229006 - DNA, 438 bp, Homo sapiens
agtatggcttatctccttcccatttcctctgggaacatacttccccagcatgtactatatgtttatcattcctagtaaagcagagaactttactctcacagatatgtggtaaattaaaaaacttaaaatatattaaaatwtattaaaaatggaggtccctactacgaaaatattactaatacttagaacaaaataatgttaaaagtgtattatatatgtatattgtgatatataatacagtgatgacaatattgtaacaaacatgttttaaggaaagtgtgtacttggaatgtcaatcttccagaagcagtacagatatttaaggcaccaaattatgttgtcaggcataagttagtagtctaaatgacagtcttagttgtataagtgatagaagattaattcaagaagcacccaaatatgaaaaagaagtacattaaa

SEQ ID NO: 229007 - DNA, 438 bp, Homo sapiens
agtatggcttatctccttcccatttcctctgggaacatacttccccagcatgtactatatgtttatcattcctagtaaagcagagaactttactctcacagatatgtggtaaattaaaaaacttaaaatatattaaaatatattaaaaatggaggtccctactaygaaaatattactaatacttagaacaaaataatgttaaaagtgtattatatatgtatattgtgatatataatacagtgatgacaatattgtaacaaacatgttttaaggaaagtgtgtacttggaatgtcaatcttccagaagcagtacagatatttaaggcaccaaattatgttgtcaggcataagttagtagtctaaatgacagtcttagttgtataagtgatagaagattaattcaagaagcacccaaatatgaaaaagaagtacattaaa

SEQ ID NO: 229008 - DNA, 438 bp, Homo sapiens
agtatggcttatctccttcccatttcctctgggaacatacttccccagcatgtactatatgtttatcattcctagtaaagcagagaactttactctcacagatatgtggtaaattaaaaaacttaaaatatattaaaatatattaaaaatggaggtccctactacgaaaatattactaatacttagaacaaaataatgttaaaastgtattatatatgtatattgtgatatataatacagtgatgacaatattgtaacaaacatgttttaaggaaagtgtgtacttggaatgtcaatcttccagaagcagtacagatatttaaggcaccaaattatgttgtcaggcataagttagtagtctaaatgacagtcttagttgtataagtgatagaagattaattcaagaagcacccaaatatgaaaaagaagtacattaaa

SEQ ID NO: 229009 - DNA, 255 bp, Homo sapiens
acttctttcctttataagttaccgagtctcaggtatttctccatagcagcattagaaggaattaatacagacaatatctattatgcyagactgtttgttcattttcttctgtgaccaggcacctgcaagggtagtgtcaagaaactgctgaactgttggttgtttattcaagtgtatctattctatgtcagtattaaagaaagatgtatccaacaaataaataaaccaaccaaacaaacaaaaactgagttttat

SEQ ID NO: 229010 - DNA, 535 bp, Homo sapiens
gaccacctgcacataatataaatctctaatgcagtatcataaccacgatattgatgatggtatagtcaagatacagattaattagttcctaacaccatagcgttttcataatgccctcttatctacattcacctctcttccctacttctctgtatttccaaacaaaatattggcacatggtctgacaataaattaatgtctctgtggggttaacacatttatatcagcattcttgtataatgtaagttgtttttatctatactgtgcgttgtgrtttgcaatatatcttgtgaatgaatactattaactaagcactttctctgtcaccagtcagcaccctgtaaaaatgcaccaatcagcactctgtgtctagctaaagattgtaaacgcaccaatcagcactctgtaaaatggaccaatcagcagtctgtaaaatggactaatcagcgctctgtaaaatggaccaatcagcaggatgtgggcagggccaaataagggaataaaagctagccacctgagccaacagcggcaaacc

SEQ ID NO: 229011 - DNA, 613 bp, Homo sapiens
ttacttcatctgtaaacaatatatagctagacattcaatatatgattttctaaataataaattgatatttcagaacaccccagatggagactggcatccaataggtaactgatgaaatgtaacactaaaatatgaaagataagttatgttgaactcaatttttcatatttcaaaaattttagagaattagcctttcctgaaaaagaaaaataatatgggttgcctgacctgacttgctgactcaagaaaccttcmtgtcaaaccaattttaagtcttatgactgtatttatgttccaagacaattaggacttgaaaatcttttaaatactggaagttaatccgtcttctttcagactgtcatctagccaagtgttattggcttagttaggtaaaaatgattccaactaccaagaaaagattttcattttatttttaaagcacagtttgaatcctgatgctttctacatatttcctcaataaattaatctttgctttaacaaatgcaaatttaaatcacaaaaaaaaagaaaaatccttctaaaatgtattagtcaattttatggatctttataagtgctttaagattaatggagtatatatgtgccaaaagga

SEQ ID NO: 229012 - DNA, 613 bp, Homo sapiens
ttacttcatctgtaaacaatatatagctagacattcaatatatgattttctaaataataaattgatatttcagaacaccccagatggagactggcatccaataggtaactgatgaaatgtaacactaaaatatgaaagataagttatgttgaactcaatttttcatatttcaaaaattttagagaattagcctttcctgaaaaagaaaaataatatgggttgcctgacctgacttgctgactcaagaaaccttcatgtcaaaccaattttaagtcttatgactgtatttatgttccaagacaattaggayttgaaaatcttttaaatactggaagttaatccgtcttctttcagactgtcatctagccaagtgttattggcttagttaggtaaaaatgattccaactaccaagaaaagattttcattttatttttaaagcacagtttgaatcctgatgctttctacatatttcctcaataaattaatctttgctttaacaaatgcaaatttaaatcacaaaaaaaaagaaaaatccttctaaaatgtattagtcaattttatggatctttataagtgctttaagattaatggagtatatatgtgccaaaagga

SEQ ID NO: 229013 - DNA, 598 bp, Homo sapiens
gaacctggtaacccagctgggtggctagatccagaagggaaataacaatcactacagtttggctctcaggaagccacatccctaggaaaagagggagagtacaaaaaactgattcttrggaaagataattaaaattgatgagcattggtgagattaaccaagaaaagaaaagagaagatccaaataagctcaattagaaacaaaatgggagatgttaccactgataccatagaaatacaaaagaatattcaaggctacaatgaacacctttatgcgcataaactagaaaatctagagaagatgaataaattcctggaaatgtgcaacattactagattaaaccgggaagaaatagaaattttgaaaagaccaataagaaacagtgaaattgaatgataatttaaaaattgccaattaaaaaaatgtccaggaccagatggattcacagctgaattctatcagacattcaaataattggtaccaatcctgttgacattattatataagatatataaagaggaaattctccctaaatcagtctatgaagtcagcaccactctaataccaaaaccaggaaaggacatgacaaaaaaagcaa

SEQ ID NO: 229014 - DNA, 598 bp, Homo sapiens
gaacctggtaacccagctgggtggctagatccagaagggaaataacaatcactacagtttggctctcaggaagccacatccctaggaaaagagggagagtacaaaaaactgattcttaggaaagataattaaaattgatgagcattggtgagattaaccaagaaaagaaaagagaagayccaaataagctcaattagaaacaaaatgggagatgttaccactgataccatagaaatacaaaagaatattcaaggctacaatgaacacctttatgcgcataaactagaaaatctagagaagatgaataaattcctggaaatgtgcaacattactagattaaaccgggaagaaatagaaattttgaaaagaccaataagaaacagtgaaattgaatgataatttaaaaattgccaattaaaaaaatgtccaggaccagatggattcacagctgaattctatcagacattcaaataattggtaccaatcctgttgacattattatataagatatataaagaggaaattctccctaaatcagtctatgaagtcagcaccactctaataccaaaaccaggaaaggacatgacaaaaaaagcaa

SEQ ID NO: 229015 - DNA, 639 bp, Homo sapiens
tttattggatctcagattttccgtctggagacagtttccttcattctgctatggctgcatgtactttgtaagtcctggtttgggataaattttattcattgcatctatctgtgaagtccttattgaaacttttctcttgctatgtaattttgttaggtacacccttctgtttaacatctattttcctttagcacttagaaaatattaatcatcattcttctgacttctgttcttgctgctgctaaattggctgttggtctatttgtaatttatttgtaattatctgccttttctttctgatygatttttaaaatagtctttgttatgcatctaggcatggttttcttttatttattgtattgacatccactgggctttctgtcttttatcactcttataaagtattatgccatatttttcaaatattgcctctttttgatgtaatagtctccctgacactcagattttgcatatatcaggtcttctcgctgtgtgtttcatggcttgtaataacacttccatattttctattatgccatctacctggtcttcattctgtgtaatttcttcaaatatgtgttcttgtttatcaaagctttttaaactgcctttaaaaagatatttttcacccatcacatg

SEQ ID NO: 229016 - DNA, 646 bp, Homo sapiens
cagcagcctccacaatgttattgcctgctatttcttccttcaaaatagcattagcctttagtatccatatgtttctgctaggttagacatggaactgggggaggagtaccatggtctaagttctagtctcatccatactacacctcatgatcctgaatatcttgggcaaatcttttgtcttctttaaatttcatggtttgtggccatgaaaaggtaacattgcttagataatatttagctcctttttagctctaaccatcaaagtttccatgatcccaggcctctcttcatggtcttctattctggttcacttgagttatctacttacaacatttttattgctacttagctgcaatttttaaaaacaaaaacaaataagcactagcttctataattaagatttctcaacagtttctataatgcatttgatacatttgaaaggttgtggaaaactgaagcttctgtcattacacacacatcgaaggaaaaccctgtgaaataatgaggacccatggaaacaatgggctagtgtgagcacacatgtgtgarttctgggtgctaagagagccgtatggctagcaggctctatggagtcataatattgacatcttgctgctttatggccttcttttcaatttccagcccc

SEQ ID NO: 229017 - DNA, 347 bp, Homo sapiens
agatctgttttaagcattcatggagggtctttttgaagagtttgctatttttgcctgtgtttttctattacattttaagggctgagatgggaataggcagcagtcttagggaatattaagcttatccttttgtatgagtaacttatcaactcgaactttgaacaaastagtcgcagcctcctgattgtcattctctcccttttcattaaaggatatgtatacatagacttacatagtggcctgtagaaaagacagggaaaaataaaattaccttgcttacatctggaacctgaggccccagagggagggtggcttcatcctgttaaggactaacatctatttagtga

SEQ ID NO: 229018 - DNA, 610 bp, Homo sapiens
tttgaattttataggaattccagcaaaaatcaatttttgaacatcaaccagagcacatttctcagctcttgcattccttggagtctagataaacacatgtactgggaagattttaggctcaatgatttcttagttatttcttagttcaaccataaagccagtaactgtgaccatttagattattgtcgttcctttcagagactgcattttccaaygtgaaaaaatcccagctcttcttatctaggctttttaggcacataaatcaactatatagaagccacaactccattgcctctcgtatgaggaactaattataaaacaaattactcctaaacttagtggtgtaaaacaaacatttattatgatcatgaattctgtgtgtcagaaatttggatgaattacagcaggggtgggttttctctgctccaggagacctggagtttcactggaagatgcaaagtcagaggataaaatcataggaaggcacacatgagagagagagagagttaggcaattgccatgagactttaagacttggtctcacttacataacatctcttttgcatcattctttttgtcaagatagccacaaagtcctgcacaggagaaa

SEQ ID NO: 229019 - DNA, 513 bp, Homo sapiens
atactactaacaattagttacttctagtatcaatttaagcacaaaggcacataactcaggcaatctcttttctacaaagctgtaaactctgatgtcaactaaattaattagttttctctttaggaaatttatcacaaaattttctatttttgctgtgatactggcttgaggatgttgtgaatggttgtagccagaaacatatttatgtgttttgaggattgtacatttgcattctaggaaaaatatttttctacacatacatagtgaaaaactaactggaaagtagacagagttgggtctcacactttgccattcactaaccttcatgtgcagcactcaccaaccwtgttccatctttactagaagaagaggaggtaacaaatattttagtattaactgcagatgacaaaatgtgtcaatcacagttctagacatttttgcaagagttagtattttaaatttgttcttcatcaaaaaattatgttctctgggttttggctcttcagagaaatc

SEQ ID NO: 229020 - DNA, 513 bp, Homo sapiens
atactactaacaattagttacttctagtatcaatttaagcacaaaggcacataactcaggcaatctcttttctacaaagctgtaaactctgatgtcaactaaattaattagttttctctttaggaaatttatcacaaaattttctatttttgctgtgatactggcttgaggatgttgtgaatggttgtagccagaaacatatttatgtgttttgaggattgtacatttgcattctaggaaaaatatttttctacacatacatagtgaaaaactaactggaaagtagacagagttgggtctcacactttgccattcactaaccttcatgtgcagcactcaccaaccatgttccatctttactagaagaagaggaggtaacaaatattttagtattaactgcagatgacaaaatgtgtcaatcacagttctagacatttttgcaagagttaktattttaaatttgttcttcatcaaaaaattatgttctctgggttttggctcttcagagaaatc

SEQ ID NO: 229021 - DNA, 574 bp, Homo sapiens
ccctctgagtctctaggaagttccaaactttcccacattttcctgtcttcttctgagccctcmaaactattccaacctatgcctgctatccagttccaaagtcactttcacatttttgggtatctttacagcactgccccactacccagtagcaatttatcagtcccttctcatgctgctatgaagaaagacccgagactgggcaatttacaaacgaaagagattcaattaagttatagttctgcagggatggggaatcctcaggaaacttagaattactgcagaaggggaagtaaacaggtccttcttcactaggtggcaggagagagagacgtgcaaggcaaaggaggaaaagccccttataaaaccgtcagctctcttgagaactcactcactatcaggagaacagcatgaggataaccgcccccatgatccatttacctctcactgggtccctcccaagacacatggggataatggaaactacaattcaagatgaaatttgggtgaggacacaccatgttactatgcttgtcccagaaaattgtttactcttaaaatgatttcaaatcat

SEQ ID NO: 229022 - DNA, 574 bp, Homo sapiens
ccctctgagtctctaggaagttccaaactttcccacattttcctgtcttcttctgagccctccaaactattccaacctatgcctgctatccagttccaaagtcactttcacatttttgggtatctttacagcactgccccactacccagtagcaatttatcagtcccttctcatgctgctatgaagaaagacccgagactgggcaatttacaaacgaaagagattcaattaagttatagttctgcagggatggggaatcctcaggaaacttagaattactgcagaaggggaagtaaacaggtccttcttcactaggtggcaggagagagagacgtgcaaggcaaaggaggaaaagccccttataaaaccrtcagctctcttgagaactcactcactatcaggagaacagcatgaggataaccgcccccatgatccatttacctctcactgggtccctcccaagacacatggggataatggaaactacaattcaagatgaaatttgggtgaggacacaccatgttactatgcttgtcccagaaaattgtttactcttaaaatgatttcaaatcat

SEQ ID NO: 229023 - DNA, 620 bp, Homo sapiens
aggaaactgctttgttttcctttggttgaaaaggactagtggagctgcaggaagcttggaagttcatcagtgggaatggagggaggctgccaagaaggtgaggggaaggggaagggccacagacacagattttgtctacttgggaattttgaatgggattgaccctaccactcagtaatagttaaaaatgaaacaaaacaaaaaacaagggttttgagtgttgtttgaatccaagtgtactatttcaatagtggaactgagcaagacttataaagctggcatagggaagggtgattaggattgcaaacataagcatgaggtgtaaatcatgacatttattttggcatggaagccagatcattgtttgaggaacaccttttgaaacccaaatgtagagggcagaaaatggtgttggctttttacactatttctctctttttgaggtaagtcagagagttgagttatgaagcattaaaagatcakttttttcccacattcaattttcttctttgcacttagggaaaaccttttaggccaaagaccatctgaagtggccctggttcctccatgtttaactcactggcccctaatttctgctggaccttcatttcagtcgactg

SEQ ID NO: 229024 - DNA, 623 bp, Homo sapiens
tacattagtagtcttgctgtctgtctttgatgaaaacaaggtctctaccgttgtttgtttaatattatgtttatgcatcttgtttgtstctcagaaatgctgaaagtgagagtggtgagtcatgtatgactcatgttctagtgggtcttaaccatttctctacctacctaatcacactttgctcagagcccccaaaacttgactacctgaatgactgatgttgctgggcttatgataatctcttattttgcttcatctcctccaaagaagccatttagagcaaatattttaaggacttaaaacaaattttattctcccaaacttgccctctcttaaaaaaataaataatcaaatgcatccaaagcaagagggaaggggaaagtgtaggagagcaaacgaaacactccatgcaggggttttattgaaagatctttgtggtattttgcttttgaaatgtgttcagcacagactttaaggattggcaatttgtttaaagaaatgggtaaaatatttaaaaccaccactttatttaaactattgtgcctccttcagtaaacattcagcacatgattgaaccctgtatgaacttgtgcttttgctggttaaatagaatctaagcttaa

SEQ ID NO: 229025 - DNA, 574 bp, Homo sapiens
cacataattacaaaaagctagagtaaatggggaatattttaatattcaataagcaatagcagtatggatagctacccaaaaatccatttatatctataaattatacctaatagcaatgtcaattctagctagatagaagtttaatataaaagtagtcactaaacaatcaaaacatttatgaacattgtttaactttttttactttcatatttctttttttaacttttattttargttctgaggtatgtgtgaaggtttgttacacaggtaaacccatgtcacaggggttcgttgtacagatcatttcatcacccaggaatgaagctcagtacccgatggatatttttgctgctcctctccgccctcccgccctccatcttcaagtggaccccagtgtctgttgtttccttctttgttaaactgttaaagtgtaatgttttcatactcttgtgtgaaatagatacatacatatatgtgtatttgcagcagtcccctcttctccatgtttttgctttgcacggtttcagttacccatgctcagccacggtctgaagatattaagatattttctgag

SEQ ID NO: 229026 - DNA, 546 bp, Homo sapiens
gtatttgagaagttcaaaggaatacttggattttctgatgtcaaagtggagtgtgggatgagaaattacctagtgagtacaatgtacaccatttgagtgatggataaactaatagcccagacttcatcattacacaatatatccatgtaacctttgttaaagttagtcattctgaaacatcctttgaccttttatttttctcatgaactccctacttatttcctacatgctgtaactgtacactgaaagcatagaataaaaatgctatcttctggtgacgatagacactggagagtactagaggcaggaggaagagatgagggcaagtgtggaaaaactgttggctatgatgctcrgtagagaggggatcatttgtaacccaaatctcagtatcacacaatttttttacccaggcaaaaaaaaataaaaaaaaaatctgcacattgcacatatactccctaaatctagagtaaaagttgaaaaagaaaaaaaaatcctaccttttattattagtgtgtgcccatatgtgtgcgtgccttctcttct

SEQ ID NO: 229027 - DNA, 558 bp, Homo sapiens
gcaattactaatatattttctatttatactaaaatgattagcttatcttaaatagctactttgttcctgcaaagatagttgcaaacattatgttaagcatttgcagcaataatgyagattctatctagtttactaattctattaatcctttaaataccttataatgtggccaaaagtagatactagagactttctgaagatgacttttttatcaaaaaataattttattcatctttcctgttaattagcatcccttttctctcatcactgcttttggaaattttccctaacttctatctaatatgtatctatcccaatgagattttcttcctaatgattccaattataataaatattcttattcaggtcagctccataatatcacttaaagaagcagtgaaaaactcaggaaatgtctttacagaacctgtattatcaagatcccttccaaaaattccaaaataaatggattggcatgggagaggtagattttatatctctgaatctttatttcagaaatagaaaatacctgttatgcgtcaatttattcttcctttt

SEQ ID NO: 229028 - DNA, 558 bp, Homo sapiens
gcaattactaatatattttctatttatactaaaatgattagcttatcttaaatagctactttgttcctgcaaagatagttgcaaacattatgttaagcatttgcagcaataatgcagattctatctagtttactaattctattaatcctttaaataccttataatgyggccaaaagtagatactagagactttctgaagatgacttttttatcaaaaaataattttattcatctttcctgttaattagcatcccttttctctcatcactgcttttggaaattttccctaacttctatctaatatgtatctatcccaatgagattttcttcctaatgattccaattataataaatattcttattcaggtcagctccataatatcacttaaagaagcagtgaaaaactcaggaaatgtctttacagaacctgtattatcaagatcccttccaaaaattccaaaataaatggattggcatgggagaggtagattttatatctctgaatctttatttcagaaatagaaaatacctgttatgcgtcaatttattcttcctttt

SEQ ID NO: 229029 - DNA, 583 bp, Homo sapiens
acaaattaccacaaatttagcagttgacaacacatttgctatttgtttatttatatttcatagttctgtaagttacaagtcaaagcagattcaaatggattctctgcttatgatatttcaagtccaaaatcaaggtgttggccaggctgggctcttatctgaaggctttgggaaataatcctcttttaatttcattcaaatggttgacttaattatggtcagttgtgtcagatgaaagtggttaaattcaggtccccattgcattgctggctgccaggcataatctattttattccttgaaaggccacttgcattcatttacatgccccctttcatcttcaagccaatggtcaccgttaaatccctctcatgctaccactwctctggttttcctttctgctaccagtcagaaaaaggtaactgcatctgcttaaataatagccttactaatatataattcatgtagaacaattcacaaatttaaagtgcaaaaaattgatggttttagtatatccatatggttgtacaagcatcactacagtaaatttcagaacatttttattaccacggcattgttaaactt

SEQ ID NO: 229030 - DNA, 540 bp, Homo sapiens
tacagggataaggcatcgtgcccggccttaactaaattgtataaacagaagtaaagaggacataccatatattgagtgaaattttttccatgagcatcttggaccaatattacttcgtagaactttaatatttttctgatcctttccttgcttagcatttgtaccattattaataattttgagccttaattcactacgacttgctaagccatttcttcctctctctccatatgtgctttataatcacaaatccttcagatttctactgtagacagattattatttcataatgctagaaaaattgtgaacacattcagscctttaaattaaaaccaaaaataataatgcaagaaatcataaatatctctacatgtaagtgtttctgtgaaacattaaacatgttatgtataaaaatacctaaaacccatgtttctggaaatatttaccaattaaaatatgcttcatatttaattatcagtaacaataagtacactagcaaagagataatattacagtagtcaactcaggacttcactttgt

SEQ ID NO: 229031 - DNA, 545 bp, Homo sapiens
atggtgaatggtgacactcccatttccacccgtttatttcaggacctgtgaatcctggctattggagaacgagtatcacatactgggcactgactcacagcatacacagccttttatggagaaccttgccctagctcatatgtattgcaacctagttggtgctataaatgaatcttcacaaaggcattccaccattctactaatccatctgttttgggacagggaggtgaggaaacagggcaataacagtgaatcctgagtatgtgcccattgcccccatttctttggctatgaagcaacatccttcctttacattaaaccaaggtagattgggcatttccaatttgttcatgttaggccatattwtgacctttccatgttacagtttcatttatgtgctccattacataatttaaattttattcaacttttttctcttaaagcagtaagtggagatttggtgttattgtttgatgttattaagaaaaccgacattattttatttactgtagatgttgaaacctggtatttcatgttaattgcag

SEQ ID NO: 229032 - DNA, 414 bp, Homo sapiens
gggtttgagaccagcctgggctacatagtgagactctgtctcaacacaaaatgaaaagttttatttctcaaatgtcaaataatttaaaaattcctgggcgattaacttctgctatgggtctttagctaggtgattagctctgcatggacatctttacctcttgacacatccttggctaattatcttacatctattaagtctctctttcatcatccctgtttcaaccaggccttatactgtcaatcctattctagccagcactactggattccctctacatttttctttgtcatctttctatattatctcctaacattctgtataattaacctatttattaakttcattgtttattgtctatcttcccctattagaaggcaaggtctacagggcataaatttttttcttacttga

SEQ ID NO: 229033 - DNA, 421 bp, Homo sapiens
atttccattaagaattgtatgagaatgcttgggttaccaaactataggcattattttgtaaatctgatagaagaaaatgaactttcagcattgtcttagttggaatgtctactcctcagtgtaagtagtctcaaaatagtttgttaattgaacataaatacttcttggtaaatttattttcctggaaattttcccattgcatttttggcattgttgaattaatgggatttattgttgtttcaagaataattgtaattgctgatttgaaagtggtgctgtggccaaaaatgccatgtgtctcaattaatttgaagaattatttcagaaataatggacagtgtatacataaaaactgaaatatattttagctataattatttataaatagtgcytattaacacatttaataatgcatgcaacc

SEQ ID NO: 229034 - DNA, 303 bp, Homo sapiens
gtccagtcttggaagctaagcaggatcaggcctggttagactttgaatgagaggctggcctccccatagcgcagcagagcagcagtccccttcagggcagggtctgggtgtggctgcttgggccgagctcccctcccccagtgccagctgcttcctgccacagcatggagcytgtgttaccatttacccagccctcccacatgccagggccaccatcccacaacctgcgagatggctgtgtcatctgcattttacaggtgagcaggaagaggctgagagaggtgaagagctcactctggtcac

SEQ ID NO: 229035 - DNA, 303 bp, Homo sapiens
gtccagtcttggaagctaagcaggatcaggcctggttagactttgaatgagaggctggcctccccatagcgcagcagagcagcagtccccttcagggcagggtctgggtgtggctgcttgggccgagctcccctcccccagtgccagctgcttcctgccacagcatggagcctgtgttaccatttacccagccctcccacatgccagggccaccawcccacaacctgcgagatggctgtgtcatctgcattttacaggtgagcaggaagaggctgagagaggtgaagagctcactctggtcac

SEQ ID NO: 229036 - DNA, 661 bp, Homo sapiens
ttccctctcctgggcaggctgcctgagctggaggtagcagtgcccaccccaggccactcagcctgctgtctcctaggtctgcatccaggtcagtcactgggcrttgcaggaaggtgatccctcagacacagtctggtctggtagaatgtgaccagccttggggacctgtcagggcacaggctgaccacaggctcctgtcccaatgaaacacaccacggggcccttcccaagcacctggcagctgctacacccagaggtcactgtgttgctgtgaccaggaccaggttgctcatcactgtgtagcatctgttctttgcttagtactgattagcacctttttcaacatggtcctatttgcaaatttcttctctgacacacagcagcctggctgctctacacatatgccctcagtctactcactctgtgacctccccatgctgcttagtggaggctagactttcaaaagaccaggtagcaggaggctgtctgctatgagagatcaagctcccctaccttcactgtaaaaccacatgtgcaccaaaaccactcccttctgtatctttaacccctctctctcagtagtcatcatccccataacaacttcaacctgttcaattctcccctgcatttcaaagccccacccctttatggaaatgactgg

SEQ ID NO: 229037 - DNA, 539 bp, Homo sapiens
ttggcaaactaggtttatttttatgaattgccttctaccttattctaccattattcagtttatgattttatgcccatattttgctctttatacatgtgaaacttattttttaaattattttggaaagagtttttaaaaaatgttaattgacataataaatgtacatatttatgctgtacaatgtgatattttgatgtgtgtattcaatgtgtaatgattaaatcagagtaattagcatgcgtattacctcaaatgtttatttactttttggtgtgtgttggggacattcaaaatccactcttctagatttttgaaaatacataactaattgctgttaattaatggcaccctatagcattatagaacactagaactttttccttctatttagctctaattttgtgtctgttaaccaatytctgactattcacacccccgcccaacttcagatggactaagacaagacttaaatatgagaccccaaactgtgaagctgtggtaaccgctattctactctctacttccatgagactaaattt

SEQ ID NO: 229038 - DNA, 558 bp, Homo sapiens
ggttattttaaatgattaacaaaattgatacactttcagctagactgartaaaaaaaaaaacccaaatcaaaaaagagcaagagcacaaatcactagtatgaagaatgaagaagagactatcatcacagattaaatataaaaaaatttgtatttttaaaatatttaataaagatattttaaaaaataacagaatataataaagcacttaataccaacaaatttgacaatttcaaatatatggaccaattcttgaaataatacaagtgacccaaattgacagagataaaacagaaatataaattgccaattttcaagaataaatctgttatcagagactttgccacaaagaaacccttgcctcagaaatgttcccttggtgaattcaaccaaatatttaagaaagaaaaaacaacaacattatataaaatatttgaaaggatagaggaagaagaaatacatcccaatacattttatgagaccaacatacatcttataccaaaattctcaaaggcataatcaaaagagaaaattatagaccaatttgtttaatgaacatt

SEQ ID NO: 229039 - DNA, 558 bp, Homo sapiens
ggttattttaaatgattaacaaaattgatacactttcagctagactgagtaaaaaaaaaaacccaaatcaaaaaagagcaagagcacaaatcactagtatgaagaatgaagaagagactatcatcacagattaaatataaaaaaatttgtatttttaaaatatttaataaagatattttaaaaaataacagaatataataaascacttaataccaacaaatttgacaatttcaaatatatggaccaattcttgaaataatacaagtgacccaaattgacagagataaaacagaaatataaattgccaattttcaagaataaatctgttatcagagactttgccacaaagaaacccttgcctcagaaatgttcccttggtgaattcaaccaaatatttaagaaagaaaaaacaacaacattatataaaatatttgaaaggatagaggaagaagaaatacatcccaatacattttatgagaccaacatacatcttataccaaaattctcaaaggcataatcaaaagagaaaattatagaccaatttgtttaatgaacatt

SEQ ID NO: 229040 - DNA, 558 bp, Homo sapiens
ggttattttaaatgattaacaaaattgatacactttcagctagactgagtaaaaaaaaaaacccaaatcaaaaaagagcaagagcacaaatcactagtatgaagaatgaagaagagactatcatcacagattaaatataaaaaaatttgtatttttaaaatatttaataaagatattttaaaaaataacagaatataataaagcacttaataccaacaaatttgacaatttcaaatatatggaccaattcttgaaataatacaagtgacccaaattgacagagataaaacagaaatataaattgccaattttcaagaataaatctgttatcagagactttgccacaaagaaacccttgcctcagaaatgttcccttggtgaattcaaccaaatatttaagaaagaaawaacaacaacattatataaaatatttgaaaggatagaggaagaagaaatacatcccaatacattttatgagaccaacatacatcttataccaaaattctcaaaggcataatcaaaagagaaaattatagaccaatttgtttaatgaacatt

SEQ ID NO: 229041 - DNA, 548 bp, Homo sapiens
tcttggctttagctgcctcaaatctattctttcccttcctcctgggtgagacttgccatatgggtgctcagtataaaaaggttattgcagaaaatgtaaaggattctttttgcgggtatgagaaacagtgcattcttcaagatcttgctaatgcagccgtgccttgatcttcctaccctgaaagggaagattgaatgatgtttttaaatcctttcttcttctgtaataaaattgcatccacacttggctttcgcagtgtctccctctgttggtggagtctccttccctgcccctttgatgttgacgttgtcttgataaattgtctcraccagtggaatgttgacagacacaacatgagaggaggctttaaatttgtttgtatatcatttttgttttcatcagtgtaggctgatatgacaaatatactatagactaggtggcttagataacaaacatttatttctcatagttctggaaactggaaagctaaagatcaaggaacgggcagatctggtgcttggtaaggcactcttcctggttttcagatg

SEQ ID NO: 229042 - DNA, 619 bp, Homo sapiens
aggaagggagccaacatttatgacttgggtctttgaagggaattacgctgcatcatcccagatgaccataggaaggagaaatgtggtcttttatttggagggagtggtggaaagagttttacaggagtggaggagactgagcatcttctgcctagagaggggatgtatctgagtagcagacactggcctgggaaatgaaagtgtgctgccatgtctgtgtgcaatgagaagaaccactatgcaaagcatctcagtgccttatggagtagctgtgccttggatcaacgtttgtagtcaaaggactcagcatacagggggaaactacatccactgccatraaataaggacctgttctctactttattcctaaaagttactccaccctcaaggaatagagaggcagtactagaagggggaagctcacatattctataaatatttccatagacactgctcataaacccacaaaacaagcccattcactcatacacacaaattcacaatcatacgaactcagtaatatacacagcgcttctatcattcactcatttttttagtgaccgcaaatgtatgcatatatgggtgtgtgtgcatgtatgtatgtgcaagtacatgtatg

SEQ ID NO: 229043 - DNA, 572 bp, Homo sapiens
ccataggaaggagaaatgtggtcttttatttggagggagtggtggaaagagttttacaggagtggaggagactgagcatcttctgcctagagaggggatgtatctgagtagcagacactggcctgggaaatgaaagtgtgctgccatgtctgtgtgcaatgagaagaaccactatgcaaagcatctcagtgccttatggagtagctgtgccttggatcaacgtttgtagtcaaaggactcagcatacagggggaaactacatccactgccatgaaataaggacctgttctctactttattcctaaaagttactccaccctcaaggaatagagaggcagtactagaagggggaagctcacatattctataaatatttccatagacactgctcataaacccacaaaacaagcccattcactcatacacacaaattcacaatcatacgaactcagtaatatacacagcgcttctatcattcactcatttttttagtgaccgcaaatgtatgcatatatgggtgtgtgtgcatgtatgtatgtgcaagtacatgtrtgcatctatgtgtgtgcatt

SEQ ID NO: 229044 - DNA, 595 bp, Homo sapiens
gatggaaaccctaaaaaaaatatgaaaactttcatctttctgcttggacttgataatctaatgactgagctcaaggaggaggattaggactgttcttgtgctctggacatagccagaagtgctatcattaacaaaataataatgaaaagtagctctctagattccttctatctggtcagggcatctctgaaagaaaggcagcaggcccagttaggggcttatagataaaattcccatctccctgggacaaagcacctgggggaagtggcagctgtgggtgcagcttcagcagactcaaatkttcctgcctgctggctttgaagagagcagcaggtctcccagcacagtgcttgagctctgctaagggacagactgcctcctcaagtgggtctctgaaccctgtgcctcctgactgggaaacatttcccaaaaggggtcgacagacacctcatacaggagagctccagctggcatctggcaggtgcccctctgggacaaagcttccagaggaaggaacaggcagaaatctttgctgttctgcagcctccactggtgataccctggcaaacagggtctggagtggaccctagcaaac

SEQ ID NO: 229045 - DNA, 631 bp, Homo sapiens
tcaaatatctccagtgatgtggtcagtgaccaggtgctcctgaaacaatcagggacccagactgaagcagcctcacataagcaagatttcattttaaatatartgatttatctttttaaaatccatgtgcattttgaattctctttcataagatataaatatttagtttaatttaaatattttatcccaatggttaaataaaattgaacctcactcatctgcaccagacacatccagtggcactgagtacctgctggctccccagtatagtggatgttactcctgactgcaagacacagtgttaaaggatctttgtcattaatatatttgtgtgaattaatgattcagctcttttctagctgagggcaatgggaagacaatatgaggcatgggagaattaataggggccaaatagcattgtgttttcttatgggacagagtaaaacaggtctaggggagacaagcagagaaaatgcccttggcattcaagactagccatggtgccctgagattgaaggtgaggaaaagagtcagatctggtcgacagttattcacgggagggtccagctttgcctgcttctctccccattgaagttggaggcacaatatagagaggtcatcaattcacttt

SEQ ID NO: 229046 - DNA, 631 bp, Homo sapiens
tcaaatatctccagtgatgtggtcagtgaccaggtgctcctgaaacaatcagggacccagactgaagcagcctcacataagcaagatttcattttaaatatagtgatttatctttttaaaatccatgtgcattttgaattctctttcataagatataaatatttagtttaatttaaatattttatcccaatggttaaataaaattgaacctcactcatctgcaccagacacatccagtggcactgagtacctgctggctccccagtatagtggatgttactcctgactgcaagacacagtgttaaaggatctttgtcattaatatatttgtgtgaattaatgattcagctcttttctagctgagggcaatgggaagacaatatgaggcatgggagaattaataggggccaaatagcattgtgttttcttatgggacagartaaaacaggtctaggggagacaagcagagaaaatgcccttggcattcaagactagccatggtgccctgagattgaaggtgaggaaaagagtcagatctggtcgacagttattcacgggagggtccagctttgcctgcttctctccccattgaagttggaggcacaatatagagaggtcatcaattcacttt

SEQ ID NO: 229047 - DNA, 590 bp, Homo sapiens
tccttatggaaagaaacatccactgtacatattcatgcagcaaatggaatttataacaatttctttgagttgggaaccacttgtcttctcctccctggagctaagccaatgtctatatttaacccagcggactgggtggcattacatttgggtgattatttatagatagcctcatgcacggtctgctgaaaagccatagggattctgccgacgcgagggaaaagaatagctccagatgtgtgcgactgcacgtgaatccacgtctggtcctttgttggataggaatgtctgggagctcaaacatgcatgagatcttggatgtctctgcytttcatttttattcataactcccaatatgaggggttttatttcaacatgtgggtagctagatcataaaaatcttacagttggaaggaaatttggagtcattagcccaatctccaatctgatatttgaatcttctgttcagtattctcattcaataaatacttattgattgcaactctaattttactgttcatcatttcaacagagtgattggaaacctacactgagatctgctctaggactgcaaagatgactgaacatca

SEQ ID NO: 229048 - DNA, 561 bp, Homo sapiens
gtactgttctacagactggagacacagcagcagaaaagttcctactttcagggacaggacagaagcagagaaaacagacartaaaaaataagtaaatgccagatggtaattgttatgggaaaatttgaagcaaaataaaggagtggagaggccctaacaggagcagatctgggatttctattttttataggtacatcaggggattctaacacaggaatccctggacactttaaaaaagggtggctgggttgaatggtaattctgtgtttaggtttttgaagaatcaacatagagagaaacaacagacactggggcctaccagaggatagaggtttggaggaaggacaggatcaggaaaaataactaatgggtactaggcttaatacctgggtgacaaaataatctgtacaacaaacccctgcaatatggtttggctgtgtccccactcaaatctcaccttgaattgtaataatccccaagtatcaagggtggggccaggtggagataatggaatcattggggcaggtttttcctgggctgttcttgatagtgaataagtct

SEQ ID NO: 229049 - DNA, 561 bp, Homo sapiens
gtactgttctacagactggagacacagcagcagaaaagttcctactttcagggacaggacagaagcagagaaaacagacaataaaaaataagtaaatgccagatggtaattgttatgggaaaatttgaagcaaaataaaggagtggagaggccctaacaggagcagatctgggatttctattttttataggtacatcaggggattctaacacaggaatccctggacactttaaaaaagggtggctgggttgaatggtaattctgtgtttaggtttttgaagaatcaacatagagagaaacaacagacactggggcctaccagaggatagaggtttggaggaaggacaggatcaggaaaaataactaatgggtactaggcttaatacctgggtgacaaaataatctgtacaacaaacccctgcaatatggtttggctgtgtccccactcaaatctcaccttgaattgtaataatccccaagtatcaagggtgsggccaggtggagataatggaatcattggggcaggtttttcctgggctgttcttgatagtgaataagtct

SEQ ID NO: 229050 - DNA, 522 bp, Homo sapiens
ttgtcccatttgaggttcacaactctgaggaggaaagcattgcccctgtcccctgcccccacccatcagtcacacagtggtaggcattgacaagtatcattgcagatacatgaaaaccctaatccaagtccttccatattaggttcatctaccccagaaaatgggaaatggtcttgctgatacacttaaggagactcctgggtacccaggtgtccaaacagagcttttggctttccctaccccatagggtttccctaccccacagttatacaactggctgtcaagcttggttctctgaacctcagcctctttcccttacttccctttcagctcaacctctcttctgaactctcagtttctgtctaaagagctgctccaarcactcttttagacaatgtctgaatagccacaataataagcacttggctgacacatagtaagtcctcaatacatatttatgtaacaaggggttgaataaatgactaattacaactaatatttttaagtgattaccatgttcca

SEQ ID NO: 229051 - DNA, 613 bp, Homo sapiens
ggaaatttgaaagcaagggaacttaaaacaactcctataaatatattcactatgttcagaaaaacagaggaaacatgaacatggtgagaggagaaatggaatttaaaaagatgaaaatggaagttacagatacaaaaatacagcatctaaaataaaaaatagacggtgttaatcactgccaaagaaaagatcaatgaacttgagacatagtaatgggaattctccaaaatgaagcagagggggaaaaaaggcagaaaaaacgttagacttcagtaagatccgggaaaaaatcaagcagatgaatgtgtgcataatcagaatataaggagcagggtgatagaaaagaraaagaaattttaaaaagtagctcattttttccaaatgtgtgtaaaacagtacactcaataaccccaaaacatcaacaaacccaaagcagaagcaattaaggaacactgcacctaggcatatcataattcaactgctgaaaaccaatgataaagaaaatgtattgaaaaagtcacatttcttccaaaggaacaaaggtaaaaattacagtacatagcttgtgagaaaccatgagggtcagaagacaatggaaccacatttttaaagt

SEQ ID NO: 229052 - DNA, 613 bp, Homo sapiens
ggaaatttgaaagcaagggaacttaaaacaactcctataaatatattcactatgttcagaaaaacagaggaaacatgaacatggtgagaggagaaatggaatttaaaaagatgaaaatggaagttacagatacaaaaatacagcatctaaaataaaaaatagacggtgttaatcactgccaaagaaaagatcaatgaacttgagacatagtaatgggaattctccaaaatgaagcagagggggaaaaaaggcagaaaaaacgttagacttcagtaagatccgggaaaaaatcaagcagatgaatgtgtgcataatcagaatataaggagcagggtgatagaaaagaaaaagaaattttaaaaagtagctcattttttccaaatgtgtgtaaaacagtacactcaataaccccaaaacatcaacaaacccaaagcagaagcaattaaggaacactgcacctaggcatatcataattcaactgctgaaaaccaatgataaagaaaatgtattgaaaaagtcacatttcttccaaaggaacaaaggtaaaaattacagyacatagcttgtgagaaaccatgagggtcagaagacaatggaaccacatttttaaagt

SEQ ID NO: 229053 - DNA, 555 bp, Homo sapiens
acgacaacagcaagtgttgttgagaacatggagcaaatagaattctcctacattgctagtaggaatgcaaaatgatacaaccagtttggaaaacagtcggcaatttcttataaagttaaaatgtaacccagcattcctgttcctagatatttactcaaaagaaagaaaaacataggtccacagaaagacttgcaaaggaatgttaataatagcttcataacaataaccaaaattggaaacaacctaactatctaactggtgaatgaataaacaaattgtataaccataaagaagtgatcaggaaccaactactgatatgtaatgacatgaatacatctcaaaacctttttgctatgtgatagaagccagacacaagtaagaacacactgtttgatttcattaactcaaaaytcaggaaactgcaaactcatgataaaagaaatcagattagtgattgcttgtggtcagggatgaggagagatttactacaaagggtcacaagggatattggtgtaaagaaaatgttctatatcttgattgtggtggttatgtgta

SEQ ID NO: 229054 - DNA, 533 bp, Homo sapiens
ggcacaaatgttatagtcctatggctaggatgggccacagggaggtaaagtgcactgcccctgcctccccacatcaccttctgtactagcatgtgtgtgcatttgtgtgtgtgtgtgcctgttgggttcagcctgttttatgtgcgataaaacagaaagcctctgctgcccagttgatgtgtgtgataagaagaggtgcaggtacaggtgagtatgcyagacatctatgcgggtgcacatacacataaaaacacacatgggagggtgttggatgcaaatgggcatgggtggtaactactaaggagacttatttgatgaggaagaggtgaattacatattaggtggtaggagatgtgtgcatatatggcatacctttatgtgtgaatcacagttctagggtgggaggtcctgtatgtgaaaaaagtggtcattggaagggaggggtgcataagcatggatttatgcacaagactatgaccagattcttatcaaacatcacccataaatcagttaaggtgctagtggcccattgc

SEQ ID NO: 229055 - DNA, 557 bp, Homo sapiens
ccatgggcatggtggggattttaaccaaggactggctgaactcaaggtcacacgaggtcacatgcctctccctccctgggaagaagtgtgcatgtgccatctgccatcaagtccgtcccctctttgtaaacttgcagccgtttcacagagctttaccaggatccccaccccaatccaggctccatgacatcaccagactggccagcagcttccctgcttaaaatcggccctccttccrtagtgttcaggaaaataagtttcccttaaggctctcttctgccatctttgcagcctcattactgcagccccatcttggctgctctcagagcaaccatgctctcttgcaacttccagtctttgtatatgctgttttcatctctaggaatgccctggccccctttcctttccttccttttctttgaaaaccccttcttctcttcaaaaatttagctcatctatcacatcctgcagcgctttccttgaccaaccctgagacatgcacacatacacactatccttcctccccaggccaagtgagtagactctcactgcctgcc

SEQ ID NO: 229056 - DNA, 557 bp, Homo sapiens
ccatgggcatggtggggattttaaccaaggactggctgaactcaaggtcacacgaggtcacatgcctctccctccctgggaagaagtgtgcatgtgccatctgccatcaagtccgtcccctctttgtaaacttgcagccgtttcacagagctttaccaggatccccaccccaatccaggctccatgacatcaccagactggccagcagcttccctgcttaaaatcggccctccttccatagtgttcaggaaaataagtttcccttaaggctctcttctgccatctttgcagcctcattactgcagccccatcttggctgctctcagagcaaccrtgctctcttgcaacttccagtctttgtatatgctgttttcatctctaggaatgccctggccccctttcctttccttccttttctttgaaaaccccttcttctcttcaaaaatttagctcatctatcacatcctgcagcgctttccttgaccaaccctgagacatgcacacatacacactatccttcctccccaggccaagtgagtagactctcactgcctgcc

SEQ ID NO: 229057 - DNA, 570 bp, Homo sapiens
tggaacaataattatgggagaaattgaaagagtcaycaaagaatttcttccctgaaaactgctggtttcaaacaattttttttcttctaggtaatgtctttccaactttaaaggaaaagataattcttatactttataaactcctccaagaatagagaaggagtggaacagctatttcattcatggtatgaaaccatcaaaagttgccaaaaacagcagcaatagacctgaagagaaagactttacaggctgtgtttccatcacgtaaaccagccccaatcttggcaatgctgaacagacaagatgtggaggcctgaaccaaggtcagccaatccatcgcctggcagtaatgatcagtctctctcttgagcagttagacataaaaccagagagaagatagtgggtgtatgttagatgttagcactaagaggacaggtatatgtttagcagccacttggcagaagaaaaattcttctaagaaaaagaggatggagacaaggagagattagagacacaagaaatggagggaaacaaaatatcatagagtatcatatagcttctaaaagccag

SEQ ID NO: 229058 - DNA, 570 bp, Homo sapiens
tggaacaataattatgggagaaattgaaagagtcaccaaagaatttcttccctgaaaactgctggtttcaaacaattttttttcttctaggtaatgtctttccaactttmaaggaaaagataattcttatactttataaactcctccaagaatagagaaggagtggaacagctatttcattcatggtatgaaaccatcaaaagttgccaaaaacagcagcaatagacctgaagagaaagactttacaggctgtgtttccatcacgtaaaccagccccaatcttggcaatgctgaacagacaagatgtggaggcctgaaccaaggtcagccaatccatcgcctggcagtaatgatcagtctctctcttgagcagttagacataaaaccagagagaagatagtgggtgtatgttagatgttagcactaagaggacaggtatatgtttagcagccacttggcagaagaaaaattcttctaagaaaaagaggatggagacaaggagagattagagacacaagaaatggagggaaacaaaatatcatagagtatcatatagcttctaaaagccag

SEQ ID NO: 229059 - DNA, 569 bp, Homo sapiens
tgaactcaggtaaatattcttcattgtaccaaagatatcttttctactcttctccactctactctgtccttttatggcatgtgttagctgggcttttgtattagttttctgtagctrccataacaaagtgcaaatctggcagctaaaaccaacaaaagtgtattctcttacagttatggaggccagaattttgatatgagtcttagtaggctgaaatcaagatgttggtagggctttgttccttctggaggctctaggggaaaatctgtttcttcgcttctagtttctagaggccacttccattccttggtttgtggcccccttccaagcctacagtgtcaggggaagtccttctcatgtggccatccttagttttcttctgcctccttcttgctttgtatgggcacttcagattacatgggggcctctcagataatatgataatctccctatattaagctgatcggcaacctgaattccatgttctgcccaagttccctttcgccatttaaagcaatgtattcataaattctggagattaggatgtagatacctttgaggagctagta

SEQ ID NO: 229060 - DNA, 590 bp, Homo sapiens
gttgttgttttgagctgcagtgtttaggggtgatttgttacacagcaaagactaactgatgctgtaagctagcaccaagcactaagaggccagaaaaaaatttacccagaaagaaggagagcatgtgccaaaatatctgaaggaaagagaaagagagcagaattgctatcaaactctaactgagatactaatttcctttaagaagaccatggattctctccttagaggattaatagcttctttatatttgcattcaaaacattttccccattcttttcatgtatctcatcatcagtatcgcctgaaaaccttgtcaactggacaccctgtcatggaccctgtgttttagagctgtgctaactaatataggagtcactagccacatgtggatatttaaatttaaattaattaattaaaatacaatacaatgaaaaaaaatcaattccgaagtcaactagccacatttgrcatgctccatagttacaaatgccaggtcatatatagagtactgccatcatcaccgaaagatgtacttagagtgctactttagagaacctctctctggttcttcttcggggaaaggaggtgag

SEQ ID NO: 229061 - DNA, 642 bp, Homo sapiens
caagcagaatgaaaagaacctgcagtcagcagctacttgtcacagggagaaggctaaatgattgtgacactgacaattgctaccctcagtttatataaaaattaccatcacctttagcctcctttccaaaattatttgaaacctattcactttcttttttgtctattcagggagaatgtgaaggaaatcyaaaaagtatcactttattttttatttatatctgttgagttactggaacttctttcctagttactaaatagcctcctgcttatccctagatgtttagtaatcaacatccgttgtccctcttagttctgcctttcccatccagcctcacatgccagcctctttgctgtttacccagatcatataaaacttcaagaactctttaaatattacattcaaagaaaattgatgtaacatcagatgatgttttgatgaagatttgtggacctgagaaattactgtaaaagaggctttctatcaaaacccaccttttattctggtccaaattaggcttactcctttccacataagtcaatgtcagtttgattactactgacattgatcagtagttcgatgcatttttttttttaattttattttctctttttgctggggtatcatacattttttgaaata

SEQ ID NO: 229062 - DNA, 642 bp, Homo sapiens
caagcagaatgaaaagaacctgcagtcagcagctacttgtcacagggagaaggctaaatgattgtgacactgacaattgctaccctcagtttatataaaaattaccatcacctttagcctcctttccaaaattatttgaaacctattcactttcttttttgtctattcagggagaatgtgaaggaaatctaaaaagtatcactttattttttatttatatctgttgagttactggaacttctttcctagttactaaatagcctcctgcttatccctagatgtttagtaatcaacatccrttgtccctcttagttctgcctttcccatccagcctcacatgccagcctctttgctgtttacccagatcatataaaacttcaagaactctttaaatattacattcaaagaaaattgatgtaacatcagatgatgttttgatgaagatttgtggacctgagaaattactgtaaaagaggctttctatcaaaacccaccttttattctggtccaaattaggcttactcctttccacataagtcaatgtcagtttgattactactgacattgatcagtagttcgatgcatttttttttttaattttattttctctttttgctggggtatcatacattttttgaaata

SEQ ID NO: 229063 - DNA, 447 bp, Homo sapiens
aatttttctaaagtaaacactctaagaaaagggcggtcaggggcttatagttgggaaaagcttctaaagtttaatcaagctgagggagacactggactagattggtcaatgccaacaacctccaataaaaacatacctgaagctcctccctttgccttttctatgataaagctttcctatttccctgcctacctttctgtctctgcaaaacacaagcattagtgttgcagggcttttccttagttcagctgaagatgaggtccttgtcacatgaccacaaaaatttaggcttgcagacaatttgaagggttagtaagtcagggttttattgggtgaaarggggaaaaaaaagggaaacagggaccctccatgaagccagagtccctgccgatgcacttcctgcattgcagtttgaatcccaggttccacacaggaagaagaggggca

SEQ ID NO: 229064 - DNA, 511 bp, Homo sapiens
tttcaagcattagttcactaaatccttagaccaagcctaggtattggagaccattctaacctccattttccaggtgaaacaaatgagccttggcaaggtgagtcacayagccgggaatgggaccccagggctgcttgactctgaagccccaaatttcaactgtgactgtattaagtgctcatttaagatctggaagaaccaacaaggttcagccaccatcccatttcacagctgagaaaattgagatccagagcagggaagagcccagtcgagtcgcagagctgctggtgctggaaccaggcctaaggttccacaatggctgctcacatttattgagcacttactgtgtgccacgttcgaattgctttctgtccatcattttatttgatctttaccataactctaggaagatggagactattacaatcccatttttcatttgggtaaagtgaggcagagagggaagtaacttactcaaggttgcacagctaattagcaggagaggcacgac

SEQ ID NO: 229065 - DNA, 511 bp, Homo sapiens
tttcaagcattagttcactaaatccttagaccaagcctaggtattggagaccattctaacctccattttccaggtgaaacaaatgagccttggcaaggtgagtcacatagccgggaatgggaccccagggctgcttgactctgaagccccaaatttcaactgtgactgtattaagtgctcatttaagatctggaagraccaacaaggttcagccaccatcccatttcacagctgagaaaattgagatccagagcagggaagagcccagtcgagtcgcagagctgctggtgctggaaccaggcctaaggttccacaatggctgctcacatttattgagcacttactgtgtgccacgttcgaattgctttctgtccatcattttatttgatctttaccataactctaggaagatggagactattacaatcccatttttcatttgggtaaagtgaggcagagagggaagtaacttactcaaggttgcacagctaattagcaggagaggcacgac

SEQ ID NO: 229066 - DNA, 336 bp, Homo sapiens
aagatctggaagaaccaacaaggttcagccaccatcccatttcacagctgagaaaattgagatccagagcagggaagagcccagtcgagtcgcagagctgctggtgctggaaccaggcctaaggttccacaatggctgctcacatttatygagcacttactgtgtgccacgttcgaattgctttctgtccatcattttatttgatctttaccataactctaggaagatggagactattacaatcccatttttcatttgggtaaagtgaggcagagagggaagtaacttactcaaggttgcacagctaattagcaggagaggcacgactcataccca

SEQ ID NO: 229067 - DNA, 467 bp, Homo sapiens
tccttgctgaatagtgctcagacgacagagacaaccctgatatgtggtcttctctgctatttgacagggaactgtcaccaataagcgaccccatcagtctgaaagcagtaaaattactaaatgatccaaggaagtgcctgtaggccagtacactatggggccctgaaaagcaggagggcaaaacctcaggaaaaatgaatcttcagtgggaccttacacaaaattcctttccagatagaaggaaagaaatgcaatttagtttttacagatgttacgtttaataagagaagtaactaattccctttgagaagaaacaaggtattatatatgaatggcaaggtgaatggtgtaactgcttggtaataaaataaaccccacatattkctatgatgctgttctgtgaacacaatgtagtctggaatcaattactataatagtacggagacattgtctttgccatacaacac

SEQ ID NO: 229068 - DNA, 427 bp, Homo sapiens
aaaaccaatagaagactttaaaaaattaaaaatattgtcaaacttcttccagatttactcaaggaaataaaaagaaaatgcaagtaaaccacattggaaataaaaatgggagtgggggtggtgagaaatattatggtaaagatagtcaagtgcttaaaaattagataaaattttatgccaaaataagaaattctatatggkccaaaaaataatgtaaattttcacattgacaaaacaaaagttggaaatttttcatagattagtgaccacagatcactatgggtagaaaaaaattgaaaaatgtaaaagacttatctctccccaaatttactgaaattagatgacttaactggtaaattttatcaaagctacaatcttcaaccaatgataagaaatgaaagttaatacattctttgattctataaaa

SEQ ID NO: 229069 - DNA, 427 bp, Homo sapiens
aaaaccaatagaagactttaaaaaattaaaaatattgtcaaacttcttccagatttactcaaggaaataaaaagaaaatgcaagtaaaccacattggaaataaaaatgggagtgggggtggtgagaaatattatggtaaagatagtcaagtgcttaaaaattagataaaattttatgccaaaataagaaattctatatgggmcaaaaaataatgtaaattttcacattgacaaaacaaaagttggaaatttttcatagattagtgaccacagatcactatgggtagaaaaaaattgaaaaatgtaaaagacttatctctccccaaatttactgaaattagatgacttaactggtaaattttatcaaagctacaatcttcaaccaatgataagaaatgaaagttaatacattctttgattctataaaa

SEQ ID NO: 229070 - DNA, 590 bp, Homo sapiens
taatgatcatttggcattaaaaatgtattaatatgattcagtgttgtaactgtttactgacatgatcatttggaagtgaggaaaaagtctttgataaaattcaaggctaattccttagttttaaactttacactgaattaaaaaataaataaatatctctcttaaattgatgaatgggggccaggtgcaatggttcatgcctgtaatcccaatactttgggaggccggggtgggcagatcacttgaggccaggagttcaagaccagcctggccaacatagctaaacactgtctctactattattaaaaatacaaaaattagccaagcatcacggcatatgcttttaatcccagctacttgggaggctgagggaagagaatcacttgagcccaggaggcagaggttgcattragccaagattgcgccattgcactccagcctgggcagaaaatattttaaatgaaacaaatatatctactatgaatgtaattacaaagaattgtacatagccaatacaataagacaagaacagagatcaatcattaaatatcaaaggaaaatcaatgtcattttgcagaccacttgtttgt

SEQ ID NO: 229071 - DNA, 447 bp, Homo sapiens
  misc_feature (1)...(447): n = A,T,C or G
caaaacggggaggcagttatgaagscactgagaaataaatgtagaaaagcagagaggaagcacggtgtaggaatcctggactcttaacagagcttgaagtaccttggagcctgagaacccagacatgtcccctcctgcctggcctcgggagtcctcctggggacttatcacacttgctgcatggcagttcctggatgcactggcccctcagcagtcacggcctggagttagagagaccttcaccccacaggctcagccatggactcatgtgantcctggcaagaggcaggttctccaggccacattttttgccttgggggtctgaagagcttgcactaagatgctaccctctgtgaggtttccagccctaaacaggaagtcagggacattccatgattatggatccgccaaagagctctgagcagtttggtgaccatgctgtgaaag

SEQ ID NO: 229072 - DNA, 597 bp, Homo sapiens
gttgaactagctaatctccaggtctcttccaaccctttgaatccatgaagggaaataacagtttaagaagaatggtgatagcatcacagacatatgcatacttccaaactcatcaaattatatacattaaatgtgtgcaggtttttgtttataaaatcaaatatatctccataartctgtttgaaaaaacaaaactacaaaaactaaagtatctgaaggaaatttcagcaaagacaggaagaatctggatagttctaggcttgagactgattaaaacaagagactactttcagccttatgaagttaaagtacccttagctgagttggtaataaatctgcgtcttgaggtcaaaatattgtcaggaaagaggagaagagagccacattagaacatgtctgaaatggaaaagactgcctctagaggagtcaagttaaccatcactggagatgttcaagaaaaagctgggagatcacttggcagagatgttttagagatgctaagaagcttctaagtcaagctccctccaaccttagagtataaaacgccaccataagctgctgtacaataattcagtgtctgttactctcatgaatctc

SEQ ID NO: 229073 - DNA, 543 bp, Homo sapiens
ttcttacagttcagtttaaatttttagatcatggtgtttggaccaatgacatctactggcatcctggtaagacttaaaacaagattgyctctgtccaccttcctttcctcaaatatcaaggaatttccattagcatctttggcaacaataacaggaatctgcactagactaaacactgggttctggaaaattattttgcctgggattacagctccaatcactcaaatttttgcttggctcttaaaatttcatggctatggagttggtcttgaaatatcaggtgtttcagtattattttcgaactttaaaaatgaggcacatgaccacatacctggcaaagaacatatttttagaatatataacaaactctcaaaactcaatagtagaaaacaaaaatcaaacaatccaattagaaaatcagaaaaaaatatattgtcacattacactgaaagaatatacacataaaatataagcacagggaaagatgctcactatcactagcttttagggaaacacaaatcaaaacctcagtgaattattagt

SEQ ID NO: 229074 - DNA, 487 bp, Homo sapiens
ctgcttatactagcaaagactcagcaaaattttgggttttccatgttcccagcttcctaaacattttcccccatgtcctcattctagttttcaggattacatttctttctaatcaaagccctcatttaaacagtagtcaactcataggttgggaattcaatttgtattctaaccctgcctcttgcaagataagactctaggtatggttttcagagatttcaatcctgtggctataggaaagaagggtttctttcggggcagacctagaaacttttaggtaatttatgtggagctagacactgagctcatccaattattcctctactttctccagtgcagttatgagcacccaatctatctcattatatactttagtttgactaaaatgttccaaggtacaaatatatgycactcaaattttatgaactacaaatacatgtcattcaaaacttttccttttatggatatttggttaggaatatccaat

SEQ ID NO: 229075 - DNA, 672 bp, Homo sapiens
atgaatgaattacttcattcagtacacacagagagacattggcataatatgaaaaaaattaacttataaatgtataaaagtgaatagtatctaatgtaattggatattaacatataataaagaagaaatttttattcattctgtattaataaactgaaacttctgtagtttgcatttaatcaggtctgtagccaattattcactgttttcttgcatatctcttttgcttgctgttttgcaaaacttttttatatatgaaggaaatagattttcattagtcacatgtrttgtgaatgtatttttagtttgtcttttacattttaatgttatatgtttggttttttttttctatttgtaaaaatataattgagtcaaatgtatcacttttttttctttaatggcttatgggttttatgactaatttggaaaggctctcccctcctcaaaattattattgtttaatgctcataatttttcttccagaaagtttttgattggttatgttaaagcttgtatccatttggatctattttattttactttactttttactttttaatttttatgtgtacataggaggtatatatatttatggggatgtgggtctattctaaatgtaagtaataaagtggggatctacattttttccagttattgatatacttttcccca

SEQ ID NO: 229076 - DNA, 672 bp, Homo sapiens
atgaatgaattacttcattcagtacacacagagagacattggcataatatgaaaaaaattaacttataaatgtataaaagtgaatagtatctaatgtaattggatattaacatataataaagaagaaatttttattcattctgtattaataaactgaaacttctgtagtttgcatttaatcaggtctgtagccaattattcactgttttcttgcatatctcttttgcttgctgttttgcaaaacttttttatatatgaaggaaatagattttcattagtcacatgtattgtgaatgtatttttagtttgtcttttacattttaatgttatatgtttggttttttttttctatttgtaaaaatataattgagtcaaatgtatcacttttttttctttaatggcttatgggttttatgactaatttggaaaggctctcccctcctcaaaattattattgtttaatgctcataatttttcttccaraaagtttttgattggttatgttaaagcttgtatccatttggatctattttattttactttactttttactttttaatttttatgtgtacataggaggtatatatatttatggggatgtgggtctattctaaatgtaagtaataaagtggggatctacattttttccagttattgatatacttttcccca

SEQ ID NO: 229077 - DNA, 552 bp, Homo sapiens
ttggttattttagaaattatattaatgtataatacgtaaaaataaatggatttataccacacatgcacagaggtrtgcacacagacatacatacctacccccacatatatgaatgtctgacctaaagtgacattgattactgttatgacaataaaaaaaatttatttataacctatttgaaagcatgcatatatcttttaaataatgtacatgaatatgtaccaaaacgtgcatctaatagataaaaataggttatcattacagatccacaactgtattcaatgcaatatcaatattactttgtttacttgaggttattttatttttaatactctcagatgaataaaacatattcatgaatacgataccagaactggtttaattgaggaagcatcatctattaaatcactgtgtctctgaaactggactgaacagtaatggctaccataagtgggctcattcacatttcttttggggatatagtaatagcacttaaagaaatttggcttagctgcttagtcttcatctgtttagccggatattttaactgga

SEQ ID NO: 229078 - DNA, 552 bp, Homo sapiens
ttggttattttagaaattatattaatgtataatacgtaaaaataaatggatttataccacacatgcacagaggtgtgcacacagacatacatacctacccccacatatatgaatgtctgacctaaagtgacattgattactgttatgacaataaaaaaaatttatttataacctatttgaaagcatgcatatatcttttaaataatgtacatgaatatgtaccaaaacgtgcatctaatagataaaaataggttatcattacagatccacaactgtattcaatgcaatatcaatattactttgtttacttgaggttattttatttttaatrctctcagatgaataaaacatattcatgaatacgataccagaactggtttaattgaggaagcatcatctattaaatcactgtgtctctgaaactggactgaacagtaatggctaccataagtgggctcattcacatttcttttggggatatagtaatagcacttaaagaaatttggcttagctgcttagtcttcatctgtttagccggatattttaactgga

SEQ ID NO: 229079 - DNA, 636 bp, Homo sapiens
gcactgtatattttaaagcaaacatttctctcctcatattaatctgtctccttttcctctttttttgactcaccatttattcaccattgccacctactccatcccctataggtatggtgtttatcctcccatgctctatacacgttacagctgattccagatgagaagctgagatcaacatttatcatataatttctagatgagaaactgccartgcgatgccccggcatcatatttggaagattgaagaaaagctcttaggggccatttattcttttgctgcaggtgtagaagggactgtggaaagacataaactgcacagctgctttttcctgagcttttgtggaccactaccttcatgattcaggttgaaaaagtcatcaagcggcagcttctctgattgtggaagccccttactgcctatatcataaacacttcatacatacaattcacagatggtcttatgttttcatcacacacacacacaacacacacacatacacacagatttcatcagtgttagctttacagcaatattatcaacatggggttagacacttctcatcttgtttttgtcactcattcctaccttacaaaaccccaacgaatcaaattagaccttgaatgtaagagcta

SEQ ID NO: 229080 - DNA, 496 bp, Homo sapiens
aaaatttagcctctgtcactataattacactaaacagtaaacacagtctaacttttagccagataaatataaaatcttccaaaaaaagcctatttgtcttagttactgtttcctatctatgtccrcttttcaacacaaaattataaggcatactaaaagcaaaacaaacaaacaaaaagcagtttgaagagacagctcaagcttcagaaccatactcggatatgggaaagatttgaaaaagatcagagtatgaatttacaaccactaagatagattttctaacaactctaatgtaagaagtaggcaatatgcaagaacagataagtaatgtaagatgggaaatgtattaaaaaatgaatgaattttttaaatgctaggaaatgaaaattgcaataaaaaaagttgaaataaccttgtatacttggaataaatgtggcatggacatggtgtataattattctaaatttttatgagaatttttgcatctttgtgtttt

SEQ ID NO: 229081 - DNA, 589 bp, Homo sapiens
tcaaaactccacccctggaaccaaataaaagcaaaaacaaaaacaaaagcaaaagaccctcaatgactaggaccatgttcttgtggatctgtttctgaagtgaaaggtgacccagatagttgcactctggtacctaatccatggtccctggagtttcytccatcccagccaatcaacagatggctcctcataacccaatccccaacccctcagtccagtccctaaaatactcctgcttatgacccataaatgaggtggatttgagaattgctttcccatctcctcacttgggtgcctcataaataaatccttgctttgctgcaaatcttgatgtctcagtgattgccttgctacacattggataaatgagcctggtttggtaacacaaacaaaaaacaccaaaaatccttgggaactcaaaattattgaactcctaagtctgagagcactggaattttgagctagggaagttttagaggaggaagtgtaaagaaccaaaggtgactacagtgttattttttatcctagtgtgggcatatattctaaaaggaatcttccaatcagtcttgtagcaatgagtaaagtgaag

SEQ ID NO: 229082 - DNA, 496 bp, Homo sapiens
aaaatttagcctctgtcactataattacactaaacagtaaacacagtctaacttttagccagataaatataaaatcttccaaaaaaagcctatttgtcttagttactgtttcctatctatgtccacttttcaacacaaaattataaggcatactaaaagcaaaacaaacaaacaaaaagcagtttgaagagacagctcaagcttcagaaccatactcggatatgggaaagatttgaaaaagatcagagwatgaatttacaaccactaagatagattttctaacaactctaatgtaagaagtaggcaatatgcaagaacagataagtaatgtaagatgggaaatgtattaaaaaatgaatgaattttttaaatgctaggaaatgaaaattgcaataaaaaaagttgaaataaccttgtatacttggaataaatgtggcatggacatggtgtataattattctaaatttttatgagaatttttgcatctttgtgtttt

SEQ ID NO: 229083 - DNA, 577 bp, Homo sapiens
agtaatcaaaacaatatagtgcagtcacaaaagaaacttgtagaccaaaggagcagaatagagagcccagaaatgcatccataygtttactgtcaactgatctttgataaaggtgctaagacacccgatggaaaaggatagcctgtttaataagaggtgttggaaaaactgaatatctaaatgtgaaaaaataaaagtgaaacattatcatgcatcgtattcaaaagccaatttaaaatttattaaggcttaaatataacacacgaaaatgtaaaactactagaaaaaacattgggaataaccttgttgacattggtcttggcaacagatttttggttgtaacaccaaaagtacaggcaacaaaagcaaaaatagacaagtggattgcatcaaactacaaagtctttaacacagcaaaagaaacaatcaacctgtaaaaatgaagcctactgaattagagaaaatatttgcaaaccaaatatctgataaggggtgaatattcaagatacataaggaactcatacaactcaatagcaaagaataagtaaatgaaaccaaaaaaaaaaaaaaaaaagga

SEQ ID NO: 229084 - DNA, 594 bp, Homo sapiens
ctggtcatttggtagctatatttcaaataaacaaaaggagttcatttcaaacagatcaaataacatgtattctttcctagtatgctaatagagaggagtcaataagagaaatatcttcagttactacagaattgtcaatcttagtttgtttttttttttcctttcaacaagcyaacaattgaacaattgaagatttcttttgacctttaaaatatcaatccatttcactgcaggaggcaagaagaaagatattaagcagcttaaggttatacacatatacacacacatgctttgtgtatacacattacacacatacacatgatccccacacatgattgttctaatctaaaagcagttttttttttctattaaggtgcaatgttcttttcctttctcttctctaggactgattccaagaacagaaattagcatttaacaatgggacaagtggaaaaggaaaataaatatgactcattttgttttttgctcttaggcataaatgccttttccccaacttattttgtatggctgactctttcttgcttgctttaagctacagcgaaaggctatttatttttaaattgacccatggta

SEQ ID NO: 229085 - DNA, 594 bp, Homo sapiens
ctggtcatttggtagctatatttcaaataaacaaaaggagttcatttcaaacagatcaaataacatgtattctttcctagtatgctaatagagaggagtcaataagagaaatatcttcagttactacagaattgtcaatcttagtttgtttttttttttcctttcaacaagctaacaattgaacaattgaagatttcttttgacctttaaaatatcaatccatttcactgcaggaggcaagaagaaagatattaagcagcttaaggttatacacatatacacacacatgctttgtgtatacacattacacacatacacatgatccccacacatgattgttctaatctaaaagcagttttttttttctattaaggtgcaatgttcttttcctttctcttctctaggactgattccaagaacagaaattagcatttaacaatgggacaagtggaaarggaaaataaatatgactcattttgttttttgctcttaggcataaatgccttttccccaacttattttgtatggctgactctttcttgcttgctttaagctacagcgaaaggctatttatttttaaattgacccatggta

SEQ ID NO: 229086 - DNA, 510 bp, Homo sapiens
aagccatttgcaaaatagtacttgtaaaaactgacccaattatttttaaataccagtattttttatttaaaaatgtatgataatattagaaagacagacatttctgatcatattatattaaaacagtaactgaacaaatattatttatgttggaaatgattttyctgagctcccaatatgtttaattcatgtaaatgacactaataataattatatatagtattacttctctgagaagaaagattttgcagatctttcacatgctcttttgcttagatgacactacactctcctcaatgttcagaattaaaatgttgttggaatttggcactacactgaaaaatacgattttgacaaatgcctcatgaaaaaggatttatttacatatattataatatatatatataatataacgtaataacacatcacgtgacatgtcagaatgatccaattgctggaaggggatcacaattcaaggaacgtgtgcagcctccagaatttaaaaaaggc

SEQ ID NO: 229087 - DNA, 536 bp, Homo sapiens
gatttcttcttaatcctccctcctggcggatcacttgaggccagtagttcaagcccagcctggccaacatggtgaaaccccatctctactaaaaatacaaaaattagccagatgtggtggcaggcgcctgtagtcccagctactcaggaggctgaggcatgagaatcgcttgamcctgggagacgacagttgcagtgagcagagatcctgccaccgcaccccagcctgggagacagagtgagactcggtctcataaaacaaaacaaaacaaaacaaaaatacatggcactagtctatttggtaaaactaaccacatagaatcattcttaagctttccctttacttaacccacaatatttactatgttagtcagcattctaggtactgtagccaagtataatctattagctattcatttttttctgttagtctctttttccaaataatcttatttaacctccccaattttatcatttaaatccaatttcaaatatcccgttagtgctttccactaacaatgctcgtgaaaatgcatt

SEQ ID NO: 229088 - DNA, 509 bp, Homo sapiens
aagagagctgatgcaaccgtaaagctcatgcggcttgctgaattagaagaaatctaattcctatctcttacccaggagtcttccgtggtctgccagtattcatgaaactgtgacaggctaacatattttctggcaactaaggtgaacatctcacacgtttcatagtttttgggaaaaatacataaagtaataatcaaagcaacttcytagaacatatgactggaaagttttgcctatctgtaattattttaaatattgtctatatagatatgaagaaaaaatacacacacacacacacaccacacttagaataacaaaacattcgttgaatttgaagtaggtagaagtagctggagtaagaaccacattttttttcacttacaatatttctgagagcttaataacttaattacacataggaaggagcatatatttcacctacattatatatgtatataggtaatttgcaaagattaaactagttgcttctaatttctttcaactaaaag

SEQ ID NO: 229089 - DNA, 486 bp, Homo sapiens
aaaataaacataataaacttgattatccccatcaatgtaatgaatatagactctctctctaaaaggataaggagtaaaatatcacaggtcttcggccttatttttacaaatcaagtgagattaaatgcactggstgttagtaagttcatttttctcttcattataaagcctatcttttgaaagctgcagctataaagaaaaaaagaaagaaaaagaaagagaaataaatgagagcatttgtaaaatataccagacacatcagttaattatttcaggcatgtaagactgataaagcagattttatatgttcatcagttttttgttttgttttgttttgttttttgtcttagaaagaaagtgttgattataagttcaaagtcagtttctaaaaagaatatttcaagtataactgcaattccagaaaactattacattgagctttaggaaattgactgttgaagtacatgaactgctcagagtccagta

SEQ ID NO: 229090 - DNA, 486 bp, Homo sapiens
aaaataaacataataaacttgattatccccatcaatgtaatgaatatagactctctctctaaaaggataaggagtaaaatatcacaggtcttcggccttatttttacaaatcaagtgagattaaatgcactggctgttagtaagttcatttttctcttcrttataaagcctatcttttgaaagctgcagctataaagaaaaaaagaaagaaaaagaaagagaaataaatgagagcatttgtaaaatataccagacacatcagttaattatttcaggcatgtaagactgataaagcagattttatatgttcatcagttttttgttttgttttgttttgttttttgtcttagaaagaaagtgttgattataagttcaaagtcagtttctaaaaagaatatttcaagtataactgcaattccagaaaactattacattgagctttaggaaattgactgttgaagtacatgaactgctcagagtccagta

SEQ ID NO: 229091 - DNA, 602 bp, Homo sapiens
gctacaaatattcaaattttttattgggaagaagtgacaagttttactatgtagttcaaaagagcaaaatacattctgggagatagaagagtgtgaataaagataaagtttagggcgctttgctgtggctcacgcatgcagttctagcactttgggaggcagakgcaggcagatttcttgagcttatgacagttcgagaccagcctgggaacacagtgaaatcctgtctctacaaaaaaatacaaaaattagcccagcatggtgatgaacgtctgtggtcccagctactcaagaggctgaggtgggaggatcaccctagcccagaaagcacatgttgcagtgagctgtgatcacgccactgcactccagcctggacagcagagtgagactctgtctcaaaaaaaaaaaaaaaagacaaagaataagacgtggacaagtgaaagaaacactgtcatctatattactcacacatatatgtacacaagtatgcatacactcatacatgtacatgtatacatagaagtatgcatgcatgtatttatgcacacaatccatatatagttcatgtatgcatacaaacatgtatacacatatatatgtgc

SEQ ID NO: 229092 - DNA, 602 bp, Homo sapiens
gctacaaatattcaaattttttattgggaagaagtgacaagttttactatgtagttcaaaagagcaaaatacattctgggagatagaagagtgtgaataaagataaagtttagggcgctttgctgtggctcacgcatgcagttctagcactttgggaggcagaggcaggcagatttcttgagcttatgacagttcgagaccagcctgggaacacagtgaaatcctgtctctacaaaaaaatacaaaaattagcccagcatggtgatgaacgtctgtggtcccagctactcaagaggctgaggtgggaggatcaccctagcccagaaagcacatgttgcagtgagctgtgatcacgccactgcactccagcctggacagcagagtgagactctgtctcaaaaaaaaaaaaaaaagacaaagaataagacgtggacaagtgaaagaaacactgtcatctatattactcacacatatatgtayacaagtatgcatacactcatacatgtacatgtatacatagaagtatgcatgcatgtatttatgcacacaatccatatatagttcatgtatgcatacaaacatgtatacacatatatatgtgc

SEQ ID NO: 229093 - DNA, 602 bp, Homo sapiens
gctacaaatattcaaattttttattgggaagaagtgacaagttttactatgtagttcaaaagagcaaaatacattctgggagatagaagagtgtgaataaagataaagtttagggcgctttgctgtggctcacgcatgcagttctagcactttgggaggcagaggcaggcagatttcttgagcttatgacagttcgagaccagcctgggaacacagtgaaatcctgtctctacaaaaaaatacaaaaattagcccagcatggtgatgaacgtctgtggtcccagctactcaagaggctgaggtgggaggatcaccctagcccagaaagcacatgttgcagtgagctgtgatcacgccactgcactccagcctggacagcagagtgagactctgtctcaaaaaaaaaaaaaaaagacaaagaataagacgtggacaagtgaaagaaacactgtcatctatattactcacacatatatgtacacaagtatgcatacaytcatacatgtacatgtatacatagaagtatgcatgcatgtatttatgcacacaatccatatatagttcatgtatgcatacaaacatgtatacacatatatatgtgc

SEQ ID NO: 229094 - DNA, 534 bp, Homo sapiens
acagaatgttttgatcgaatgaggaacaatcaggcatacagctcagttacaggaaacatttggtttacataaataagggatctatttatctacatatctacctagcactcctctcctcttcttggcttcttcttgcatattcttaatcttaaagaaaaatgtgtgatattcctccttggggaagaagactgctcaggaagcttattttatcttctgtggctgttcrgctaaagagagatttaatagatttgctaaacaatattgtgcttatacttaaaacactgtatggtacacttaaagtgcattaggggtagatatcatgttaagtgttattacaataattaaataaaatcttctttaaaatttcagggaagttattgtatttgcccagcttgtttaaatgctgagctaatcatctgtaatctgagagtgaagggtgtaaagcatatagtaatagttcaaacttcatggttggaatataaaaaagtggagctttgctagtagaaggactggaaggaatactgcataaataaa

SEQ ID NO: 229095 - DNA, 534 bp, Homo sapiens
acagaatgttttgatcgaatgaggaacaatcaggcatacagctcagttacaggaaacatttggtttacataaataagggatctatttatctacatatctacctagcactcctctcctcttcttggcttcttcttgcatattcttaatcttaaagaaaaatgtgtgatattcctccttggggaagaagactgctcaggaagcttattttatcttctgtggctgttcggctaaagagagatttaatagatttgctaaacaataytgtgcttatacttaaaacactgtatggtacacttaaagtgcattaggggtagatatcatgttaagtgttattacaataattaaataaaatcttctttaaaatttcagggaagttattgtatttgcccagcttgtttaaatgctgagctaatcatctgtaatctgagagtgaagggtgtaaagcatatagtaatagttcaaacttcatggttggaatataaaaaagtggagctttgctagtagaaggactggaaggaatactgcataaataaa

SEQ ID NO: 229096 - DNA, 628 bp, Homo sapiens
gtgttgttttgtacttatcaccagatttccagaaagcattggtagataccaggagtttatgagataagcaaagtgaataggcaaaattgtgctcttcatagtctggtaacatcactaygtacaaacagttgcaggagcaactatccaagccagcaaaggatttgagaaagctaaaatgctcttcttccagttataagtatattttattgtcttatgaattgtgtagctgcattattttatccttaacttatatgtttattttttgaaattatattcatcacttcaaatagtatgtataataacaaacgtgtcataatgagagaggagacagaggatggctaggaagatagaaggggagggtcttgggagagaaaaaacacctgtgggagcacacttgtactgaccctgtagctagcgagaagaaatgtggttaagatcttcctcttatgccaggatgtttgctcagaaagtactatcccaacttaggtgtaggcacaataaatcaactaaatgtccttaccttgacccagagctagctgtaatatcattagcattgcagttttagtcccccataagttttacttaggcactcatggataataaccaagatggagtagctatggccaac

SEQ ID NO: 229097 - DNA, 628 bp, Homo sapiens
gtgttgttttgtacttatcaccagatttccagaaagcattggtagataccaggagtttatgagataagcaaagtgaataggcaaaattgtgctcttcatagtctggtaacatcactatgtacaaacagttgcaggagcaactatccaagccagcaaaggatttgagaaagctaaaatgctcttcttccagttataagtatattttattgtcttatgaattgtgtagctgcattattttatccttaacttatatgtttattttttgaaattatattcatcacttcaaatagtatgtataataacaaacgtgtcatawtgagagaggagacagaggatggctaggaagatagaaggggagggtcttgggagagaaaaaacacctgtgggagcacacttgtactgaccctgtagctagcgagaagaaatgtggttaagatcttcctcttatgccaggatgtttgctcagaaagtactatcccaacttaggtgtaggcacaataaatcaactaaatgtccttaccttgacccagagctagctgtaatatcattagcattgcagttttagtcccccataagttttacttaggcactcatggataataaccaagatggagtagctatggccaac

SEQ ID NO: 229098 - DNA, 499 bp, Homo sapiens
tgtttttacttccagccccactctatgacaatgagacctaataaagcattgcaagcaagggctaattaccactccacttcgcagtacccttccatattgttggcaggcactaacaatgagccgaatctcatccagtaggcatcatcaagactgaactcaagactcaaggctataggactgagggccagtaagaacgccacttgtcttcaaccctgtagtcaactgattgcaatagggagctgaccctctacccctacccagcagcaaaaaaagtagaataagaaaatggaakattgatctagatgacattttagtttcatcaacttcctgtggtgacaatgaactcagcagagagctgaacttctgcctctaccctactgcaagaaataaatgatcaacaaaatgaaataacaggatctaattgctctatgtagaacatgatagccaacaattttttagtgctcataaaacattcatcaaagatagaagacattatatt

SEQ ID NO: 229099 - DNA, 569 bp, Homo sapiens
taaagttctgaaaaatctacaccacaattaatttttctaatatcatatgccactttctcattcctttgagaaggctatgctctgacattgccaaattcaagttcaatgtccaattatacccacataattagcagacaagtagagcagyagagggtaggtcaggctaaagtgttaaagaattttaaaatctcacaatattttagagctgtggcaagacctgaacaacagatgaatatgaaaatgaactcaaaaatctattagagtcaagcaactagtttttttttctaattgggtggagtgttgcagaagtgtatctccccaggtaaaataatttaacaagggaatgtccatataaggcacctaaagaagcatctcagaagaacgcaggtctcaggtctagaagcaatgcctagatgttgaaaagaggcacataataatgtactgctgtaagtgagacagtttgttctgaaaattgcaggttataggattttcactagtcattttcaataatgaatggggccttaaaaagatgaagaagcccacaaaatatgcattaggtgttcagaatg

SEQ ID NO: 229100 - DNA, 619 bp, Homo sapiens
gcctataaccccagaactttgggatgctgaggtgggcggatcgcctgaggtcagcagttccagaccagcctgcccaacatggagaaaccctgtctctactaaaaatacaaaaaatyagctgggtgtggtggcgggcacctgtaatcccagctactcaggaggctgaggcaggagaatcgcttgattcttctgaacccaggatgcgcttgaacccagatccgcttgaacccaggatgcgaaggttgcagtgagccaggattgctccactgcactccaacctgggtgataagactgaaactccgtctcaaagaaaaaaaaaaaaagatactttctttggacagtctagtgactctatgccttggtgatgtttattttgaatagtatctcacaggtgttctctgaatttcttccatctggatatctacctctctgacaagattggggaaattttcttggattattctctcaactatgatttccaggttgtttactttttcttctctctgagaaatgccaataatttatatttagtttttctttacataattccatatttcttgaagattttgttcatatttttaaattactttttctatttttgtctgactaggttagttct

SEQ ID NO: 229101 - DNA, 603 bp, Homo sapiens
attttgtctgtccagcattaggtgacacgtggtcaatgattctcataaccctaggatgagaatccctctgtcaccaacagggtgaagaggaggtgatcaaaacatccatccacaggrccaacatgcattctaggtgaacatgcatcctcagtgaggcaataccacccttgagtgggtgaaagctggttcttgtggggtaaaagaaaatcttacccttttcatgtataaaacacagatatgcacacagtatataaatagatacacaattatctgtggcattaaaataccatgaagggaaattaggaaaaagtaatctaagaaaattgagaaactcttaattagtgtaggatggcattaagacaatagcttgaagcaggacagaatgaccacaagaaaccttcacctccctgcatggttcaagaacctctcttacagttagctaaaaaccagctgaagtcttgagacacagcagaagagctgcagacttcccaagttgaatggggccattcagaaatgcatcagtggcccttaacagactggagcagagcagaaaggttgaaaaatctcctaccaggcacacaaagcagtccctgagtgcacagc

SEQ ID NO: 229102 - DNA, 603 bp, Homo sapiens
attttgtctgtccagcattaggtgacacgtggtcaatgattctcataaccctaggatgagaatccctctgtcaccaacagggtgaagaggaggtgatcaaaacatccatccacaggaccaacatgcattctaggtgaacatgcatcctcagtgaggcaataccacccttgagtgggtgaaagctggttcttgtggggtaaaagaaaatcttacccttttcatgtataaaacacagatatgcacacagtatataaatagatacacaattatctgtggcattaaaataccatgaagggmaattaggaaaaagtaatctaagaaaattgagaaactcttaattagtgtaggatggcattaagacaatagcttgaagcaggacagaatgaccacaagaaaccttcacctccctgcatggttcaagaacctctcttacagttagctaaaaaccagctgaagtcttgagacacagcagaagagctgcagacttcccaagttgaatggggccattcagaaatgcatcagtggcccttaacagactggagcagagcagaaaggttgaaaaatctcctaccaggcacacaaagcagtccctgagtgcacagc

SEQ ID NO: 229103 - DNA, 490 bp, Homo sapiens
tgcaataatctaaaatgtatgtttattctctaatcttgatggtaataaaatgtaattaagcttttgataaattgaaaatttgctgtatacagtggtatgtgcctgaagtcccagctaatcaggggactcaggtgggaggacagcttgagcccaggagttcaagtccaaccagcgaaacacagtaagacttcatttctarcaaaagttgaaaataatttgaaactttatttgagagatacaatatgtctttatgtgaaatagaagttaaataactactgaattaagatcctaattccattgcttaaatcataagtaactaaatgtaattaactacattatttaaatgtcaatttatttttaaaattacctttagaaaaatatattaattattttttcaagaaaatattttgagaaaataacaaaagtaagtagatttagcatgaacatgggacttcccaactaaatactacttaagactattttatctttg

SEQ ID NO: 229104 - DNA, 490 bp, Homo sapiens
tgcaataatctaaaatgtatgtttattctctaatcttgatggtaataaaatgtaattaagcttttgataaattgaaaatttgctgtatacagtggtatgtgcctgaagtcccagctaatcaggggactcaggtgggaggacagcttgagcccaggagttcaagtccaaccagcgaaacacagtaagacttcatttctagcaaaagttgaaaataatttgaaactttatttgagagatacaatatgtctttatgtgaaatagaagttaaataactactgaattaagatcctaattccattgcttaaatcataagtaactaaatgtaattaactacattatttaaatgtcaatttatttttmaaattacctttagaaaaatatattaattattttttcaagaaaatattttgagaaaataacaaaagtaagtagatttagcatgaacatgggacttcccaactaaatactacttaagactattttatctttg

SEQ ID NO: 229105 - DNA, 319 bp, Homo sapiens
cagggtctcccaaggccctcctcccctcactgccggcggtacccagggaccaccgggccctaaaagcatggagcttaggaacccaccctccccgcctccctaccactgtcccgccctccatggcaaaagcctcaacgcggggggtctgctcacctcacttgctcctactrcctcccaccctctcctctccggcagggagcctcaccatgcccttcacggtgaccagaccccagaatctcctctactccctgggcctctcagcacggcctccccgagctctgttgttctcccctccgctccgttctccttgggggacccc

SEQ ID NO: 229106 - DNA, 601 bp, Homo sapiens
ctttatttgttctttgaaagcctgtgttgtgtatatttcatggaaaaatctggtttaaatgttcttccttttactttttacacatgacaaatgttcaagccacttttctccctcaaaattttcattaatattgctttcttcctttcttctaatgttgccatgcttcttcctcatgtctttgaaatcagaaaaccatttagtaaacagtgtcataaatacttcttaaaacccttagggctcatatcacggaatactatttccaagcctgcagcatcatagttttcttaagttacagtttttcctgtaaaacttatattatttacgtttgtctgtatgaattaagtattctctccccagaatggcatttcttgaatttttctccctaccttttgttttcattttcttctttaaatgtagctataatctgtttcaacaaggggtgaagatacattgtagaaccaacagaaaccytcatttgacccagcagaggaaataaatttagtattaacatgagcggttgcattagtttaggtaggctgtgctatgctgcaatgaaaaacaatccatggtaacaaatttactaaacaaatttatacaacaa

SEQ ID NO: 229107 - DNA, 542 bp, Homo sapiens
aatatctactgtcaccagcaatgtatgacaagtttcagtccttgcaaatatgtaactccttaattttcagatttttgtgactggtagatggggttgaatatcatgttatatagacatcccgatcatatatcaagactcaggttggggattakctctctcaggacatttttgccagtcttcttctttgtgttcccttgcacaacactagcagagaatataaaacagtattttgaaatcatttgttttctctcctacttgacctacaggactgtgatctcatcaagggttgatatctattcttgtttgccttcgagttaccaaatcacacaacaatggcaaacacaccagtatatgatcaatgaatgtttgtttaagtgagcaaaaatataatagtgaatagttccaagctcaaaacaggtttggagcacatttcatggagatttttgagtaacagggcataagagaatctcagaattgaccctcacacccttggccttgtgtggtcctggccatagcacagactgtttccatgtatttccaaa

SEQ ID NO: 229108 - DNA, 379 bp, Homo sapiens
atatcaagactcaggttggggattagctctctcaggacatttttgccagtcttcttctttgtgttcccttgcwcaacactagcagagaatataaaacagtattttgaaatcatttgttttctctcctacttgacctacaggactgtgatctcatcaagggttgatatctattcttgtttgccttcgagttaccaaatcacacaacaatggcaaacacaccagtatatgatcaatgaatgtttgtttaagtgagcaaaaatataatagtgaatagttccaagctcaaaacaggtttggagcacatttcatggagatttttgagtaacagggcataagagaatctcagaattgaccctcacacccttggccttgtgtggtc

SEQ ID NO: 229109 - DNA, 618 bp, Homo sapiens
ttgtattagcagttttactggatattgccaaattactcttccatatagctgcaccaatatctactgtcaccagcaatgtatgacaagtttcagtccttgcaaatatgtaactccttaattttcagatttttgtgactggtagatggggttgaatatcatgttatatagacatcccgatcatatatcaagactcaggttggggattagctctctcaggacatttttgccagtcttcttctttgtgttcccttgcacaacactagcagagaatataaaacagtattttgaaatcatttgttttctctcctacttgacctacaggactgtgatctcatcaagggttgatatctattcttgtttgccttcgagttaccaaatcacacaacaatggcaaacacaccagtatatgatcaatgaatgtttgtttaagtgagcaaaaatataatagtgaatagttccaagctcaaaacaggtttggagcacatttcatggagatttktgagtaacagggcataagagaatctcagaattgaccctcacacccttggccttgtgtggtcctggccatagcacagactgtttccatgtatttccaaagaggcttgaccttagcaagtc

SEQ ID NO: 229110 - DNA, 569 bp, Homo sapiens
tgtaatttcttttcctcagaatgaaacctaaatttgttctaaaactgattaytttacatgttatattttacatatatatggtagaaaatatttgcaaaccgtacatctcatgagggattaataatcagaatatacaaggagctcaaacaactctacagaaaaaaaaagtaatcatctgatttaaaaatgggcaaaagctctgaatagacatttctcaaaagaagacatacaaatggcaaacaggcacatgaaaggtgcttaacatcactgatcatcttttatatatataataaaatatgagccagatttaaaatatttacatagtcttggtctatatttcactcccaaattctaccaaatccataaaacataaggtggaaagaaattacaagtctcaattttgatcacttctcagaattctacaataatcccagtgtcaaccctgactgctaaatgttgaaaatctgttttagtgagtgttccaccaaaatttgcgtatatgtgaatcaatcctaaagcattttcattatcaatgatcatttttacaaattgtgttttacttgttttat

SEQ ID NO: 229111 - DNA, 569 bp, Homo sapiens
tgtaatttcttttcctcagaatgaaacctaaatttgttctaaaactgattattttacatgttatattttacatatatatggtagaaaatatttgcaaaccgtacatctcatgagggattaataatcagaatatacaaggagctcaaacaactctacagaaaaaaaaagtaatcatctgatttaaaaatgggcaaaagctctgaatagacatttctcaaaagaagacatacaaatggcaaacaggcacatgaaaggtgctyaacatcactgatcatcttttatatatataataaaatatgagccagatttaaaatatttacatagtcttggtctatatttcactcccaaattctaccaaatccataaaacataaggtggaaagaaattacaagtctcaattttgatcacttctcagaattctacaataatcccagtgtcaaccctgactgctaaatgttgaaaatctgttttagtgagtgttccaccaaaatttgcgtatatgtgaatcaatcctaaagcattttcattatcaatgatcatttttacaaattgtgttttacttgttttat

SEQ ID NO: 229112 - DNA, 569 bp, Homo sapiens
tgtaatttcttttcctcagaatgaaacctaaatttgttctaaaactgattattttacatgttatattttacatatatatggtagaaaatatttgcaaaccgtacatctcatgagggattaataatcagaatatacaaggagctcaaacaactctacagaaaaaaaaagtaatcatctgatttaaaaatgggcaaaagctctgaatagacatttctcaaaagaagacatacaaatggcaaacaggcacatgaaaggtgcttaacatcactgatcatcttttatatatataataaaatatgagccagatttaaaatatttacatagtcttggtctatatttcactcccaaattctaccaaatccataaaacataaggtggaaagaaattacaagtctcaattttgatcacttctcakaattctacaataatcccagtgtcaaccctgactgctaaatgttgaaaatctgttttagtgagtgttccaccaaaatttgcgtatatgtgaatcaatcctaaagcattttcattatcaatgatcatttttacaaattgtgttttacttgttttat

SEQ ID NO: 229113 - DNA, 568 bp, Homo sapiens
atatagtagctggtgtttttaaaatgttgttatgcagttaatttaaagtttggyaacactatgtctgtggccaaaacattttttaaaattatcctgctttgcaaaatcaaacatctgcaaatcactgcctgaggaaacaatcacttcttcggtctggcaggagctctgatatgactgtgcagtgatgagaaaggggtgtgatgtgtgaagcaagactgcaaaacagcagaccatttctatgtgttatacacaaacaggttaaaagcatattttactctcaagtatgacggggaaatactccacttacaaagcgctttacttttctatattagagtaacaaattaccacaaaattagcagcttaaaataacacacacttgttttctcccagtttttatgaatcaagagcccagttatagcttatctgggccctctctttgagatcttacatggtcatgtattatcagccgggttgcattttcatctgtaggtttgattggggaaaatttttcttctagtttcattcaagttgttgtcagaattaatattgctttggtctgtgtggatga

SEQ ID NO: 229114 - DNA, 568 bp, Homo sapiens
atatagtagctggtgtttttaaaatgttgttatgcagttaatttaaagtttggtaacactatgtctgtggccraaacattttttaaaattatcctgctttgcaaaatcaaacatctgcaaatcactgcctgaggaaacaatcacttcttcggtctggcaggagctctgatatgactgtgcagtgatgagaaaggggtgtgatgtgtgaagcaagactgcaaaacagcagaccatttctatgtgttatacacaaacaggttaaaagcatattttactctcaagtatgacggggaaatactccacttacaaagcgctttacttttctatattagagtaacaaattaccacaaaattagcagcttaaaataacacacacttgttttctcccagtttttatgaatcaagagcccagttatagcttatctgggccctctctttgagatcttacatggtcatgtattatcagccgggttgcattttcatctgtaggtttgattggggaaaatttttcttctagtttcattcaagttgttgtcagaattaatattgctttggtctgtgtggatga

SEQ ID NO: 229115 - DNA, 568 bp, Homo sapiens
atatagtagctggtgtttttaaaatgttgttatgcagttaatttaaagtttggtaacactatgtctgtggccaaaacattttttaaaattatcctgctttgcaaaatcaaacatctgcaaatcactgcctgaggaaacaatcacttcttcggtctggcaggagctctgatatgactgtgcagtgatgagaaaggggtgtgatgtgtgaagcaagactgcaaaacagcagaccatttctatgtgttatacacaaacaggttaaaagcatattttactctcaagtatgacggggaaatactccacttacaaagcgctttacttttctatattagagtaacaaattaccacaaaattagcagcttaaaataacacacacttgttttctcccagtttttatgaatcaagagcccagktatagcttatctgggccctctctttgagatcttacatggtcatgtattatcagccgggttgcattttcatctgtaggtttgattggggaaaatttttcttctagtttcattcaagttgttgtcagaattaatattgctttggtctgtgtggatga

SEQ ID NO: 229116 - DNA, 611 bp, Homo sapiens
ccttatgtaaaactggctttgtgaaaatcacattgatttactccttgacaagttggcgtctttgaattgcataaattccttctccaacctctgtgtaagtctagagaatcaagtgacaccaagacagaatctagctaatttaagtcaatatttccttgtgaataaataaaatgctaagagttatgaagctcagctgttctcctaagctctgctgacacttgaaatacatgactgattcctcaaggactttgtccatagaggaaacaactagggaaatattttccagtgaagtgttgatttactttaaactctgttctctcacagacacctaggagaaagcctttttttcttttaattttataggttctttttctccactggtgaaataataagcaatagatgatcctcaagctaacattacacaatagctagatgattcaatctggcactgctttagtraactcatttttatactgctcctcttccagtgctgctaggattggttttgtataatacctgaggtttccatattaaattaagaggtatacatgtttccttcatctttacattctaacactgccttcataaactcaattcacaatggttaagtt

SEQ ID NO: 229117 - DNA, 598 bp, Homo sapiens
tgcattgttggtggaaagtaaaatggcatagcttctcaaagaagcatcagtttcttataaaagtaaacaagcaattactatgcaaccagtaattgcattcatgggcatttatcctgggagggggaaacctatgttaacacagacctgtacataaatgttcaaagaaattttatttctagtagctaaacactgtaagcagcccagatgtccacttcaatgggtaaatggataaaaaactgtgatacaccatttcatgggctagcactcagtaataaaaaggacaaaaagaaatcaatacactcaacaatttggatgaatctcgagaaaattatgctaagtaaaagctaaaagagaragaaaaaaatctaaaaaaggttaaatattaaatgtatttatgtatataattttttaatgacaaaattatagatgtggagaacagagcagtgttgccagagattaggaactggtagccgggagaggtggggaagagaaaagtgaatgtggttaaaaggacaacatgagggacacttgaggtaatggaacagttctgtgtcttcattctagtttaaatacacaaatctacatgtgataaaattgc

SEQ ID NO: 229118 - DNA, 506 bp, Homo sapiens
gctaaatttttttatttgtagtagagatagggttttgccatgttggtcaggctggtctccaactcctgacctcaggtgatccgcccacctcagcctcccaaagtgctgggattacaggcatgagccatggcgcccagccaggacaagttttaatagggattaccacataatccttttgatgaattaaaacaacagaaatttattctctcacagttcttgaatttctggccagaagaacaaaatcagagtcactgggtcaaaattaaggtgtcagctagatcacactgcttcgcaaagttctgcgagaaagcccgtcccgtttatcttccagctttggatagctaccccatggtcgggcttatggctgtatcatttcaatctctgcctttgtggtcctgtcttttctttctgtctctgaaatcttcstctgcctctctcttacaagcatatctgagatcacatttagggtccactcaagaacccagaataatctcccccctctcaag

SEQ ID NO: 229119 - DNA, 563 bp, Homo sapiens
atgtagctttaaattaatccttgatatctgaaaaagtgagtctttcccctagctcccttattctatgtcaagaatagtttagctattmttagcatttgcaaataaattttaaagtcaacttatcaagtgccaacaatacatacaaacaaacaaaaatttacattttattggaattgcattaaatttaaaaaataacttgcagagagtttacatcattacaatattgaatctttccactgataaatatggggtaaccctccatttatttaagtattctgtttctcttcaaaatgatgtatattttatttgtaggggtcctatacatttttaatgtatttattttgtgcatttaaaaatatttgctgtaagttatttgctatttcattttctaatatttgtgaaaaatataatttatttttatatatttaccttgtatctaagaaccttgctaaattcatttatttgatattccatctttgtatatacaaaaattatatattctttatttaataatatgtttctatctttttggcatcattaatttctaacttttactaacaaat

SEQ ID NO: 229120 - DNA, 563 bp, Homo sapiens
atgtagctttaaattaatccttgatatctgaaaaagtgagtctttcccctagctcccttattctatgtcaagaatagtttagctattcttagcatttgcaaataaattttaaagtcaacttatcaagtgccaacaatacatacaaacaaacaaaaatttacattttattggaattgcattaaatttaaaaaataacttgcagagagtttacatcattacaatattgaatctttccaytgataaatatggggtaaccctccatttatttaagtattctgtttctcttcaaaatgatgtatattttatttgtaggggtcctatacatttttaatgtatttattttgtgcatttaaaaatatttgctgtaagttatttgctatttcattttctaatatttgtgaaaaatataatttatttttatatatttaccttgtatctaagaaccttgctaaattcatttatttgatattccatctttgtatatacaaaaattatatattctttatttaataatatgtttctatctttttggcatcattaatttctaacttttactaacaaat

SEQ ID NO: 229121 - DNA, 563 bp, Homo sapiens
atgtagctttaaattaatccttgatatctgaaaaagtgagtctttcccctagctcccttattctatgtcaagaatagtttagctattcttagcatttgcaaataaattttaaagtcaacttatcaagtgccaacaatacatacaaacaaacaaaaatttacattttattggaattgcattaaatttaaaaaataacttgcagagagtttacatcattacaatattgaatctttccactgataaatatggggtaaccctccatttatttaagtattctgtttctcttcaaaatgatgtatattttwtttgtaggggtcctatacatttttaatgtatttattttgtgcatttaaaaatatttgctgtaagttatttgctatttcattttctaatatttgtgaaaaatataatttatttttatatatttaccttgtatctaagaaccttgctaaattcatttatttgatattccatctttgtatatacaaaaattatatattctttatttaataatatgtttctatctttttggcatcattaatttctaacttttactaacaaat

SEQ ID NO: 229122 - DNA, 648 bp, Homo sapiens
aatgtgcagtcttgtccttgtcctccatattactcacygctcactcgttgattcacctagagcaacttccagtcctgaaagctccattcattgtaagtgtcctatgcaggtgtactattttttatcttttataccatatttttattgtaccttttccttgtttagttatatttagatacacatacactggccaatgtgttagagttgcttacagtattcagcacagtaacattctgtacaggtttgtggcttaagaacaataggctataccacataccataagtttgtagtaggttgagccatctaggtttctgtaagtatgttctgtgatgtttgcaccatgacaaaatcgcccaaggatgcatttctcagaacgtattcttgttaagtgatgcatgactgtatagagctttgctaagattttcaaagaagtcaacataatttgcagaacttgaacactttttctttgcaacatgtgcatggaatatgaagaagctgtaatatgatttgctgaaagtagctgcaaaatctatattggaatattcaaaaatggttgcttttacatattcgtagagatcagccacagaaacagagcaaacaatattggaattatagtgtattattatagaaggaaaataaaatgtagaa

SEQ ID NO: 229123 - DNA, 624 bp, Homo sapiens
gttacttttacatttctgatatttcatttatccttctaaaacaggaatgtattacattttggaaaataaatctttactaaaacccagaaacctaaactaacaattaaatttgtgacagtacagtgtggtatcatagtaattgatatgtaagacttgattaataaagtctatttatttaatcctatagtaactccattttctcattactccatcaacaaatatttactctgtcttctctatgaaagacattatgctaagtgatatgaggtacagagagaagaattagtcttcaagatattggcagtctggctagggtgcagttctcatgcattaattacagaaagtagcacatgggaaatgccagctgagtggtacagctaatgcgtctcatgagatgaaatcatagtcttgtgatgactggggaagtttgcccaggcgagttagaatttaagtgagagagccttacatattattagtatttaattamgatcgaaggagaacagataaaaaaaagtagaagcataagcaaggaatgaaaatggggggcatagagtattttgtagagctgcgttgtccaatatggtagccactagtcacatatggctacagagcacttcaactgtg

SEQ ID NO: 229124 - DNA, 624 bp, Homo sapiens
gttacttttacatttctgatatttcatttatccttctaaaacaggaatgtattacattttggaaaataaatctttactaaaacccagaaacctaaactaacaattaaatttgtgacagtacagtgtggtatcatagtaattgatatgtaagacttgattaataaagtctatttatttaatcctatagtaactccattttctcattactccatcaacaaatatttactctgtcttctctatgaaagacattatgctaagtgatatgaggtacagagagaagaattagtcttcaagatattggcagtctggctagggtgcagttctcatgcattaattacagaaagtagcacatgggaaatgccagctgagtggtacagctaatgcgtctcatgagatgaaatcatagtcttgtgatgactggggaagtttgcccaggcgagttagaatttaagtgagagagccttacatattattagtatttaattacgwtcgaaggagaacagataaaaaaaagtagaagcataagcaaggaatgaaaatggggggcatagagtattttgtagagctgcgttgtccaatatggtagccactagtcacatatggctacagagcacttcaactgtg

SEQ ID NO: 229125 - DNA, 487 bp, Homo sapiens
gctgccacactaaattctgctgctagaatattggttgcatttccttcaagcaaatttgtcacactgctggcgttaaaacactaagaatgtaccgaacaagctgcatgcttgattgccaataagtgtttgtatgtgtgaccaaatttcatctaccagccttgtttttactataatgtggttgtaggaagagacttataacctttacctgactctactattgaaacttttatttaccacttggaacctactagttgtgaatgatccattgccttagatcagattgtggcaggagtctgtgtgtgcacacacatgcacatacacacacacaggagaaaagtgaaataaaagggaggaagtaggtgagagaatcaggctgccaactgtttatatatggrcttacttgtccttgtcccctttggttggaaagtttttcatccacaaattctcctgaatttcttacagtgatcaggccatttgtcttttgcta

SEQ ID NO: 229126 - DNA, 590 bp, Homo sapiens
tactgtaagctgaggagcacaatccaaatagaagtgagtgctatcacaggtcatcagctctcctggtcatactgatcacttgggcagaatacatggggcctctgggaatctcttcgtgacacttttacctcaaaggtcaaaaactgaatcaaagtacagatcaatggatttaagactaggctagctgaaaaagttgcattccaattctggccctatttaatttattcatctataaagacatcttctctatggtgctacaaaaatatattgaatagcaaatttgcttttagcccttcaaataatacattatgtcaggaaagaagactgattatattttaaacaatgaaaaaataaaataaagataaacataaaacctaaaatgtgaaaagcttattcaagaaaactggtattattcctaaagattcagtaaaactcatataaataaaacgtaagtttaaaaagccaggaaaaggtcagggaagaaaggyaggatagaatagcaaaaataatagcaatcagtacgaagtctttaattttttattggtttgagaaagaaggtaaagatgtttccatcccaaacaatgttaaaa

SEQ ID NO: 229127 - DNA, 538 bp, Homo sapiens
ttttcatcagtgtttcaatcatctctagtcagaaaaaaatgtaaagctattttgatattaaataaaaggaattcttatgataaataaaaacaagagaaaatggatatatgcaaaagttctatactctatacaaataagagttctaaaatgctgtgacttgtgcatatggttatttcattaacaaattaacatacacagtggcaaaacataagatttgaaatcagatttgcccccagcttgaagcagcttgaatatttaaaatttgaattacattgagcaatattcatcaactgggtcccagagttacccatctcatagaattttctgaggactaaatgaagtaacatwtataaagcatcagacagaaatagggattcaaaatactaggttaatataggttaattcaactttgttcatctgtatgaacataacttaaagaaagatgtgtttatgaggatgaaattctagtttgtagaatatctttgcttctaatcaattattgcacagcctaggaccacagatacaaatgacacccatt

SEQ ID NO: 229128 - DNA, 612 bp, Homo sapiens
tttttcatttattgtatacttccgcacttgacagattactaggaatgccaccaagaaagcatgagcacaaagggcagttaaaagttcagtctttggataaagaaaatgtatatacaccatggaatactacacagccataaaaaagaattagttcatgtcctttgcagggacatggatgaagctagaagccatcactctcagcaaactaacacaggaacagaaaaccaaacaccatatgttctcactcataagtgggagttgaacaatgagaatacaaggacacagggagggaaacatcacacactagggcctgtagggtggtgggggcaaggggagggagagcattaggataaatacctaatgcatgcaggccttaaaacctagatgatgggttgacaggygcagcaaaccaccatggcacatgtatacctatgtaacaaacctgcacattctgcacatgtatcctagaacttaaaagtaaaatttaaaaaaaaaagttcagtctgagctctgatgcctacaacaaaatggctagtcaaagggtctccttcattattcaattaccacccgaaggactgcagtctcagttatgcacacctgccacattaaccc

SEQ ID NO: 229129 - DNA, 561 bp, Homo sapiens
agtgagatcatgcggtatgtgtctttctgtgcttggtttatttcacttaacacaatgtcctccagtttcatccatgttgttmcaaaagacaaaacttcattctttttgtggctgaatgatattccattgtgtatatacaccacactttcttcatccattctcctgttgatcggcacttaggttgcttccatatcttagccatagtgaacagaacagcaatgaacataggggtacggatatctctttgctatactgatttcctttcttttggatatatacccaagagtaggactgctggatcatatggtagtttaactgttcgttttttgaggaacctccataatgctctccctagtggctgtactaatttacattaccatcaacagcattatgagggttcccctttctccacatccttgtcagcattcattattgcttgtcttttggataaaagccattttaataagggtgagatgatatctcattgtagttttgacttgcatttctctgatgatcagtgacgaacattttttcatatacctattggccatttgtatgtct

SEQ ID NO: 229130 - DNA, 573 bp, Homo sapiens
tagcttacttagaaaatacatataattgctttatatttcagttcaatagttgttttcataataaactaccttgatgtctttgactgccgtcaaagcccccttttacccattcttcctcatagcatttttcagaattttaattttacattttctgctattatgcagtttatgactatatactccaaggacaggctctgtatcatttttccttatagtagtgtcatcaaaacatggtgctgtccatactatagatattaaaatayagagccattggctcataggtcaaaaacttatttgtaaagcaaattatattctgaggtagataaatataaattttaacaacatgttgtttaattcataaaatcacagtaaaaacaatttgaaaaagcagagcaataaatttaatgctgaaattcaaagtcattaatattccttagaattgcaaaatgactataaaatgactgtacgtgtaatgcttttccaagcatagtggggccatattaggcactcaaatgtttactaagttagaaaagatctggattttataatctaaatcttgtaattcagatgttt

SEQ ID NO: 229131 - DNA, 599 bp, Homo sapiens
aaatacatataattgctttatatttcagttcaatagttgttttcataataaactaccttgatgtctttgactgccgtcaaagcccccttttacccattcttcctcatagcatttttcagaattttaattttacattttctgctattatgcagtttatgactatatactccaaggacaggctctgtatcatttttccttatagtagtgtcatcaaaacatggtgctgtccatactatagatattaaaatacagagccattggctcataggtcaaaaacttatttgtaaagcaaattatattctgaggtagataaatataaattttaacaacatgttgtttaattcataaaatcacagtaaaaacaatttgaaaaagcagagcaataaatttaatgctgaaattcaaagtcattaatattccttagaattgcaaaatgactataaaatgactgtacgtgtaatgcttttccaagcatagtggggccatattaggcactcaaatgtttactaagttagaaaagatctggattttataatctaaatcttgtaattcagatgtttactaacttagtaaatatgygaaaattataagatctagat

SEQ ID NO: 229132 - DNA, 547 bp, Homo sapiens
aataatagtattacagcaacaaaatagaatttaaatgtttcatgtccttaaaagaaatataaggtagtatgtaataatctgtctgtaacaacaaactgtaaacaacataacgatccatgattaagcctgcttcaatatatcacaacagacctacatgtgcttacataactacctttcccaggtaartttttaagtaaaataaaaaggtataggcaaatataatatgatgctatttaagtataaatacatagaatttttctaaattttaaaccataaactattattagtggctattatgagtggtttctatgagaaggctttttaaccatgttcaaattttatattctttaaaccttaaagacaaaaattaatgtaaaataaatgaacatgttatttactctcacagtaataaaggaaaaaaatggcaaaaatctccatgttggggctccatgaaaattcataaaatgcatagaactttaggctgttttttatctgcaaaacattcttattgttcaattctatctaaaagtgaagttttatttagaaa

SEQ ID NO: 229133 - DNA, 606 bp, Homo sapiens
ctactttaattctctagcaaagaattatagcagagacgattcctttaatcctgaaaacagggataggcatcatcatatttttgctcagaaagggatatcaggcaggaataaggttgaaccttcccttatcagagaatacattattgtttgygtacaataaattttaaatcaaacaggttttttttagcaaattctattttcagagatggctcatcttaatttctggagaagtcaggatgcagtacatctgaaagaactaatgttatgaattcagatcaacaagttaaatctagctttgccacttcatctagaaagaaaatatcactttggtcaactatcaggaaaagaataacaacaactagaccagctaccatttattgagcagtttgtgtgtaactcaggattaagactctacatgtcttaattcattattcctcataattcctcataattcagcatcctgaatgataactgaaagtgggtttctcagatgccaccttctctaatgtgtagagttgttacaaattctatgttggactgaagagcaagtctccctaaaattaagcattagttgattggtacaatatatcatcaataagctattgg

SEQ ID NO: 229134 - DNA, 606 bp, Homo sapiens
ctactttaattctctagcaaagaattatagcagagacgattcctttaatcctgaaaacagggataggcatcatcatatttttgctcagaaagggatatcaggcaggaataaggttgaaccttcccttatcagagaatacattattgtttgcgtacaataaattttaaatcaaacaggttttttttagcaaattctattttcagagatggctcatcttaatttctggagaagtcaggatgcagtacatctgaaagaactaatgttatgaattcagatcaacaagttaaatctagctttgccacttcatctagaaagaaaatatcactttggtcaactatcaggaaaagaataacaacaactagaccagctaccatttattgagcagtttgtgtgtaactcagrattaagactctacatgtcttaattcattattcctcataattcctcataattcagcatcctgaatgataactgaaagtgggtttctcagatgccaccttctctaatgtgtagagttgttacaaattctatgttggactgaagagcaagtctccctaaaattaagcattagttgattggtacaatatatcatcaataagctattgg

SEQ ID NO: 229135 - DNA, 606 bp, Homo sapiens
ctactttaattctctagcaaagaattatagcagagacgattcctttaatcctgaaaacagggataggcatcatcatatttttgctcagaaagggatatcaggcaggaataaggttgaaccttcccttatcagagaatacattattgtttgcgtacaataaattttaaatcaaacaggttttttttagcaaattctattttcagagatggctcatcttaatttctggagaagtcaggatgcagtacatctgaaagaactaatgttatgaattcagatcaacaagttaaatctagctttgccacttcatctagaaagaaaatatcactttggtcaactatcaggaaaagaataacaacaactagaccagctaccatttattgagcagtttgtgtgtaactcaggattaagactctacatgtcttaattcattattcctcataattcctcataattcagcatcctgaatgataactgaaagtgggtttckcagatgccaccttctctaatgtgtagagttgttacaaattctatgttggactgaagagcaagtctccctaaaattaagcattagttgattggtacaatatatcatcaataagctattgg

SEQ ID NO: 229136 - DNA, 606 bp, Homo sapiens
ctactttaattctctagcaaagaattatagcagagacgattcctttaatcctgaaaacagggataggcatcatcatatttttgctcagaaagggatatcaggcaggaataaggttgaaccttcccttatcagagaatacattattgtttgcgtacaataaattttaaatcaaacaggttttttttagcaaattctattttcagagatggctcatcttaatttctggagaagtcaggatgcagtacatctgaaagaactaatgttatgaattcagatcaacaagttaaatctagctttgccacttcatctagaaagaaaatatcactttggtcaactatcaggaaaagaataacaacaactagaccagctaccatttattgagcagtttgtgtgtaactcaggattaagactctacatgtcttaattcattattcctcataattcctcataattcagcatcctgaatgataactgaaagtgggtttctcagatgccaccttctctaatgtgtagagttgttacaaattctatgttggactgaagagcaagtctccctaaaattaagcattasttgattggtacaatatatcatcaataagctattgg

SEQ ID NO: 229137 - DNA, 647 bp, Homo sapiens
atctttagaatgtggtctccactgcataaacgcccatgctgagtaaaacaatattgaataattagactattattattttaactgcaacagataaatcctaaatgagaagggattaattttagaaaagcaataatatgagttaccaatcaggacataaaataaaacacatgggtataatattaactgtcttttgaaacatcctarcatcattcagtgtgatgcaataaatgaaattcacatatagtctttaaatcaatagtccatatgaacttttcattttgattctacctaccaagagttcatatgaacttttcactttgatttctacctaaatgcctttttgtgaattttttggagggaaagaagaaaatgcccttaagcaaagttgtatataaatcaccatgcaaatatatattacctaaaatgtggtataaaccacaagaaagcattatattaatatcacaactttctgcctggctatttctattataaatgtcccaaaagaactcatgtgcaggtgaaatacttgtgaagtgaaaattcagaaagatgtgaggagtgaaaagcagtcttatgagcctccatacacatgcagtccattaactttctgcaatgatggaactcttctgcactactcaatacaatag

SEQ ID NO: 229138 - DNA, 613 bp, Homo sapiens
tgctgtaattgtttattaaaatggctttctgaactataatctctttgaggaatacgagtgtatcttatttgccttgataggtctgttcatagcagtcatgccacaaatgtttaatgaaaagatcttgattctcatccttggtttatagaatataaaataaacaaaagaaaacataaatatctggcaatttttatatacagataaacattctgtataatttatggaagttgttagtaaatgagcaagagtcaccaaataattatctgttttctgtttaagttctggctgaacatttcagtctaaagggggcttttatgtatttagcaaataaacatatattaatttatggattttaattagtgctattacctaaaacataacctaaatattatacaacttattcratttaaaagtttgcaaattctatgtgaaagggcaaactaaaacaccttctaagtatttaaaagtacaggaaaagtcctcttataagatgcagtcagaaccagtattgattcacatactacaaaaggtcaagtaaagcagaaaaaataacaaagaaaaaatatgtaccttattttaacttaaaacacatgtatattcatttgtatatagg

SEQ ID NO: 229139 - DNA, 422 bp, Homo sapiens
cttcctcctctggggtgggccccagctccattggcaggagtgaattcagcacatccgggtcctgtaatggaagagtcagggagcaggggggcatagagttttctggccctccctccwgacccacaagaccaggatgttagattaggtcgggggcacacctgagtgcagtactgcagacgctccaagatgctggcaaagctagggcggagctcaggctcgtgctgccaacactgggtcatgatgcggtacctggggagaggcaggagttcatgcccacccatggttgtgaaggacctcccttcccgggcagcactcaactcacacaggccctgggcagcccctaggagggtccatccggcctcctccaacgacgaagtccagcacctcctggttggtgcgcccaggatagggcatgtagccca

SEQ ID NO: 229140 - DNA, 337 bp, Homo sapiens
acgattttgatgtgaagattgacttacaagttcccagctcaggtatgtgagggtggggcgggtggtgagggctgagaaccagatggatccatggttttctggggcaacaaggaagcccacttttagggaagaaaggggaatgctggctcatcagcatccacaggccaggccaagacaggctgtgggtatggtgagagggaacagggccacartcaggaggctgcctgcaggagtgtagcacaggactaagaggactttgtgggacctcagctgccaacttgctcttctttcccacagagtcaaaggctttagccatcacctccaaggctccgccagc

SEQ ID NO: 229141 - DNA, 550 bp, Homo sapiens
agtgtctgcaaataatcctttcttgctgcaagaaaaatgtacctattaataaaataaaaattgttgtgcaaatatttctttaaagagagacaataaaaatgtcaaagtgttttatataaaggcctccagcccattgtaaatgtcctgagtgactactaatgctgtattaaccccagagaaaactgcttgtaggacatgagctcaggagttctgggctctgggaagcacggtttgagctgagaccctctcagcttatataaaagataagtggaaggtggcctcctttcaggagggacacatctctcctttgcttcaaagtggtttaatatgaaatatatttggcctttgyccctggttcctgatactgagttcctaaaccctggtaatttcctgagtgataggaatgtcttttgttattcataatgaaccccttttgatcacacctaagtttatgttaatgaggtaacttagggtggggtccctaaatagcctcaggttggggctgaggaaagaccaagccattagaaagatggaattttctgacccacac

SEQ ID NO: 229142 - DNA, 550 bp, Homo sapiens
agtgtctgcaaataatcctttcttgctgcaagaaaaatgtacctattaataaaataaaaattgttgtgcaaatatttctttaaagagagacaataaaaatgtcaaagtgttttatataaaggcctccagcccattgtaaatgtcctgagtgactactaatgctgtattaaccccagagaaaactgcttgtaggacatgagctcaggagttctgggctctgggaagcacggtttgagctgagaccctctcagcttatataaaagataagtggaaggtggcctcctttcaggagggacacatctctcctttgcttcaaagtggtttaatatgaaatatatttggcctttgcccctggttcctgatactgagttcctaaaccctggtaatttcctgagtgataggaatgtcttttgttattcataatgaaccccttttgatcacacctaagtttatgttaatgaggtaacttagggtggggtccctaaatagcctcaggttggggctgaggaaagaccaagccattagaargatggaattttctgacccacac

SEQ ID NO: 229143 - DNA, 527 bp, Homo sapiens
tatattaatatcaaaagcatttgaagagttgcaagaattaccaaaatgtgacacagagatacaaagtgaacatatgctgttggaaaaatggcgcctacagacttgcttgatgaggaattgccataaaccttccatttgtagaaaatgcaatatctgcaaagtgcaataaggtgaagcgcaataacatgaggtctgcctgtacctaattttggtatgtagagagccttttatgacagtctgacttgccacctcttgtggatagaattacatcctccaaaaagatatgttcaagtcctaatccccatacycatgtaagtgaccttattgggaaattggttctttgcagatgcaattagttaaaatgaggtcatgctggcatagggtggcttttaatccaacatggctggtgtcctcgtaagaaaagtagaagaaacaccaagacactccctcagagggaagttgtcatgtggctatagagacagtgtttggagtgaggcagctatgagccaagggatgatagaagggac

SEQ ID NO: 229144 - DNA, 527 bp, Homo sapiens
tatattaatatcaaaagcatttgaagagttgcaagaattaccaaaatgtgacacagagatacaaagtgaacatatgctgttggaaaaatggcgcctacagacttgcttgatgaggaattgccataaaccttccatttgtagaaaatgcaatatctgcaaagtgcaataaggtgaagcgcaataacatgaggtctgcctgtacctaattttggtatgtagagagccttttatgacagtctgacttgccacctcttgtggatagaattacatcctccaaaaagatatgttcaagtcctaatccccatacccatgtaagtgaccttattgggaaattggttctttgcagatgcaattagttaaaatgaggtcatgctggcatagggtggcttttaatccaacatggctggtgtcctygtaagaaaagtagaagaaacaccaagacactccctcagagggaagttgtcatgtggctatagagacagtgtttggagtgaggcagctatgagccaagggatgatagaagggac

SEQ ID NO: 229145 - DNA, 604 bp, Homo sapiens
acccaccaagctactgaacccacccgttgtgtaggtaacacaagtgcaacaaggtctagcgcctcagaagcagtgtgtagccagaagcagcctatctggttggattatctaagaatggagttttttttctattttttcttttttctttttgagatggagtctcgctctgtcccargctggagtgcagtggcatgacctcggctcactgcaacctccgcctcctgggttcaagtgattctcctgcttcagccttccaagtagctgggattacaggaacatgccaccacacctgggtaatttttgtatttttagtagagacggggtttctccatgttggtcaagctggtctcgaactcccgacctcaggtgatctgcccgcctcaccctcccaaagtgctgggattacaggcgtgagccactgtgccttgccaagagtggaatttctggcatccatcccataggaaacacattaagtatacactcacagttctaccactgtgtactctgatggagtccatggtcaaacattagggcttcaatcttatgggtcagatttttctggctgtaatgaagctggaggaaattggaatacatttccatttct

SEQ ID NO: 229146 - DNA, 604 bp, Homo sapiens
acccaccaagctactgaacccacccgttgtgtaggtaacacaagtgcaacaaggtctagcgcctcagaagcagtgtgtagccagaagcagcctatctggttggattatctaagaatggagttttttttctattttttcttttttctttttgagatggagtctcgctctgtcccaagctggagtgcagtggcatgacctcggctcactgcaacctccgcctcctgggttcaagtgattctcctgcttcagccttccaagtagctgggattacaggaacatgccaccacacctgggtaatttttgtatttttagtagagacggggtttctccatgttggtcaagctggtctcgaactcccgacctcaggtgatctgcccgcctcaccctcccaaagtgctgggattacaggcgtgagccactgtgccttgccaagagtggaatttctggcatccatcccataggaaacacattaagtatacactcacagttctaccactgtgtactctgatggagtccatggtcaaacattagggcttcaatcttatgggtcagatttttctggctrtaatgaagctggaggaaattggaatacatttccatttct

SEQ ID NO: 229147 - DNA, 552 bp, Homo sapiens
atcctacttactcttctccttctctgtgcttctctaatgccctagccatgcctctgttttctgttgtattgtttttttctgtgtgtgtgtgtttcccgccattggattgaaagctacctgaggcctaggactgccctcatttttkcacttagctcattactggaaggaagctggcatttgtataattcttgaaggctgagagtgatggctcatgcctgtaatcccagcacttcgggagcccaaggtgggagggtcgtttgagcccaggagttcaaggccagcttgggcaacatagtgagaccttgtctctacaaaagaattttaaaaattagccgggtgaggtggcatgtacctgcagtttcagctattcaggaggctgtggtgagagggttccttgagcctggaaggtcaaggctccagtgagctatggttgctccactgtaaaaataaaagaaaaaaatatatatatatatatacacacaaaattgttaagtaaacagttgagtctgtatggtttattcactctctgataaatgggtcttgcatttttct

SEQ ID NO: 229148 - DNA, 572 bp, Homo sapiens
gaagtagaaacatagtgtttggcataaagtaggcatttagtaaatatttgccaataagtaaagaacgttgcccccccttttttttttttacaaaagctaagcatttgagtttaccraatttgtcatttgctttattatcttaatgaaatagggttgttttgttttcttcacctagaaaccaaaactatcagaatgtagtcataaatttgccttttacataagtcagtgttttgagggtttctgttgggataacttttattcattgagttctgcagagatcataaaataaagtattttacaatggaaatagcctttttgacttaattcaccaataactcagaagcagctgcaggcaatctttttcttatgttccaaaaagaaaaaaaaagtggcctcagaagaagcaaagaaaagtttaactccagacaataatgttttggaaagttccaattgagtgaaacttggggttacaatagaaatgtcttacaaacctaagtacggcttacagtagagtggataacataataatattgtggtacccaacttaatttactctgtaattgtaccagaca

SEQ ID NO: 229149 - DNA, 565 bp, Homo sapiens
ttgtttactttgccttttcccacagcacagaactgcaccctttattattactgtcatagttggctgaagaagagctgtctgtccaactggaggatgctctctgaagatctgttccatacaacgttctgctctagcaaaatcgtccaacaagaagaagtttatatttaaacaatgtcatctctaccacatatacatgtatctcacttgaagtttttaaaattaagacattgtctgtgctaatgctttttaaaatatggccccacattatttcaattctataagtttctcactttaaaagkgattaacccctaagagaagggagaaagggcatcgtagccaggagggagcagtggaaacttcctctctcccatgccaggccctcaaggtaagggccccagaatagatttgacctctgctgcatttccaaggccttagaaacttcttccttagctcaaagcttccctttggttgtttccaaaaatgtgatgagggcagggaaggagatcaaagactgagggatgaaaggttggagatgggcctctgggtaggagaagaggggtagtgc

SEQ ID NO: 229150 - DNA, 530 bp, Homo sapiens
actggaacattcacaaattcatgaaaatttaaaaatatgttcctgaacaaccagtaggaaaaagaataaatctaaagggaaattttaaaaaatatattgagatataccaatatggaaacacaatacaccaacatttatgggatggagcaaaagctcttctaagagaaaagtttatagcaataaaggccaacactaaaaaagagaaaagatctcaaataaactacctaaaattacacctcaaggaactttaaaaaaaagaacaaactaagcccaaagaagaaaggaaataatacagagcagacataaataaaatagaggctagaaaaaacaaaataaaagatcaagaatrctaagaatttgttttttggaaaagtaaacaaaattgacacccttaagctagactaagaaagagagaatactcaaataaataaaattataaatgaaagaaaagacactacatctgataccagagtaatacaaaggatgataagagtctactatgaacaattacataccaataaattggataa

SEQ ID NO: 229151 - DNA, 604 bp, Homo sapiens
aagcttgtcccatggctacagcgggagcaagagaaaaagcgggcaagttgccacacaatgttaagctaccagatctcttgagaaataattcactatcatgaggtcagcacgaaggggatgacacacaaccattcatgaaaaatctgccccacccccccccacccccaacaaaccaccctcccaccaggctccacctccaacactgstgtgaaaggaaaataaatcttggcattccaaaaatcactaagctaaagggaaagtcaagctgggacccgcttagggcaaacctgcctcccattctattcaaagtcatccctctgctcactgagataaatgctatctgattgcctcctttggagaggctaatcagaaacttaaaataatgcagccatttgtctcttacctacctatgacctggaagccccctccccgcttcgagttgtctcatatttgcttccagttgtctctccttttgggaccaaaccattcttcatcttacacatattgtttgatgtctcatgtctccctacaatgtataaaacctagctgtgccccagcctccttgggcacatgtcatcagaacctcttgaggctgagtcacggg

SEQ ID NO: 229152 - DNA, 557 bp, Homo sapiens
ctggcactgggcccttgagaccctgtgatyggcttccttccaacatatggagtgtactttcgtgttcaataaatctctgcttttgcggcttcattctttctttgttttgtgcttatccaattctttgttcaaaatgctaagatcctggacaccctccaccgataactcttttggatggctttctacctacttctccccttcccaattcctctcatttcaaaacttagcaggccctcagatgtatgtgttttcataacaccttgtgtcacttttaggttttccatttttatcgcatgtaaaaagttaaatatgagaagagggcctatctgcccgagaaagctataagctcatggagtaggaaatgtgctttgttcaatgctgttttctgtatgcaaagcagaggattctgtacatgctaagcgcaaaaaaagaaaaagttcctccgttcactgagaatggggaagacagagattcttaagaacgaaaataacatatgagagcacttttatcaaggcatcatccaaagttaaaacaaggggcagacgaccaaaatccca

SEQ ID NO: 229153 - DNA, 554 bp, Homo sapiens
agtttctgaacgtttgtccataacattggattccaaaacactcttgctgttgtttgaatgtttgtccgtcacacaggattccagaatactgctgctggggtctgaatgtttgtcccttacgaaagattctagaacactgctatgattgtctgaatgtttgtctctaatacagggtcccagaacactgtgacgagtgtctgaatgtttgtccataatataggtttccagaacacagctgctgttgtttgtttttccctcacaggattccagaacaatactgcaattgtatgagcgtttgtccctcacattggattccagaacactgcttcraggttctgaatgtttgtccctcacactgaattacagaacacagctggtggggtggaaatgtttgtccgtcacataggattccaggacagtgccacgagggtctgaaagtttgttcctcacaggggattccagatcactcccgatgtgtctgaatgtttgtccctcacacaggattgcataacactgctatgatggtctgaatgattgtcactcaagcagaattc

SEQ ID NO: 229154 - DNA, 554 bp, Homo sapiens
agtttctgaacgtttgtccataacattggattccaaaacactcttgctgttgtttgaatgtttgtccgtcacacaggattccagaatactgctgctggggtctgaatgtttgtcccttacgaaagattctagaacactgctatgattgtctgaatgtttgtctctaatacagggtcccagaacactgtgacgagtgtctgaatgtttgtccataatataggtttccagaacacagctgctgttgtttgtttttccctcacaggattccagaacaatactgcaattgtatgagcgtttgtccctcacattggattccagaacactgcttcgaggttctgaatgtttgtccctcacacwgaattacagaacacagctggtggggtggaaatgtttgtccgtcacataggattccaggacagtgccacgagggtctgaaagtttgttcctcacaggggattccagatcactcccgatgtgtctgaatgtttgtccctcacacaggattgcataacactgctatgatggtctgaatgattgtcactcaagcagaattc

SEQ ID NO: 229155 - DNA, 554 bp, Homo sapiens
aattccagaacactgcgacgagtttctgaacgtttgtccataacattggattccaaaacactcttgctgttgtttgaatgtttgtccgtcacacaggattccagaatactgctgctggggtctgaatgtttgtcccttacgaaagattctagaacactgctatgattgtctgaatgtttgtctctaatacagggtcccagaacactgtgacgagtgtctgaatgtttgtccataatataggtttccagaacacagctgctgttgtttgtttttccctcacaggattccagaacaatactgcaattgtatgagcgtttgtccctcacattggattccagaacactgcttcgaggttctgaatgtttgtccctcacactgaattacagaacacagctggtggggtggaaatgtttgtccgtcacataggattccaggacagtgycacgagggtctgaaagtttgttcctcacaggggattccagatcactcccgatgtgtctgaatgtttgtccctcacacaggattgcataacactgctatgatggtctgaatga

SEQ ID NO: 229156 - DNA, 259 bp, Homo sapiens
gctgcaatgtggccatcatcactccttcagtttacatttccttagttccacagccccagaataaagcaaaatcagaaacacttctaatagtttcaataagaractagagattgactttgggtgtgaggcttggatttcatgtccatttctagtttcatctgtgccaggattagaattatattcattggccaggcctgtgtcacgaggtcatacagggtttccactgtccacacagtgcctttgcaagtattagaaaatg

SEQ ID NO: 229157 - DNA, 259 bp, Homo sapiens
gctgcaatgtggccatcatcactccttcagtttacatttccttagttccacagccccagaataaagcaaaatcagaaacacttctaatagtttcaataagagactagagattgactttgggtgtgaggcttggatttcatgtccatttctagtttcatctgtgccaggattagaaktatattcattggccaggcctgtgtcacgaggtcatacagggtttccactgtccacacagtgcctttgcaagtattagaaaatg

SEQ ID NO: 229158 - DNA, 259 bp, Homo sapiens
gctgcaatgtggccatcatcactccttcagtttacatttccttagttccacagccccagaataaagcaaaatcagaaacacttctaatagtttcaataagagactagagattgactttgggtgtgaggcttggatttcatgtccatttctagtttcatctgtgccaggattagaattatattcattggccaggcctgtgtcacgagstcatacagggtttccactgtccacacagtgcctttgcaagtattagaaaatg

SEQ ID NO: 229159 - DNA, 259 bp, Homo sapiens
gctgcaatgtggccatcatcactccttcagtttacatttccttagttccacagccccagaataaagcaaaatcagaaacacttctaatagtttcaataagagactagagattgactttgggtgtgaggcttggatttcatgtccatttctagtttcatctgtgccaggattagaattatattcattggccaggcctgtgtcacgaggwcatacagggtttccactgtccacacagtgcctttgcaagtattagaaaatg

SEQ ID NO: 229160 - DNA, 445 bp, Homo sapiens
aaaagtagcaatgatgatcacattgaaaatcttgtattatctggtggttttctcttacataagcttcttggaatttagtaagataagttgcagctcaaaaagcagatctgtagaatattttattccagagattgtagtgggggccaaagtattgcatgagttttgttgggaacaaggtrtaggctgagaatctaagcatacttcagttggtggttttcagttggtgggcagtggaagaaggaggaggagctccgtctgtgctctctcttcccccagtcacagccctcaggcttgttgcatccaggcccttctaagttaaaacagacaggttgacaggtttatttataatttagcagacaagtcagctcagggtaggcaggtgaggtggggtgtgggctgctagtacagtgccgccctttgacccagggctacccatgcccatggg

SEQ ID NO: 229161 - DNA, 445 bp, Homo sapiens
aaaagtagcaatgatgatcacattgaaaatcttgtattatctggtggttttctcttacataagcttcttggaatttagtaagataagttgcagctcaaaaagcagatctgtagaatattttattccagagattgtagtgggggccaaagtattgcatgagttttgttgggaacaaggtataggctgagaatctaagcatacttcagttggtggttttcagttggtgggcagtggaagaaggaggaggagctccgtctgtgctctctcttcccccagtcacagccctcaggcttgttgcatccaggcccttctaagttaaaacagacaggttgacaggtttatttatmatttagcagacaagtcagctcagggtaggcaggtgaggtggggtgtgggctgctagtacagtgccgccctttgacccagggctacccatgcccatggg

SEQ ID NO: 229162 - DNA, 564 bp, Homo sapiens
gcaggagcggaaagaggaggatcagatgggaggctaacagccagcaccaccttgccagccaagtgactgagccatcttgcagtggatcctccagcccccatcaagccccaactaagccactaagtttcatggtaatttcttacactgcaataaataactaatactggaccagtgagaaaaggagtcaagaataatctcagctttctacctttaataacttaatggatagtggtgctattaatcaagtcaggaaagagaaaggacaataattacacctatagtattacccaaagtcatgataaattattttccatatgctcttgctaaaatttatgtagtcattcaactcattttattgartatctaccatgaaaccggcaatatggaagaaccttctgatatagaactgaatataatttagtcactgccctcaagtaataagtctggagaatcaagaatctgaaaaatgtttgtagcttttgttcaaaattttctctcagccatttaaagggaaaattatgaagattgtatagtggtgacagactgggatagcagtccacgaaa

SEQ ID NO: 229163 - DNA, 201 bp, Homo sapiens
acccatatcaaagaagataaatagatgtcaaataagcatgtgaaaaaattctccrtatcttatgtcatgaagaatatgaaaattaaaacaagataccaccaaagacctattagaatggcctgaatcccaaatactgacagtagcaaatgctgacgaggatacagagcaatgggaactcttattcattggtggtaagagtaa

SEQ ID NO: 229164 - DNA, 581 bp, Homo sapiens
tagtttcctttaagttgttatgtcctttcttggttttggtattarggtgatactggcttcttagaatgatttagggaggagtccatctttctctaacttttggaatagtgtcaaaggattggtaccaattattctttgaatgtctgacagaattcagctgtgaatccatctggccctggacttctttgttggtaactttttaattaccatttcaatctcactgcttgtcattggtctgttcagagtttctatttcttcctagtttaatctaggagggtcagatatttccaggaatttatccagatcttctagattttctagtttatgtgcataaagatgttcacagcaggcttgaatgatcttttttttatttctgtggtatcagttttataactttacctcactagattatgaatttctctttttgtaaaaaatacatagctatttttaaataacaataaaaatagtaacacagggacatttctgtgcttgcttttgtattcttaaatctataaaggcttcatatttttcattttctattaaacagaaattttgatgtcagacatttatacactgtgtat

SEQ ID NO: 229165 - DNA, 606 bp, Homo sapiens
actgtgtatatttaactctagactctaatttttacctgtcattgtttcttaaatatggcaaatgctataaatggggatgtagaagtatagggcaataaaataaatcttttttatgaaaccagggcattttaattttgtggtttttcttatttttgggtctttctttctttctttctttctttctttctttctttctttctttctttcttcttttctgcttgagtaattttttttctaattgtggggaagcattgtatggtgatgaaataaaactctggaaatgtattcttattttatagttatcaggtagggctaatactggagtccaagtttttctggaggaagctatgttgaattatctaactatctgagcctatttttgtgtgacaacaggagtcagattgaaaggggagaatgtttctatttggttctggattttatactgggcattttcactgaaacaacttgtatagttttgttctgatgccccactttaagtatgcacacacacatacacacacacttttatttyaatgtttaaatgttatgtctttagacataggaggtctgcagaaaatgtactgaataacagaggtttgtatgctg

SEQ ID NO: 229166 - DNA, 594 bp, Homo sapiens
tgtatatgttttttttttaaaaaattcttattattcatgccatgggattacaaaaaaaaacactaaaagtattattttctttggagtcagaacaagagaggaatacatgaagtttgaataatatcttgctatacagctaaattttctcagacaaggggatggaatatgataaggcttggtaaggaataaaataaacagccatatttttcagatagaacaaattattgcaacatagtaaatgaaaccataagtgaaagaaagcttataacccttgaacatttcttaattgttaagcagtgtaggagaaacatctcagaatcaatctctgcctcgaaatagaaktgtgctgcttaagacttaacttcacactgggagctacagtgtaccaaaaagagagaaaggatagcaatgaagaaagatttttagattaaaaactatcaaaagtatggtcttaaatttattctaatgattattctatccctattaaatcttaatgtctttttgagtttatagtttagttattcaaagtctaaagtccatcaaaaaattagaaaatgaacaattacaagcttattttgctgaattgggaatgtt

SEQ ID NO: 229167 - DNA, 634 bp, Homo sapiens
gtgtgttttattatgcttagaaatcgcagagctttttgagtatgtatattttgtctttcaataattttagattattatctattttgtttttactcaaataaaatttttgcccatttttttctgtctcttmttcaactttcagctatatgcatgctttatcattaggtatcatccaatagctcttgtatgccataaatcaactttgttcaatttcttttcatgtttcattttggcttgaataatttttatgtacctgtcttctgattttcctattatctttttcagatgtttaaatttttctattacatccaaagaaacaatttatcatattcagtatcataatatcatgtgtttttaatttctatcaatttgattttttaaattgtatttctgctgaaatatctcacctgttcatgcatattgcccacatgtttcctaacatactgaccatagtaaatttaaaccccctatgtgataactctaacactaacctgggccatttctgaattggattttgttagttgctttatttcaggaaaattggttatgttttcttgcttttttgtgtcatatacattttttctttaatattgaatgcgtgacattgaggcaaaggaacaaggtagagcaagaa

SEQ ID NO: 229168 - DNA, 512 bp, Homo sapiens
ggacctgagaaaggagataaatttcaccttgaaagagctgaaaagatagtagctagtatgcactatcaggagtcagtagaagacatctgaaattgtatttgaagttgctttatatcaaggagtctattagaaatataatggtgaatggggccccaacgtccctaaaaagctcagctgtggctcttttctccaggtcagggattatggcagaggtagcagtcgtagagttaagcttgttaatagccctggaaatggtgaggtctcaaaataacagaggccaggtagtggtatttatctgatagaagcagcagaccacaatgatagagacaactgggaaaaacctagaaccaaccaaaggtttcacccacctaagtagtattgctaacagagcatggmatcagtcagacccaaattaacagacagaaaatgggagtcatccttaatgttcagacagaagaaagtaaggttgatggtggttcctttcatcagtctatttaaaatgccaatatggt

SEQ ID NO: 229169 - DNA, 573 bp, Homo sapiens
gcgtggctttatggatgtgataggcagaggacttaatattctgcattaacatctccttctctctcaagggaatttctagcagacttaaagcactgtaggcaacagaaaggaaacctgaaatgcaacatccacctggaagacacatacatatttgctgaagcgtgtttcaaatttaactgaaaaagaagaagaatataattgtgcttctcattcactgcaaatcttgtgatttcatagtcttcagtgttgacctgtcaacctgtatgggttgtttgtttaaaaaggttgtatttttattttattttatttttttaggcagaccacttaagtatcatgtgttactgaataccagctgaattattttgttgttgttgttttgacagtcttgctctgttgcccaggctggagtgcagtggcctgatcatagctcactgcaacctcgaactyctgagctcaaacgatcctccaacctcagcctcctgagtagctgggactacaggcgtgcaccatcatgcccagctatttttcaaaaaaatttttgtagagatggagatctgactttgttgcccaggc

SEQ ID NO: 229170 - DNA, 588 bp, Homo sapiens
cccaaatccacaggctgtggtttctctaactcaccaagctggctggtattaatagacatacttacgtctgtagagaaaatgtgctggctgtagtggccagttctgaagactctacagttatatcagtcctttatgaaactactatctattccttttagcctgagcagaccacgcccctattcagttataacagacttcccttttttttcactctctaatggtattttgtacacttctaaatccaacaaccaattcctccaaatgtaacagatcaaatttggaataaatcacctacatcgtgttaatttgattttttatatcgcttataagcatccataacctaatttatttcctcaaatgtattaaactacttgagagtaagcttagataatctttcctgttttaatgttgatttctttttaaaagaaaatacactatyggactcagggattatagtcttggtgaatggacaatatatcacacatgcacatgaaaaagactataatattaaagaggatataaattggtatactgcacatgcagtgtttaaagataatatatctaaagttaacttttatgttattattt

SEQ ID NO: 229171 - DNA, 472 bp, Homo sapiens
caaattatggagtatattcatatgttattcactatgcaggatcaacatgtgaacaaaatgcacttctccaggaatgtctgtctaagatctcttaaagcacaccatataattgcaggcaggktgtgttcatggacagaacataggctttgaacaatacaagacaaagagagcacctctgtgacaaaggaagtcaggaaggctccacaaaagagacagggatgggctgggcctttcatggtattcaaacaagtggagtagaggcgggagcaaaaggcctgctgggatggtgtacataaaggcttgctagtaggaagaagcagatgtgtgttccaattattcataatgtccaattcgacagttgtattaagtgcagggtggctggtaagatgatgctatggtttaaatatggtttgtttgatttggccaagtctcatgttgacacatattcccaatgttgcaggtgggacctact

SEQ ID NO: 229172 - DNA, 565 bp, Homo sapiens
gaaactcttagattaaggcccgcattaaaacattcgtgcatgcagcctgctccttgcctactctatgtggagctccaccattcccacttagcttccaaaaggtgagggcatcttgaagatgagaggcacctccaggccccattttatcactcagctgcaaagatggcaggacaaacttcagtacccaaatgacaacccaagaaagaagttgcccttgaccatttctatttacaatctctttcctctgtccactaaaaataccaccacctgccacatcagctacattatatatcctttttaaatactaatgttatgtattttggaacagataatatataagcatgattcaaaagtactgattttagaggaaattttctctgaccacagtaaaattaaggtagaaatmactaatttcaaaaaaaacctgagtttctttataattggaaattaagtaatacaatagttatattttgaattcccccaaaagcagatctggagataagagcatagtatagagagtctatttggaaggtgctctctggaagcagcaatgagagaatgggaa

SEQ ID NO: 229173 - DNA, 587 bp, Homo sapiens
aagattacttcaatttgacatcatctttgaggctttaactggtgcaatatggccaggaaaagaaattaaaattgcaagaattagaaaagaagaaacacaactgtcattatttgcagacaatatgtttgggtatgtagaaaataaaagtgactctacaagcaaattattagaatttagaagtatatttagcaaggatgctgaatacaagaataattagcaaataccaattgcattactatatactaacaagaacattagaaattaamgtaagctattacttataaaccatcctaaacttgcaaatagatccagtgaagcaagattgcctcacaacaagctataaggtattacttgtaataccttacttaagtaaatggcaggctatactgtattaatggatttgatgattcaattgtatatagaggccaatggtccccccaaattatttatagattcaacaccatccaaattataatatcagcaagtagtttttatagttattatctagctgattctaaaatttgtatgtgtataaagtgtcaagaatagccaaggaaatattgaaaaataataaagttggaaagctt

SEQ ID NO: 229174 - DNA, 380 bp, Homo sapiens
  misc_feature (1)...(380): n = A,T,C or G
aacaaacaagcattggtgaaactagagggaagtaggaatgctcgaatctgattggagggaatgtaaaaccgtgaaggaacagggaaaatagtatggcgtgtaccggaaaaagtagaaacaggattakcggatgttcccgcagttgcacttgtgggtacctgccaaaaagaattagaagccaggagtggaagagagattcgtacacccaaattcatagcagcagtattcacaacagccaaaatgtggaagcaacccaaggggttcgtggacagatgaatgaaaaagctcactgcagttcattcatgcgatggaagattattcagcctttaaaaaggcaggcatacttggccgngcagtggctcacgcctgtaatcccagca

SEQ ID NO: 229175 - DNA, 380 bp, Homo sapiens
  misc_feature (1)...(380): n = A,T,C or G
aacaaacaagcattggtgaaactagagggaagtaggaatgctcgaatctgattggagggaatgtaaaaccgtgaaggaacagggaaaatagtatggcgtgtaccggaaaaagtagaaacaggattagcrgatgttcccgcagttgcacttgtgggtacctgccaaaaagaattagaagccaggagtggaagagagattcgtacacccaaattcatagcagcagtattcacaacagccaaaatgtggaagcaacccaaggggttcgtggacagatgaatgaaaaagctcactgcagttcattcatgcgatggaagattattcagcctttaaaaaggcaggcatacttggccgngcagtggctcacgcctgtaatcccagca

SEQ ID NO: 229176 - DNA, 380 bp, Homo sapiens
  misc_feature (1)...(380): n = A,T,C or G
aacaaacaagcattggtgaaactagagggaagtaggaatgctcgaatctgattggagggaatgtaaaaccgtgaaggaacagggaaaatagtatggcgtgtaccggaaaaagtagaaacaggattagcggatgttcccgcagtkgcacttgtgggtacctgccaaaaagaattagaagccaggagtggaagagagattcgtacacccaaattcatagcagcagtattcacaacagccaaaatgtggaagcaacccaaggggttcgtggacagatgaatgaaaaagctcactgcagttcattcatgcgatggaagattattcagcctttaaaaaggcaggcatacttggccgngcagtggctcacgcctgtaatcccagca

SEQ ID NO: 229177 - DNA, 380 bp, Homo sapiens
  misc_feature (1)...(380): n = A,T,C or G
aacaaacaagcattggtgaaactagagggaagtaggaatgctcgaatctgattggagggaatgtaaaaccgtgaaggaacagggaaaatagtatggcgtgtaccggaaaaagtagaaacaggattagcggatgttcccgcagttgcacttgtgggtacctgccaaaaagaattagaagscaggagtggaagagagattcgtacacccaaattcatagcagcagtattcacaacagccaaaatgtggaagcaacccaaggggttcgtggacagatgaatgaaaaagctcactgcagttcattcatgcgatggaagattattcagcctttaaaaaggcaggcatacttggccgngcagtggctcacgcctgtaatcccagca

SEQ ID NO: 229178 - DNA, 671 bp, Homo sapiens
gatatctggccacattttctatactgatagaaaacgctttttaaaaattttaagactctttggtgattaaagattraatgtaaacaagacaatctaaacagtaagttgtgcttatttgtagaaaaagaatattataaatatattactttagtgtgcatcttttaactatcacactaggaatcattctcatcttaaggctaatgagacagacagagagagagagagagaatgttctttaacattacaatatcaaagacaaagaaatctccaatgggaatgttttttctagtactggcattttggccattctaagtctgtgacatgtattttgaataaagaaattcaggattctagtgtgatttccatcgtttgttagtgatgtgaacttaagcaaatcattgatactatttcctctcctgtaaatgtgttcaaataatacttctcagatcatcttttggagccattgaaggtatcaaatgagaaaaataagtgaaatcttcatgaactgtgattatacacaagaaatatgtattgatgtttgtcatcaaaaatatgtgtgaaaattgtgatagagtaagctgtatactctgagatgagctatgagcaaaacaatcacctgggataagacaattctaaaagcagaagtgtaagtgcattaatactaagtaaaa

SEQ ID NO: 229179 - DNA, 671 bp, Homo sapiens
gatatctggccacattttctatactgatagaaaacgctttttaaaaattttaagactctttggtgattaaagattgaatgtaaacaagacaatctaaacagtaagttgtgcttatttgtagaaaaagaatattataaatayattactttagtgtgcatcttttaactatcacactaggaatcattctcatcttaaggctaatgagacagacagagagagagagagagaatgttctttaacattacaatatcaaagacaaagaaatctccaatgggaatgttttttctagtactggcattttggccattctaagtctgtgacatgtattttgaataaagaaattcaggattctagtgtgatttccatcgtttgttagtgatgtgaacttaagcaaatcattgatactatttcctctcctgtaaatgtgttcaaataatacttctcagatcatcttttggagccattgaaggtatcaaatgagaaaaataagtgaaatcttcatgaactgtgattatacacaagaaatatgtattgatgtttgtcatcaaaaatatgtgtgaaaattgtgatagagtaagctgtatactctgagatgagctatgagcaaaacaatcacctgggataagacaattctaaaagcagaagtgtaagtgcattaatactaagtaaaa

SEQ ID NO: 229180 - DNA, 577 bp, Homo sapiens
gataactggcacagaaaatacactctaatcaattataattctctcactgactactgtaggctcttgagtttatggctaatgayccaagtcatcagtaacccacatggcttcctgatagaaagaaagatttttagagatttggaattcttagagactcaatcgccaacacatataattaccaatactgctgatatgtagaagtgaatctaataagataagacaaaaatagtatggaaaacatgaatcctcatgtacctaaaatgtattactttacagttgcatgttgatatacccaatgtgagaagaaattatacaaaaatgaaatgtgtctttaagatatggccatagttctattcagctacaaggacataactacccttttttgatgtaacatttgaatcgttttctaaaaatttttaagacctgtattttatgtttgttttaaaagtggtttttgataccttaatctttatttcattttgttttgtctttatttcaatttgctactgtatcatctattgaaaaatcttattaaacacttcctggcactaggctcaaatgaaagtaagacgtaagt

SEQ ID NO: 229181 - DNA, 577 bp, Homo sapiens
gataactggcacagaaaatacactctaatcaattataattctctcactgactactgtaggctcttgagtttatggctaatgacccaagtcatcagtaacccacatggcttcctgatagaaagaaagatttttagagatttggaattcttagagactcaatcgccaacacatataattaccaatactgctgatatgtagaagtgaayctaataagataagacaaaaatagtatggaaaacatgaatcctcatgtacctaaaatgtattactttacagttgcatgttgatatacccaatgtgagaagaaattatacaaaaatgaaatgtgtctttaagatatggccatagttctattcagctacaaggacataactacccttttttgatgtaacatttgaatcgttttctaaaaatttttaagacctgtattttatgtttgttttaaaagtggtttttgataccttaatctttatttcattttgttttgtctttatttcaatttgctactgtatcatctattgaaaaatcttattaaacacttcctggcactaggctcaaatgaaagtaagacgtaagt

SEQ ID NO: 229182 - DNA, 577 bp, Homo sapiens
gataactggcacagaaaatacactctaatcaattataattctctcactgactactgtaggctcttgagtttatggctaatgacccaagtcatcagtaacccacatggcttcctgatagaaagaaagatttttagagatttggaattcttagagactcaatcgccaacacatataattaccaatactgctgatatgtagaagtgaatctaataagataagacaaaaatagtatggaaaacatgaatcctcatgtacctaaaatgtattactttacagttgcatgttgatatacccaatgtgagaagaaattatacaaaaatgaaatgtgtctttaagatatggccatagttctattcagctacaaggacataactaccctwttttgatgtaacatttgaatcgttttctaaaaatttttaagacctgtattttatgtttgttttaaaagtggtttttgataccttaatctttatttcattttgttttgtctttatttcaatttgctactgtatcatctattgaaaaatcttattaaacacttcctggcactaggctcaaatgaaagtaagacgtaagt

SEQ ID NO: 229183 - DNA, 608 bp, Homo sapiens
taaattcttattcagatttcagtacagcatatattatgtcattcagtaataatttatttctttatttatcccaactccctatacctatcagaatgcctggtacatagttagtacttaatatagtttcattgaaagaatgaaaaaataaaacaacagaacagatattaacaaaacaaatttttaacaaaacacttttaaattttggatacaatataaaaaaataacttttcaaatatataactaattgtaatamgttaagaaaaattccacccaaattaaagaaattgaaatcggagtagtaagcttactttggaagatgtggaagatgattacacatatacagtttgaaaaaaagagccatatccaaatgaaagactgaaactatgagatctaaaacactcagccaaaagatatgaactcaaaagtattaccagaatttaatagtagtaaaagcaagtattgtctggatgaggcaatcccatagttagagctcatcatccaaaattacagaaacaatgtacaaaaaaaaagagtaagcagaaaaaaagagtaaagttatacccacaaagataatgcagtattgaatgacagttaaatgatatacaata

SEQ ID NO: 229184 - DNA, 440 bp, Homo sapiens
agctgaacaaactaaatgtttaccataacagatcctcaattaggaaatatctaaataatatacctcagaagagagactatggtcccagctggaaaatttaaaatgcaagaagaaatgtcagtaagagttgatatgaagtttggtaaatgtaaaataaaatttactctgtacaaaaataagaactcgtggtttgagacgtaagaggaaaagaacattaaaactgaaatacttgacaataataatacctaaggcaaagagggtggtcagaatcctaagaccacttagaatrgagatattttaaatttagatgtatgacgttaaatatacctgtcaaaatatgaagagaagacaataaataaatgtttttaaaaatgaagtgcataaattctaaaacagaattctgtttcaggaggaaacagaattagcaatggtaggaaagg

SEQ ID NO: 229185 - DNA, 599 bp, Homo sapiens
accagttaaaaaatttccaaagaaaaacacttggacaaaagtgagcactttcacagcatgtctacactacatggttttaccaggataggacatgagtaataacrcttacctgtgcttatccgtgaattgtttttacaatgcacacctgaatgatacaattgcaggcaggagccaacacatttgctggtacagatgagctgcgttcctcacggagcacgggcacatcaattctggaacagtcagccccatcaccatgctgcttttctatttgaacctttcatgccctgcaagacaaggcacgtgaagctgttttttttttattattattgttatttacactaatattggagatagaggatgaatcccaagcaaatttgcctttctttaattaaaccctagttccttttttgtttcattcattaaaggtcttaaccaagacatgcaggccatttggtcaataatttataaattattgatatgcaagagacacaaaatggaaataaggtttctgcttctgtcaactctggatatcacccgagtatgtttgaactatgtcttactcgtcactctgtttcaagatagtgaattggcatagaaat

SEQ ID NO: 229186 - DNA, 599 bp, Homo sapiens
accagttaaaaaatttccaaagaaaaacacttggacaaaagtgagcactttcacagcatgtctacactacatggttttaccaggataggacatgagtaataacgcttacctgtgcttatccgtgaattgtttttacaatgcacwcctgaatgatacaattgcaggcaggagccaacacatttgctggtacagatgagctgcgttcctcacggagcacgggcacatcaattctggaacagtcagccccatcaccatgctgcttttctatttgaacctttcatgccctgcaagacaaggcacgtgaagctgttttttttttattattattgttatttacactaatattggagatagaggatgaatcccaagcaaatttgcctttctttaattaaaccctagttccttttttgtttcattcattaaaggtcttaaccaagacatgcaggccatttggtcaataatttataaattattgatatgcaagagacacaaaatggaaataaggtttctgcttctgtcaactctggatatcacccgagtatgtttgaactatgtcttactcgtcactctgtttcaagatagtgaattggcatagaaat

SEQ ID NO: 229187 - DNA, 599 bp, Homo sapiens
accagttaaaaaatttccaaagaaaaacacttggacaaaagtgagcactttcacagcatgtctacactacatggttttaccaggataggacatgagtaataacgcttacctgtgcttatccgtgaattgtttttacaatgcacacctgaatgatacaattgcaggcaggagccaacacatttgctggtacagatgagctgcgttcctcacggagcacgggcacatcaattctggaacagtcagccccatcaccatgctgcttttctatttgaacctttcatgccctgcaagacaaggcacgtgaagctgttttttttttattattattgttatttacactaatattggagatagaggatgaatcccaagcaaatttgcctttctttaattaaaccctagttccttttttgtttcattcattaaaggtcttaaccaagacatgcaggccatttggtcaataatttataaattattgatatgcaagagacacaaaatggaaataaggtttctgcttctgtcaactctggatatcacccgagtatgtttgaactatgtyttactcgtcactctgtttcaagatagtgaattggcatagaaat

SEQ ID NO: 229188 - DNA, 570 bp, Homo sapiens
caagaattcaagttattctacacagaatcatgggggaataagaagattattgtaactgatctacccagcgcaaaaagagtaatagatgtatgaagatgtttatattttcaagacagtgaagagtcatcaatgtcttctgcaaaccattagtaaattgtcaaaaagaaaaagagatttatatcaaatttacttaaaatagggtttaaaaataattacaaagggcataaaatgcctttmcaacagaaaaaaaacaagcaaacaaacattaccaatcatagatcagacttatgatacatgacttctagtgaaacacattgaccagggtccaacaccagctatgtagcattattagagaagtatgaattatatcacaaaagcagctgccttggattctttaagttttaatacattaagacaatcttttttaaagcagggcactattttagattaaaagagagtaaagagttatgacagttaacttatagcatgtgatccttaattgaattttggctcaacaccaaaacaatgaaacagctgtgaaggacattaccgggacaactgaggtcattt

SEQ ID NO: 229189 - DNA, 632 bp, Homo sapiens
aaactttcactgtagttttatcaagaattgttcaggagatctgaaatgggcaaagtaattagaaatagagaatataaatcaccactaatctcttctgacaaactcttatatcaaaaatagtttcacagggaagccaaaacaagtgcatgcttttagatatcactggctactgacttttatactacctagagagggaattttataaatataataaaattgcctctctatgctgctatttttaattctaattttaatacaattagtaaatggtgtcttctccaatggctacaagttatcaggacagtatctgcttcaaacatctttggctaactttcagttagcaggctttcaaaacaattccttttccactagttgccatcctcttccaggaagagataattttcataaaattttgtaggtaaaacatactgacaaattatgtagtctatttgcttactttttgggtaaagagttgattcacggaaaggtaaaatgattggcctgggatctagctaayggcagattagaactaaatgtaagcctttggtattctggttcagtggactttctactgcattaaaatgccttagttccctgaggttcaaagtagtcctgttttacctatgatgtct

SEQ ID NO: 229190 - DNA, 489 bp, Homo sapiens
caagatggaaaactcaaatcttagatttaataagaaatagtatgatgctatattcatgactacacattagcagattttagcaaatattctgaagatgaaattagagtactgattaatttttaaacacacttaactcccttagagatgccattcagtagtgtttctagtcaggaaatatcctgatatgagctaatataaagtttagaggggtccctgagtractataccccaaggcaacttttggggcaaaaatataaatgtgacaactctgtctgtgactgtctagtagaaaaataacactggaacctagtaccagacttggttgaaaaaattgtaaaactagttttttcttcccctcccccaacaaatagaatagttttctaaagaccaagtaacattaacttctctgccagattccttgtctatgagcacactttgctgtttagaatgatgactgtatcttacacgtttattgcatttcacgatttt

SEQ ID NO: 229191 - DNA, 568 bp, Homo sapiens
ccaacctaaaatattttttctaaacatttctcagtccaatccaatcctccatctttcactgctttcttcatacctttcactactttattattattatagtaaacttttctatatgtctagatctataatattttaaattacattttctttctttgcttttatggaaaacagctgtcaattgggcaatacttctcctataaccccatcagtctgaaactatttctgttgtttcatataccagtrtttgggcggtaaagtggtataccacagttcccacatctggatcattagtgtcctaaaagacacgaccacaatcaaccacagaaaccatcagatcaaaatttcttttttactgtgcattactcagggctaaactattctcatcccttcttaactgccttcacccatttacttctcaatcactccgctgacatccactgaggaattcaattacttgtgtatcatttttctcctctccatattttatcatttacagttacatcaaaatttaatggctaaaattttatcagttaaaactctcatttatactggccttcttttagtttct

SEQ ID NO: 229192 - DNA, 568 bp, Homo sapiens
ccaacctaaaatattttttctaaacatttctcagtccaatccaatcctccatctttcactgctttcttcatacctttcactactttattattattatagtaaacttttctatatgtctagatctataatattttaaattacattttctttctttgcttttatggaaaacagctgtcaattgggcaatacttctcctataaccccatcagtctgaaactatttctgttgtttcatataccagtatttgggcggtaaagtggtatacyacagttcccacatctggatcattagtgtcctaaaagacacgaccacaatcaaccacagaaaccatcagatcaaaatttcttttttactgtgcattactcagggctaaactattctcatcccttcttaactgccttcacccatttacttctcaatcactccgctgacatccactgaggaattcaattacttgtgtatcatttttctcctctccatattttatcatttacagttacatcaaaatttaatggctaaaattttatcagttaaaactctcatttatactggccttcttttagtttct

SEQ ID NO: 229193 - DNA, 568 bp, Homo sapiens
ccaacctaaaatattttttctaaacatttctcagtccaatccaatcctccatctttcactgctttcttcatacctttcactactttattattattatagtaaacttttctatatgtctagatctataatattttaaattacattttctttctttgcttttatggaaaacagctgtcaattgggcaatacttctcctataaccccatcagtctgaaactatttctgttgtttcatataccagtatttgggcggtaaagtggtataccacagttcccacatmtggatcattagtgtcctaaaagacacgaccacaatcaaccacagaaaccatcagatcaaaatttcttttttactgtgcattactcagggctaaactattctcatcccttcttaactgccttcacccatttacttctcaatcactccgctgacatccactgaggaattcaattacttgtgtatcatttttctcctctccatattttatcatttacagttacatcaaaatttaatggctaaaattttatcagttaaaactctcatttatactggccttcttttagtttct

SEQ ID NO: 229194 - DNA, 568 bp, Homo sapiens
ccaacctaaaatattttttctaaacatttctcagtccaatccaatcctccatctttcactgctttcttcatacctttcactactttattattattatagtaaacttttctatatgtctagatctataatattttaaattacattttctttctttgcttttatggaaaacagctgtcaattgggcaatacttctcctataaccccatcagtctgaaactatttctgttgtttcatataccagtatttgggcggtaaagtggtataccacagttcccacatctggatcattagtgtcctaaaagacacgaccacaatcaaccacagaaaccatcagatcaaaatttcttttttactgtgcattactcagggctaaactattctcatcccttcttaactgccttcacccatttacttctcaatcactccsctgacatccactgaggaattcaattacttgtgtatcatttttctcctctccatattttatcatttacagttacatcaaaatttaatggctaaaattttatcagttaaaactctcatttatactggccttcttttagtttct

SEQ ID NO: 229195 - DNA, 581 bp, Homo sapiens
aaatatatatttattctttctggtaagaaggtactccaatgaaaaaatagatgaagagtttaagaaagtcactcacttaaaaaaaaaaaaaaaaaaaaagattcctaatagttcatttatactttctcaagctgtgtcaactagcaggattattttagtccaycttgtaaattgttttcaaataaactcataaaagtgaatgtttgaggcacctcaaaattatttttaatgttcaaataataaatgaggagacaatatgtacttattctgtaatggtaaaagtgcacaaatcaaatactgaaatgtacattattttttaatatctaacaatgttactgtgaagattttgctcaggcaaaatgaacaatcttttaaaaatttttgatacatgatttctttcatgtttatatgctatttatttctctttttaaattttttaattgacagaactgtatgcatgtattatgtacaacatgatggttctaactatatatgtacattgtggaacagttaaattcaactaattaaaaatgtattaactcacatagttatcatttttctggtgaaaatatttaagattc

SEQ ID NO: 229196 - DNA, 581 bp, Homo sapiens
aaatatatatttattctttctggtaagaaggtactccaatgaaaaaatagatgaagagtttaagaaagtcactcacttaaaaaaaaaaaaaaaaaaaaagattcctaatagttcatttatactttctcaagctgtgtcaactagcaggattattttagtccatcttgtaaattgttttcaaataaactcataaaagtgaatgtttgaggcacctcaaaattatttttaatgttcaaataataaatgaggagacaatatgtacttattctgtaatggtaaaagtrcacaaatcaaatactgaaatgtacattattttttaatatctaacaatgttactgtgaagattttgctcaggcaaaatgaacaatcttttaaaaatttttgatacatgatttctttcatgtttatatgctatttatttctctttttaaattttttaattgacagaactgtatgcatgtattatgtacaacatgatggttctaactatatatgtacattgtggaacagttaaattcaactaattaaaaatgtattaactcacatagttatcatttttctggtgaaaatatttaagattc

SEQ ID NO: 229197 - DNA, 556 bp, Homo sapiens
ctctctacttacttaccattgccataactcaagcaaaagggaaagtaatgaaaataaattgaaggacacaattcatatgaaatatggacyttaaaattgtgcattcctaatttctctcacccatattttggtttagtgctgtcatacatttcttacatacgctattaacacaaaatatattgctacaaattttctgagcatcttcgatacatggttttgttttgtgactttctcaatatatctacatattctttccccagtgtatggttacttaaatcagggatctagttctccttaggaaaaaaaaaaaacaggagattcattaccaaaaatcttttgttgttccagagcttctttttttcttttcttgtgtggatcaagcctctcctcaaaggtttctatgtctgaaaactggctcagatctgaactggacaaaggatcatgaccttctattgctaccacttctctcagcttcttgatcattcaatgttatcagatgactcaaacccctcaggcataagggtcttgatcaccccaacaagtgagcagcctaaat

SEQ ID NO: 229198 - DNA, 556 bp, Homo sapiens
ctctctacttacttaccattgccataactcaagcaaaagggaaagtaatgaaaataaattgaaggacacaattcatatgaaatatggaccttaaaattgtgcattcctaatttctctcrcccatattttggtttagtgctgtcatacatttcttacatacgctattaacacaaaatatattgctacaaattttctgagcatcttcgatacatggttttgttttgtgactttctcaatatatctacatattctttccccagtgtatggttacttaaatcagggatctagttctccttaggaaaaaaaaaaaacaggagattcattaccaaaaatcttttgttgttccagagcttctttttttcttttcttgtgtggatcaagcctctcctcaaaggtttctatgtctgaaaactggctcagatctgaactggacaaaggatcatgaccttctattgctaccacttctctcagcttcttgatcattcaatgttatcagatgactcaaacccctcaggcataagggtcttgatcaccccaacaagtgagcagcctaaat

SEQ ID NO: 229199 - DNA, 528 bp, Homo sapiens
ttacttaatgtaacttcattaacataacattttggacatttgctttatctattttaggctgttattttaaaaaataagctgataagtaaagcataaactgaaataatattaaggcacccagccattagcacatttatttaaaacattatatataggaaattcaaataagttaattgattttccaacaccaaacataggtcctagcacatttggactttgttatgagactgcaatattagactttgatttaggtaaacaaagtgtttgccacgtaagaataaacatttcagaaaaataaaacagatcatgtgttactagtytatatagagcaacaaaagaaagaccactttcaaagacaagtggcaaagttcagaatgggtagatagaattcaaatccagaaccttagactgaatcattggtcatgtcagtgcaccctgctatccaagcttgtgaaagcctatttcataacttcacataccacatatccctataagagtatgcttttggggccgggtgtggttgctcac

SEQ ID NO: 229200 - DNA, 606 bp, Homo sapiens
agttgaataatgacccctaaaaagatacactgaagttctaaaccccaaacctgtgaacatgacctttggaaaaagggtctttctagatgtaattaagataaaaatatacagatgagatcatcttggacttagattgaactctaaatacaataacaggtgcctttataagagaaaagcagagggagatttgagacacacagatacatagtggagaaagccatgtgaggttggaggcagggattagtgtcttgcagccataaaccaaggactgcctgaagcccccatgaaccaagggacaaagaagggttgtccactatagcctccaggtagagcatatccctgaagacactgatattagacttctagccttcacaccgatgagagaatttaaatttgttcctgtaagccaccaagtttatgtgaatttattayggcaatcctagaaaactagtacaatgagtaaaggtgaatacagattgccatgggttggaagtgctggtagccatattgaggaggagatatttaggcaagaattaaaagtgattcatggaattgattataaacaaaattttgaagcacaacctttgtataaatttaaatatgaaa

SEQ ID NO: 229201 - DNA, 620 bp, Homo sapiens
tttttaaaaacttttcactttgtcattgattttgagaaatttgattatgatgagctttgatgtacttttcttaatgtttgtttgtgaagtatgatggaggattgttgttgcacttcttgaatccattgggtatgtaattatcatcatatttaaaaatattttaggcattaatttttaagttttctgcttcaatgtytccttttttgcagagattcaagtaacacatgtgttagatcatttgaagatgctctaatggctcactgatgatgtgattgtttttctaaaaaaaaccttttctttttctgttttcagatagtttgttgctattttcatgtttactaatcttagtaatttattcttcaatttcatttttggtttatgaaatcaaattttttttaaatctcagatattgttgttttcatttcagtagattcactttggatcccttttacatttatttcccaacttaacagatttcagttgtaataattatttctattcctctgttcactaattctaaaaactatcaattctcggtgagttttgagtgattggtcttcacctcagaagtcttccaagctctatcttgatttcctcctctctgtccgacagcctgaaaa

SEQ ID NO: 229202 - DNA, 620 bp, Homo sapiens
tttttaaaaacttttcactttgtcattgattttgagaaatttgattatgatgagctttgatgtacttttcttaatgtttgtttgtgaagtatgatggaggattgttgttgcacttcttgaatccattgggtatgtaattatcatcatatttaaaaatattttaggcattaatttttaagttttctgcttcaatgtttccttttttgcagagattcaagtaacacatgtgttagatcatttgaagatgctctaatggctcactgatgatgtgattgtttttctaaaaaaaaccttttctttttctgttttcagatagtttgttgctattttcatgtttactaatcttagtaatttattcttcaatttcatttttggtttatgaaatcaaattttttttaaatctcagatattgttgttttcatttcagtagattcactttggatcccttttacatttatttcccaacttaacagatttcagttgtaataattatttctattcctctgttcactaattctaaaaactatcaattctyggtgagttttgagtgattggtcttcacctcagaagtcttccaagctctatcttgatttcctcctctctgtccgacagcctgaaaa

SEQ ID NO: 229203 - DNA, 513 bp, Homo sapiens
taaatatgtcatgccactctctccttgactgtaaggtttccactgaaaagtctgcctccagacatgttggagctccattgcatgttattcatttcttttctcttactgccttcaggattgtttgtttatccttcaattttaggagtttgattattaaattccttgargtagtcttctttgggttaaatctgcttggtgttctataaccttcttttacctagatatagctatctttctataggtttgggaagtttcgtgttattatccctttgaataaactttctacccttatctctttctctacctcctctttaagaccaacaactctgagatttactcttttcaggttatttttctatatcctgtaagtgtgcttctttcttatttcttttacttttgtctcctctgacagtattttcaaatagcctgccttcaagctcacgatttttattcctgcctcataaattctgctattaaaagattccgatgtatccctcattatgcccattacat

SEQ ID NO: 229204 - DNA, 600 bp, Homo sapiens
tccgcccctaaattagttttagtatacaaccttgagttgagtcgtttatatttgaagaagtctaaaatacacatacacmcacacttgcacacacacatgcatatatatacacccacattattgttatgtttagttaagattaaaaggcttgagtcagagatatttcagctattattatttctgaccatcagtataagagtttcttaatttgcataatatataatatatattatacatttttactccactgaaatggtattcaagatgtggtttggagggaaatattgttcaagcaccctcactttccatcactaaagtttaagatcctgtacaaatcagaaggtgacccttcagaatgatgccctggacctgtatgtacccccatcctgtcctgtgttttgccaataagaatagtctcacatagtcaagttaaaatataaatgaaaatcggcctctaggatatttttacaataatctgaactaaacctttcattcaaggtgattttcagaatggtaaaatgacacagctgaggctttttcaaaattataggccatttgagttacacacttacttgctaatgtgtttgtgtgtgtcaaata

SEQ ID NO: 229205 - DNA, 482 bp, Homo sapiens
aaattttattgttcattttactttgtcaatccttagaatttaataactccaataattaaatactaacaggaatgttagyatacaaatctaatattttagtatgttcatttaaaataatgaatacatgtttaaatataaattactaaacatgatatagaattctatattgatttaaaattatatgcctgataccacataatagtgcacttatttttagccatgtcatcactctttttctcttggagtcttatatttcctgtattttggttctgttaattggtagtttaccaactgtctacattgtattttttcatgagctttataaacatttctatttggagatagcatcatatgatgttcacttacaaatgtgataaaataaatggatacgttgtgcaatgcattgaacctacatgggatttagtagttttaaagccaaagttatttgtgttccacatgcagtgaaaagggatgtttcaaaa

SEQ ID NO: 229206 - DNA, 420 bp, Homo sapiens
taagctaatcgcatcttcctgtcagccgctttcagggcaccacacctcattgtgctgacactcagaggtcattatgcaattttttttcctcgatgattagattaatcaatcaaccacggacgtctagaaatggcggcatctcagaagggcccccatttgactggcaggggactggcccaatgcgcctcgcaagcccagccaggcccgccccagccggcccccctctgacgacgcctgtcccttacgcgactgccttgctgccatataagagggacggcgytcggcctccagcagtcggctttctgctgggctcggagccagaacctgctgcgtgctccctccagactccctggctgcgggtggactacctcagagctacagcggtgaacctgtggacacctccgactcctcgggcctctc

SEQ ID NO: 229207 - DNA, 457 bp, Homo sapiens
cccacttttaaggaccaactgtgtatgccaagtgctagagccacttccttgctcagtcctcaccgaccacactgtgctatctttattcacattttgcagttgaggaaacaggttcaggcaggtctgtccaaggccaccctatttagggtctgacaaagccaggttcatctgactccaatgccaacgcccatgctgttgaccagaccatccctgccaacttcccaatatgaatgctttgagtggctctcggcccccgggctgtggaacaccagcacaccagtgcctggagggcagcagctgtccagcaaatgtctgctcattcatttgttcacgcattcagggcaagtcsaacggcagacggggcaggagatccagggccagcatcgatggtgcagggagccctctggccccttaaatatcctcagacaatcccagaaatcattcctgggtctacctt

SEQ ID NO: 229208 - DNA, 363 bp, Homo sapiens
ggtcgaatcctggccccaccttacyagctcatcacagtgtctccgtttcctcttctgtcaaactcaggttttgcgagggttctgggaggtcctatacgggaagggttagcagttaccatgggtgtgtagcacgggctttatctgaagggaaggtggagccgtagggagaccatgtggagtggggctccagggctgtgtgggtggggagggatctgcttctgggttaccccatgcctccccttctcaagtactactttttaatcatcatggctcctgccattcatttcatagttgatgtaagccaggtgcggtggctcacgtctttaatcccagcacttggggaggctgaggccaggaggatca

SEQ ID NO: 229209 - DNA, 439 bp, Homo sapiens
ggtactgaaaccctgtggatgcagcctcctgttggcaagcagcgcttccgcatccttggggaacagggygcatggaccacagccactccactcctggctgctggaggtccggtattgggcacagggtggccgcaggacatgagccacttctgtgggcttctagtgccaccttgtggtgcttgttggaatgaggggctcggagccaccgagtagggtttttctgccccccctgacgacagcgccctcccccaggtttccggacagtcctgaaatgtgatgtccaggcttgagtgccctcagtccccacagtggtcctttggggaatgtaaccttttttatgtggtcttgattaaatcccattttacttccttgcaggttaacaaccattattgagtacctgttgatatgtgtggtgtactgagttaactagaacatgtcc

SEQ ID NO: 229210 - DNA, 457 bp, Homo sapiens
gaattcacagaagggagaagtgttttttcccctggcattgctaacctggggaacatatacctgggacttccagcctcctccttttgccaccatgtagggaaactggggccaacacagagaggaacaaacagagtcagaccaaatctccatgacagtgagttcctggatctagctatgtctaaagctgaacctgcccgtggactttgcagttacatgagccaactggctctcttttttagcttaagccagctggagttgggagtgtggactggatgatcctaaaaactgcctttcagtggtgatggctgggtccctcaacctttagagatgtagcagcatctcaagactgattataggagtaygaggccagggcaccctcatcacagcacagagctggtttccctggcatctaagcctcttctcaggatcccataacttatccatgaggctggctgat

SEQ ID NO: 229211 - DNA, 590 bp, Homo sapiens
tagtggtgatggttgcacagctttgtgaatatgccaaaaaaaagaaaaaaacactaaattgtatacttttttttttttttgagacagcctccctctattacccargctggagtgcagtggcacaatcttggctcactgcaacctctgcctcctgggttcaagcgattttcctgcctcagcctcctgagattacaggcgtatgccaccacacttggctaatttttttttttttcgagacagggtctccctctgttgtccatgctagagtgcagtggtgccatcttggctcactgaaacctctgcctcccgggtttgagcaattctcccacctcagcctcccaagtaggtgggactacaggcatgcaccacccacttggctactttttgaatttttttgtagagacagggttttgccatgttgcccaggctggtctcaaactcctggagtcaaacaatccatccgcctcggatatttctcactggcataatcagtgctgaaagatcattgaaaaggggcttgcatgatccagaggtcactgttatttaatgcgctctcctcatctcctgcaggttgtgacttcaatataccc

SEQ ID NO: 229212 - DNA, 351 bp, Homo sapiens
attgctgcctgtttcttcctctggaagttttgtcccagaggggcacccaccagatgccagccagagctctcctgtatgaggtgcctgttggcacctactgggaggtgtctcccagtcaggatacacgggggtcagrgacccacttgaggaggcagtctgacccttatcagagctcgaatactgtgctgggagatctgctgctctcttcagagccatcaggcttttcaaagatgctttaagtctgctgaagctgtgcccacagccaccctttcccctaggtgctctgttccagggagatgggggttttatctataggtctctgactggggctgctgcccttttttcagagat

SEQ ID NO: 229213 - DNA, 351 bp, Homo sapiens
attgctgcctgtttcttcctctggaagttttgtcccagaggggcacccaccagatgccagccagagctctcctgtatgaggtgcctgttggcacctactgggaggtgtctcccagtcaggatacacgggggtcagagacccacttgaggaggcagtctgacccttatcagagctcgaatactgtgcwgggagatctgctgctctcttcagagccatcaggcttttcaaagatgctttaagtctgctgaagctgtgcccacagccaccctttcccctaggtgctctgttccagggagatgggggttttatctataggtctctgactggggctgctgcccttttttcagagat

SEQ ID NO: 229214 - DNA, 392 bp, Homo sapiens
ttgcctgggtatcaccagcagaggctggagaacagccaagattgctgcctgtttcttcctctggaagttttgtcccagaggggcacccaccagatgccagccagagctctcctgtatgaggtgcctgttggcacctactgggaggtgtctcccagtcaggatacacgggggtcagagacccacttgaggaggcagtctgacccttatcagagctcgaatactgtgctgggagatctgctgctctcttcagagccatcaggcttttcaaagatgctttaagtctgctgaagctgtgcccacagccrccctttcccctaggtgctctgttccagggagatgggggttttatctataggtctctgactggggctgctgcccttttttcagagatg

SEQ ID NO: 229215 - DNA, 480 bp, Homo sapiens
agtgcaccgttcctcatggtacagtccctcggggcttcccttggctaggggagggaattcccccaaccccttgcacttccygggtgaggcaacgccccattctgctttggctcaccctccgtgggctgcacccactgtccaaccagtcccagtgagatgaaccaggtacctcagttggaaatgcagaaatcacctgcattctgcattgatctcactgggagctgcagactggagctgttcctatttggccatgttgccagcaaattctgagatttttttcaaaagtgcaaagaaagacatctgaggggtgctgacatattcaggtcacctcaagccacatgccagcttgcttgcccctgttggattcagcagagggagataggccttgccatacctgtggtgtctgccaaagcttcctcctggcaattcttgggagtgctgatacctgggccacagttagtccaagtttatcactgaaga

SEQ ID NO: 229216 - DNA, 480 bp, Homo sapiens
agtgcaccgttcctcatggtacagtccctcggggcttcccttggctaggggagggaattcccccaaccccttgcacttcctgggtgaggcracgccccattctgctttggctcaccctccgtgggctgcacccactgtccaaccagtcccagtgagatgaaccaggtacctcagttggaaatgcagaaatcacctgcattctgcattgatctcactgggagctgcagactggagctgttcctatttggccatgttgccagcaaattctgagatttttttcaaaagtgcaaagaaagacatctgaggggtgctgacatattcaggtcacctcaagccacatgccagcttgcttgcccctgttggattcagcagagggagataggccttgccatacctgtggtgtctgccaaagcttcctcctggcaattcttgggagtgctgatacctgggccacagttagtccaagtttatcactgaaga

SEQ ID NO: 229217 - DNA, 558 bp, Homo sapiens
ttttgtgcttgaaacctagggccttggtggcagaggcactggagggaatctcctggtctgtggattgtgaagaccatgagaaaagcatagtttctgggtggagtgcaccgttcctcatggtacagtccctcggggcttcccttggctaggggagggaattcccccaaccccttgcacttcctgggtgaggcaacrccccattctgctttggctcaccctccgtgggctgcacccactgtccaaccagtcccagtgagatgaaccaggtacctcagttggaaatgcagaaatcacctgcattctgcattgatctcactgggagctgcagactggagctgttcctatttggccatgttgccagcaaattctgagatttttttcaaaagtgcaaagaaagacatctgaggggtgctgacatattcaggtcacctcaagccacatgccagcttgcttgcccctgttggattcagcagagggagataggccttgccatacctgtggtgtctgccaaagcttcctcctggcaattcttgggagtgctgatacctgggccacagt

SEQ ID NO: 229218 - DNA, 480 bp, Homo sapiens
agtgcaccgttcctcatggtacagtccctcggggcttcccttggctaggggagggaattcccccaaccccttgcacttcctgggtgaggcaacgccccattctgctttggctcaccctccgtgggctgcacccactgtccaaccagtcccagtgagatgaaccaggtacctcagttggaaatgcagaaatcacctgcattctgcattgatctcactgggagctgcagactggagctgttcctatttggccatgttgccagcaaattctgagatttttttcaaaagtgcaaagaaagacatctgaggggtgctgacatattcrggtcacctcaagccacatgccagcttgcttgcccctgttggattcagcagagggagataggccttgccatacctgtggtgtctgccaaagcttcctcctggcaattcttgggagtgctgatacctgggccacagttagtccaagtttatcactgaaga

SEQ ID NO: 229219 - DNA, 606 bp, Homo sapiens
ggtgctgacatattcaggtcacctcaagccacatgccagcttgcttgcccctgttggattcagcagagggagataggccttgccatacctgtggtgtctgccaaagcttcctcctggcaattcttgggagtgctgatacctgggccacagttagtccaagtttatcactgaagatcctatcaaagttttgtctgaaattccacttttgccttttgtcctaagtggttgtggacatytccaggggctgataccaaggactaggaacagctgagggaggcagaaaggttcagagtacatctctatttacagggaacagaacaccggcctccgagagtccatggagcaatgggaaaattgcagtgattactcatcactgtgaaacttctactttgaatacagtatcttctggcaagcataggggactgcagtcgacaatgctgctgaatatacctgagtacataggaagacatttgtttggtaaacagtcaatgcatacaataaattaccttgagagggccatctgtgctccagatgtgagagttcatgtgaatagaatggccgcaattcaaagaatcttcacaggaaaacagggctcagagctcatcc

SEQ ID NO: 229220 - DNA, 648 bp, Homo sapiens
tgccagcttgcttgcccctgttggattcagcagagggagataggccttgccatacctgtggtgtctgccaaagcttcctcctggcaattcttgggagtgctgatacctgggccacagttagtccaagtttatcactgaagatcctatcaaagttttgtctgaaattccacttttgccttttgtcctaagtggttgtggacatttccaggggctgataccaaggactaggaacagctgagggaggcagaaaggttcagagtacatctctatttacagggaacagaacaccggcctcygagagtccatggagcaatgggaaaattgcagtgattactcatcactgtgaaacttctactttgaatacagtatcttctggcaagcataggggactgcagtcgacaatgctgctgaatatacctgagtacataggaagacatttgtttggtaaacagtcaatgcatacaataaattaccttgagagggccatctgtgctccagatgtgagagttcatgtgaatagaatggccgcaattcaaagaatcttcacaggaaaacagggctcagagctcatccacaatggacagacagggagggaaacaggtggaggttagttcaccacttcctcataagaaggtaataaatagtttg

SEQ ID NO: 229221 - DNA, 533 bp, Homo sapiens
ctgggatgttctttgatgggagatgttttattattgatatactctccatactcagtattgttctgttcagattttatctttcttcttgactttctctaggtaagttgcatttttctagaaatttatctgctttttctaggttatccaatttgttggcttgtaattgtttatagtggcctcttatgatcctctgtatttctgtggtattagttgcaatatttcctctttcatttctgattttattgctttgagtattctctcrtttttctagtctagctaatggtttgtcagttttatcttttcaaagaacaaattcttagtttcattgatctgttctattttctttcacagtcttttttgtatttgaaggacttgtatttgttaactggctcaagcctggacatttgttgaggtgctatgagtctctattgctctcatttctcttcactagacatagaaattttctgattacacgaatcaaataagactaataagcttcccagggatgaatcccacttaagcatggcgaattt

SEQ ID NO: 229222 - DNA, 596 bp, Homo sapiens
atcctctgtatttctgtggtattagttgcaatatttcctctttcatttctgattttattgctttgagtattctctcatttttctagtctagctaatggtttgtcagttttatcttttcaaagaacaaattcttagtytcattgatctgttctattttctttcacagtcttttttgtatttgaaggacttgtatttgttaactggctcaagcctggacatttgttgaggtgctatgagtctctattgctctcatttctcttcactagacatagaaattttctgattacacgaatcaaataagactaataagcttcccagggatgaatcccacttaagcatggcgaatttttttgctgtgtttttttaaaaataatatttgctaatatttggctgaaggtttttccatccaagttcatcaggagtattggtctgccatttatttttattatagtgtccttctctggttttggtatcagggtaatgctggttttgaaaaatgaatttggaagtattcctcttcttcattttttttggaagagtttgggaaggattggtgttagtcatctaagtgtttgttggaattcagccaccaagcc

SEQ ID NO: 229223 - DNA, 533 bp, Homo sapiens
ctgggatgttctttgatgggagatgttttattattgatatactctccatactcagtattgttctgttcagattttatctttcttcttgactttctctaggtaagttgcatttttctagaaatttatctgctttttctaggttatccaatttgttggcttgtaattgtttatagtggcctcttatgatcctctgtatttctgtggtattagttgcaatatttcctctttcatttctgattttattgctttgagtattctctcatttttctagtctagctaatggtttgtcagttttatcttttcaaagaacaaattcttagtttcattgatctgttctattttctttcacagtcttttttgtatttgaaggacttgtatttgttaactggctcaagcctggamatttgttgaggtgctatgagtctctattgctctcatttctcttcactagacatagaaattttctgattacacgaatcaaataagactaataagcttcccagggatgaatcccacttaagcatggcgaattt

SEQ ID NO: 229224 - DNA, 596 bp, Homo sapiens
atcctctgtatttctgtggtattagttgcaatatttcctctttcatttctgattttattgctttgagtattctctcatttttctagtctagctaatggtttgtcagttttatcttttcaaagaacaaattcttagtttcattgatctgttctattttctttcacagtcttttttgtatttgaaggacttgtatttgttaactggctcaagcctggacatttgttgaggtgctatgagtctctattgctctcatttctcttcactagacatagaaattttctgattacacgaatcaaataagactaataagcttcccagggatgaatcccacttaagcatggcgaatttttttgctgtgtttttttaaaaataatatttgctaatatttggctgaaggtttttccatccaagttcatcaggagtattggtctgcmatttatttttattatagtgtccttctctggttttggtatcagggtaatgctggttttgaaaaatgaatttggaagtattcctcttcttcattttttttggaagagtttgggaaggattggtgttagtcatctaagtgtttgttggaattcagccaccaagcc

SEQ ID NO: 229225 - DNA, 596 bp, Homo sapiens
atcctctgtatttctgtggtattagttgcaatatttcctctttcatttctgattttattgctttgagtattctctcatttttctagtctagctaatggtttgtcagttttatcttttcaaagaacaaattcttagtttcattgatctgttctattttctttcacagtcttttttgtatttgaaggacttgtatttgttaactggctcaagcctggacatttgttgaggtgctatgagtctctattgctctcatttctcttcactagacatagaaattttctgattacacgaatcaaataagactaataagcttcccagggatgaatcccacttaagcatggcgaatttttttgctgtgtttttttaaaaataatatttgctaatatttggctgaaggtttttccatccaagttcatcaggagtattggtctgccatttatttttattatagtgtccttctctggttttggtatcagggtaatgctggttttgaaaaatgaatttgraagtattcctcttcttcattttttttggaagagtttgggaaggattggtgttagtcatctaagtgtttgttggaattcagccaccaagcc

SEQ ID NO: 229226 - DNA, 564 bp, Homo sapiens
aggagtattggtctgccatttatttttattatagtgtccttctctggttttggtatcagggtaatgctggttttgaaaaatgaatttggaagtattcctcttcttcattttttttggaagagtttgggaaggattggtgttagtcatctaagtgtttgttggaattcagccaccaagccattcaatcctgggtctttcttttatgagagamctttcattggtgatttaatttccttattcatgatttcttctaaattttgaattcttcatgattcagttttggtacgagtttatcaatttcttctaggttatctaatttgctggtgaataattgtttatagtagtatgttatgattttttaacttctgtggtatcagttgtaatgtctcttctttcacttctgagtttgttttcttttttcttagtctatgtaagaatttgttaattttgtttatcttttcaaaaaacaattcttatttttattgaaattttcagtttctattatattatttctgctctgatctttgttatttgtttccttctgctatctttgggcttgtattg

SEQ ID NO: 229227 - DNA, 564 bp, Homo sapiens
aggagtattggtctgccatttatttttattatagtgtccttctctggttttggtatcagggtaatgctggttttgaaaaatgaatttggaagtattcctcttcttcattttttttggaagagtttgggaaggattggtgttagtcatctaagtgtttgttggaattcagccaccaagccattcaatcctgggtctttcttttatgagagaactttcattggtgatttaatttccttattcatgatttcttctaaattttgaattcttcatgattcagttttggtacgagtttatcaatttcttctaggttatctaatttgctggtgaataattgtttatagtagtatgttatgattttttaacttctgtggtatcagttgtaatgtctcttctttcacttctgagtttgttttcttttttcttagtctatgtaagaatttgttaattttgtttatcttttcaaaaaacaattmttatttttattgaaattttcagtttctattatattatttctgctctgatctttgttatttgtttccttctgctatctttgggcttgtattg

SEQ ID NO: 229228 - DNA, 398 bp, Homo sapiens
cagctaatagattaatgcattaggaatgagcaaaaaaattgatggtagtcaaaaagagggagggaggtagattttgaatgattcaaagcaggagtgttttgaagataaacagaataactaaaaagaaagactcagatgaaaagcctagatttaaagcatttgaatcaagaggtggtaatctaggaattaggttgatttctttttttttaaatttgtgtagctttttattttattttttattrtactttaagttttagggtacatgtgcacaaagtgcaggtttgttacatatgtatacatgtgccatgttggtgtgctgcacccagaagcctggttaatttcaataacctaaaaatccacaaggtgggagtgtttcactgaagccagttgttagagaa

SEQ ID NO: 229229 - DNA, 524 bp, Homo sapiens
taaacccatcatcaatactttcagtgtaatgtctgatctaaaattaacagattaggtaagaacaagattcctgactatccatgaaattcatcaggtgtttaaatgacctgtgatattaactattcctcatttccaacatattccatttgtacttatacatattcttataatttccttcccttcccagtttgcagccacaattctctgacagaaagtagacataagaggaaaacatgattaacagatggattatcacctgcagtaagaggtgcctgggacggacttagttgaggtaggctgtggattgagacagaatatagagactggggtatgtgaaatcggaaagcccacaactgtagcagaacagagtaagtggactttcacaagaaatagaatcaccaccattatctaccacattttctcmtgctcactgctatttaagtgcctcagtttctatacaatctttcacaattacgaagccctaaatggcttcccatcctgcagtgatttcataaggagcctat

SEQ ID NO: 229230 - DNA, 621 bp, Homo sapiens
gcttcccatcctgcagtgatttcataaggagcctatgccacctgtcatgtaaggctttttccatgcctaataaatatgttttggagggatttcaccagagtttttgctaagatgcataaaatggccacagaggttgtgagaaatctctgcagtttctctttgtctatacacatgaaagtatagaagaccagcacttggattagttaagataatgttttaattcatcrctgtctcctcctccccttggtaccagcttttatgttcattgcattccccatccttttaagtactcagtacctcctgcatggtaacctattctgatatttgatattatcatgcttaatttgactgaatccatttggatattttatctttaagaaatttgtagttttatacttttaatttatgataaaattagattaatatcaaacattaacaagtgacttttaggaaggtatatgagctttcttattgacttcaaactataaagtacaaactgtgacactagaaatttagtcctttaacacatgttgtatttatatgtgaagtggagggtgagcagaaaacagtgttatatttctctgtgtccagatggatactcacctcaatgattttcctata

SEQ ID NO: 229231 - DNA, 476 bp, Homo sapiens
agaccagcacttggattagttaagataatgttttaattcatcactgtctcctcctccccttggtaccagcttttatgttcattgcattccccayccttttaagtactcagtacctcctgcatggtaacctattctgatatttgatattatcatgcttaatttgactgaatccatttggatattttatctttaagaaatttgtagttttatacttttaatttatgataaaattagattaatatcaaacattaacaagtgacttttaggaaggtatatgagctttcttattgacttcaaactataaagtacaaactgtgacactagaaatttagtcctttaacacatgttgtatttatatgtgaagtggagggtgagcagaaaacagtgttatatttctctgtgtccagatggatactcacctcaatgattttcctatagtagaaagtagttcctgaaaacacttaatagagattatt

SEQ ID NO: 229232 - DNA, 476 bp, Homo sapiens
agaccagcacttggattagttaagataatgttttaattcatcactgtctcctcctccccttggtaccagcttttatgttcattgcattccccatccttttaagtactcagtacctcctgcatggtaacctattctgatatttgatattatcatgcttaatttgactgaatccatttggatattttatctttaagaaatttgtagttttatacttttaatttatgataaaattagattaatatcaaacattaacaagtgacttttaggaaggtatatgagctttcttattgacttcaaactataaagtacaaactgtgacactagaaatttagtcctttaacacatrttgtatttatatgtgaagtggagggtgagcagaaaacagtgttatatttctctgtgtccagatggatactcacctcaatgattttcctatagtagaaagtagttcctgaaaacacttaatagagattatt

SEQ ID NO: 229233 - DNA, 635 bp, Homo sapiens
ggcagaagagacgattgccattaagaacaggtggaggaggttatgccaaggacattgacctgaccctttaggaattagtgaaaattgaataggagaagaatgaggtatacaatgtgtgaaaaatacctaaattgatataacaggaggagaccttttcatatcaattatcattacttctgtgtatataaccatattagatacccacaaaygaatagaaagtggatagttcttgattgacaagtaagactaataatcccagatcatagtaaggtcttaacttcaagtcaataatctttattacttatggttcattcctctcccttatgttttccaataattttaaaatgcataattaaaacaattctcatttaaaaacatagtagccatgactaatgatcttccagtgggaaggtactaagactttacaacatgtttcttgctggggataagacagcctacagccagcattcaactcatttttctaaagtctatggatcaatttgaaatacagaaaaagtagaacagagataaagttaaaacaagattaaaaatatgggaagaatgggagaaaggggagattagaagatatgaacaatgatttaaaaataaaagagcctcaaaggagaagagaaact

SEQ ID NO: 229234 - DNA, 536 bp, Homo sapiens
gtttggtgtatgttgaagcatacagattgtctacatcctaaaaatcattttggtgaataaaggaaaataagaaaggtagtcaatattcatttgttgcctatcattagaaacttctcaaaggtatatgagaattattaaataaatttaggragccagtgaaggtatgggtcctgggaattgaggatgaagccagtaattagggaagatgccccatctataagtgtaatgtatcaaatggagaaaaagaaaaacgtagggaagaagttcccttaagagaagattgaaatagagcagacttggggggctacacaaaggaactgggtctacacagttccagctttaaggctatagaaacagaaatagaaatactggtaagtaaaaacccaaaggattggtgacttatcacagctggagtgaatacgaaggagcatgaactcaaagtaaaatatcaagatttaagcaagaataaataggacaatggtaggtccatttttagaaattagaaagttgaacataaaatatgtcagggtggagaa

SEQ ID NO: 229235 - DNA, 551 bp, Homo sapiens
tagaaacttctcaaaggtatatgagaattattaaataaatttaggaagccagtgaaggtatgggtccygggaattgaggatgaagccagtaattagggaagatgccccatctataagtgtaatgtatcaaatggagaaaaagaaaaacgtagggaagaagttcccttaagagaagattgaaatagagcagacttggggggctacacaaaggaactgggtctacacagttccagctttaaggctatagaaacagaaatagaaatactggtaagtaaaaacccaaaggattggtgacttatcacagctggagtgaatacgaaggagcatgaactcaaagtaaaatatcaagatttaagcaagaataaataggacaatggtaggtccatttttagaaattagaaagttgaacataaaatatgtcagggtggagaaaataatcacttgtattttaagcaaataagagtattagatattgagatgctcaggtgaaaacatatgacaggatatatgggggaaaagtacaaattcaacatgtaattgtatagtaatcc

SEQ ID NO: 229236 - DNA, 551 bp, Homo sapiens
tagaaacttctcaaaggtatatgagaattattaaataaatttaggaagccagtgaaggtatgggtcctgggaattgaggatgaagccagtaattagggaagatgccccatctataagtgtaatgtatcaaatggagraaaagaaaaacgtagggaagaagttcccttaagagaagattgaaatagagcagacttggggggctacacaaaggaactgggtctacacagttccagctttaaggctatagaaacagaaatagaaatactggtaagtaaaaacccaaaggattggtgacttatcacagctggagtgaatacgaaggagcatgaactcaaagtaaaatatcaagatttaagcaagaataaataggacaatggtaggtccatttttagaaattagaaagttgaacataaaatatgtcagggtggagaaaataatcacttgtattttaagcaaataagagtattagatattgagatgctcaggtgaaaacatatgacaggatatatgggggaaaagtacaaattcaacatgtaattgtatagtaatcc

SEQ ID NO: 229237 - DNA, 642 bp, Homo sapiens
cctgggaattgaggatgaagccagtaattagggaagatgccccatctataagtgtaatgtatcaaatggagaaaaagaaaaacgtagggaagaagttcccttaagagaagattgaaatagagcagacttggggggctacacaaaggaactgggtctacacagttccagctttaaggctatagaaacagaaatagaaatactggtaagtaaaaacccaaaggattggtgacttatcacagctggagtgaatacgaaggagcatgaactcaaagtaaaatatcaagatttaagcaagaataaataggacaatggtaggtccatttttagaaattagaaagttgaacataaaatatgtcagggtggagaaaataatcacktgtattttaagcaaataagagtattagatattgagatgctcaggtgaaaacatatgacaggatatatgggggaaaagtacaaattcaacatgtaattgtatagtaatccatataaaaataatagacggatgtgtaagagtgcataaggtccctgaaggaaataatacacaggaaaaaaagattaaaaagcaaagacccaactatagaaactatccacattgattatgtaaagtaggaaaaggaatcaataaactagacagaacat

SEQ ID NO: 229238 - DNA, 642 bp, Homo sapiens
cctgggaattgaggatgaagccagtaattagggaagatgccccatctataagtgtaatgtatcaaatggagaaaaagaaaaacgtagggaagaagttcccttaagagaagattgaaatagagcagacttggggggctacacaaaggaactgggtctacacagttccagctttaaggctatagaaacagaaatagaaatactggtaagtaaaaacccaaaggattggtgacttatcacagctggagtgaatacgaaggagcatgaactcaaagtaaaatatcaagatttaagcaagaataaataggacaatggtaggtccatttttagaaattagaaagttgaacataaaatatgtcagggtggagaaaataatcacttgtattttaagcaaataagagtattagatattgagatgctcaggtgaaaacatatgacaggatatatgggggaaaagtacaaattcaacatgtaattgtatagtaatccatataaaaataatagacggatgtgtaagagtgcataaggtccctgaaggaaataatacacaggaaaaaaagattaaaaagcmaagacccaactatagaaactatccacattgattatgtaaagtaggaaaaggaatcaataaactagacagaacat

SEQ ID NO: 229239 - DNA, 358 bp, Homo sapiens
actgtgattccatgaaactctttttattcataaattacccagtcttggatatgtctttatcagcagcatgaaaatggactaatgcaagcagaataagcagaattcttcgatactgactcagcaccccacacacgttggttccaagatgtagaaatggaagcttcaaggcttttaacatctggacatcaaaactggaagttttactttcactgtattttattggtcaaagcagtcaaagagcccacccaggttcaaggagaaagaatatgtccccacgttttcaaygggatggtgccacaaaatttctactcatcttaattcaccacagatagaaatatgaagagctcatttgttatgt

SEQ ID NO: 229240 - DNA, 358 bp, Homo sapiens
actgtgattccatgaaactctttttattcataaattacccagtcttggatatgtctttatcagcagcatgaaaatggactaatgcaagcagaataagcagaattcttcgatactgactcagcaccccacacacgttggttccaagatgtagaaatggaagcttcaaggcttttaacatctggacatcaaaactggaagttttactttcactgtattttattggtcaaagcagtcaaagagcccacccaggttcaaggagaaagaatatgtccccacgttttcaatgggatggtgccacaaaatttctastcatcttaattcaccacagatagaaatatgaagagctcatttgttatgt

SEQ ID NO: 229241 - DNA, 490 bp, Homo sapiens
aataagcagaattcttcgatactgactcagcaccccacacacgttggttccaagatgtagaaatggaagcttcaaggcttttaacatctggacatcaaaactggaagttttactttcactgtattttattggtcaaagcagtcaaagagcccacccaggttcaaggagaaagaatatgtccccacgttttcaatgggatggtgccacaaaatttctactcatcttaattcaccacagatagaaatatgaagagctcatttgttatgttatttgtgaatgcagactaaagatatttgttggtttatatagtagtgggaaaatragaacttttaaaatattcaacttttagcccttgacatgcaaaatgagttcattacatggtaaggatgagggagaaagaaaagatctgaaaaagtagaagagtgatggattcagaaagtataggatgattgtcagtgtgattgttttatctagccacatatagctgtgt

SEQ ID NO: 229242 - DNA, 564 bp, Homo sapiens
ttcatggtattaatatttatgtgatattttgtatgtacatattttcttttaatttgaagatttatagtttattttagttatgtgctgtataaattatatttagttctttaatttttgtgttatttccaagggtcctctccattgactcttttaatatagttccactttaccccttwaacccactttcctctcccaccttcgtcattcaactttatttgattttgttatttttaatttttctaataatgacctttatcttttaaaataatatttaatcacccataacataatttgttgattctctcccactgtgaaagttgaatggaccagaatatatttctactatctttctcttcttatttttgttatgaatataattagtctttatacagttatggtttgtaacatttgcattctgttctttaaccgcaaaccccagaacattttgatattaggcttcaaaatgctcacttgtatcatgtgatctatattcatttttagtggatagttttcttttttaagtttttctgatagagatggggtcttgctatgttgcccaggctg

SEQ ID NO: 229243 - DNA, 564 bp, Homo sapiens
ttcatggtattaatatttatgtgatattttgtatgtacatattttcttttaatttgaagatttatagtttattttagttatgtgctgtataaattatatttagttctttaatttttgtgttatttccaagggtcctctccattgactcttttaatatagttccactttacccctttaacccactttcctctcccaccttcgtcattcaactttatttgattttgttatttttaatttttctaakaatgacctttatcttttaaaataatatttaatcacccataacataatttgttgattctctcccactgtgaaagttgaatggaccagaatatatttctactatctttctcttcttatttttgttatgaatataattagtctttatacagttatggtttgtaacatttgcattctgttctttaaccgcaaaccccagaacattttgatattaggcttcaaaatgctcacttgtatcatgtgatctatattcatttttagtggatagttttcttttttaagtttttctgatagagatggggtcttgctatgttgcccaggctg

SEQ ID NO: 229244 - DNA, 621 bp, Homo sapiens
tacacatagtccaagtcaacaactaacttagctgtcttttctatgtagtaaataaataatataggatatataaaataaactttcttcaggaatcacaaactgtgcccctagatccccacaatctgtgatagaacattccacacacaacaaatgcttaaattggcaagaaacccagattaccgtgttggactcaaagttgaggacacataaatattttttttaatcctgcaaatsttaataccagagtatttttagccttcttgtgtttgattttggcttcaatgtgactttcctcagaaaacgtgctcattttcttcacagcatttatcaatatccatcattgttagttttttatgtattgtctacctcctccattattttaaagctctataaggacagagattatatgcacatatttactaaaatatatccagcatcttaaacagaacctatgaatggtagacattcaataactagttgttagatgaacgaacgagtacattgaaatagcacagacatgagtgattacagcttagactgcttttcttagccgggtggatgtagctttaggaaacctgcaatacctggaacagcactgaaagctgaatgttggtgaggaac

SEQ ID NO: 229245 - DNA, 513 bp, Homo sapiens
gatcgcttgagcccagaattcaagaccagactgggtgatataacacaatagtaaacttcaacaggagagagaatctgtaaacttgaatatagatcttctgaaattatccagtcagaggacaaagaaaaaaagaataaaaaagagraaagaaggctgggcgtggtggctcaagcctgtaatcccaacactttgggaggccgaggcaggcagattaagaggtcagaagttcaagaccagcctggccaacatgacaaaaccccatctctactaaaaatacaaaaattagccgggtgtggtggcacacacctgtagtcccagctacttgggaggctgaggcaggagaatcacttgaacccaggaggcggaggttggagtgcaatgtgagccgagaccacacattgcactccagcctgggtgacagagcatgactctgtctcaaaaaaaaaaaaaaaaaaaaaaagagacagagaaaagaaagccaacaagacaccattaggcaaaccattgtcaggt

SEQ ID NO: 229246 - DNA, 513 bp, Homo sapiens
gatcgcttgagcccagaattcaagaccagactgggtgatataacacaatagtaaacttcaacaggagagagaatctgtaaacttgaatatagatcttctgaaattatccagtcagaggacaaagaaaaaaagaataaaaaagagaaaagaaggctgggcgtggtggctcaagcctgtaatcccaacactttgggaggccgaggcaggcagattaagaggtcagragttcaagaccagcctggccaacatgacaaaaccccatctctactaaaaatacaaaaattagccgggtgtggtggcacacacctgtagtcccagctacttgggaggctgaggcaggagaatcacttgaacccaggaggcggaggttggagtgcaatgtgagccgagaccacacattgcactccagcctgggtgacagagcatgactctgtctcaaaaaaaaaaaaaaaaaaaaaaagagacagagaaaagaaagccaacaagacaccattaggcaaaccattgtcaggt

SEQ ID NO: 229247 - DNA, 513 bp, Homo sapiens
gatcgcttgagcccagaattcaagaccagactgggtgatataacacaatagtaaacttcaacaggagagagaatctgtaaacttgaatatagatcttctgaaattatccagtcagaggacaaagaaaaaaagaataaaaaagagaaaagaaggctgggcgtggtggctcaagcctgtaatcccaacactttgggaggccgaggcaggcagattaagaggtcagaagttcaagaccagcctggccaacatgacaaaaccccatctctactaaaaatacaaaaattagccgggtgtggtggcacacacctgtagtcccagctacttgggaggctgaggcaggagaatcrcttgaacccaggaggcggaggttggagtgcaatgtgagccgagaccacacattgcactccagcctgggtgacagagcatgactctgtctcaaaaaaaaaaaaaaaaaaaaaaagagacagagaaaagaaagccaacaagacaccattaggcaaaccattgtcaggt

SEQ ID NO: 229248 - DNA, 513 bp, Homo sapiens
gatcgcttgagcccagaattcaagaccagactgggtgatataacacaatagtaaacttcaacaggagagagaatctgtaaacttgaatatagatcttctgaaattatccagtcagaggacaaagaaaaaaagaataaaaaagagaaaagaaggctgggcgtggtggctcaagcctgtaatcccaacactttgggaggccgaggcaggcagattaagaggtcagaagttcaagaccagcctggccaacatgacaaaaccccatctctactaaaaatacaaaaattagccgggtgtggtggcacacacctgtagtcccagctacttgggaggctgaggcaggagaatcacttgaacccaggaggcggaggttggagtgcaatgtgagccragaccacacattgcactccagcctgggtgacagagcatgactctgtctcaaaaaaaaaaaaaaaaaaaaaaagagacagagaaaagaaagccaacaagacaccattaggcaaaccattgtcaggt

SEQ ID NO: 229249 - DNA, 554 bp, Homo sapiens
cgtcagccagatgctgagcgagcggtggtacaccctggggcccagtgagatgcagaaatacgacctggccttccaggtgaaggtggcccacttgcaacaaggaccgaaagaagtccagctcagaggccaagcccacaagccaggggctagcagsagtgtaacaagggctcgtgggagcggagcatatcagagacgggcactgccactgcccctggggcgtcctctgaactcctgtcagttgcagcccaaacactccagagctcggatgccaaggagcagcttctgtggggcagaacggctgcacacagtcagggaacctggctcagcctggcccaagccttctcccacagcggggtacacagcctggacggcagggaaatagaccgtcaggcactacgggaactgacacaggtggtgtctggcactgcatcatactctggcccaaagccttctactcagcatggagctccaggccactttgcagcccctggtgagggaggtgacccgtgggcagccctgctgctgcccacctgagctgctcattcccagcacat

SEQ ID NO: 229250 - DNA, 597 bp, Homo sapiens
gagcagacatactgagacacactgaaagtaagagagcaggaggaaacaaaaccagggtcatacaaagaacacaactgattttgagattctcacataagtattacaccttcagtgagcacatgtactagaaatttaaaaaataaatamaataaaccttcaaagagagctagcaaataaatttccctatggtctcagctctgagtggagagagaaaatgttccctgtggagtttatagccagaatccagctctcaaacaggtttcagcctgaactcacacaatctgtgtggcttccaaatttgcaagctgagaatttaattcaaagtggtctcaggttgatagcagtccaaaatgctaggtaggaaaaaaaatcctctctggacaaataaatcatcaaagcaagctcataagagcaggtttcaaaggtcatgagcttctaacacacacaaaaaaatcacacacacaaaatgggggtagcagcaacatgggtagcatattcaaacttgaaaagactttaaatatttgtattattagatgtagattatgaaacacatattttaatgtggttaatttttttaaggaatcaaaactatgagta

SEQ ID NO: 229251 - DNA, 449 bp, Homo sapiens
tatggtctcagctctgagtggagagagaaaatgttccctgtggagtttatagccagaatccagctctcaaacaggtttcagcctgaactcacacaatctgtgtggcttccaaatttgcaagctgagaatttaattcaaagtggtctcaggttgatagcagtccaaaatgctaggtaggaaaaaaaatcctctctggacaaataaatcatcaaagcaagctcataagagcaggtttcaaaggtcatgagcttctaacacacacamaaaaatcacacacacaaaatgggggtagcagcaacatgggtagcatattcaaacttgaaaagactttaaatatttgtattattagatgtagattatgaaacacatattttaatgtggttaatttttttaaggaatcaaaactatgagtaaagaccaagaaaactgtgctggatggccacttccac

SEQ ID NO: 229252 - DNA, 449 bp, Homo sapiens
tatggtctcagctctgagtggagagagaaaatgttccctgtggagtttatagccagaatccagctctcaaacaggtttcagcctgaactcacacaatctgtgtggcttccaaatttgcaagctgagaatttaattcaaagtggtctcaggttgatagcagtccaaaatgctaggtaggaaaaaaaatcctctctggacaaataaatcatcaaagcaagctcataagagcaggtttcaaaggtcatgagcttctaacacacacaaaaaaatcacacacacaaaatgggggtagcagcaacatgggtagcrtattcaaacttgaaaagactttaaatatttgtattattagatgtagattatgaaacacatattttaatgtggttaatttttttaaggaatcaaaactatgagtaaagaccaagaaaactgtgctggatggccacttccac

SEQ ID NO: 229253 - DNA, 571 bp, Homo sapiens
ggaggtcttcacataaagcaggcttaaggattagacatagcaggtttgacagatgtgatggcttgcagaatcctttatgagctcccactgtccatctggataagatttacagacctttcagaaattcctataagcttgggttctgtgcccacactctagactgtcaggctaagatctctsatataaaacagacctcttctgattttgtctagctgcttttctaatatctattcaccaagctcttccaataatagcataaggccctaattaatattaaacttttatcattataatacataggatgtcttctgttttcctgatcaaattctgactactattaaaatataaagaattgtccagaaatatataaaaaaagaatcacacattgatcttctttaaatgaaaatataacaattgtatggactaggatgattacagttgttcagttctgactgttatttgaagaaaaaagcaataagaagcctcagcaacttaacagaaggagctgccatttactaggagaaaagattgtggatgagagtgtagcaaaggtcagaattctgtgaagctt

SEQ ID NO: 229254 - DNA, 468 bp, Homo sapiens
atctggataagatttacagacctttcagaaattcctataagcttgggttctgtgcccacactctagactgtcaggctaagatctctgatataaarcagacctcttctgattttgtctagctgcttttctaatatctattcaccaagctcttccaataatagcataaggccctaattaatattaaacttttatcattataatacataggatgtcttctgttttcctgatcaaattctgactactattaaaatataaagaattgtccagaaatatataaaaaaagaatcacacattgatcttctttaaatgaaaatataacaattgtatggactaggatgattacagttgttcagttctgactgttatttgaagaaaaaagcaataagaagcctcagcaacttaacagaaggagctgccatttactaggagaaaagattgtggatgagagtgtagcaaaggtcagaattc

SEQ ID NO: 229255 - DNA, 571 bp, Homo sapiens
ggaggtcttcacataaagcaggcttaaggattagacatagcaggtttgacagatgtgatggcttgcagaatcctttatgagctcccactgtccatctggataagatttacagacctttcagaaattcctataagcttgggttctgtgcccacactctagactgtcaggctaagatctctgatataaaacagacctcttctgattttgtctarctgcttttctaatatctattcaccaagctcttccaataatagcataaggccctaattaatattaaacttttatcattataatacataggatgtcttctgttttcctgatcaaattctgactactattaaaatataaagaattgtccagaaatatataaaaaaagaatcacacattgatcttctttaaatgaaaatataacaattgtatggactaggatgattacagttgttcagttctgactgttatttgaagaaaaaagcaataagaagcctcagcaacttaacagaaggagctgccatttactaggagaaaagattgtggatgagagtgtagcaaaggtcagaattctgtgaagctt

SEQ ID NO: 229256 - DNA, 571 bp, Homo sapiens
ggaggtcttcacataaagcaggcttaaggattagacatagcaggtttgacagatgtgatggcttgcagaatcctttatgagctcccactgtccatctggataagatttacagacctttcagaaattcctataagcttgggttctgtgcccacactctagactgtcaggctaagatctctgatataaaacagacctcttctgattttgtctagctgcttttctaatatctwttcaccaagctcttccaataatagcataaggccctaattaatattaaacttttatcattataatacataggatgtcttctgttttcctgatcaaattctgactactattaaaatataaagaattgtccagaaatatataaaaaaagaatcacacattgatcttctttaaatgaaaatataacaattgtatggactaggatgattacagttgttcagttctgactgttatttgaagaaaaaagcaataagaagcctcagcaacttaacagaaggagctgccatttactaggagaaaagattgtggatgagagtgtagcaaaggtcagaattctgtgaagctt

SEQ ID NO: 229257 - DNA, 468 bp, Homo sapiens
atctggataagatttacagacctttcagaaattcctataagcttgggttctgtgcccacactctagactgtcaggctaagatctctgatataaaacagacctcttctgattttgtctagctgcttttctaatatctattcaccaagctcttccaataatagcataaggccctaattaatattaaacttttatcattataatacataggatgtcttctgttttcctgatcaaattctgactaytattaaaatataaagaattgtccagaaatatataaaaaaagaatcacacattgatcttctttaaatgaaaatataacaattgtatggactaggatgattacagttgttcagttctgactgttatttgaagaaaaaagcaataagaagcctcagcaacttaacagaaggagctgccatttactaggagaaaagattgtggatgagagtgtagcaaaggtcagaattc

SEQ ID NO: 229258 - DNA, 468 bp, Homo sapiens
atctggataagatttacagacctttcagaaattcctataagcttgggttctgtgcccacactctagactgtcaggctaagatctctgatataaaacagacctcttctgattttgtctagctgcttttctaatatctattcaccaagctcttccaataatagcataaggccctaattaatattaaacttttatcattataatacataggatgtcttctgttttcctgatcaaattctgactactattaaaatataaagaattgtccagaaatatataaaaaaagaatcacacattgatcttctttaaatgaaaatataacaattgtatggactaggatgattacagttgttcagttctgactgttatttgragaaaaaagcaataagaagcctcagcaacttaacagaaggagctgccatttactaggagaaaagattgtggatgagagtgtagcaaaggtcagaattc

SEQ ID NO: 229259 - DNA, 525 bp, Homo sapiens
atactcactacaatttcctaacaattttggggtttatatttttgaaagagatatacctttaatttttttctttgtactattgttagataactttaatgtgcagattatactacagtgaaagttgccaatgacaaggcaaagtcacttacatcagacccaaagcaaagtggagccgggtcatgaaaaaggggatcttgtgtgtgtgtccacgataagcactatcacaaggactttctataaactcacaagaaatttctgcccacccagcacactctgtttgtccagctcatcctgtaggtgtctctataataggayctatcataaaaaattcctcaagactgcagcatttcagataagccaccctcacaagaacacttgcctagcaatggctgtttctgccagtaagttaacaccagctcctgcatcagaccctgtgaccaatgatgtttgtttcaaaacagcttgcatagacttctttttgtctttacatattttccttacctcaacctcttgggatgcacctat

SEQ ID NO: 229260 - DNA, 525 bp, Homo sapiens
atactcactacaatttcctaacaattttggggtttatatttttgaaagagatatacctttaatttttttctttgtactattgttagataactttaatgtgcagattatactacagtgaaagttgccaatgacaaggcaaagtcacttacatcagacccaaagcaaagtggagccgggtcatgaaaaaggggatcttgtgtgtgtgtccacgataagcactatcacaaggactttctataaactcacaagaaatttctgcccacccagcacactctgtttgtccagctcatcctgtaggtgtctctataataggatctatcataaaaaattcctcaagactgcagcatttcagataagccaccctcacaagaacacttgcctagcaatggctgtttctgccagtaagttaacaccagctcctgcatcagaccctgtgaccaatgatgtttgtttcaaaacagcttgcatrgacttctttttgtctttacatattttccttacctcaacctcttgggatgcacctat
